United States Patent Application Publication US 2008/0114160 A1 - sequence listing, part 84

SEQ ID NO: 44990 - DNA, 727 bp, Oryza sativa
gcatcgcatcagagaccaaacgccacacacttacacactggattcaagctagaaacagaaccagacgcacgcacccacgcacgcaagcgaaatcgtaaagggaagcactgaatccaaagcaaacgagcacgcacctgagtggatcggagcggggcgtggaggggagagggggggggggtgggccgaactaggaaggggagggaggagggagtggagtgtataaatagcccgacaccgacgaggagggtagcggcagattgatttttcctcctccgctcgcttggcctctctctctctctctccggtgcgcagttgcgtggggatttggggaggaagaggaggagagggggatgggggcgacgtggccgcctccgtgcccacagcgtcgataaggaagagatgagcccacttagacggaagccaaagcccatggagacgaagtgaaatatctctccgtcctggtgaaattggcaaatggctcgtattttttgcgtgccattttcgtagccagtggggttttcctccgatggcttgtagtgtcgtggctgctggactcacggctcacgcaagattggactgcttggaatcctggagatgtgaaggcgacacactggtcagagcatggcaatatgacatactaagttgctgccaacattagttattgggtaaacaaagccagagccgtccatttcccttgcacgacctgccgactgaatttttttcctcg

SEQ ID NO: 44991 - DNA, 524 bp, Oryza sativa
catcagacacatagtattatagtagtatagtactaggactaggactatgatagtagtagaagaaactgtaaagtgaaattacctgcgctgctgctgctgctgctgagactgcgagtggtgtgtgtatgaaggaactctcaagtggtggcagaatgacgacgaggcaccaaccgaattcaagtgagcttagtattcgcttggattggactgatgaacccggatgaaaatgaaatgaatcgacgaatacatactgtggaagatccagaggggaagttacctgcggttggttggttggggacgaacggggttgaggcggaggcggaagcgagtaatcggcggcggcggcggcggcggcgaaggcggaggaagaagaggagggaagggaggggatccgcgcggcgcgtatcgtgtgccgctccctccgctgctactgctactagatattggggagggcggtgacgtggaacaaatggaagtggggagcgccgctggtgggcccgcccctgagatcccacgaaatcaaa

SEQ ID NO: 44992 - DNA, 1414 bp, Oryza sativa
tcctgcagcccgattgatttgcacaactgcacaagcacagatgcggatgcagcccagctagctaagctaggttagctgctgctgttggtcttggaggcaaactagtgtaatatgtgccgtaccgcctgcctttcttcatcaaccaaacccctgccaccactcaacccggccaacctcttcgagtcaggctgatgatgggaaccgctcatcacaaccaaaccgccggctctgccctcggagtcggagtcggagatgccaacgacgccgtgcctggggctgggggtgggggctacagcgacccggatggcggaccaatctccggtgtgcagcggccaccgcaggtctgctgggagcgcttcatccagaagaagactatcaaagtcttgctagttgatagcgatgactccaccaggcaggtggtcagtgccctgcttcgtcactgcatgtatgaaggtctgtctcttctttcctccttctaccttctcacttctgtctatttatttatatgtttgcctttttcacaacatattttcctattattacttactatctgactctcaaactgttaatttttctgctcctcatctctgtttaatcacacgtaccgcctctgctttacaatttgctgtagtgattttatccggaaactatcttcttaaggattgtaccaaacacatttttcaccacaaattagacgattgtcaagttcagaacaagattttgaacacctacatcacaaggacgataagcaagcaacaagatcatttggtacataaatctgttgaatactttgttttgaaacataaagtatgctgttccaaagtcttgtttgagagactgacttgaaccctgcaaaatccatgcacactttgtcatgctagccgctaaagccaaatttaaactaggcctgattaggtcaactggaaactccttctgatttttttttgttgaaaaaaggggtgcagattgtggtactgataatcatctcaaggtcctcctttttttttctactgaaatcatgtcaaggtccttgaacggacacgttaccaaatcaatttgttgaagaagggagagataactttttaatccaagattaatctccacgttgtatgagaggccaccttgaattgatggtttctaatgattttgggttttcttttttatttcaatacttgtatgaatttctagtgccaatattttggaccaatgctcttgtattccttatctttaatttggatgcaacttttccattggatacatcaaacgagaatgaagtcatagggatagtttgttgttgttgtgttgtgttggatacctccttttggcacccagttcaccttcttcttgtaagccaatgggtaccacctagaatctccagccatctgtggacagcactatatattgcaggcttgtt

SEQ ID NO: 44993 - DNA, 1136 bp, Oryza sativa
cccgacggcagcaagactagacacccagcttgcgataggaattggaggttgtcggcctcttcttgtatgtggggtggcagatttactgccaccaccattagagtctgtttaaaagagtatatatacttggacatcaaaaagcacatgctagattacatgaaagtaggaaaagtctggtagctcaatgaaggttttgttataacatggtcaagtaagggtgtagggcctgattacagggcactcccaatttgattgatgagtacttctacagtgctctctgaatactacaagtattgttaccaatagaagcgatagaagtcagtgatttatgagttctactaccactagaaaaaaatttctgctaccagtagttgaggtggtagcataaatagatatggcccattggatgagaaaagatgacaggactagattgattttactaccagtaaaaaccaccgaataaagtttctaactattctttcctcacactattgagaagaaggcacttccattaaaaaggaaaacattttcgatatcaaggcatcaatttgtttttcattaaaaaggaaactgaatgaggggataaaaaccttccgttgggctttgcatgcgaatagtctaataaatactccctctgttttcttttatttgacacctttgactccacacacaaaactaggcaatcattgtactttctagagatgactattttactcttagagaaatttagtgttgttggtagggtatgctcacacaagaactttctagattagtgtggatgaatacatagttgtttcttataagggcaaaatgggaaaataaagattgagtttcgtgccgtgccaattatttgcaaacaactttggtcaaagttgtctaattaaaagagaactgagggagtaaagaattctagctcagcctaggaaagtagagccaacaacataagtcaatgagtccatgttgcttttgagccaactaattgagcaacaagtttggcatctactacaaaagagagaataaccatgtgagaagggtatatcatttagtaggaagggtatatcctggaatacctcgcttgacctctttcaaatgattgtcttggcttggcttcggtttagctggcacatttattagga

SEQ ID NO: 44994 - DNA, 1261 bp, Oryza sativa
tctgcccatgtttctggaaagagaatcatcgctccgattcttctctcttctaggctagtttgagcaattcccaggtcagctcataacaatgtgatatcagagctcgtcaatcctagagaagtcgtgattccgaacacgtatgcagcaacaggtcgaggatatggattttaggaaagtattccaaacacataagtgtgggcctttccttgctcggcccaacccatcggttgcttgacccatttcatcagttgacccaagaattgtatttctaggtgtatgtgggtccgctatacgtgagagtgaaatctagattttggaggcaccgaggcagggtgtgatatcaagattgtaatcctactcatgagtaatacaatgaacatatcttgattgttttaaaaaaaccgacaaggctgtgatgttcttttcacaaaaagaaagaaagaaaagaagacgccaatgttgtgctggtcttttggcctgtaatggctctttatggacgagaacattgttattaagctattgttgctggtgacttgtctagaacacactacacatacactctcctcggaaatttcattagccacaagtgttagcacctccaacctaatcccatcctgaaggacctagaacttgattttatccattatctaaaaagaaaggacctagaacttgccttcccacagaaaggaattacgagggtcttgtcatgttgctagccgatgataatatctgccaaatattcttgaagtgcaggaagttacccttgtaagcatcgaagaaacaggatcctaagtgcctcgcaagcttgtgcacaacatgacccaatggttggaatagtggcaaacaccggactaaaatttagtatagactagtccactggtttgacatatgcttgttctcagtctgactatattggggagtaaaggttttttttttcatatttcaacattagaaactttaaattgttggtctagtactcatacttggctgtgttcgcatatgtgggttgggaactcattccctccgcatggaaaacggagtggtccattagcacgtgattaattaagtattagctatttttttcaaaaatggattaatttgatttttttaagcaactttcgtatagaaactttttacaaaaacataccgtttagcaatttgaaaagcgtgcatgtggaaaacgagggagaagggttgggacaaggggatgccgaacacagccttaagtttgttggtcgcactgtacccaagcatgtggagc

SEQ ID NO: 44995 - DNA, 747 bp, Oryza sativa
  unsure (1)..(747): unsure at all n locations
gtttgtgtcaacaaatctattgttagagcaaatttaatagtatagcccattgttagctctaaatcatctatagctgtaatagtcaattcatacaatagttgcttgctatactattaatatctggtcctatctgtcatacatacattacgtcttggagtccgtgttgtagttagctacaaatatgtagcccgctgctcttctctctctttctttatctctttaaaatatgtttatagctggcttataggctgctattgtacctgctcttagtaatgcacctgcataaccaaaaaaaataactcttaaaattgtttgtattttgtatttctttgtacggctaaaacataattaatttaaagatagtactttgcacatatgtgttgtaacattggaagtacgtgtatatttttttaacaaaaaaaattgagatattttgcaccgaaagcttatgtaggcagaatatgttttctagatataacggtgaggtatacataactttgttgagagctacgtatgttttgattaaagtaacatttaatagaaatgcctctgaaagnnnnnnnnnnnnnncaacacctgtgaaaacacaaggactaaaaacaagaaaaacttaagagcagatgtaaaggtgaatatataatccaaatcagttttggttaatatttttatggagaagtatgaatttaaggccctgcttagttaccaaacaaaaaacttttcaccctatcacatcaaatgtttggacat

SEQ ID NO: 44996 - DNA, 1933 bp, Oryza sativa
tggatttatattagtttatcaaacgggcgcaatagaactgaggtaactctgacttttgccgatttccctgttcttttttcacaccatatacaggatcttagtttgtttttatgacaatttttggcatgctgaattttatgaagatttttgatattttgactttttagtataattttaatagtatatggataaacttatagtgtgtatgatcaatgtattgttggagagaatgtgcctttctctttatactagagcgcattcctcaagtcaggaaacatgactaactacagctttgattgtccacctcaaatactacaagtaaaatctgagaattgtagtgtaggtaagaaaggagaaatgttagtatagatctcatgggaatatggtttagttatatgaaaggaaagagagtcataaattattgttttaaatctagaccatattcttaagttttaatctggaaagttctgtaagtccttaattgggaggtccaatcctggctgtcccagcccaatcctcaccaagaccagttcattttcgttgttggtattgggccctcccatactatgcctgagtgatgtgatcttcactgcgagcatgtatgcatacatcaatgcaagagcctggtaatttttgttgaaaaataattatcttacttttatcatgagcagatctctgccagagctggctattcttgctgaaagctccttaatgtcgttatcaaggtggagttacaaggcaggcatggagaaatctatgagctccgcaaatggacagattgctctggtaaatcgttttgctttgagctgtaaattggtcctaagggttcggttggtttatgccaaataatacattgaactttggtgtcacatatcgccagatgtttgttgattccttttttctgttgtttctggaacgtttatatttgagcgcatgctcaccgtgccaactggcaagaacagttgaagttgactttcgctagtaaaagtcacctctaatcaattccatctttaataggaaactcaagatttaatttagaatctccaggtccatctacctattacaatgttacatagtgtggccacagtacatgcgaatgtaactaatgcattagcgcacaatacacctttttttcacaatccactaatcatccttgatccagtgggaaatgttcggggaagaaatccatcattttttattctgatcttccctctgccacaggtaaacgggttgaacttgcaatcatctctcttatagcctcagagaatgccttcaggtacttggcttttctggcatgtcttctgtgtagtttttttttcctgtttcagttcgatctgctatttaggttaagaagcatagtcccgacatatgaccatgcactgatattttggcattcacaattatcattttaggcttccagagtcaatgccatgccttcatgacaaagtacttgcagcagctgctgaagcagctattaatgcctcaatggaccagaaaagaaaccaggtttggccttgttagatcttctatgtatcatcatcacctgtgtacaatttggcatgacaatgaaaattcatctgtagactccagcaggaggaattcttggtggcatcattaaaggattgaaaggcaaagaagaaaatgcaaaacagaaaggaagtttaagtgcacaaaccatgagcgaacagttggaatcgattttcttgaaagaatcacttgttgaaccatcaatacccgatcctgacgacccatagaagaactgtcaataggtcatcttcctccctgtctatctgaaagctttgcccttaagtactgcctatttatttgaaagcatttgaatgcagacgacatagatatcgatgatgaaattccactagcacccccaccagcatcatctacatctcatgtgaataaaaaaacaacagggctgcag

SEQ ID NO: 44997 - DNA, 1157 bp, Oryza sativa
ccccaaacatggcctaaagcttgttgggatctggtagatccaacattgttgggacatggttctagaattactatactcaattgatgcttgatttaatcatgtcttgtagcctagactttttatccccacataatctagaaagcatggtcaaccaagcattaatctatcctccatccatccccccacaagaaacaatgggtacagatccacgatagctgaattcttcatgctggctcttggctctgagtgctctgcagaggtggaggagatggattcagctgtaacggctgacttgccaaaactgctagcctgataagtgatgtggagaagtgctgccttcgtaggttcatcttgttgcctatgcacgcactgatcttctgcagatatggacaggagatagagattgagttcacaggcagcactatgtttgtgagggtagaaaaggagttctttttccaaagatgtttaatagtcccttgacttaagggaagacaaaaatgaactgatgggcaatggcaaatagggtaagatcgtttttcacatggcaagtaaacaattttggttagcattttttttttttagaaatgttatccctggttttattgaaagcatggttctgttgattgggttaatcttttatggcaaatagtgaattttctaacacttttggatttcttgtgctgatgtttgtttcactatgttgtgctctttggagataagagtaactccaggtcctgtcatgatcttgttgtgtaaataggtgttgaattttaatcttttatcgaggaattttgggatctgttcatttcattgtcatttaaattgccccttcaatttggaatgccttctattttctgttttaagagcgccattgccattcattatacatttctgacttctgatcctgtatataaaatgatgtgcatagaattctggccgagcccactagccactggcttactagtcactgctatttaatcataggtacttctatagttggaaacttgagttggtttggtaattgggagaaggcaaattggttatatagcatcgaaagttaacgtttttggttttatagcaccgaaagataccgttcattttaatagcacccaaagttcaccccgtttccatttttaacactttcgtcaattctcgat

SEQ ID NO: 44998 - DNA, 3638 bp, Oryza sativa
ttacattgtgaaacggaggaagtagatgttaatgaatctatacacatatatgtccagattcgttaacatctatatgaatgtggataattctaaaaagtcttataatataaaacggtgaaagtagttcttttatatatataatgagaagaatttcattaaaaagatgaaattacagccttaatattatggattatggttgagaagggcacgataaatgtgatataggagtatatcaaagtccatggcggggggaaaaatgtgagtgcaagttagcagaagtgtatttacagttggagtatttactacaatcaagttagttaatccgtcgatgaaaaaaaaatatatacatggacagacacattgtggttatacttgtcaggtgagattcttccgatataattattgaagaaagctcaaatagtatacgaagaactcgaagctaagcaactgtgaagagaaattaagtagctacaattaggttataaataatttgatttctactctaactgtgacgtggggatgtagctcagatggtagagcgctcgcttagcatgcgagaggtacggggatcgataccccgcatctccatttttttatttttttttagaattctactttttctaaaattgaccctttaattttgtatttatatttcttttataatgtatatgcattctgcattttatttttcctttacattttttcttatataatgtaagttatgcattctgcattttcttttgtcttttttttttcttataagtggttggaaaattgacatttgaggatgaaaagctttaggcatgcgcatgcagccctcaatctttaaacttttgattcacccggaatgaagaatgaaaagcatcacaattaacacactacgcatcacaattaacacaagtatttttccagacaggtgaaatacatttttagaggcagataggtcctctatgaaaacgattgtgcaaatagttatttccataggtgaagacaaagccgtatgtaaaaaaaaaaaatctattgcggtagtgacatgtatcaggcatcattatcgcggtagtattgtcataactccgcctataaaaaaaattatacatattgatattcacatatatgttgtgtgtattataatgatatgatgttgaatactagacgcatgcgtaagactaaaaataaggaacccttgtcaatgaatatatatatccatgttcagattaattgttgtgcccgtacaataattataagctttttttccactcacaggctcacagcctcaaaagaaacacataaattaaggaagcgaataaatatttaagggatgtccaatagacactgattaataatcaccaagtaattcaattcatcagctagtatatgattaagctgtagcactacatatttctaaatttgtctagcagcaactcataaaagaacatcaaattctcctgatatgtaatgttgatagagtagcatgcagctgtgcaccgatatttctccacgcatgcctgtcacatgggagagtaactagataggttagtgtgttttggcacataaaaataaaattagagtttatttcattatgaaaaaaaaccgccccctcgtactgcatggtccataaaaacatccacaatgcaatgaaaaaacaagtaatagacattaaagtatttctaggacctagtaatcaatattgtggaagtaggtagtaagtttatgacctaggaataaaaaaaattaaaatctctctctctctctctcttttgtcttctctcttcaatattaggatttgcttgtactttatgctgagttggataaaaaaacaactaaggccaggtttagttcccaaaatttttccaccgaaaacatcacatcgaatctttggacacatgcatggagcattaaatatagataaaaaaattaattgcacagtttacatggaaatcgtgagacgaatcttttgagcctaattagtccatgattagccataagtgctacagtaaccacatgtgctaatgacggcttaattaggctcaaaagattcgtctcgcggtttacaggcgagttataaaattagttttttcattcgtatccaaaaaccccttccaacatccagtcaaacatctgatgtgacctaaaaaggtaaaaaaaattataatgggacccacattacaaaaacctactaccttagccctgctacttaccccctccgtcccaaaaaaaaaaaaaaacccaatcctagcaacgaacctggacacatgcgtgtccatattcattgctatgattggattctttttgggacggagtagtattgcctagttaggtaacatatattaggttgccctaagagcagatataataaggctaactcatcagctccaaaaattactgtcatcttattcctatgtggagggagagaagaaagcggacgactaattcttcgccgggcgttaacacaaattttgatgcactaccggcgttaacacaatttttgatgcactaccgcccatagcctaggttgtaaaagacacggtttgtgagatccacacaaatcaatcccatgtgatctgcgatctcccgttcttcgatccccttacatagactttcatcgagcgagtcacttgctgccgatttccccaccggcgactgcgacggtttctcttccgcccttgcgccatcccttctttgcgcgcttcctttttcctcccaatgtgcgcgaaaggttccgccacccctaaaattgccccctccccaattcccgccgcaaacctagttccccaccaccaaaagccatatctcaccggacgaagagaggtttgcgccgcctccttgtatcatcgcgagctcatctagtcctccagatattcctacgttgtcggaagcgctatatccgtatggtggtccttgattcccactgccagcttggtttgcttctccgtgatcacaagccatgctggagtttatttccatcatctatgatttcatcgtttcctttttattattttgtttgagcatcatgatatatttatccatgactatattttaggtggatgctaatgttctagatggtgatcaacatggtatgcagctagtcagtgaagatcaagaagtttaatctcattttagtagtcctttttgttaaatgttacttcctccgtttcatattataagatatatattgccaatagaacctatgtcgaatgttatcagtagatcaatgtcctttttgcacaatgaccgagtgctgctgcaccaaaatggtggaatggccaaaagaggagtggcagaattaatctcatagttgccatgctcatgcaaatattaaatgtctcaatgtcttatattgcagtcagcttatagctagcattttgtatgaattgactctaagttagctcttaatgatatggataaattttagagctagttattgactatatcattgaccttgctctaaggacgactgcatatgttttcatgatgcctcactttatatatactacatggagccatgcttaattgaccatttgaaaaagtatttctagatacggtctatataggctttttgattgattatgcatagtggatcattcgaatacgagtagtataaccagtcatgtgactagcatatacccctatgttgataa

SEQ ID NO: 44999 - DNA, 673 bp, Oryza sativa
tatcggttgcttgctctttctagagcttttgatgttacattgttgatttatttgttgtatttcctttgtgctgattgttttattactgttgaataggaacgtggtgtggaccccacggagttgatatcatttctattggaacttagttttcatacattaggagaggtaagttaaccacttttaaaagactgtggtgatgcttctttttttttcaaaaatcgttttaaaaagtgaccagctccagtttttcttttacagaaattaaaatataatttccctcaataatagtaggttatattgatataagaaataaacacggccacattttacgcagattatagtttatgagaggattgggtaaattgtagtggtatatgaaacggagcatctcaaagattttctattggtttctgatctatctaacagaatagggacatcaatctaacatgcctgcttaataatgcttactagttcagacagtaccagagatttagtgcttaaaaagaggttatcagtctgtagattaatgttattaactaagcattatctttcatctgttgtggagtccaagctttgtggcctggttcatctgttgcaaattcgcttcaacatgctgtttaacttattcatgcttcaggcttatagcttgaatactctgaccgatgtccaaaga

SEQ ID NO: 45000 - DNA, 2218 bp, Oryza sativa
cctgcagccccactacttactccgttataaaatataataataaattattttagttttcttgttcctgaaaatattctatctatctcctaaaatataatagtttcttcatcagtattctattttgtcaaccagttaaagccaacccttatgccttttaatttcgttcacctaattaattttctcaactaatcatattcttttttaagctttggtccttcttaattaattttctcaactatttttttcttttaatttgtctgttgttcacactactttttctaacctcaaattttttttatatttcggaagagagataattctgtggagcttgcctggatgttgccacctgccgccaggcgtggagctgtcacctgtcacaagaacactcaatagctagtatcctgctaattaccagcgcgcgacgcaatcgctgccgccatcagcacagataattagcattaagccctgcccgatcattctccctaattattgcgagaccaagattattttagagtataattaggtgctactactgctggtattgtatcccaaccaacctgccggtgccagccagggacattgctcgctgccctgagcctgtattggcgcctaacctgatgaatcatatccatcagggtcgtcgcgtacgccgaccgcagctcgatcgatcgcacgccggccacttccacactggggattgtctgtggaactagggacttgtttagttaccaaaatatttttcccaaaaatatcacatcgaatctttagacatatacatgaaacattatatatatatatatatatatatatatatatatatatatatatatatatatatatatatatatataaactaattgcacagttaatcgtaatacaatttttttagcctaattagtctataattaactataagtgctacaataactcacctgtgctaatgatagattaattaggcttaataaattagtctcgtggttttcagacgagttatgaaattagttttttattcgtgtccgtaaaccccttctgatactgataaaacgtttgatgtggcacccaaaatttttttttcgtgaactaaaacaccctagcttgatcatctggaccagcggctgccaacgaacgaggagtcagtagaaaaaacttggtgttttcatcgctcttgtcactacgtgtagcctacgtatgttaacagtacacgaaagaggagagatatttacgtgcttgagaaataattttctacggtcctgtcgtttcgctcacgcttatagttattcttattcgtattacttgttagcaatcaaaaaataatttaagtaattattttatgtgtgtacttgatgattcagaattaaatattgtaaaataaactacgatgaacaaatcatgaaatcagcttttaaaatttaaattttgtcttataggtttcactataagtgaaatgataaggttgtacgtatcaaagctagggcatgttgtttttaaggaattgaagaatggaatgcatgagttattagacggtgtagttttcacaaagaaattttctgaaaaaaatggattaatacctgacctctaaatccaaacagttgtacacatgaaaagaaagtaaactgctttaaatttatattttaactctatgtggtcacaaaatcattcatctaacccgaacaaaaatcaagccctaattagagttaattaacgcaagttaattaatactactacatgatttaactcctcgttttaagtgagctcctgtgttttcttgctgttggcttaggtggactggtgacgagtcaacgactgacatccgctgctatttcctgttttggttttggatgattgctgccttcttgtcaaccaattatgctctgttactgttgatgttcacacgtccatctggtgtgatctgatttgttttgaaggagtctacgccacgatcatccaattgccctattgttgttgttactgtataagactaatgtgactcgtcagaagcgaagagctccatatctctgacggcatcgtataaaaatagtattatgtgttctctcctgttgtgtttttgttgtgttgtgccaaactactacttttcagcgtgacctaatcctttcgtcacaggttgtcaccagccacgagcacgaaatgataatgcatgtcattgatccttctcataaatcaatcgtatcttaaagtctgaaattaacgttttttttat

SEQ ID NO: 45001 - DNA, 2237 bp, Oryza sativa
attcctgcagcccttctataaaaatcctgtaaaattcctatgttcaaaaataactcctaaacatatgaattgttggaaatttagaatgaaaatgctagaagtattgtcaccaattgtttattaaaaaaacatttgatttctgaactgctagattacatcaaaatttggaatgaaattgctagaactctatcgccaattgttcgtcgaaaagattttctatttctagagtatcatattgcatcaaaatttgttcagggagaaggggaaaaaaatgtacgatgcgcatggaaggtgggtatagaatgcacgatctgcaagacacaaacacgtgtctacaggtcaactgtgtcacacgctgtttttataagttaaataaaagttactgtaaccatactatagttatgctctaaagattttcttttttcttaaaaaagaaaactgttgtcagatttggatagccccaatcaataatcatcagtggaatgagacgtataaccaacgaatcatcttgcggtaacgtagccggccggccgccttcccacggaggccggcaatggtgattcgttgaacattttgatcgattcgccgctgctgacctcccagcgttgatggcgatccaaccatatcttaccatatatccccgagcatccctgctaagagcaaggataatagtgggctataaggccagtcacaatgggggtttcactggtgtgtcatgcacatttaataggggtaagactgaataaaaaatgattatttgcatgaaatggggatgagagagaaggaaagagtttcatcctggtgaaactcgtcagcgtcgtttccaagtcctcggtaacagagtgaaacccccgttgaggccgattcgtttcattcaccggatctcttgcgtccgcctccgccgtgcgacctccgcattctcccgcgccgcgccggattttgggtacaaatgatcccagcaacttgtatcaattaaatgctttgcttagtcttggaaacgtcaaagtgaaacccctccactgtggggattgtttcataaaagatttcatttgagagaagatggtataatattttgggtagccgtgcaatgacactagccattgtgactggcctaagtaagctatatgtttatctgaaagagaaagataaacaaaaaaatagggagtattggctctcatgcaagagttaactgcacacaaactccaagaaatatgcattaaattcatggtgagagaaagagagaggatgaagaaaataatgataaacttatagccaatttactatacatgttagctttaacattgactaatagtaagtagtgagctctactattaaacttgctctaatgctgccaatggcaacactgttagcttccataattactgcgcattatactgcctcatttgaccgtggattttttttctctgcatttctgcctcctgttcgtggccaaaaattcagacaacgctgcatcagacgtgttatagtactcttgttatttagtatttgacttgaaggtcatctaatctaccggtagagaggcacattcgtatgttgctcattatagtggtacacttgttggttagtggtaatgctatccagtgggcaggcagtggcatctccattgcttttcgccattattatcaccgtgactccagctgcttcaccatgtgatttgctgaccgtcatgttggtgcatgcatcaactcttttcccatgtgtttcttttcacataaattgatctgacgatcttcaagttgcttgcagtaatacgtacagttcgtttggtaaaattcagagaggtgtatcaatagtaggagtagaatgaaccttgtgttcagcttccacgcaatgtcctccgacatgacaaatgacagtttatgggactagatcaaacgattatctatttcattatctttaaaaaaatcgacggttcagtcaaaaagtactgcatttcttaggataaattactcgttattgttcgtcgcgatgtgcagatagatgcagtttagtttggttttgcctgcatccacggatgataggtacttgacagaacaacgagcactatgcgactaagttggatgcttcagttttacaggaaaaagagcagaggactgatgttgattcaacctgcagtacctgaggccacaacactttgcctaagtcatgggtcgttgacatttgatatctataattttctttaatctatagcgtcttttactaagggctgcaggaat

SEQ ID NO: 45002 - DNA, 1090 bp, Oryza sativa
tttttgatggactagctactctctcaccaggccgtcactcagtgctctaagattagtggcaagcttttgcggcatcgccaccataataagagtaggaaatgtctcgactcccttgtcaactatggaaggagaggaatgcccatgtccttgatgatgttctatctcaagtgctgatggtggtggagcagattgtggaagaagggaggcaatgggtggcgacaactgccaatccagttggagagttgttaggcacatagcttagttatgtttagtgtagtttcttcctctctcggtctcagcttaggagctttgttgggtgatcgtctaggcgtgtcactttttttctaatatattaacatgcaagaggtcatagcttaggagctttgctggttgatcgtctcggcgtgtcacttttttttctaatatattaatatgcaaagtttttttacgtgttagcatatatatatatatatatatatatatatatatatatatatatataatatatatagagagagtaacgtctctgactttttaaaggtgacaagaacagtagatcgcccattggaattatccatagaaagctgatgagtacgatgaattaaagctggtcatgggattggtcaattaatataacactatatgattgccttttttttcctccgcttggtcataacaaaagacagagaattgatacatagggctcggtcattttcttctagatacaagaaaattttgccccgttcttttctaattaagattcatattttatctcagttttcgttagcacacttttcaaactactaaacggtgtgtttcgtacgagaactttctatatagaagttgctttaaaataccaaatatgtggatttgtcaagtttgtaataattaaaacttaattaatcatgtgctaatggcattctcgttttccgtacgccaacttaattttcatcttcatcggttttatgtcaagtcagcatattttactctaccaattactagtggaaggtgcaatgaagctgaaaaaacatgtgaggaaaacctgcagattaaaaatatatttatatagaactgatataaatatattttt

SEQ ID NO: 45003 - DNA, 2540 bp, Oryza sativa
cagctatcccaccgaaagcttctacgcgcttcctcctcctcctcggtgcggtgcggagccgcccgcttagtcgtcttccacttcgcggtgttcttcgcttcgcttctgcttctgcttctattcgttgcgtgcgcggagcgggaggagggagagaggggcacgcgtcccaggagagagagagagataaaaagctccaactgactgacaggtggggcccaagcgtggagggcgacgtaggtgtgtggttaccccttcgaatgacaggtggggtcgggttaaggtggggcccacctgtcggtgggggttgaggcgcgaggtgggagtggatggcggtggggaaaagtggagtgacctcgtggggcccacggttggacgctcgaggcggccacgtgagcttggtctatacacccacgaccggggggagtgggggtttagggaatgagacggagaaaatttggagaaaaaaaagggtgttgacgaattttgcacggcggcttgaacagtgaatttgaaagtggaaaagtcgattcgtacaattttcttcaagaaaaaaaaatcttacaaacgctgaagtggcatggtacaagtaaatttagatttttgtataactcctgctcctcatatagttcgatttaacgattaagaacttttttgtgattgtttttaaatatcccttcttctagatgtggtttttaaaaaggtttttccaaatccttattgaaaacagggaggtaaaagcttccaatcatttgcctcacagtttataagccgttgttaaaatttaaattataaaactttggttttgagttaaatttaggattttttttattcaacactaacttttaaaccgcagaaaacacaaacagaaaagtttggtccataatttatgacttggtttcttatataccgtttttggttagtagtagtacaccagacgatatatatagtaataatagaaaaaaaaacagagaatctagttcaaatagaggatacgtttgaaaaaccattcaggcatcaatccatttatgttcaacttctgttgatgtacacttgagaaatcatctgcaaaacatacctatttgtggacatttctttcgtcttgattgaataccaaggctcctacctataattaattaataagaatacgactttgtgcaccacatgccgtagttggaaaaaattgtttgtagtctattccaaatttctactactccgtatggtccaggtgcacagagcggttgaacttggacggcgagaagaaggttggtgcggtgttacggtcatttgtcactctcgtaatcggtggttatgaacttgtttgagagcgcaaactgccggattataaaaaaatatcctacttgtcgtcgtgtagcctcctctccattcatgattagtgcatgtattagcgaaagatttcgctattattaattcgaatgattagattgagtggttgcaaaacagctgttacgtcatccccattcaccggccggtgtaactttgtaagtccccagttttcaaactaaataaagcgtagtaagtccatctgttagagtacctgaattgaagtaaagcattttttatttttgtcgatgggtgattttgtgttatcttttgcagtgatgaagagatagaaaaaggaagagtgcagtggtggtgcgaactcccggttcctctaggcccatgcaattatattccatgggccttccttccatttatagcctgtttatccggcacgtatataatgggccgcattttcgtctctgtacagtttcagcccagataaaatgggcctgaagtgactggctaacgttctggcccaaaaagtggccagcagccagttgcggcccaaaacttgttgcattcttcacccactctggtgtcagttagcattgatcaatgtttgttttgcgtgcaggatccacagttatctcaaagactctcaaccctaccaattttttggtattaccaaaatttagtagggtaacaaactaaacaaactcttaccattatcactttaccaaattttagtattaccaactttgcaagcccttcacactactaaattttaataaggttaatttcgataacaaaccctactggtttgctttctagactctgaattgtgatgagtactactactagctagctagcgtccattttgaggggacacgactcgtggaaaagaaagaagagaatgatcgagagtgtggcgaccctttttattgctgtttgttaccgggtcgattaaagtacatttgtcttctttaattatgatgagtaggcataaaggtcactcaaggtgagaactgaacctgccgatcgaatttgggccagctagtttagtgacggtccttttcaggtagtttcactggacttggaggtgaacatccgtttcactaccaatgaatactcgcacatttcgaatcgaaaaacgggtactatggccatgtttagttcctctccaccaactacaaacttctaacttttcatcacatcaaaaactttcctacacacataaacttctaacttttttttcaaac

SEQ ID NO: 45004 - DNA, 2034 bp, Oryza sativa
aagggaaatagcttaaaaaaacttatccagatatataaaatttattatgcttgtgacaagtacttcattcgtcccaaaaaaaaatggtggaggggatatgatttcttctaaaacaatgaatctgtactacccttttatccagattcatgtagctggggatgtgattttttctaagacaataaatctgtactaccttttatccagattcatgtagctggatgtgacttcttcctatgtagtagcagtacgtcagatttagcagcagtgcatagagatagggcaagatactgtacggagtatttatttgtgagaatcgtaaaaatggaagccacccgaatcggcacttatcccatagcttgaccctgacgatgcgactttacctacggtttgcagatctgatcgtgcagaagcgcagtgccgggcccattgcacacctgtgagctgtggcggctttcggccttagatgctcggtgggccataggccgagatgagaagctgcgaaggcccatcaaggaacatcccccgccccgcgtactaggccgttatcccaggctcccttgcgccgctgggctattctcgcacgcgggccgtcaggccgtgtggactgaacaagttgggccacccgcgtacacatcatttctgggccagtacaagaatcgaagatgatctctcgcgtttgtctgggatttttggggttctaattttgtacatctgttgaagatgctcttaagaaatcttctttttatctctctctctctctctctgaagaaatcaacagcagctgcaagattttatctaccttatcagggtaaactaacaaaagaaagagacaaagattcttctccattccagagtcaaagagagaaaatggaactattcaaagaggagaaatgggatgattttgacaatgtatcggttgaaaactctccaaataattgtcatctctcccagccttttgaccctagacttttgtgcgcagccgcccacactaaaacagccacaaaagctacatggatttttcagatcaaatgcagacaagccaagtaatcctcatcagagattttactttgaaagcgtgtgcttccattcatacgtttaagtatttccatcagagactgcttctccagatgagaaatggtcgctaatactttatccaacttgtcctgcatttaaatatttgaatcccaaacaacattccaagaagcatcttttccgcacgtatcggtctatttaaaactactaaatatctaactaatttataagatgcgttgagtgcgaccatggattggatggtagggtcacagctcaccaaatatgcaacgactcgatcgacacttcgacgatgccatatagtagtatattttttttgtctgaataattctatgctcaggttcaataattcgccagtatttttggcttatagtagcactaattcttcacctgcccagttctagattttttaatttacaggtgattcgcccatgttttcagcttcaatatgttttgtcggaataatgctcaggtccaataatagttcaccagtatttttggcctgtagtagcatttcttcacctgaccagttctatataaatatatttttattttttttgaagaagaacaattccattaagcaggtagtccagctgaatcactagctaccaaattgcaaacatcatccgggaatccttcaagccaaacaaattggcttcgtggacccagagaagcaccaattttagcaagctcatgcgcagcacgattacattctctaggacaatacatgacttgatggacattaaaattcattgcaagcaaaaatttggcctctctaatgataacagcgtttacacttctatcatgtgtttcatccaacaaagccgctttcagagcttgagcatcagtttcaacaataatgtggcccattcccatatcattagctaatttcaaagcttggatgcatgctaaagcttctgcatccaagctttcctcacatgttctatataaagattaaaaatatatttatatgggctgcaggaa

SEQ ID NO: 45005 - DNA, 2562 bp, Oryza sativa
tgtattcaactattagtgatctttacctgctgtacaggacatattcaagcatgaaggaacttattgctgattatgaaagtggcgatcttgactcttttgatgtcaagtggcacctgggaaaagcaataaatgacatattagaggtagctcttgtttattgaggcataaggttttataatctgtaatgactgtctttctttacaatcagatggtggggacaaggacaatatgaaaaaaaaaagaagtcagcccttaaaaaaacttaatttattcctttttatttattgtttttatcacttgtaaagttcaatcaattaattcttgtgatattatttgcatccttagtgactttttttactttctgtttcctgttataaatgtgcctaatcaattaagttaatttgccaaccaccttaattatgacaattacttttggacagtagtgtcattttgtaccacctaccttaattcttgtactgaatccaaatggacttatatttgaaattgaagggattttgtttgggcatcgaagttttccacccgtttctttaaaatccttcatattatgtttacattctattctgtggataattgtttaccacttggtctttcttcaagcttgtcagcgagtttttccgtagcaacgaggaagctcaagctcaaattgttccccacagggtacagttcttaacccatgactattattatttaccacaattatgtattccgatataacatacctatgatgactttgctcctgaattgactcattgtattttaaggtgaatttttctgtatatatataatcaagagaaatattcttttacacagtcatgtttaattaatgtgataaaattttgatcaagtttgcgaaatttatgccaatccactagtatccatgctagctaaatccgcatgatcacctaatgatgttgtttttgtgcgatgatgttacatttttgcctaggtctaacaagtgtcctagtgtgttctgctctgctgtccatggaacatatggctaaacgcagggtccgggatcttttattataactatatcacattagagaacatgcacagacaggagaacaataacttgcttctactataatcttcaactactctaccccaatgtgtccctaaaagattaaccaatgcagcatctataaatgcaccagataaaatcttcccaaaatgtgactagtttcatagagcctgaattcctggcactaagattgatttttcttgaataaataaacaatatatggaagtacttcaatgactcctctagtgtaggatctgaaaggaaaatagagtggtcaaccaaagataattttttagtgaagtgttctactgatcaggttgtgctattaggctgtgagatgcaacggccaggatgttatcccatttgactaaaaggcaccgaaattatccttttcacctgcataataactcttaccataaacaacagatcaggcaagtataatttaaaaaatttcgtgcacttgatatgagaattaccatacaagttgatcgaggtacacaaataaatagggtgtttggtttgtggatccggttgccgctagcaccatactacattagtaacataaattttaaaaatttatgtccgatgttcaattccttttcgactttcttttaactggatgtttccttttgacttcagttacaggatgaaattggggcagatatccagaagatccaattgcagaacgaggagatgtctggtcatgtaagtttacttagacatgtatttagacacctgcggcagaccagatttaactacgcagctaactaccggaatcgttttttttttttgcaagacatttattttctcattagttccttattttccagtgatgccacagctgaacgaggaagaaaaatacaatatatgtgttgccgatagaggagaaatctgggtttctttggacaaacttgtatatattgccgctagaggaggaaatgaataagataaacttgtttaaatgtttctgtaactgtaccaaacatacatcgatgtgacggaagttttcaaatatatgtaaattattattatttatatactagggtgaatttgtgagccgtgtataccatgtgcgcacgatcgagttggatttacatatatgcgcgtgcacgcagccagctaaccacgggccacggcattgtcgcatttaatttcctctcaggcagcagcggcaaaccggtagaccaaacaaacaagggggttaattaaatccgtaccactatgaatttataggttttaaaatataccattataatttataaaattaaaactatgtcattataacttaacattattttaatatgtcaccacttactcattcactacatttttctaatattttaaaccaaattggccttgtttttttcatccatcctcttctttcttcgcctctccttttcacctctcaccgatgagttcatgtagccgtccacggcacaggaaggttgtagtaggacaccccgatgagctcgtgcagcaggtggccatggtgtaggaagagctcgtgagtatagttatgt

SEQ ID NO: 45006 - DNA, 2323 bp, Oryza sativa
cattcaactgctctatcatcatcagagtaataatcaatcagtccacttgtcgtcgatcgaggtcatcacctgcgtcgggatcgacccgtccgagcgtgacgacgcgctcgctggcgatccagaagtggtcgtgggggagaaggctgcacccctcaccgcccaggctctgcaaagacaaagggattctcctcagctttctcgtacgagagaagagatcgcagattcgaataccgggggaaagggaatctcccggagaccttggaaaagggcgcgcggtagaggagcgccgccgcgagcgccgccgccaccgccagcagcggcaggaccctgcccttcgccgccgccatcgccatcgtcgtcctcctcctcctcctcctcgcgctcgtgacgagacctcctgtccttttctgcgtctgcttccttccttcctcgcgtgcgcgtgggctgcgcctccactggctctgggctgacgtggattcgggtatctgagtcgggtgggagtggatctgtacacctggtccagtggactggtgggtacgaggattcctgtggggcccacctgtctgtggcgtggtctagtggaccgcgacctggatgatccgattctggttttgttgcgttgtgtgagggcatccaagtggctggaacctttggagggatctcttgccttttagtctttcttttcgtttttttataagaaaatcgagattcttttttatttttttattaataaattagagaatctcgtgtgttgttttaaggaattagagaatctcgttgtagcggtgagggggtgggtgtgacgcggccgcggagatggacggcgtggattgcctgctcggggtttgaaacgtcactggataggaactgaaattaagatttaaataaaacaaatcaaattattcaattattagagcaagtttataatagtatagctcactactggctccaattcatctatagccgatctaatagacaatttatacaatagttgcttactatactattaatatatggtctcacatgtcatacacacattacatcttggaatccgtgctgcagctggctatagatctgtagcccgttgctcatctctttcatcttttatcttattaaaatatgtttacagctggcttatagcctgctattgtacctgctcttatagcggcctgcgctataggtggaaaattctacgtggggtaggacataaaattctttccagctgtataagaggaaaccagcggctaatttgacaagtagtcaacatttggtactccctccttccctaaatgtttgacaccgttgactttttaaaacatgtttgaccgttcgttttattcaaaaacttttgtgatatgtgtaaaactatatgtatatataaaagtatatttaacaataaatcaaatgatagaaaaagatttaacaattacttaaattttttgaataagacgaacggtcaaacattttttaaaaagccaacagcgtcaaacattttgggatggaggtagtatttgttagtggcttatcatacattttctttttataatttggtgggataccgttttattttgtaatttactctcatctttatatagcgcatacagacgtgtgtacatagagctgaaaatcattttatatttccatgcctccagtaaactccagctttgaatattgtgatgggactgtagtattatggtgcttatccgagtctcgtatgtactatctccatcacaaaatatgttgattttttatataacgttcgattatttgttttattcaaaattttagtaataactcctcggttgattaaaaattacaacaaaataaatgatatgcatataacatttttcaactaagatatatgatcaaacattatgcgaagagtcaatgatgtcatatatttcaaaacggagagagtagcaatttattattagtatcaccatggctttaagaaatgacatcagccaccagtagataaatttaagccacgttgaaagcacaattgcacataatagtagcaacgtgactagcatgaactctcaaactatgttagaagtgggataccagaaccatggaaatttatttttttctgaaatggaatggctttgagctttccaatagtatacagtaccatttccttatttaccctgaaaaattaccaaattctgcaagggcctttgcgagaaattaccatagcatttccgtccccgttcccgttcccgttcccgtttgggtccccccgttggaaaagaagaaacggagcgcaagccgaagaaaacgccgccgccgccgctccacctcctcttccctcccctctcctccc

SEQ ID NO: 45007 - DNA, 2078 bp, Oryza sativa
atatatccaaaaagaagaaaagaaagtaaaaaagatggttcaaaaaaaaaagaaacaagtgagaaagatcgaacatacggtcgaatccggaggccagcagggagatcagatggcagctcatggtggctgatggcactaatgcactagcatactcaaccaagccaaaaatgccaaaatattcgtcatttgatttcattgtaaccgaaaaagaaaatgccttgccaaattatgggtgagtttgaggagaaggagattgagaagattgaaaagatacgcaaaacgaggtgagtcattagcgcatgattaattgagtattaactattttaaactttaaaaatggattaatatgattttttaaagcaacttttctatagaaattttttacaaaaaacacaccgtttagtagtttaagaagcgtgcacgcggaatagaggtactttctcacctaaactcaccggaacgaacgcaccctatgtcaagatgcaactttggtacaaaaccccccaaaaaaatgactagccaatttctgccaaaaaaaaatcaacattgcagtttttttttttttggagaactgcatatgaatatcagtcaattagctagttagtgttagtgtaagagtaggcccgtgcgtgctacttgtgctaaatttgtggtctgcaagagatggtcataacgaacgcgaggaagcaaaaacctcttcaaatcaacatgcatgatcaaacgtactaatccaagcaaaatagaggctaggttattaaacccgcgtgcatcgatcatcacaccaagaaatgcatcaccacataggagtaacatatatccccagatcagcatatcacatatatatctttgttcaaatacgacgatcgagtgcaaaaccatacgtacacacagatatccatcgatcggcgatcgctactgatcctatcacagacaacatgcaagctacgtagtccaaactaaaatgcaacgaaaggtaatccagttctcaacgtaggccaacccgaccgcatgcagatagtatacctcagctcagacggcggcggtctcggtctcggtcgcctcgcctccggtggtggcagcagcacgtaggtcggtagttgccggcgccggctccacctcctcctcctcgtcccaaggaccaccagcagcagcaggagcgacgacggggtcggccgcggcggcggcggcggcggcgatgtcggggttggcgacgtcgatggggtcgccgtcgcaacgacccgtcacagtagcgacgacgaaggggtcgcgaggcgtggcgcgcatgaccgtcatgttgttgatggactgcagcattccgcgcgtgaaggagcggcggtcggagttgctgccgcggccgcgcgcctgaggagccgacgacttcttgttcttcttgttcttgttcttcttcttcttccccatgcccggcggccggcttttgctctgctcgtctactctcgtcggaggagtgggtggggtggggtgagaggcgtgagactccttatgtaacccgcgtttatatactcgagctggttacttgcgtggtttagccgtctcctctctctctctgacacctcttgtaacaagaaatgattcctcctagttatctctctctagctctctctctctctctctctctctctctgacaccttgtaacaagaaatgattcctcctagttaatgataacccgtctcctctctcacacggattgacacaggtgaaaacctgacacctgacacacaccctccccctcctctctgatcgctcgtctctccctctaatcgctcctctcttgcacggagtaatcatctagaataagtaaagaaaaatatctagaataaaatgtgatctatcctaaaacaactaatttggactggacggatggagcactccgtaataataaacagggtaacagcagttaactcaaaagttcagcgagttccaactccttaacatgatgcagccagtggatatattcatgtgtgacaatgggccaaattggtgcacaacagtcattgataaagttcttactgtgcaggaatataggagtacatagattgaataaattatgcaaactata

SEQ ID NO: 45008 - DNA, 1078 bp, Oryza sativa
tggatcatgcagaaattcatactccaagtgatacctgttcagcggtaatcccattctcaaaagcaccataaagactttcttttgtaatagatcccacaattaggtttggaagttgatactccactctgcaaaaatatccttattgaacattcaatgaagaatggaggatgacagtaatataaggtaaaatctacagtcgccactattactgtcattttaataaaaccttaagcaagtgtcctgtaaaattaataagcaatattacttacaacacagttattaatacagtcatcttcactgtattgtgtttcctactaccttgatttagtactggattccagtgaaacagttggcattcctgagtcaattcagtcaagatgaaggcatctactcaaccaagataaacggtatcagtcactgaaacagcagtgaccaatcaccattctactagagcatagccaaaaatcaagattatggcatatactcgcatgacaattggcagagttacgctggttaactaaagaaaatgtgatgaagggtatagagcccttagctccctgccgtcgctcttttgcatgccaaacatatggcaaaatgttaataataaatagaggaaagtcgttcaaggatgcaacagaagctatggatcagtaattcagtagttaaaaaaccagtacatagttgagctaagttatgccaatcatctagcaccacacgtaccttgaaaaaaggcgcagaatttcacaatgtaatctggaagttgagtacgcatacatccggaaatttgtctccacaactacaaaaccctacagcaccaacatcatacaatgtaattattaacagaaagtattttcatcttcatttgttgttgcttaggtgacgagtagattgaggttatgaaagatttggacgtcatgaataactgtaatagcaaggatataaaatgttctgaaacctctttgttagacgatgaatctgacaagcttgctgagagatttgtagccagttttgtaggtatgaaccagctgtcctttcgaccctgccatggcttaactcttgacatttgggctgcaggaat

SEQ ID NO: 45009 - DNA, 753 bp, Oryza sativa
ttcctgcagcccatctctctatgaaggggttatactaatatactgtcaaaatgacccaaaatgaatatcatgatttaccacaaaatacatttaaaaggggtgaatgattcgactagtgaaatcaaaatataacgctttgagataaggctctcaaacagaaaatgacatttcagtttcctattaatctgcatctaaaagcaccatttttttttatcaaaaagcacttgagcactagcttattactacctccgttttttaatagatgacgccgttgaccttttatcacatgtttgatcatttatcttatttaaaaaatacgtaattataatttattttgttgtgagttgttttatcactcaaaatactttaagcatgatttatattttatatatttgtgtaaatttttttaataagacgaatgatcaaatatgtgttcaaaagtcaacagcgtctctattaaaaaacggaaggagtattatacaagcaatgagagaatagagaatttagacagtgaaaaattgacagcacatattctagaaaaaccttaggaggcaataaatatctttcttcctccatatttttaaatttataaaggatcttattgtaatttcacaataaccaatgatttgcaagctccaaaactcttggattgaaacagtttgagcaaatttatcatggaagttaaataagaatctaattatctgccgttgtgtgatgattacataagtacctcatcatctagcatgaagatag

SEQ ID NO: 45010 - DNA, 2754 bp, Oryza sativa
ttactaagctttctataatgcataggaatgccgagatatctaataggaaaatcacctagctatcacatatgaaacaacaagtattaacagattgaaatatatgtttcctttcatcaaaatataatcatgcgatatcttgttctaaagatttaattacaacgaatacaatagtgtgatcggattgttgattggataagtaatttaggagaaaaataatcattttgaagcttgctaaaatacatgcacgtatgtatggatgaggtggagaaagtggagagagagagtagtagcaagtagtttaaggaattttgtggaacacaatgaagacacacattgaaacatatcactaccacgtataaaaaatttagttttaacggtttaaaacacatgtttttattttgacataatataatcatatgatatattgttgtgaagatttaattgcaatgaatacaacggtgtgatcggatcgtagattgaataagtaatttaggagaaagaatatttaaagagagtaggaaagaaggagaagaaacagctagacatgcatgtgacagtaacagggttcgtccgattcattgggctgctgatttgcatcatttttccaaatttcgtgttagagtactgatcgtatcagggaaagcaaaaatttatgtattagagtaaaactcaaattaatatacatttgtcctatccagatgtaataattactataacctactacattctaaatttgtaatacttaacatgcaaaaataacacatcatcatgcaatagtaatttattatattttaatcctcatgtaaacattgctatatcatctatatgtattatattctaaagcttatacatacaaatatattaaatcatcatcccacataatctagtccattaaattttctacaaacgtttctagggcagtcctaaacgttcctgcttcctagttgtagctcccattcatgttttgtagctatattatatctatgaattggatttataagtaaggaaaataaaaacaattaaatccacaaccctcttcccacctcacctcctccccatcccctcgcatgtgcatgcagctgcgcatacccgtttcctgcttcccctcctgcttcccattttgaagctcctattcctattttgtagctatatatcaaattaaaagagaaaaaaaatcaaatgtttttaatctaactaaaatgttgttgcattcataattaaatccatagtgcccctatttttgctatatatgtcattcggccaaaaagcagtgcactttgcatgccatataaatagcaataaattactttaaaaattagcatatattgcatcaccatataccattctataggcatatgtatggctaaattaaatttccagtatccaaacaaagattagaaaataaactattcagcgatattttatcgagggacaacaccctacccttctaaacttcatctcaactgacataaaaacattacaaaattattcaacaacaaaggttgcaccattatacattattttgcaaatgtgaatagataaaatataaactatgtaagaaaaaagaactaacccaaaatgaataactaaaaccattacataaacaatctgatgccttcagtgagagaaaaataatccaagcaagccaaataatgtttcacataagtgctttaaaatatattctatattaccatctaatcgaatttagacaatgtttaatgtatttttaatacatcatagatgaacataatttgttctagtgtacaaaccgttgaaaaagtggatcatccttacatataattcataatatttaattgttgattttttagaaaaagtatttaaatcatagaagcaatcataaaaaatcatataaataacaatgatgcacacatagtatatttagccattgtgttctcactggattgcgtggactctttactcacactctgctcgaaaagttatttgatgggttgtcttccacactgtgcaattgaattggactttacgagcctgtgcattaagcataggatcatgtccaacccaaatccacccattaataaacaacaagaatataataataataataataataataataataataataataataataataataataataaggaatagtactatacatgacatttaactatgtacaatctgttttaactcttgaattattttggagaggaagacagacaaatatatctgtgtattgatgaaatggataggatcaaccactcttgaggtgaggacgagagagggggaaacctatctacctatccagctcatcatgaatctgggacatatgttctcctttaggctgaaggaaactgccctatataaagcctatacttaccctatactatacttacaccatcagtataactctttctactcttgctgtgacaaggggcatgggagatggagagcagtagagctagtagaagccttcggtgatgcatagaaccttgtcctttggttttttacgagcatatggctagttctatggatagtacgaacttctgatgtctagctacggagtagatggataagtgatttatgtttggggtaatgggttagtctttatgtaaatgaactgtgagatactttctcgatagaaatagggtacttttagatacttccgggcggccgccgctcctcccgctgcacgttgacgacgccgacgccgccgcacgcctcttctccctgcagttgctgacaatgccaataccgatgtcgccgctc

SEQ ID NO: 45011 - DNA, 564 bp, Oryza sativa
ccgaatccgatttgatgaaaataatatgggatagaatacgagatgagtgatatattatccgtcactaaccgtacccgactccgagtttaaagaaaaatatgggttaggatatgggaatgccataatccgaccgtatccgcccgttttcacccctgtcgatatccaatcttagattgctgtattttgagacgaagaaagcagctcaggttctcttatcctgttttgccaccatgctcacgcggcaaagaactggcaccaatcaatgagaggagaggaagcagacatatactccctccatttatttttggctgctcctatttatctcaaaataagttcttttttagataaacattacatcggtatttgtgaaagtagaggccagataaatgcattgggagcagataaagtgcaaataattgaattagaatttgataaagtggatgtattctagtcttttcagttttatgttgatatgtgtgagattggtgaaaaatgaacttattctgagaaagtattatgtaagaagttgaagcaaacttatcagtttgacatcttcggcagcct

SEQ ID NO: 45012 - DNA, 1141 bp, Oryza sativa
aagcttgaaatcttaaagcactttgattagtaaagatgataattgtagattggtcctgaaaaatacttctatataattatatttttaatgatctctatgaccaggcatgtgaataaaaatgtaatgataagacatcatacacattggagacaatgcaatggaaacggcaaacaaaaaaaaagatctggtatatatgtgattagggggatcatcaatatcaatcaattttttaaactgcacgattgcatccaaaggtcacaggttaatttttttacgatcatcaaaagtaaagaatccccaccagtataaaaaaatattatcttcaaaagcattaaaataaatctaaaagagatcgtgaaaagaatatgaaacactgatgctatactagagttggaattaacttcacaacatatatatgaactcttttggatcctttcttttgtgaaagcaaaccctcatcggtacaactgagaaataattaagtgtgtagtaaaaaaagatgaaatgaagaacagaagagcaattaaatggagccttccattccttcgatcgatcaatcgatcgatgaggcatgttagctttgctagaagccgtgagcaatgcacgcctcccagaagagcctgtcactctcggcgtcgctgccgccggcggcggcgacatcatcctccgtcgccggcgcggcgcacttgccgtcgtccgcagccaccaccagctggtagcccgcgcagtactcccgcatccagcgctcccacgacaaagcctccacggagccagccgccgccgccccgccgcctccatcctgatcacccccgcagcacgactcggcgtcgccatcgtccgcagggcagctgccgcggtccaccgccgccgcgtccgactccgagtcgcccgtcgcctccatcaacgacgacgccatgctcggcggctgctcggagttcataccgacggggcgacacaggaggccgagagggagatcgttgtgtcgtggcgtggcgtggtgaggagaggcgttttgtatcgggcggggaggtaaaaacgtgaagaatgtgggcaaaggtcgcaaggaaatgagcgagcgacgggtcaaagattactgatgcgaagccgaagcagcagcggcagcaagaaaaaaatgggtttt

SEQ ID NO: 45013 - DNA, 703 bp, Oryza sativa
tagggtagattgtgagtttgtatgattcgttctccgcgtgacgtttcccgaactattaaatggtgtgttttttgcaaaactttttttataggaaagttactttaaaaaatcatattaatctatttttgaaatttaaaatagttaatactaaaaaaaagtctctttctttccccccacaaaagagtacttctatatttttttaccagcaatggcgctatattttcccaataaaaaacaatcaaatcgtttttatactgtgaattttaaatgttacaccgccgtaaatcactttacaaatttcaataattacaatctaaattttataatacaaattttataatgaaattaagactaaaagtaattgatcagaagaggagatagatgagatagaaacatgcttaattagatataacatacagagatactaatcactactacctccgtcccaaaataagtgcagccatgagttttcacgcctatctttgatcatctatcttatttgaaattttttcataattagcatttttgttgtatgaaatgataaaatatgaatagtactttactcatgacttatgttttaaaattttttcaaattttttttaaataagatgaacggttaaagttgggcgcgaaaaactatggctgcacttattttggaacggaggtagtaaaaaaaattgcctgaatcaagtaagatgtggcc

SEQ ID NO: 45014 - DNA, 883 bp, Oryza sativa
atttctccgacttgtcgcctgtcagagatgtaaacagaaaatgctaagtgttcaatctcatcgtacttgcaataaattaagaacttgcatccatgactatgcagtttgcatgatgatcatgatgggcttcaaagaaactaataaagcatcaagctatagatcagatggttccatgttcatcacgtaagattacacctgtcgacttgcttgctactaaaatatataatactagcaaaagtgcccgtatgttgcaacgggaagaaaaaagagaaaattgaattcaaacatattaaattctaattaattgaaatataaattttttggaatatttgggtatttttaagtaggtaggtatataattaaattaatttataagtaaactaagtgtgagaaataaaatgatatggttgcatttattttttattaaattctccatattaattacactctttgaaattttcttgaaatttacagagcttaattgttaattttgataatacaaactaaacatcattttagcatttatttaaataaaaaacattctttctctatgggccatttttagcccattttcttcttcagcccgcaaccgagccgtcccacttttctcaggccgcaaggtattaaagtctaactaacatctccatactcctctcagttccacgtttgtgatggactgtcggcccgcatgcggctcaagtgtcaccgtgtggtgatggaggcctgcccaacactcgatcgatctgagccgttcgtttcgatggacaacaaccccagtgcaaccctaaccctagaatcattctccccccacccttccccaccacaccatcggccgcctcctcccgcccgacgccgccttcccccgcccgacgcagcctccccc

SEQ ID NO: 45015 - DNA, 700 bp, Oryza sativa
cctcttagcatcgtcatcacatatgaatacaaaatcttaatgatatacaaataaaaacatagtgaaaggcaacacaagatcacacacatacatacaacgccttaatgatgacaaacaaccatggtgaaaaattaacacaagtgtacttgtacaaagcataggaaaggtaactctatttacgcagatgagcaacgatataaaccacatcagggtaccaatacaacaagataaggaacatctacaacaggcattaagaaatatgggaatcataatcatttgcaatacaaaaataatagttggatgcaagtcgcaaacccacagccatcctatatgtgcatgtgtgtcaagttaatcattgttttccctagaatctaaagcctacactctgataccaactgtaacaccccagaaattcccaaaagcctgggatgccactaaagaaccatacgaccatgtgaaaatgatgaaatttttacattagattctttttgttataaaaaattattgtggaagcttcgacatatagatacaaggatctaagatggcaacaatctgacacatatgaacaaactaagaatggtagataaaccatggtgaatatctatagtatttaataaatccactataacaacaaactctaattttaccccctaatcacaacatttataaactatgtgatatcataatgtgcagcggtgta

SEQ ID NO: 45016 - DNA, 1944 bp, Oryza sativa
cctttatatctcataaatataaaaaggctatgactgcaaaaaaaatacattttagaaatctacaaaacaagacctagttcttttatgtagaaagcacttttttgttctgccatttaaatggtctaattcacacttgaatgcaggcttcagaatctgtacagaatttcagaggatacatagaaaacaactattccggagttctacccatccgatcaaagtgtactttaccaacatggaaagctcacagaaaactctaaggggcctgattgattccactgtttaacctctccaaaaacagttcaatctacaactatctagattttgacaaaaaaaagcaatagtcatactcaaaaattcatatcgcttattccacttgagataaaatcattccctttggtcagaagatagatcacgatgttatctacaacgtttctgtggacactttgttcagaatatatcattttgaccatgtaattgatggaaaacagaggcactataaatctgcccagcctagctagaactaccaattcgattcacaatgtccaaactcttctctaaccgtctttaaccacgaattaaaccactaaattcaccccagaactgatgcacaaggggataaacctcacctagggttttccttttatatcccacgggaaacagcggggaaactccgatctaacccctccttctactcttctcctcctccacgttccatttttccactttgcttcttgatccaagctatgaaggtggagatctagggagagcaaggtctgctagagaggagaggaagcaaaactaagtataggaggtggaggagtcacaaccggcgtcatgggggaagggagggggggatggttcggttcctctcccctagggttttaggtgggggtaagggatttggctaggctcttgggccttgacccaagctaacttgcccacttacaaaggaactttattcaactaattgtggctatcttaataaaccaaaaacattatcttttatttttttaggggtattagaactatagagcgagactgcagatatatactttttatgttaaaccatagtcctcttaaatggtttaattttgatgaatatgattatttgaaatgatcataaatcgattggtaaaatctatccagtgcgtgtgcactgcatgttcttatctagtgacccttttgtgagccgtctgaatcagttgatgatggttgagatatatattcatgggtgttgtactaaccaagagacaaaaaggggaccacttgctagaatatgaggaccatatgctatctaccagttgtcatagcaattcacttgtattttttagatctgtttgaaccaccctactctacttaaagagaaaattccctgtgtacccctgaaagttcacctaatcccttctataccccctgagatttgctcattctctcccatgcccctaaatttcagtttggatcacttctataccccttccgtcaattgaccgttagttgaccgttaaattcacatcataaagtctattttaccctctagtatcaagaaaatataaatttataaagtatattgatggagtgtataaatttattgtatgcgactattatatttatgagtttatttcgtgaggtattatttgcgacggagcggcggcggcaggcgtcagaggggcggcggagcggcacggcggtgtggtcgtggcggcggtgcagggcgtttttagctggtgcgggagcgggcatgagaaggggaggcgcgagtgcggtcgtgagagggggaggcgcgggtgtggtgtctatacgtatgtttacgttggcttcaccatcaccactacgaattttttaagtagtaaagagtaaagatagtgaggaaaaaaataatctatactatatagtatgcatgttagcttagtcaatactcaatagttagcgatgctattaaacttg

SEQ ID NO: 45017 - DNA, 1374 bp, Oryza sativa
tgatgaatgcagaacctctaatttagttaagcaagtcaattcatgctgtacaatatgatctctgacaaaaaactgaattccttgtttctgcaaatgcaagtgcagtcataaataagaaagaatattcgtgaaagtttcatagaaactagataaaaaaaagaaagtgttttagataaaaaaaaagaatgtgtttattttcagaaatccacagttgctatattttcagatatcttcaaaactgaataatgttttaatccatttgccaacaaaaagaaaaagaggtgcagaaaacagcttacttgggggataccatggatcatgcttgatttgatcagctcaacggtgatttgatgctatctagattcatccttttttttttaagttcaacactgtacacatttgctggacataatgcatatatgttgttttcagcgtgacaaatacaatgaagaagaacctaatgcatttgatttgttcaaggagttccactacagcaagaaaaaaaatgctacaccactgctgtatagtaggctattgtaagataagtttcaaactttgctctttgtaatgcttatttttaattctctcatcaacaacaatgtttgctccttgcttgctagactcaaatggaaaacaagctgtctacaagttcgatgaagaggactcaatctgagatggaagcggaaacttaatcttttgatcagtcaagttcgatcaagttaattcatgcatgatgctatatcttttgctactacatgcattttgctgctattgctaacttgtgtcaagtcaatttttgactaagctaagctatacatgcttgcattttgctgccgcagcattcattaagctcctagacttgtatgcattgcttggaatctctatttgttgttggcttgagccatggtaaactgcaaggttgtatgcactttgaatgttgtaatctgatgttggatgaaaaatcatgtgatatgatattgaatggaaaaatgatatttctatttgatttgctgctgcaactattagttgcatgggctgtgtatatgggctttagttgtgaaattaagctgtatatatgggctgtaagcgatgtagtagtgggctgaaaagggcaccaaaaaatggtgacaaaattgggctgcaaagctgctgaaatgggttgtaaagctattgaaaatgggctgccaaaatggctgaaaaggagctgcgaaaatggatggaattgggctaaaaattggcccatctttgattttggcctgttaataaataggttgaggtagtgtctacgtcatcatccacgtaagcaaccatgtaagcatccatgatgatgtggcattcaatccgtgacggttatttttcgtcataggaaatgaa

SEQ ID NO: 45018 - DNA, 2418 bp, Oryza sativa
aaggtgcaagcttgtgctaaggctattgactagacctctagggccatgtaatagggggatccctaaaaaattttacgaattaatacaattgcttttacattccaaatattgttgagagaaccacgcctttcaatgtgacatagttgtccattcgacaacagctggcgccgtccgtggggatacccagaccgaaagggcaaaatgggacccttctcgccacacgccacgcccttcgccatagtaccaataaggtacgtcgtcaagggctgcgggtgaataggtttcgccacacccacgcccttcgccatagtaccaataaggtacggcgtcaagggctgcgggcgaagagttttcgccacacgccgcgcccttcgccatagtaccaataaggtacggcgtcaagggctgcgggcgaagaggtttcgccacacccacgccctttgccatagtgccaataaggtacggcgtcaaaggctgcgggtgaagaggtttcgccacacgccacgccccacgccacgccctcgccatagtaccaataaggtacagcgtcaatggctgcgggcgaagaggtttcgccacacccacgccctcacgcccttcgccatagtaccaataaggaacggcgtcaagggctacgggcgaagaggtttcgccacatgccacgcccttcgccatagcgccaataaggcatggagtctagggctgcgggcgaagaggtttcgccacaaccacgcccttcgccatagtaccaataatgtacggcgttaagggctgcgggcgaagaggtttcgccacaaccatgcccttcgccatagtgccaataaggcacggcgtcaagggctgcgggcgaagaggtttcggcacacgccacgcccttcgccatagtgccaataaggcatggcgtcaagggctgtgggcgaagaggtttcgccacacgccacgcccttcaccatagtaccaataaggcacgacgtcaagggctgcgggcgaagaggtttcaccacatgccacgcccttcgctatggtgccaataaggcacggcgtgatgggctgcgaggcgaagaggtttcgccacacccacgcccttcgccatagtaccaacaaggtgcagcgtcaatggctgcgggcgaaaaggtttcgtcacacgccacgccctttgccatagtaccaataaggtacggcgtcaagggctgcgggcgaagaggttttgccacacccacgcccttcgccacagtaccagcgaggtacggcgacaagggctgggggcgaaaatgggttaaggagttgctcccaagagcagccgaaagagatttatcatttttcaagatgctccgaggggccggcaaactcaattggacacctgagtgtcaagccgcattcgatgggctaaggtagtaccttcggcactagtgtaaaaatccatttggaaaaacattttctgttgattcggtgtgccgaaagagttcattaccggcaataacaagcggtttgactccgagaagtccaaggaaatatgtgaggggctaaaacttgaaatcaagttcgcatcggttgcacacccgcagacgaacggggcagccgaaagggacgaacggcaaaaccctagcagcactaaagaaaagaccgaaagccgataacagttaaaaaggtcgaagtactaaaaagaccaaaagccggcaatggtcaaaacgatcaaagtacctaaaaatacctttgccaaaggcaaaaaggggaaagtacaagccgaacagccgtaacacgcaccacaccccatttatttgccaaaaagcacaagttacagataaattccattgcccaccaaaaggcattcggactttacatccgattcatcagcaaaagcagtcctcaatggcgaaggactacccccttgagcatcttcttcatcgctagttgttagatcaacacaaaaaaaatttaaagcggcgaagaaggaaaaacggggattatgctgcgtcgacgctgggcaatggcaaactgacgctcagtcatataaaattcatgggtgtcttcgccttttttgtgtatgatatttcgtggaaaaaccccaaggcaaacgtttgatcaacgaaaacaccaggggggcgatacgaatcggtcgaagcatagctcgccgaacgttgaaaccgcgaaaccgcgacagctcgttttcagaaaacataccgatcgtcgctacactcgacttctgcaaatacttaagcatttctggatgcatatgccaaaagtcgagagcgaatgatgcgggctaaaagtcaatgtgaattccttttgctaacacacaaggggaccgacatgcttcacccttccgaacgtacaagttacaaaatgcaatgatagcgaaaagaaacttaaaaacacgcacaagctccatcgggcaaaagcacatacgtgttatacaaa

SEQ ID NO: 45019 - DNA, 2683 bp, Oryza sativa
caacgctcgccgaacattgaaaccgcgatagcttgtttcagaataaagatactgaacgccgttacattcaacttatgcaaaacacaagcgtttttcccagcgcaaaatgctacgagtcgaaaacagaagtcgaaagctgaaaagtcaacaaatcttttcgccaatccccgaaagggggccgaacgcatgacttttggcaaaatcccctctaaaacaacagggaaaaggggaaagaaaaaaaaatacaagtcaagaatcgtgcaaagcagacaaacttggcaaaatataatcacccagtgtcataatacagcttcgccattttcgaaaggcgaatgccagtgttcatattttttctgcaggagtctaaaaagaggtttcgacaggaacatcagccgaaagggggcgcctcatgccataccgtatagtttgcacggtctcggccgaagctccttactcacccttgcccgtgaggggcttgttggaggcatgccatgaagcccttcggccggacctgccgaaaccatagtaccagccaggatttaagctaaagacatcaagaccattcaggcgaagccctatggcgaaagccataagcgaagatggcgaaggctgaaaagccgcgtcggtactccgaaagtaaaggcatctcgggcgaactacaaagacttcgccatgacgagttcggcatcaagaaggcccaacaggccgcccccggccttttaggcccgttcgccatagaccaggcccagcctatcagcccattaaagacccatatgtgcaaatgacactgcgtacccatgtaaatgtccctttcataagggcaaccatgtaaaatcctttgtaaccctaaaccctagaaggtggaagcttgtgctaaggctataaatagacctctagggccatgtaatggggggatccccaaaaaattttaagaattaatacaattgcttttacattccaactattgttgggagaaccacgcctttcgacgtggcatagttgtccattcgacaacaaacttattagagaaggttagtgatttgataaacaacgttagttagtcaactggttgcatcattgccccattttcaaggtaaaccaaaaaattatcaagagtaatgcaaattaacagcctgcattatctcataagttgagagtgtagctcctgagacaagtcatctgggctgatggacaggggtggacagaaattccccgaagaccgaaggccgacccaacctgacccgaaccgaactaccggtttttttcggtcttcggctggagcttgggtttctaattttgttttcttcggtgttcggctgttttatcagcttgtagataacgcaaaccgaacgcaccgcatacaccgatctactatagcatgtcttgtgtctcacaatcaagaatggcatgtgggccccacatgtgggtgggtcccacattattttgatgtgaatgacaaatgggtcccacatatttttttaattctagaacacataagcgccacatcaaccccatatggaccgaagactaagtcaacatcgccacgtaagcgccatgtcagcgaaaccgccctccaaaaccgccgagggagtcaaattgtaccggttttaagagttgggggttgagatatccggtattttggcttagggtcacgaattagattttgatcagttttgagggtcacagaataaacttattcctcagataaaaggcaagcagaactgaaaaagtacactgaaggtccctaaacttgtcatcgggataaaaaacgtcctcaaaccgcaaaaccagatatgtggggtcccttaactatataaaaccggtcacccgaggtccttcggtggttttgaccctggttttgctctacgtggcggctgagccagcgtggcacccacgtgggccccacatgacaggtgtccacgtcgccctctctctttcccctttcttttttctcttctctttgccacgagtgagtagcaagggacgggcggcggtgagtggggctgagcgacgatcggcggaggcggcttgcgagcgcacagcggccggcgaagtggagtggagcgggggcgcggaggaggaggcgggaaaggaggagggcggcgccgcgacagcggaggacgccggcggcggccgccgccgccggcgtggggaggcggtcgttccatgaaaacctaaccactaccaaccctcttgcccagacgcggacaaagtggcgaagctcggcgccgccgtgtccgatggccggagcgagcgcgtcaccactgcggcggacaacccagagacgctggaggaggtgattggcttctccccatagaagcttgaggctatgggtgtggacgcactcatgatctaggcgaagatggccgatgaggacgtgccgttcgaggtggcgctggccgcgggtgacaccatcaccgtgttcgacacgctagtgtcacccgacgagtagttggagtcacacggctccaacgcctgtgtcacgctggtggcgaccgtccagctacgtgacccgtcacggcgctgcgatgcgttggttgcgccctggaggctggaggggggagagagaggggggagagagaagagggtatttaggcgttgactcagcaccgaagaccgtggtgaaagcgccatggtggacaaaaccagcgccatggtggacaaatctggcgtcaatactgtc

SEQ ID NO: 45020 - DNA, 688 bp, Oryza sativa
aacatcctccttctgtcccgaaaaactgtactaattattcctaagggttaattagatacctatcatgtgaaatcattgtcatgattaatatttatgatgaacaaattgactttgtaaatgatttaatcaatgaagtggtttggaattatgtgtggatgtttgtgtgagtgcgtgtgattaatgtgggtcaggttatgatatatgtactcaggaacgattgttttatctaattcgattgttttatctaattgtgtgcaggtgacttgaggttagtcttggtcaatggtgaggaccgggactatctcagggaggagcagaggtctagtgcgatcgggataccatgtgagaaggtaagagagtcaggattcttgaaggacaatttcagtcaacggtggggatcggaactagactcaataaggagttgaggtccagacggttaagaatgccgggtgacgaagttggatacgacagtactacaaaaaccctcatagacaacgactcaaggtgcaaggttcatttaaaaccgataccaatgtagcttttcccacctccctacgatgaaaaaacataaaaccgacacctatgccagttctaacaaaaaaaccgacacatatactataggtgttggttttttaaaagaaccgacacctataatatattataggtaccggtgttttttttaaaaaaa

SEQ ID NO: 45021 - DNA, 3302 bp, Oryza sativa
cattattggagtaaatgatttacttcgataaaaacaacttttcggttttcggtatatattctatttttcccgtacccaaccaaccactctcgcctcacttccttttttttctcttttttttggatctaaatcgatccaccatcccaccccacagatcggcgacacaccatggaggaggacgatgacaccgtggcggttgatggcggtggccggtgagcgatggccggcggcggttgaggcgaaggcactgcttcgggcctcgttgccggacgttgggcagcaccttaaccagcaataaggtatcacctgggccaatagcaacaaccagcggctactccaccacgtcggcggcattgatagaataagcaagtaaggaaatgacactttgatttgcatctgcatactctccttcaacttcatgcatgaagccccaatatttttttcaaatcaaattaacgtgcaatctccaatattacctgatctcaattgatgggctgcacaggtcctacatttgcacatcgtgctccatgtggctggccgtagaggatagggtggagtccgtcggtgatgtaggttgtttgatatttttcttttgctcgtcatctctattgacatgaacgagaatgtttttacatttttttgcgcccgctagatgatgatggctgacctacgtaatgctcatgtctagccgaccccgcttcatccctgtatcattccatcgtagtatgcaactcgctcgatggatgccctctccactcccagtgtgtgtgatcagtcagtagacacagactgttctatcatctttatagcaagatccagcatagccaccatatggattttgagttgaatcattttttttcatttctagtttgattcacctgtgagtaatttcatcgtctgtgtgtgagtgagcctgtaattttttcacttgtatgactattttatgatacagatcaacaatactcttagtatcaattttttactcttatactgtacattgaacatatcagtaaacatattactatatggtggctacgagatcatggctatatcgagaggaaggtggtaattgtttactcgcagaccaaggaatctcagtttttactcttatactatgtattgaacacatcagtaaacatattactacatggtggttacgagatcatgggctatatcgagaggaaggtagtaattgttttactaacataccacaaaatctaaacaatatttataatattggtaaaagaactactagcattgtaagctggtagtaattcttttacgaccatctaggtatggcgtcatacgatgtggagacattcatgtgagtaaatttgttacttttaaatgagcagatgtgggaggctgggagtaaatgaaaaactccacggagtaaattcgttacttttgaaacgtgcggagatactagaaaaatggaaaactcggaaagaaaaactagacggtaaatattttactaaaacgcgaaaacagaaaaactacagagaaggaaccaaaaacagaaaaatctggatggttaatattttagtgggcccattgatgaagcacggatgagatggaaaagagaaaaagaaacacggaaggtggagtggtaaaagcgaaaaaaacgaaccgagaaaaggtgggatgcggaggaaaggtggggtggtaaaaaagggaaaaccggaaggagagagcgttgtgcggcactcgaactaatattccgcgctgtagagcgcggaatagtgctaatggaattttatcaaatcgaatgcgagaagatgaacaagagagaggatggaggaggaagaaatgctaagttagtccaaaatttcattgtaagggcagtgagaggcatatatccaatatctacaagtttataatggtatatatgttcaaatatataaatggtagtgttatatttcaaactacaaaagttacgatgacaagcctaccagaggaggtgaatggtagattatgtcagcggaaaacaaataatcgaatcttaatagattaaaagtacaccccaacctcaaaaaccaatggaatacacgtccggcggtctatccgacctactagagtcggtctgaccaaaacctagccggtctaaccgcaggtcactcggcggtctaaccgtcagccctaaaaccagcacgacaacgcttctgtgaaaacttgatctctcttaaaccaaccattagatcgagttgcagactcgatagaataaactaaataaactaaggaacaactccacctgagagatttgcaaactataaacggtttaagagaaaacaccctcgaaagtcagctgtctcagaattttagcaaatctgaactaaacctaaaacttaagcaaattcgaatctagtaagaaccaatcaacgaaactttccagatctgatctatgaagtattagaaaggttttggatggattaacttgaacaaaatcgcagcaaaacaaacaatcacaagttaatgccaaaaccaaatataaacgtaaaacttacgaaaccagaatagatcatcgatgccttgatgattgaatatgatctttatcacttaaatatattgttcacaaggtgtagctacaacaccccttataaatttctcacgaaaccctctctaatatgggagttcgtagtacgcgcgtacgcgccgcgagcagaactagcgcgcacgcggcacacgttttcggaaggacgcggtagccttactaactctgttagttaaagataatgatggtaattaacaatagattttttattttattaggagagtttttttactaatagattgaaaaaaaataagttacatttgaaaacttttgacttaagatttaaactttgaactcaaattttgaaaactttcaactcaaactttgaaaaatttcaatttgcaagaaaattttttaaaactttcaactcaaatttgaaaagtttcaacttgagatttgaaaactttcaactcggatttgaaaactttcaactcgagatttgaaaatttttaaattaagatttaaaaattttcaagtcaagatttaaaaacttttttaaaaaatgaaaacacttgctactggaagattaaaaagtaatcaggaaaaaaagcaaaagaaagcggaaaaaaaagaaaacagcggtggttagatttcgtgtgcgcgccgcgtgggccgtatgggccgggagtgcgcgctgccggcgcgcgcgtgcgaattaggattatcactctaatctctcaaacttggcttaccttaaggcataacctccatctctatttataccaagaaccttcaacttcaacttaaagga

SEQ ID NO: 45022 - DNA, 1832 bp, Oryza sativa
atgtggtgtgcctccatctctaagtgaatggtgctcaagttcctctcgttgggacttgggtgaaatcactaggagaatggacacccttgatgtgcagacaggggagatccagtacaacctcacggaacacatagctcaaacgtaagaatggcaacaatctgctgatgctcagttcaccaacatcaacatgatgcagcaacagcacgatgacctacaagcgtactttcgctttcaggggttcaatccttatcaaggaccctgagcgaaagccaagcttggggggatatacctctccctccactaaggtaacttgtatcacattgtatatttccctttccaattgcatatttgctttccacttgcatcttataaaacttgaaaacaatataaaaatttgcaaaatagaaaataccaaaaagataggataggtttaagtcatgctaggtaagacaagctagttctcttcgttgaaatgatgaatagttgctctgttctatatctctgatatatgggttcttggtaaatgctctctcaaaggttaaatattagtagccaacaattatccgggaacctgaggtaaatgagctgcagttgctgatctaagtctaagttgttgcgagatatgagatagtaaatatgagttgctatgatcctgatactagtttgactttcattcaggatgttttgtttttcaaaatgataaattgagagttcctcatttgatataaattcctaccagagccaaaaatgtgctatcatgattaaaccatatacattttggttgcttgtcattccattgaactttgtcaaactcttgtgagttgtgtagataattctcatgctctatgatcaagatcatacacccacatatatgcacatgctaaactcctacactgggagctaagcaatattccattccatttccatattaccaccaaaataaattctccatactttcatatgttttcttctcctaaaaaaatccttttgaaaaagaaaaaaaaaagagagagggaaaggcatggttatgaaaaaaataaataataaaaataaagttatgctccattagcatgagcatgacactgaaaaaaaaatgtagccatgccctctcctaatcaataaaagaatgattttttgggagaagaaagtaagcacaaaggagaagctttttctttattttcctttatataccatttccatcatataccacacacacatattgcatgatcttgatcttgagtatgtttagtcatttgctttagtctaagtttttatttagtaataaaggcgaatgcaagtatgccatgtttgatccctaccgagctccacatatcaagccttagagtaggaatcaaaaaggcaaagtggtgaggaattcattttgatacacttagagagactgagtgaatcatttgaggaactaggctttcttatgcaaaatcatttgaaaacttccggaataagagttgaataatgattgggtgattggtgctctaattgttgttctgtctttcaactgcccaaggcaaggagaagcagtgtctcgtgggaatcaggggtaagggtaagccaccgtaccaaagattatttaatctgagagagagtacatataccttgcacctatatctttgagatatgcagcatagtagcaactcctgatcaacaaccaagtctttgtttcctttcgtccttcacttgggacgagcaaaggttcaagcttggggggttttgttgacggttgttatcgatcagttttgaccgtcaatattgccaaaatatagaactagtaatgcttgcaacgcatatatctgttagaataataatattccact

SEQ ID NO: 45023 - DNA, 2212 bp, Oryza sativa
gaatacaccgttgccacactgttaacgaccaaatttggtagtccaaatatcggatgtaaaggaggaatcgagatcgaaatcgagatagagattgtcccgcccacagagtgaagatcggctaaagtccaaatcggtcacgactagcatcgacatagttcgagttgcacggggttagccgattaagccgaatccgacaatatcacacagcatatgttgtcggtctaggttcacgtgcttcatgatgattgccacgcatggatagagtcctgagaagtccattgtatctattaattagcatattctatataatttccttagatatatgtttgggcaacagtctaccgcaaagacctatggtatcttagagtttgttagatataagagtcgtgtccgatatgtacgtattttgtaattatctgggtataaatagacccgagccccatgtaatcaaacgaacacacgttcaatacaatctcggcgcatctccacccattttacattcgttttgtttcgacgagttctcacttgtgggttaactgcatcagttttgatttctacaagaggtaaaacttgttatggcggcttgcgttctccggattagtgcttctatctttatgacactctaatcttgtttatgtaattcgtcgagttatcatatatcttacgtaatctctagcaatatcgtcatataacctacaatcggccaacatctgctaatagaaggcagccgattaggttaaatactgatgttgatctagattatataggatatctaccactctataaaacatccaacgatttgattgtctagatactgcctttcttttcatacttatagctgcatcagttgagtttgatcttataagtcgtgattagaatttcaatctctagcctgtctttggttgccaattagggttgtattggggtttcagccgatcttatcttatttaactatatttatcttatatgctttattgacatgttaaatctgccctttatgttaagatctgttgcgctaaaagtatattaggctttctgtttgatatattctacttgcattaatatcttaatatagagtggtatcggagtattagccgatacatgctagatctatctgactggctatgctatgaacatagatagtcttttgttggtatatatttcgatctaagtgatttatactgtctcggcatggtgaccgatatgtcccaatcacttgatttaagtatatatcgacataaggattatatattgttaatatctacagccgattgagtagatttagttctttcttatttattcatgactgccgatcgatgcatatatgacatcggctcaaagataaatgatttgtcatcagcatccagccgatcggctatcttttatggatttaaccgtggtttctttgtctttatttcttgttgattgcaggatcaaatcaactggcacgctcacacacccaaaggcaagttttggacctgcactggagttaagcagatctcccaggcctcgtgtttttacatcaacaaacacacaagcatataaatactcctatagatttatactcatatttcaaatataatctacaaggtgcatgtgtgtcggagggtgcactcctcaagcgagggacagtgaggcccccccttgttagttcggccgggggcagtgggtgaaaatcaaagactcgatggaaggtgtgacatagagggggttgggcccctcaggaacgatgagacaaaagtggtttatacaagttcgggccgctgcaagcgtaataccctacttatgtgtctggctgattgagtgtaagttacaaatcacttaagtcgctcagactcgagtgtgagttcgcccaagaatcgatctctcccctcaccaggcctggacctccttttatatctcaaggggctgccacatgggcctagaaaactgcctaggggagagcgagggcattcacattaaatgcatgtcttgttgcttaacttggaagccactcgcacgggcgctacgacatggggcccgtcaatccaactgcctgacacggggggcatccgtgtcattcatcattaatgagtgaagacttctgggtctttacttgcacggggaaacggaaaccctgctttgactaggtgagatgtactgactccggctaagcctctcatcatcacgacgtgacagaggccgcatgacatgcaaccagtgcgtagacgca

SEQ ID NO: 45024 - DNA, 719 bp, Oryza sativa
tacgtttccctgtatattatggaacggcctaaagtcctggtttgataagattgtaaagtagatttaggaaaccgataccgtattggttaaggtttctatcttgtaaccctgccccccaacctatataaggagggcagggagcccctctaggggcatgatgagacaacctgatcgtcagatcaatacatactcggcggattcaaatccccaaacaggagtagggtattacctctcattgagagggcctgaacctgtctaaatcctttgtctccacatccatccacttttaggtctcgtgcgctaccccgttttattattgccgaattcatgtttcgacactatgtcatgacgatgatattagagtagtatctggtagtttaggcgtggtgtctagattacgggatatcattatttggagttatatattgcggatgagaggtgggccgctgatggtgacagctcagtacgggtattcctccacgccggtatataatcctaagttaatttcctagggagggtattcctccatatttagccccggttgtatggtcatgacgggctgtcgtaaggaactcggcagtcaggggtggcttctcgaagtaccaggaggacatcggatagagggtattagctagtatatcggtaactagaatgtatgtatactatgtatattagaagtataggaatagattttcttcctcttttctatctacttagct

SEQ ID NO: 45025 - DNA, 671 bp, Oryza sativa
aaccaagaagtaaaaggagaactgaagaagaaggcatcgcggacgcccgatgccaatggcatcttagatagtcagtagccatcaatttcgggaggaatctacccatgggagtgggacgcccaatgcctccaaaaaataggaggatgatcaaatattgcagttgaccaacaactgaaacattaagttatatatggtgaaacaaaaaaaatcagcaactaaaacatttaaatatcttataaaacatggtgaaaatacacgttaaaacatgtcgttatcacatattttttatataatggaatgaaacatcctagtctttactcaaagagttacagccaattattacataattcacatagaagaaaactcacaaagaaagttcacgatagcagaaacaaagctaagcaaacacaaactaatagactgtaatacccggtgttcttgagcatggttgggcgaattcgagggcgatttcgatttaaatgggggaagaatgtaatgccctgagtttcgaattagtatattttggggaatattagaacaaatgcgcaaaagtttaatttttaaaccattgttcgaataagcgatcaggaatcgtggatgcatagagttcgccgagtagtgcaaatagactataagttaaaacaatgtgggccggtagatcttttcagtct

SEQ ID NO: 45026 - DNA, 688 bp, Oryza sativa
tttcccagtgtaagttgttttagttgcactaactcttttctaaatgtaagtctttctttaagatcatcaactcttcttcaaaaacattaacttcaataagttaatgtgttcttgttctcacaagtaaatcagtagaatgaataaagggttacaaagttgtgttgtttcctcaattatcatgcataaatataagatgacttagggtgtgtttagttcacaccaaacttcactccaactcccaactttccatcacatcacatcacatcaaaactttccaacacatataaacttctaacttttttttttaaactaccaactttccccaaacttcttcctaatttcagaaaaacacagccttatacttgcaattagtgagagtacgcacgtgatatgttcctacactacttatgttagtatacaggtttgttagagtagtcattattgactttggctatagtcgtgtagtaccatgtgcttgacatctagaaccgtggaatatatttctagatttgaaaacttttgtgtagttgaataaaactataatagattaataagagcatatatatatatatatatatatagtaacttgtgctgtagctagcggtggctatttgctaatttagtccctatagttggatccttaaatttagatttatttagactgaattctacaaaactgcctacttaa

SEQ ID NO: 45027 - DNA, 974 bp, Oryza sativa
ccagccatggcagtatctatctccaaatgattggcttgggtttatgagcgcaagcttctgtctcctgcagtccatactctaggttccaagaggcaatgcgacaagtgattggtggcatgaggtaaagagaacagcagtaaggtggtgtttggttggagggactaaagtggggctaaactttaatccctctcacaaaaacaaaaacagtagtaaggatggatggatgcaatgtgtgttcagaaatgacagcagttggactctgaaatttgctgcaaaggtagctagtaggggatactcctatataaagtggtcacagaaagatttgtgccatactactccagtcaatgcagtgcagtactcatcttgtcatggaagttgggacactgcgtagcagctgcaggagtgttcaggtaaaaaggatttgagtcagagttcaggaattgttctcctgctagtagtacagaaactagcaatcctctgaattcgtgtgaagcaataagccaagaaagatctgccaagacaccactgcatatcatgatatttaatctttgcagaaaagaattggagatgaaaacgagcttgcaaaacagaaaagaaaaaagttcttcaatctgaaatgacttgacattgtcacacttcgtcagaattactgtactcacagttccatacttccatggcgatccattggccgatagcccgatatatcttgtgttgcaccgggatgaacaatacattggatggattgttcatggctccttgtggtacggaagaatcgattcgtaaagcctatactcgagaaggctgatctgcagctaggcaaagcatcaaacattgtacagtagaaaacaaatgcagagaaacttgagaacgaatgggttgggttcagaggcagccaagccaaaaacaccttgtagaagcaagagagaatcatgcagtagcatttcaggctttgattaacgtggggctgcaggaat

SEQ ID NO: 45028 - DNA, 781 bp, Oryza sativa
tcctaggttagtatattctgagacggagagaggatcggcatgggctcctaggttactatattctgagacggatagagtattaggttggattttttaggacggagtaaacggtttacgaagtgatgtgaaatcgttgtgatccatttgccagggccctgaaacaaacatggttaatgattgtccttgtcgaaagcattcgaggtcatacacgttcggctaggatgagcggttgtacggagtgccaggtgaaagctgttctactactcccaaatcaacatgaggctcgctaatcatacgaatttgaattccaaaacaacaacaaggctgtgtttagattttaaaaaaatttggcaaaaaacatcgcatcaaatatttagacacatgcatggatcattaaatgtggacgaaaaaaaccaactatacagtttgtatgtaaattgcgagacaaatattttgagcctaattgtgtcctgatttgacaatgtggtgctatagtaaacatttactaatggcagattaatcaagcttaataaatttgtatcgcagtttacaggcggaatctataatttgttttgtcattaatctacgtttaatacttcaaatatgtgtcagtatacataaaaaaaattggccaactaactgaacacggcctaaacttgaaagttcaatccatccaacacatcataccgtgtagacagacaaatcagtctgaggaaaaaaacgagacatattatttacgcatgatcaattccagtattatatttttcctttataaaaatac

SEQ ID NO: 45029 - DNA, 573 bp, Oryza sativa
agatttggataatcaccaagagctcttctgcctatgcctagcttcctcatgtttcactggcccaaagaaaagcctttttgcaaatgcagctagagtactttacttgactacctaaagcccctttgaaagcagagtcttcttcttcttcttcttcttcttcttcagttcatcttgtggatggatggatggaatctggattcccatccttgctccaagatgcttctttttcatcttttcccaactccacttttccattgtctttgacatcttcaagcaccttcccttaaaaccctttaaagctcaccacagtccacagcagcagcatagatccccctctaaccttatcccaatgcatgtgttttaattatagtactccctccgtttcaaaatatcaggatttctagtatttagtttttaatactcatataagcattccttctctgatttctacaattcccatcatttcaataattccaaagccaattagatgcttggaaagccaatctatgcaattcaaatttaaaaattgacaactaaaatgacaaaaaaaattgccctaaaattagtatttgg

SEQ ID NO: 45030 - DNA, 1371 bp, Oryza sativa
tcattgaaattgaaacgatgtgacgaaaaaaagttgaaagtttgtgtgtgtagaaaagttcgatgtgacatatttgggttcaaactttgaatctaaaccaggcctaggagtatgatcttctctcttagtactctttggacactcgtttgctcggttgataaaattgaatgaaacaactaaaaataattaagtacaaatgtggttttttttgtttgttgaaacgcgcagctacagtaaaactgcttgttagtcactcgcaccaggacaaagcacaagtgttgatgagaacagcaggcagcaagctaagggacaagaaggatttgatatccacaaagcacctattcccatgtgtaaatacaggtaaacctttgttctttagcagtttggagctcacgtgatctcttccctacgctttgttcttaccctacttcatagaagtactccgagttacgatttatttttttttcagaaaaaaaaactacaagtgatttggctgaacaatcttcagatattagtaactttatagtttggacactacagtaaacaccaacagaacaaacacaaagaaggatcttaatggccttaatgagctattttagttttatatattagtgaagtgggagaagcaactactgatatcaatcattcagttcacaagctaacaagacaaaacaaacccaagggagaaaataacaggtcttatcagttgtcctgattctcctcctgttgatatacaatattacacaaattttgtttcttccaaagttccaagcctatatctaattggtttattttgattgtgcaccctacactaaactttatacttatacttgcaaaaaaccaaaaggatgtttagtgagtagatgacacacaagattctcttcgacagagaaaagtgagcacccgtactaccaaacggagtatgtagaatatgctatgctgttagtgcattgtccgatgcaatttcagtggtcaaacacaaaaacagatgcagtagacgcctcacaaattttcaggctgtctcgtggcgattgaccaaagaacaaaactccccatttggttcagtacatttatattgaacatgcatgatgcatccaacgttggcacatcggccaacacatttgcatggttgcatactttgcatatgctagctgctactagtgcaaacccaacacaccactagctaccatgtcagctggaatttaatttcttgtgaaagaaaaacaagaatttcaccataacagtcaaatcaaaatattctattttgcgagtaaaaaaattcaaaaccttctttttactaaatgttgtgcatattagttacatagttataaaatattctgaatgaaataattcgtgtttgctaaaattatg

SEQ ID NO: 45031 - DNA, 507 bp, Oryza sativa
agcttcagctcgttcttggctggcgagctatgcccacgagagctgcataatatatgtcacccgcgtatggatgtgaaattgtggatggaaacgtgcatgtacgcgtacaaatacgcaattttttttagatgatgacaaatacgcaatgataaacaagaagctcgtgtacagcgctgcatgcttcagtattcatttatttttgctgggtaaaaatgaaaattttgtgtggagggagcgtagcttaacacgttaggttttgtggtgtaactagcctatatggatgcaagtcttaggcttgatggtattcgcatttacggcaaattattctttaagagatagccaacgtaacctataccccttgacagcaacccggtactcgtatttacgactagttattctttgagtgatagatgacataccctgtacctctcgacgacacaggctcaatcttctgaagatactcattaaaggtaggatgagtgtgcgcgcattatgggctgcaggaat

SEQ ID NO: 45032 - DNA, 673 bp, Oryza sativa
ctagagcgatgtaccaaacaccttcaagatcttaaataatgtagagtggaatttgccgctttcctcctgataattatacggataggcatttccgctactcaaaaccgataaaaagttcttgtaaagttggattagatgacattccacccagcctgttttagaaacggttagaacctctagattattttggattactaaaccagtattttccatctactcggacggcattttatcctcctcactttatgaacgagaaatacatttttctccaggttataaacctataaagtcaagtggtaaactaaacaaaacagaatctgagaacctgttaaacctgtgatgatggttgcaacaactaagcattgtatttacctctgatcattctgatgaagatgcatatgactcttctcaaaaattcccatgtaggtgtagctatcattgtgaaagccctacaggatgcagtgttcttccaaactgaagatcagagagaaagatgcacattccctatctgataagaagaaaaatcaatgttcagagaagtaactgaacatctctgatcaggaaccaatgatctgttcacagatttgtgttgcaatcgatcgatcaaaccgtgtcatgggtatttttggacaggctggggaatctaagagccgtgcaaagactgaacatgcaa

SEQ ID NO: 45033 - DNA, 678 bp, Oryza sativa
tgtgtccttgtactttaaaaaaattaaatggaactaaacacggccaaagtcataaacatagggttgccctgagttgggaacctttccctccaacataaaaaaacgaaacagctcattagcatataattaattaaggattaactaaagctaacttaaaaaaaataaagtaatatgattttaaaagtagcttttctatagattttttcaaaaaaaaatacacaccttttaaccgattaaaaaactcgcacggggaaaacatgggtaaaagttgggaaagctcactgccaaaggcagcctaatttccagccttcgagtgttttgtgagtgctgaaatttcccaaaattcatcatcattacgggtgtgttcggacctccaggttcccaacccaaatcactagtttttcacatgcatgtttttcaaactgctaaacggtgtattttttacaaaaagtttctatacaaaagttgcttaaaaatcaaattaatttatttttaaaaaagaaattagctaatacttaattaattacgtgctaatagatcgctccgttttccgtgcggagacactatgttcccatcatccacatgcgaacacagccgtagaagtactagcaagtaccacactcctactagcagtagatttttgcagtcaaatggtgtactgtactttcttgggcgtgt

SEQ ID NO: 45034 - DNA, 665 bp, Oryza sativa
aaaatgaccttttagaacgtaaggggacctagctagctagccaccaaatgcataatttcgatagatatgtagagcatcttctatcatgaaatatcatttgtccttttcctccggcacgatctccttgtcaagctaatccaattcatgtcacattccgctaaaaaaccagtcaattacttagtaacatatacagatatactatgaccgacatggggtttttctggatgcataaaaagaaaacctataaacgacaggccctgtataacatttttattctcaaattaatttagagaggaaaatatgaaagtttttttttctctgacacggatcctctacagtaccgcccctgttgtggaagcggcgagcaggtagatctatagtcccacatattaatgatacaactgtgcagtactatagataaccctcgtcgattttgtgtgtgtgttggggggtgggggggtacccatagcagagcagtgtgtgatgagctagcatgtcagtagcatatatcctcctggattcctttgtttgattggctagcctgctccatcttttgttacacatggttcaatcatggatgctacagcaggcatttatggagaaccatatggcagggcacagttaggggcccctctctttcaaacacccccttagtcagatcgacc

SEQ ID NO: 45035 - DNA, 1227 bp, Oryza sativa
tagatccacgtgtcagtgaacagtactgcagagaatcctctttcaatataaccttattctactaagataagcatattatactgctgatgttggtcatcggagatgatcagcaaacatttactaaagtttcaaagaaggaaaagaataataaagctttaatactactactacacatttggtcctggatgaatggggaaattagggcttatttgaattaaaggatttttatgatgaggaaaaaaatggaggaatccaattcaaaagaaattctcctactatatgagcagtttagtttggatcatacgattgtttcaaagggatttcaagggataggaaaagtctctccacatcttcgaggaattctagcatggggtctaacctcgttgtttcgaattcttttgtgatttttaaggcatgttctctcctcctctctctagcaaattaaacatgtaatctcaattttctctcacccgttcgatatatccaaacacttgtgtttgaatgattcctgtagtttgattgcttggaggatttttcatgtcgtgacatttcaatcctaagttttcctcttcctgtattttgagtcatgttccaaaggaacccttaaagtggacttataactttcatcaatacatatttggtaactcatggtaaggagattggaaatttagagtaataagctaatgaagggattgatcctgtaagtttcatttttaatctctgtcgtttgataggagatatgagaattatgatgaatttgagtgagaaatgaattttaagtgatgatatactaacttatttttttctctcagttacctgcctctacccaaatattgaaaagacgagagttcgctcttaaaactcctcacccctcaaacttccatcatcttcaaacattccccctccctcctaaccaaacactccctcagcgttctgaatgcaacgtgctattcaattaatcacagaatataactttgactgacttacaaacttagtaccagaaggggataagaagtgaaatccgagtagaaatagggagattcaaaatcacatataggaaagtaagaataaccaacaccttcactcttggataaacgttgtcacaaaatacgtaccgtcaaattttaaaaccttaaatggccaattaataaaaacatcaaagttttacacaatgatgaaatatgtctgttatacctattgatagtgagacatctacatgattttctt

SEQ ID NO: 45036 - DNA, 1087 bp, Oryza sativa
agtagcagtatggtagcatggaaatgaaacgatggactaataaaccgagccatcatcatgtctagctactactggctactgatctcaaacggattcgtccacatcttgtctatgactttcaatgcaaatgatgctcagacagattatgatattatcctaacaacttttatccttcctaagcgatcgatcgacgattaatttcacatatcgtatttaggctaagatttgtcaattgaatcatgttccattttccggtgctttgtggtagcacaaaaggaaacaaaaggacattgctcatgggaccccatgctgaatgaaggagccacacaagggataagagtgatagatccagcttataccaacatgaaacactgtgtttggcttatgtggatgaatcagtggacactatctagtgtatggagaggatccacaaatggggtacttggcaaattgagcatggtgtttgcccccctggttcaatggacttgattgcgattgatgatgattttaattaattgctaatatatactaattagacatgtttcttaatttccccttgaaaaagatgaacatgcatgacatctataatacaggttattatcatggacagtccacttttaaacttttcattgggactctagatatatattacttactctatctctaaaataccttatatttagaggatgtttagatctagggtgtaaaattttgacgtgtcacattggatattatatagggtgtcgcatggagtgtttgggcattaataaaaaaactaattatagaatccatcagtaaactgtgagacgaatttattaagcctaattaatccgtcattagcaaatggttactgtagcaccacattatcaaatcatggagcaattaggcttaaaagattcgcttcgcaaattagtcgcaatctgtgtaattagttattttttagcctatatttaatactttatgcaggtgttcaaacgttcgatgtgacagggtgtaaattttttggcagggatctaaacaggcccttagtcaatctcagatatattaataaggatgtgaaaaaatgaatacgcctttcattaactgt

SEQ ID NO: 45037 - DNA, 544 bp, Oryza sativa
tgggttacaaaatttatgtgtaacaacatcaggaacatgaaaatagcattttgcaataagattgacgcatcatataccaagaaatggctagtttcaaatgagtaatcaccagaaaatgaacaggtattagctacggcctactacaaagggaagggaccattgccttcaaagtaattaatcatattgataataaaatgttgactttgaaattttacttgaattttaaagatgataatagctggagacaacatagtatgtattctacgagaaagtgttttgcattctgtaccttctaaaatgattaagacacatgttcttctataattgtgtgatatgatgcagcatgttttgtttggaaatatggggaaacatttgattttttttttaaaaaaaaatatccaccataacaagtttttcctacatagatgaattaggcattttcttcttttttttcaagagtgacatggaaagttcttgaatttggttttcaatgtttgtgtggaatttaaatccatttgctttaggcaaaaaactaaatcctttt

SEQ ID NO: 45038 - DNA, 616 bp, Oryza sativa
ctttattcatgatttatattccaaggtttgacttaaacattgtcctaaacggctttatttatgagtatgctttagagcacccgcaatggtaaagtaaggtgttatctataaaacatgtacatctcagcaatagactagattaatagtaaatcatctcaatagtatgtctacatgggtatctatagctctctaatacattgcctcgtttttctctatagactatctccaggttagtagatagctttgctctctctcttcatttaatctcttccaagtaggaaaatatgctgacatggatctcttatatagagcctatagataaccattgtgggtacccttatgagtatgcagggagtactcctgcatgagaggcgaacacaataatgattcactgcatgtctctgcatccattccaaggagggtagataacccaatactgtatcgggcattgtcattggattgcattgctttgctactagctagcatagcaagcccagccccagccctgcaacattcagatgttcagaacggcatctgcatctgcattacatgcatgatgcagctttccccagtgcaatggagttgatgatgcctctcgaccagccagctatcagca

SEQ ID NO: 45039 - DNA, 656 bp, Oryza sativa
  unsure (1)..(656): unsure at all n locations
tcttttgtcccccagagattcctttgatcatttcatcaccaacaattgtgtccgcacaaatgtccagccctaaaatcttggctagataaaaattagcaattcagaaatcttgccagaaccaaatgattcaaaggtagatcatgttgatgctgtaaaaatgataagccaaaataacattgtagggaaaattgaaaattgtcttgaatggatgggaattaagtgagccatttggttaaacagcttgatgaaaatattgagtaaatttcacaaaaccctaggttttataggacatgcgtaacccaaaccccatgtattgcaatttgtctcaaggaaccccatgcataataattgtaaaaaatagtatgtgatatatacatattagccgcacttccaacacatgtcaattatcgaaagtataaaccattttgtgtttatgtaactggttaatctgtcattaacagtgagcactgtgtttgtgttgagtttgtgcaatcatggagagcgagagtgaggaagaagaatgtacattttgtgcccattatatatgtgaatataactaaaaataccatatattattatgcaaatgaatattttataaaaatctggggttccttgaaacattntgcccccaaaacatgggggttttcgttatgcat

SEQ ID NO: 45040 - DNA, 667 bp, Oryza sativa
tttttcatctcctcatctccattttttttatcatcttttttcagacaacgatttgttgttatcttcttgcagagtaggcatgccaactaggctcgccagcgagtcgcgccactgtgatatatggcctgtatttttccgggcttcattatctaacactatccgtaaaccggaatccgcgtgtagtatttgtctaggctctagaaaattcctggatccgccacgcggagagtcgcgtggctggatttatatgcatgtagttgtagttcaggtgccatggtgaaagctagaggtatggaagggagctaggttggaacacttgtaaggaggaggtgcaaccatgtgtaaggcaagatggatatgggtgaaaaaccggatatatgatgatttctttgcaggttaatcttcgctttctgatctttactgaacctcatctggaaccaaccaatccgggcctgaatatatatataaaccttttaaaaaaatccacaatatggcactcgtacaaacgtgcaattaattactccctggaaaagatcatagtctcctaccattagtagcaagtagtagtagctatcccgtttttcgcatgaaggtgtttgtgccggattgggaatttggattgctgcttggtttcatggtgtgacaccacatggaggataacgatggc

SEQ ID NO: 45041 - DNA, 742 bp, Oryza sativa
caatctaatcctctcgatatgttaccaataattaatttctcagtctatcaaaaaaaataattagtttctcagtgttagtggtgaatgcgtacgtggcaaacatcgtcagataagagggatcatcaatcaatatcaaggaaacctccggccaggcgcataacacaacacgcaagtacgcaacataccaatattgaaaatttcaaactcaaaatcttccattgcacacaaattaaaaccaaatacaaaatcacgcacatgataaattaacagtacgactaactaggggcaaatctctttatttatttattactcacgcaaaacatattgtatggtacctgattaataattataataagcatctgtgatacatgcatatctatctaagagattttacggtcctcgagaaggtacggagggataccaaattttatatttccgatactatataaggtacgaagatttgtaaaaaatactcaagaactataaaatttctctatataattaaatttcctaattaataaccacttggaattgagcatgatggaatcatctcaattaattaaccgtcttcttggtcggtgtgcggccttgtagaggactgggcatgttgtgcaacgggttcgatccggtgggaaccagacgctccgtcacggccaccgtgggctcgtcggcggcggccggaggagtcggcgcgccgttgtgcacggggctcggcccgctgctggggacatcgtgcctcatc

SEQ ID NO: 45042 - DNA, 878 bp, Oryza sativa
tacataaagtatagggactaaaaatagacatataaatgtaacagtctaaagaatagggaccttaaatagacttattttagctatttatataccccagcccaaagaagagggaggtaaaatagactttttgtagctgtacatatgtcacagcccaataggagggaggaaatttagacttattctgaggaaaagcacgacggcccatcgtgccttcgggccggctcggcaaggcccgaggcgtgttgggccgtgcctgggccgtgagtgcggcacgtgggctggcacggcacggcccggtgcgtcggtcgggccgtgccggcccgacaagcctcggcccaggcacggccgggcctgggccgtgccgtgccgtgccgggcggcccacatggccaactatacgtataggctcattcttgaatgaagtctctttattatcttattatggctaaagtatcgtgaatgcccgaattataaatcggggcagcctaggctggggcgcccgatcaattcggagtaaaatcgggcgctgacgttagcgtccgatttacgtgcaaaactattttaaactgatttttctcttaaattacttatcaaaatcataatccgattgtaccattaaattcgttataattaaatcttcaaaacaagaccatatatggatatattccgatgaaaaaaaatattagcttattattgaattattttttagtgttgtacgatgttccactagttatatcggaattgtttcactaagtagatcgaaaatatttcactcgtttaaatcaggtgttgtttcaccttatataaaaacaatgtttcggcaaatagcgaaagaatgtttcagttcactgcaacatttgatccacacatagtgaaaca

SEQ ID NO: 45043 - DNA, 673 bp, Oryza sativa
cctgcagcttttgcaagaaccgaaagacacacacatcaaaaaccacacggatcacaccaaaaccaaaaaacatcaaatttcaaaaggccaaaagccaaagatatcatatttcccccgtattcttgctcacttgtcattgttgcttctacactcctactacacctatagccatctcaaaaaaaaaaaggatagagagagatgctcaagctagaatgaactccatggaagtgacaacacagagagatagccatgcatgaacactcttgcagagtagagtggagtaggcaattaggcaggaggaatagtggctaggatgaacagcataggcaaagcctgggagagagagggagagagagagagatggaaaagccatccatccatccatgcaggagcaggatgcagacgactgcaaagagattcacatgtctctctttcttcctcctcctcctctctttcttcctccatggctcagcatcatcagctgccaccacagctagctagccatagctcatcatcatcaagctcagatctcccctccttcctttgtcctatgggcaaatagctttgctgcttgtttgtttcccaatctctcatttctctctctcatcacacggacgcaatgcaaacagacacgcgcatacgcacaagccagtagtactaccaccaacctagc

SEQ ID NO: 45044 - DNA, 1793 bp, Oryza sativa
  unsure (1)..(1793): unsure at all n locations
ctacacacactcagagcagaagcagcagcatcaccaagtgtagaacacaacaaggatgctcaagagaagagagagagagaagcaagcagctggaagctagctagccaggcaagcagcagccatgagagagagggagagagagagatcaaaggattgggggagaggagcagtagcagtgtgttgcttggcaggcagcagctgaagtagccagaggggagagtggagaagcaaagctgagcaaatggaagaagagaagggcaccaaaaaccaaatcccttttcttcttcctcctctttatctgctcctgcctgctgatcctatactttactttcagggccctgtgtgagccagctaaaaagattaaaaagatttgtagagcagttcagactttcttcagactagcttcttcacttttcttgcttgcagaagaaacaaaaattgaacccctttttttttcacttgagtaattaccacagtgccaatagcttttttactacatgtgctctcactggttaattttgatcagtaagccaaggggttgtttatatcaatcttgaatagatatttcaattttaaaaaaaatcaagtcttgagaatgcatgactagtgtacatatcacaatatcacagtgagtgaactgttttatgcattctcaaggaagctgcatctgcatgaggcaagaacagtgtactggtagtagatgaaccagcactagctatagctagtagaattgtgtactacagagtagagatgaggagcaactgtttgggtttgtgcctgaatcacaaaatcacacaacactcctaacaatgctacactgatgttgagcttttctgtcttttcccttgtctccttacaagtgcagataccgtccgtccctgatgatcaactcttgcatttcttctttctttttatttatctaacctgttgtacacctacttggttggtacaccagagataagtatgcatcaatggaacaataagctagacaggtagattccaattttatcacatttgttttataaattccagggcctgcactcaatgtatatgatagcaacaatacatatgatatataatagtactcatacatgtacacaccaaccataatgctaattcacattnncatgnncantantgnncncnanantnantnantntntntntnntnttgntnaanccaantttngancctccaanttggnttgggntttggaaattttgttgttttgaattggnggccaatttttttngnngccttttnantngtntntnntntnntncncncatngcctctctctctctctctctctctctctctctcttttgatgagtcaccctgggccccatgcatatcatggatggtcgtaattcaaaaatagtagaaatcctatcctgtcatggaccagttatttgtccatgggattatatcttcagagttgctttggttttgcaagacccacagctgatcttgctgcagtagtactatcagtttttaattaattagtagtttatttctttgtcatttgttcatgaaagatggagcattaaataaacactcctttttctcttttgttctcttgaggtggaagtacatcatagaatgatgagtttccaattgacctgatgagggggagaaagagaacctagggaagttcaaggattgtctgtgcatgggaatttaatgcgacctaattaagcaagcaaatgtgctcatctgatacatccatcccagctactactaggccctatttgaaagattagcccagagctaatgtttagttatgaattgg

SEQ ID NO: 45045 - DNA, 2538 bp, Oryza sativa
tttggtagtactgctcctctcaaaaagatggagacgtattttccaaagttagctggtgactgcagcctaggagcttcatgtgacactcaaaagcatgcatactcttgtgcttgtgttgtgtagggtgccaccagcccaggtgtactttttactgcaggtaaaaaaacactttgcaggaacagaatcaagaaagagaattttgctattaatgtacagtgatgacactactaatcctgtaagattagtggtgagtactagtactagctagaagtagtacagtagtacaatctgaaactttttgcagtgatccatgcataaaatgactttaccttaaaaatcatgctttgtgatctgatggtttgatcccctagactagagaacctccaaaagattcatggacatgcataagattgagactgaagcatttcgacagccccaagaagacatttgggaggcatcttaaagcttataggagcataaaaaagaatgatgtagggtctctggttaaaaaaaggatttggacatttgacagtccaatgcaaagcatgcacatgcaaccactggcttaaacatttttagggtctctggtgggggtcaccacatatcacaatgtgaagaatgagagggtggggcccacaatgtcagctatagttttcacctgaaagagataaaaaaaaaagttaccaagcctcttttttttatgcatgttgttgcatgctactgtttttagggtggtgccagttatgtgatgcaacatgctccattgaacagtgtagtaggagtatatttttgcgcacactttttttttagatatggtgcatttatgtgtagatggggaatcttgacagaagcaaatactaggctacatgggcctacagtacgtagtgcaccgagtggagaaatggagtgtatttttcacaaaaatattaggggtgtttagattagggttgtaaagttttagcgtgtcacatcgggtattatatagaatgttgtatggtatgttcgggcactaataaaaaaactaattacagaatccaactacgagacaaatttgttaagcctaattaatccatcattaataaatgtttactgtaacaccatattgtcaaatcatggagaaattaggcttaaaagattcgtctcgtaaattagtcgtgatctatataattagttattttttagcctatatttaatacttcatacaggtgttcaaacgttcgatgtgatatgctataaaattttagggtgggatctaaaatttagtagtcgtttttgcgtcaactcagatgttccttttttttcatagtttctagtatcattgttttgggagttccaacgataaactttcgtccatcactgacgcgccgagattgtgagtgaagaacatagggggcgggtaagaagattcagtctaattgtctcgtgacctgaaacttgtaattgcacaagtatttagaactttaacatagagaaaataataataataaatcttccaacctctgcacaatttctatatgcgggggcggagccagccagaagctaagcctatggctcaactttgttattttatcctaattccttataaatttatgactagatttcacaaaactatatatatacttcaaccaaactatcataaaactacagatttaaggtgatgtgtcgaaaaactacatattcagtgctgaagttacgaaataactacaaatttaagatggaagatcaaaaaacaatatgttttgtacaaagttaagtgcataactacaacatttgtaactctcaacatgatagtagtggcatctgtgttttgtgataactccaatactcaagctgtagttttttatacttggccttaaatgtatggtttggtgataaatcttatattaaatatgtagttttatgatacaacactttaaatctatagtgttgtgataatttagtcaaagtaccaatagttttgtaaaatttactctaaatttatatgctcctataaaatttatatgaaatttacatagagtttgattcctagggctagggcttaagcctttatatgaaatttatagcctgaattcgcccatgtttatatgcatgggccaattctattttttagataagtcgtaaaaacaatatatattaggttattaccaattataattcctcttatgtaatcaaatgtttccgctacttaaaaaaacattttcacaggtgggtaaaatccgtttgcagaggtaggtcgatggactgtctctaacaaaatgccagtggagaaactgctatatgtgcgaatcaacttttggatagggttttagactacatgaccatcattgttattataagaggattttcttatagctcatcagtaaaaatgaaacccatgtgtttgtgaaaatagtttctagtgtccctctatgaaatataagtcatgctgtatatccatacaatcagttaataaaatgttagtcctttacatatgtgcacaggatttaagatatactgctagatgataccctgcacgttgttgtgaaaatctttatgaaa

SEQ ID NO: 45046 - DNA, 1859 bp, Oryza sativa
accaaccgaataacagttccataaatcaaacggcttcaaagttcaaactaatataattatcgtgtaaaaaaatgcatacataccagctttccttgtctgagctgtaaaaaacaataatacattccttgatcttcaccacaaagtttgtgtctgtattcaaagcaaagtgtaaaaaaaagaatgtattgtgcacaacttgtgctaaatgaaagagagaacttttttttagagggagcttgcacaagcagtactaaacctgatagtatatacttaaataataatacctgtattttttaatttatttctttataaaatgtcacataggattccatccacttgataacatggtgcatttctatcaaattaatttatccgagataaaaaaaataaaagcaaaacaaataccgccgcccacccaacatacatacgtgtacgtaagccaagcttaattagccttccgtgtcttccaaacccctataattaattaagaaaaaaaacccaaagattcgccaggagcctagtgcgaaaagttaaccgctaattaattaaaaagttaatcctgattaatttatcttaatgcttgatctctcaggcaaactagcagctaggccggattagagattagattaggaactttttggagctatcatgtcgccggccggttgcatcagtgtggggcccacgcgtcatcccctcaatggtgataactaatgggattaattagccatggaaaataaatattaattaatcttaaccaatggtgattagcgtgaggaggagctgcctaatcaggggccactggagcagagtggagcaggggttaacactggtgattagcagagatagagagagagagagagctgtggtcgctgtctgattctgctgtattatattcccctgatggcatccggacaagcgtcaagaggggacggacataccatgtgccacctcatcctcgtgatccatgggcataattgctaggtgcacacggcggggttctggttccggcctcgatgggtggctgacgggtggggccgtctcacaaaccgtgtgcggccaacgtgtcggctttgcggaattcttgctagtatttcttttttttttcaaaaaaagtttttattcaacacgcaaggaaaaaaacgatatagagatatgattgttgtaaacagctcaaacacgctggctacatgaaaccctagcggtctgagtttatacccgacagtcccataaacccttagttagcatacggactcgaacatgtgatctccccttcccgaattcaagtggttttaaccgctgggatgtcatttgacttgtgaatagtatctcatatgtcattttccccttgtaaattgagctttcgtacttaggtctcaggtagtaagtatttcccgaatatatttatcctatatcccaaaataactgatcactttattacttatgagtcaattatgagaaaaggtaaatgacctagatgccctatactaatagagatgtcactagtgggctgtagttgagggtataataaatatatataatttttaaattagaggttggaagaaattttggattggcaaacaatattcacttatttagggataatttttgaattttgaaatttgagatggattgacaaatagtactacttgttttcccgttgaaactggtagggtaaatactaacagtttgtgtcataaaactgctacaccttcacatgatgtcttgtcagaggttttgtttaaatctctcaccctttttgtggaacaataaaaaagcattactcctgaagcaatggaacactcccaaatcccaattcaccttttgatcagaagcacatgtacatgtacatttgtacacag

SEQ ID NO: 45047 - DNA, 2484 bp, Oryza sativa
atgccattttcaaccttaccaaattttggtaaagttacaaaaaaagtggctacatttagtttgctgccaaattttagcaactatataagaaatcctaccaaaattttggcaagttaccaaaattttggcaatggtaaaatttggtaaggttttttttggcatcaaagtgaacaggccctatatgtagtactgggataataaaataaatgtttattctaaactgttccaggtcattgttgatatgcgaacatatatgtcagtactatctgtgactcaatgattgctttttttttcttttctagaagatgattgattagatcgatggttttaacttctctcgtgcttagctattaggaattctaggacattgtaacatgcatgttttttggcctgtaaatgtaggccctgttaggatgctacagatttaaagaactactctatgcaatacttccaagtttgttgcatccatgaatacgccagtctttgaatactacatttttcacactgtagcaaaaaccatagtttcttgttttggcaactgcagtatttaccacattactgttttttttttcaaaaaagaattgtttggctagttctatttagatatcttgggtgcatggaattagaagatgggtatgtgaagcatcaacgtgtactgacagatgtctctatgcatagcttttttaactcctatgtatcaatgtaccattgtgtcgtaggctcgtagccctagcttttacacatattaacgatcattagctaattcaatctgtaaacccagatttgctcacatataagagatggatttaaaactaccttacagacagtattataccccaagactttgcaatatttaaaactgctgtggaatcgcttcactttcttggtttacaaaagaaaaggagtccaggagtggaaaaaccatagcgttgagaaaactacagtattttctgttctcaaactaaatactatagtactttttggaaaccactgtattctacgaaaactccaaaactattacatcctcagacagagcccatattttttttcttttggtcttatatttttattagcattgtaccaatggatggcaaattatactataaactttataagtttctaggttaacaatatcaaaaaataattaccctcaaattttttaaaaaagattctacaatactcaattttacacgaatcaatcaacatcgacatatatactatacacgtactaaagttagtattttttagaaatgaaaatacacaaatagcacatggcacacatgcctgcatgtatatagccacaaaaaatattcaagagtgggtgggtgtagaacacgccatcaatacaacttctataagagtacctctttccttctcatgaccagatagtaaagtaggttcaacatgataaaagtaaattgtgattgaatctttttagaactttggtgacaatttctttcccatattgctgctgcttccctgtttttactcgtgcacatactggaagttttctttgttcatatacttttgcgactctatgaattatgatgccagtaacaactgtttattttgtgtgcatgtatttgtctgagttgtggagtgttattttggaggtttatgagttcaagggcagggtcatacattagccggtgcaaagtgcatgtgttcagggccccaaaaattaggggtccccaaataaatctatcattagtactaatcaactatacttaattaccagcaaattacaaggcctaataaatgaaaaaagaaaaaggcccacaaggactaccaggcccaaagactgtatcgttggctcctccattgctgcccacgcgctactcgatggcttggtgtcgcgcaggcatacaacagcaaatcacaattcctaatcttcattagtttgcagcagcaagaagccaacagtgcagcaaaagggagtatgcccgtgtgcatccatcagctcgtgagttcactgtgccatcacatttccctacaatttgttttcttctctaagtttcaaattcatgttataaacaagcaggaaattatttgtttatttcatcagtcctcatcgatcgtgtcttctgaaatgtatgattttggttatgaaataggagtttatttgttcatttcatcaatccatattaagtgaaggtatactttggttctacagtgtttttaaaaatttagggccccagtgttttgcacatgggcttctaattcctaggtggatcgttttgttgcttgttcctctataacataatcaactacgtagtcttcttttacaggttttaagtatgttcctcaataaaggtgactgttgaatacacctagttaccataaaataaaggtcaaaacacaattgtttcaatattattggattaaatgcataataggaaactcaaaaactagtgtgctcttactcttacgttaaatatgcatccaaatatcatgtacacttaaaaactgcaggcttgtaattgt

SEQ ID NO: 45048 - DNA, 2894 bp, Oryza sativa
cgtcctatcgtttggttcagaattgcttgtgaaactatccgtggaggccgtggggcacaagtgcagaagataaggggccccagttatgagctggaacgtgtgatcgttgcttgctacatctcaaacatggtttggatctgtccgtgcctagttgctgtcaaaatcccgggtgttgttgcatcggttcagagttacatttcacatgatcgctgggagggctcacatggccgtttcatcagtccgggcttgccatgcgaagcaatcacctgaactacatgtccctctctactgctgctatcacatgcccaagtgacagcgactgtctactatctcactaaacagtcaaatctttttgctcctgatgaaaatgaattgatcttagcaaccgtccgttcattccgatggccttttcattagaggtagttaagatggaactgtcagttttttttttacctggttttaccaccgtatatgagagagtcgtggctgtgttggcttgttatctcggtggtcagttgctcgaatatttgtgtcagtggtgaaagcaaccgactagaaaagacctgaacgacctgtatgcgttgggtgacactggagatggataagcaagttccttggcatgtcaattcaggcgaaaacggaaggccccaaagaaatggagctgtggagggtagctacttggtcgctttccttgatattatcattgtgtctgcgttggagataaagcaaatccttgagtatttatccggcccgaactgtgcaactagatataatagaaaaaaaggaagggtaaattttgcaaaactatagatatctcaaatcaaactattgtaaatttataaggcgttgtatgtatatcacaaagttatcatagatttttaccaaatttgttatgaaactatacatttataagatgaagtattgcaaaactatagtttcaatgattaaattatcttgaaattatagactttagagtttaaacccttagcattaatgttttgatttatttaccttggtactaatgttttgttggagcaacaaaagatatagttttgttacaaatttagtgtcaaatatgtattttgtgatactctgtcaagtgtatatataattttacaatagtttaaaattttataaaatttagttccatctattttttataaaatttactctactcaaaactgaaattgaagaatatggataaaaaaagaaagaaatttactctcatttgttttagtttttttcttaaaaaaacgctttttcctattagtacgcgcaataaatggaaatcaatcaagaataaatactcaacctcactaaattctccacatgtgtgtaatattcgtcggtatctctctaaagtgaaaacaataacatctttatgcgtaatagcatctaccttatttttttttcatggtagttagtgactagcaaattgaaaatcacacaggatatgaagaagttaaaaaaaaaaagttcaaataccccctaagcttgaaaacccaaattaacccaaaggaaaacaaaacgagtgaaaaagaataaaataggaaattactgcccatttccaccgctgactgtcctactaccctgaagcctcttccgatcacctccgccggatttgagcacgccggccggcgaggcccgcctcatcaccgccagggcggcggcgctcccctctctgccttctcgccgtcgaggtattgagaactatggcccctgcaacctacaatcctccggcatcagcaggtcagttttttttatcattcaagaatctctctcgctcccctaacaatggcgaacgtcaagtaagcaaaatgcatttctttttctccctctttttctctctttctttttttccatttgtttacatgctggtggccagtaattgcaattcaactctgccctcgacaaaatatgcaacactgacaaccgaattcatttcaccggacaaaggaaaataaatatctccattctgtagctcacatgcatgcttggcttcaaaaacagtttcagttcaagaaaacctgcttcacacaataaatcccttggctcctttcaagattgctgctagtgtgtgtgtgtggcaggttacccttttgtcatcttgagcagcagatgtcagagaagatttctgctgtttttattcagtcaacgatttgactcattaaaacagaccaatgcatgttaggatgatcatagcaaaagctctcttcttgtcctagttcttttggaaaagggaaatgacttgttgagtcatttctgcctttgctcaccatttatattcatgatgaatctctgcctcagcttccttcttgttttgtcctccttcagaatcatgacatttgacactttctgctttctagctatattatgaattgtcatttctttcacacaaaagaacaaggaaaaaagaagaagaagatatggtatgcctccactcaaaatgaaaaaggctagaaattaggaaacaatgagcttgcgtccttcttcctggatataaattgtttcatatgacatgatttgtctgctgagtgctgacctgaacttcgcggcattatctagtactacaagcttttggacctaaccacttatcagaaaattccagagtccatttatgtcttgatcagttctacttcaataactatatggtatgtgcaaactttttctcttttttgacctttttctgctgacctgtttttgtctcatgggaccaaaccaaactgaatattcagaatgttttcattctagttttcaaaaaagagctgaattttgactgcgcctacattcgttgatcggcgatcgctgtcccgacaccgttttatttcttgtctttctcacttgcactgcacttgaattaatcctccacaggggctggctgacaaacacagatc

SEQ ID NO: 45049 - DNA, 859 bp, Oryza sativa
ctggctagtcatttggagcagcagggtttaggaaattatgggtctctaaacctctggagattggccaattgtcagtgccatctagctcatattgtactgtacatctctttcttgaatctgtaccggtgacagaacaatggcatcatcagtatattatcctaccaaaccacagttttccttggacagatttgcagctaaggttgctgtcaccaccctacattctcagttagaaacggagccaagcatccaagaacacctacaacttggcgacaacgacgaattcgattttctgtgaagcctgatcagtggcttgtcctcatgttcatcaaaaaataaataaatccaagcaagcaattatcatcaaggtgttatgcatttcataatatcctcctcctcctcctatcatcttcttatgtccatctcttgtactaacaaactaaccattcgtcctgccaattttgttgtgttcttgtttgccttgtggatcagaagatccagttttcaggggtccctgttgctgaatccttagcttttcttcttctccatgttggtgtgttttcagggtctccagattcaaaaactgcgactgcaagatggggaggagcatgtccttgtcctgatgcagactttgcttatattctggctcataattcgcgccttgaccgcattttttaaaaaaaatcatacatgaatagaaattcaagcatatcgatatcgatgtcgatatgggttggaaaaggaagaggggaaaagaaccaccatcttctgaagaaatttttggtaagtctgaatgaatgaaagaatgattgtgattgattggttgctaaatacacaattcttgcactcgtgtgatggcatg

SEQ ID NO: 45050 - DNA, 1979 bp, Oryza sativa
tcagctagccatgcatcacacttgccaccaccaccattgccttgctcttagctagggtcaggccatcactgcttttgctatactactctagtgcaaagatgccttttttgaaatgggtaaatctctctcatatttctcctctcctttttaaacatcttgtgtttatgatataatctcatgatcttggaagctaagcaagcaagtaaaagcagccatggcgaaggcatggatggatggatatgatacggtactgcaggcaatcagtcagggagtttgtaattttttgttcgtttggtaggaggagagaactgtataagctaagcacggatcaggtgaaggaaaaactaaagctatgtgacaatcaataataatacatgcacccatcatctcttttttgtatactctagtaatatatttcttcttatttttcaattgcacttcactagaaaacttacaattatatatcaccctctcagttgcattccaataatgtgatgtgatgcattcctttttgggagtaatatatgaactctatatagggatataggagtatgatgaatgaactgatcagtcattttctatatagatttttaagaaaatattagcttggagtagctaggaagatatcccatactaataattttgagatggatatgatgtgtggcctatggtgatatatatatgagtagtttattgtgtgatacacatgagtgtccgtgtactgtttgctgcaatcagtcgatgtactcgggagtgccgagtactgttcgcccgtgacaagtttttgtttggtaatggtcatgggcgggcattattccatgctggaaaggaaaaaaaaacaatgaaaaacttatatatatctgtgtgtggtgtgtagatgccttcttggaaactttattctagtttcaagataagacaatgtagttttttacctagacttcactagtgtgatgccactgtacctaatctaattttctggaactaaaaaaattgcaaatgtgtaagttgctactcctactagctagtttcttgatctcaccctcacgttgacagggtaaagaaaattgggtatatatatttaccttcaatctcctgaagttcgtgttatactcttatactcttctctcttttttttaacgaaaaccattataccatcatcgatctttctcttgtttgttttcttctaaaaggttttatgttagcaactcactattatcataataagtttcacgttggtttctagctgatgtgtttagttaatcctatgtatctataaggttcattctcactaaatcctatgtttcaggtaattcttaattctcttttctacaatgaagtcacatcatttcaattatttctctttagattaatcatcaagggtgtaaagttcatcgcttcttccaaaaaccacaccatacaatccaatcatttataacatttggataattgatcaagatgcaaaatatataagcacatgaaagaaaatcgtataggtatatatgtaagtaagaaaattctaactcatatatactattttatcgcttaaattttctcgtgggaacgagcaggatacctatctagtttacttacgactgctccaatttatatagaagaatagcataattcatgtacttaaaatgatgtgctctttgtttgaaatcctccagagattatttttgcagcattatcatcgcaaaatatcctttttattttgaaaaatcctacttatcatgattcacagattttatcggagaaatcacaggaaacgagagaaaacactaaaacaaatatgccggtatatatttaaccattttcttttgatcttcttgcctcttcattgcttacaaaagttccatatatatagcttgatatatatatatatatatatatatatatatatatatatatatatatatatatatatatatatatatatatatgcctatggccctctgtctttgctgctatagtattttctt

SEQ ID NO: 45051 - DNA, 1647 bp, Oryza sativa
tattggtaaattaatatgataagctcctaatgaatctcttggggcttataataataagcatgtactccctccgtcctaaaatataagtgattttagatggatttaatacatcttagtatgataaatctggacaagctccaggatatgtcacatccatttaaaatcccttatattttaggatggaggagtaactgtcaccctattttttaaaatatttaatttatccctagaccacttgtttaagctaatattatgtttattttttaaaatatttaatttatctgtgtaatcagctaggttatctgtaaaaataatctatgcttagatctcctcatcctagaaagcattgctactatggcgcatgtatcgtaagcgaaattaatcttaaccccactttctactactatataaactctcttcgttttaaaatagttatccacatggggattcataatttatcccaaaatagttgttacaactactacttctctcatcaatcactttccacttaaatttctcctcattctactcacttttcttccaccattttcaaccataggcatttaatatggggtttttctttctcaaaccttaacctatgctagcctaaaacaacaactatttcatcaatccacgtatgatgtttgtcacattggacaatcctaaaaccggtagttaacatcaggacgggaagaagatgtgaggcgtggagaagaggacgagccaagctagtgatctcagcagccggcacggagaagacaagccaggtgatctcacacagcctgagacgattgctccctgcaggcggcagcgactgctttgtcactgaccgtttgcactcctcttccaagtgtgtgtgtgtgtgttttgaagggtgaaacaacatattctccgcagcagggatgcgacaaagaaccgcctgttaacctggccccgtttgctctctggccactttggcttgtaggatattatgatcttacttcctccgtctcaaaatgaagccatttatgaggttggcacgagtattaagaaagtaggtgagaatgattggagaaagtgtgcgattggttgaaaagagaaagtatgtgaagaagaatggttgtgattggttgagaggaggaggtaggtgaagaaatagcttcattttaggacaagacactgtgctagaaatagctatattttgggacggagggagtatatgagagcagtttaggtacaatgggggatgcatgcacctaaggaatgctatatggctttcgagtttgaagtgaacgaagaacatgaatattgtttccgaaagagtgcagcactacttaaaaaaagcttttccctagcggccatttcatatttttgctggcggctagtcactactacgaaaaccatttttcgtggcggccattttagatttttgctggcggaatttacagccgccacaaaacaaaggccagtgaagatcaaaatcttcgctagcggttattgaccgccagcaaaaatagatttttgctagcggtcatcttaagccaatcgccagcaaaaatctattttcactggcgttggcttaggacggccggctgagttatatcagccgccatcgaaaaaggatttggggaacaaaaaaaaccggtgcgcagctgcccagccgccagt

SEQ ID NO: 45052 - DNA, 2904 bp, Oryza sativa
tgcctgaaggttgtcgctgcactctgcaacggccaccgcacccgtcgccgctgctaccacaactgcaacccgctgctgccgccgccgaggtcatcgctgcactccgtcgcggttgccgaaccccgccgcaaccgcaacccaccaccactgtcaaggtcgtcgtccccatccagattcggcgagaacaaggctagatccgagccgacagcggtggcggcagctcgatctcaccggtagagaggggggagagctcaagatcgagcaccgtcacatggatctcgacaccgctgatctcgtcgccttgtgcagggagggagcccactacggccctcccgcggcctagcagcggtcatgtcgtcgtcgcggcggcggatccgaccttccccgtcatggtggcggtggctctagcctccctcgtcgacgtggcggtggatctggccacccccgtcatcacgactgccggattcggcctcgagctcatagcggagaggcggtggcggctatggcagccggcggtggtggaggagtgagagggagaaggagagaccgcgagggagaagggagaggcgaataaactgaggtgggggcggtaggtgggctaggtgcagtgggtttatatattcgcctcaatttttttttcagcggtcctctttacctaccgccagcgaaaatgcgattttctagcggacacttaagaagtccgcctcaaaaaatagagttgtttttttatggtggacctcttagcattcccaccaacgaaaatcggttttcgctagcggtccgtaacccccaccccttgttatatttttgctggcggtttttgcgtatggccgctagcgaaaattatagggtaacaccatgaaaaattgtttttctagtagtgtatgctgtgcgttcggctcttgcagctgggaactaatccctgaggcatgtaaaacggagcaactcattagcgcctgattaattaactattattttttagagtaaatttcagaaaactacaacaatagcgacatgtttcagtttgctacaacattagcgacatgtttcagtttgctacaataataacgtggattatcacaaaactgtaacttttacgttatatgctgctacagtacatataggtgacaactgtagcagcatataacataaaagttgcagttttgtgataatttaccatgatattgttgtagcaaactgaaacatgttgctaatgttgcagcaaactgataattttgtcactttagttatagttttctgaaatttaatctatttttttaagaaaagatagattaatatgcttttttaaacattttttatagatttttttaaataccatttagtagtttcgaaagtgtgcgcgtgaaaaacgagagaggtgagattagaaaagtatagagaagaacacaaccaaatacagagaatggaaaagcttaacacatgctcatcattcacatagtataaaaattgaccaactcctatgttacacatactattattatgtgtaaattgtacttttgcctatcttttattatcaaaatacgtttcaatttagaccgctcttaatccaatattttactttgaaccagctatcttttcatttgttgcactttgtaccacctccaccgtgttatctagacatgtttgtgttctcctctagcgaaggtattgcatgctgcagatgggtgggggagttcgccagtgtgtcagagccgatatgccacttgaggtcattagggtgttagagaaatcgtatggggtgatctaaaactctaaatcataagaaagataaagttagctagttcaaattaaaaatattggattaagatgggtccaaagtgaaaccatatcaataaaaaggtggcccggagttcaattcaatctattgttattgacctaatgacctccctatgcacctagctgcatactccctccgtactcgtaaaggaaatcgtttagcacagcgacacggtctccaaaacataattttaacttcttgtttctataaaaatatttattgaaaagtgatatatgtatatttttatgaaagtatttttcaagacaaatctattcatataatttttacattttcaaactcaataaattaagagttattcatgatttatatttccaaggtttgacttcaaaattgttctaaacgactttctttacgagtgcggaggaagtactcctatatggtttcaaatattttcactggctactatttatattttagctttgactgttatccttttttgaaaagaatattgatgtgtacttaaaaagtagggtgccatattagcaatgtgtgttgtcccgtaaatacaaccatacaacttttattaataataaattaacatattacaaactgttaatggtcatgttaaaaattgatggtcagacaatggttacaagtaaataagaagattggactgacttgggtgcacacaatttcatttggtaaatggtgatgaatgccgaagctatatatagtcttctttgatgaaaaatgctcactccgtttcaaaaaatgtataaagttattgactttcgcataacgtttgaccatttattttattaaaaatttagtataaatacgtaaaagtataagtttaaggttatattttatttgatgataaaataagtcataatgaaataaatgatatttatataaattatttagtaagatgaatggctaaacattgtgtgaaaagctaacaacatcatacattttaggcaaaatttgctacaggacacccaaaaattgtgtaattagctgtgagacaccggaaaatcatgacactgctcatgaacactacgaaagttgtgaaattggctgtaggacaccagagccaatattttttaatttccgagacaaaagaggtcagagaaattactaaaaga

SEQ ID NO: 45053 - DNA, 1272 bp, Oryza sativa
aaaatattggtcaaagttactttttatatagaccgtgctcttgttaaaaaacgagtattattaacccagatagagtagctctatcgatccaaatatccaattgggtcaacgtacgacagaacgtcaaaacaaaaaggatcaactgatgtatacttaaccttctccaattaatagggacgatcgtgcacgagctatattaactcattgttccttatccacagtgcttatactgttgtttcgcgaaaacaaagaccttcacacaggcgtcctaattaatgtatatgcatgttaggccgtgacaaagacatgacaacgagcatatatatagcgtaatgcatgctctctgcagcaaattaaaatatattggacctagctagcttgacattccaaaccttagattaagggtgtatttagttaacgctaaaattggaactttcattgaaattggaacgatatgatggaaagttttaatgtgatgaaaaattaaaagtttgaagaaaaagttggggactaaacccgccctaaaggtaaaactttttccaataattaagatatattgctctgaccgcaccacttcgaggacatgataattaaattctggaaaaaaaaaagcttggtgccaatgatttttataaataagtaatattaataaaacgtcttcggtctgggttcgagcctcctcttctcgagaatctactagggttcaaatcttatatacgtacccatcaatattaagcattacgctagtatgcctttaataggctagtatgcttttaataggatttgcgaggcggaggattaatttgctattggtcttcttctctttaagagtggatgcccttttaataggatttcgtgatttggccttgtctattcgcaatctaattacccctataacatatctgaaacactgagctagcatatcttaaaattgacaaagtcacatgtgactgagccaacatatcttaatattaagaaagtcaccataaatgtctcgttgccaaggatacattggctacaatttaaatgatgattaaccataaatatgagcactatgccaattctaagacttgaacaggtcacaacaagaaacatatctaatcaattaactacactcactttgtatttttgccatatctaattttatacgtctagctctcatgataaaatgttataatctctttcattattttcctgttcatagacaaaagaaaaaaaaatacttatttattaattgagttccgcagagcattttggttgacaattttagtt

SEQ ID NO: 45054 - DNA, 5192 bp, Oryza sativa
ttttttttttccattttattttcttttttttatatgtaggtatataaagagactagaacttttcttttcttttttttatctgtaggtatataaagagactagaaaggagatcaaacggtccacgtcgattcaatcgacgaaacttcgtttggactctgattactgcaaacttatagtctacttcgtactactcaacgagctatacgcatccacgtttccttattgcctattccaacaatggtttaaaggttgaacttttgcacacttgttttaatatttcctgaaatacaataattcaaaactcttttgcgcatttgttttaatatttcctgaaatacactaattcaaaactcggggtattacgattcaatcaacggaactttgtttggactctgattactgcaaacttatagtgtacttcgcactactcgacgagctatacgcatccacatttcctcattgcctattccaacaatggtttaaaagttgaacttttgcgcatttgttttaatatttcctgaaatacactaattcaaaactcggggtattacaggaacaagccccctcttagcgcacgtatgtacatacagtgccggcactatatccatacgcaactgcgagggtcggctataatagcgtttgtaacagccctccctccagtcggcactatatccatacgcaactgcgagggaaataaaaaactcggctataatagcgtttgtaacagccctccctctagaaattcaaaactcgggctataatagcgtttgtaacagccctccctccagtcggcactatatccatacgcaactgcgagggaaataaaaaactcggctataatagcgtttgtaacagccctccctctagaaattcaaaactcggggtattacaggaacaagccccctcttagtgcacatctgtacacacagtgccgacactatatccatacgtgcaactgcataacagccctccctccagaacccggcactatatccatacgtgcaactgcataacagccctccctccagaaccgcgtagccagcccagggctggctcacttacgcataccaccccacttacatttttatcctcgtttcatataaaacggttaacccgggagtgatacggttggaaggaaaataccttataaattggtttcaccctttctaaagtagcaaggtggtactaaatatgcacatacaactctcacgggccacacatgtctcatcctaattgggccaggatgtcacaaccatatccaagcatatatgatatggttgttaagagaaatattatttggaaaaaagaagagcatattcaccattgtcacttcctatcataccaaaaatttggtgttatcaaatttcagtacggtgacaacctaaacatgatcttacccaattgcagaactttcctctaataaaaacgctattaaattttaggatgcatcaaactaaatatatctaactttaccaaaatttggcaacaccaaaaattaacattgttaaaatttggtaaggttaatttgggaacaaagcgaataagcctgaaatgttatttgccatttggaaccataatctcgtctcaactcatatatattaattgtttgatatatataaccctttgttatttgtttggcattatatatagatctgcacaagaaaacaaaaaaaaaacataaggatatatccacagaaaatatccagaattaaacaaaagaaaagggacataatgggtacataataattaagcagaaggttctccaacatccccactataatctgttttccactgatgagaaatgtctgtcgtgtgtcctatacgtacatatcaaagctacctaccaaccactgttactatagctagccagtactatatctactcccataattaagcatagaggccccatttgtagcgatgtgatttagcgatcctaccaatatcatgcgtatatatgcacacgtgccaattagctgcaaattggacaattactactcccttatctgtttccaaatatatatatatttgactattcctattattgaaaaaatacaaatgtaaaacatatatcgtatataaaatacctttaataataataatgtcatagtaaaataaataacatttacatagtgttttcaataaaaataaatggtcaaacagtatgtttgaaagttaaacaagcttatatgtatttgaaaactgaggtagtagtatcactactatagaattggtcatcttgatgctgataatgaagatgttttgggttgattttctacatgtatgatgattcactacttcaacttgtttgaggtcagtctaatatctgacagggtggtgcactcatatgtgaagtgtgctaattactactcgtcacaattgtctatcatcattaatgggtgttgacttgtcataggaatgaggtattctcatcggtgaccattgatctgttatgtactccctcagtctaaaaaaagacaaaccctggtttccgtgtccaacatttgacaatccgtcttatttgaaaaatttatgaaaaaaattaaaaagacaagtcacgcataaaatattaatcatattttatcatctaacaataataaaaatatgaattataaaaaaatcatataagacggacagtcaaaattggacacggaaacccagggtttgcttttttttttgagacggagggagtaaccaatagccatcataaatgtgggttatgactcgttatcatgaatgctaattccctttagtgtatatagaagaggtacacatgtatgcgcacttaaagcatggcttgcatctacgtttacataagagcattcccaatagctcatctgtcacacacgcaatcttgaaaatagcataccgaaggagaaaaatgggctctagtagatacgtcatcgctacttccaaatttgacgtttctctctccacaccatcttgtaaccgcctaaaaacagatcaaacttccgcccccatccgaatcaatggactcatccactgccgtcaacactatcccgtgtaacctcgactcctcatttttcatggcgatgaccaatgaggacaaacctagtcggccactccgccacccgcgctacccatagtgatgcagactgtctcccgatataatacaattgttacagtagaggataccgatagagtgaccgtggatatcacggtagctttctaagaaacgtggtgaggagcgccggcctagggacagtagtgggggtgggatggaatggggaggggaagggaggagagctagccagccgcccagcggggatatggtacacacacgcaagcgtacgtgcacgcggtgactgcaggaacatgtccaggatattcccgggcgtgtcggcaacagaccatgtacagtatgtactgcacgcatgcttgtgcagttactaccggactggtggtaaatccttcgtcccgccaaattcctgctgtaaatgtactggcatattgcatatatatacgtaatatattcatatataggtgacttcgcacatattttgctggaagtgaatgtttttcactgtgcattttcaaagactatatgtccgagcaagaataatgtagcaaaactataattttttttctattaattatagtatgaaatgcccaaattaacgattcaagaaaaaaaaaagacccccacctattctactaataactatttccttcatcccaaaatataaatatttttagcatagtaaagtcaaaacatttttaattttgactattaatagaaaaaaaatcaatcatgtaaaattcatgttactagatttattattaaacaaactatcataatatgtaactctttttatttaaaacatcttacttttatatatattattagtcaaagtaacatttcggagaccatgtcagagtccaaaattgcttatattttgggacggagggagtagctagtaacatatataccactgatcaaacccatatatataaataaagatatctagcctataagtgtgatcgaggataacatattagattgttggataatgattacgtatatgttacccaggtaaatgcgtggtgggaggaggggattgagatcctcttccttcacagacaccatacctttgttactgacagataggttcagggttcatcgggtccatatataagtgataaagttaaatgtatttgaaggtaaaggagcctgatccgggaggaggggggcagaaggaggacgactttcgcttgcatgtgatctggacaacgcgctcctctgacatgcacgcagtatatagtagtcctgcgcgcagaacggctgaggtgtgtgttgatcagttcagtggagtacgtacgttgtgcacaagtcgcatgcacgagcaagcaaacgaacgtaaaacataatggtagtatggtactactactagctatagctgacagcgctgcatgcttcacacagatggagtcatatagatataagatgttgcacatgtatacactactggagatacaatctttgctgggttagctaaaaaccacattagtcccggttcctgtaaccggttgaaaagccaacgtcacttttataatctttagtcccggttagtgttatcaatcaggactaaagatcatttttagtcctacaggttcaaaaaacgtccagccccttattatctttagccctggttagtattggtattatcaaccaggattaaaattcaatgcttcatatataatccctcgcatttatcctctccttctggatcacaaacatttcatcctcattttttaacttcctcctctcttttctcctctctcgactctctctttcctctctcttatcctctccttttctttttcttgcagcagcagcagcctggaggagggggcagcctgctcaggcctacgtgcagcgggcggcggcctgtgcaggagccagccccggttgatttagttgttagattttgttgatttatctatgaatttgttgatttatgatgtcttttaatatgtaaatttgtgatatgaattatgaatgtggatgtggacaattttgtgatgtttatgtgaatgttgatgattttattgttgagtttggttagaaatcaatatataaaaaacaataaaaaaagactaaagatgacatcgtcagccacgtggcgctatcatctttagagataaccgggagtaagatatgcatctttatttct

SEQ ID NO: 45055 - DNA, 1488 bp, Oryza sativa
tcgtactgagctccagggccaatggaaaacattattgatcacacatgcataagcatatgcatgcatgctgccgcacacgtgggacgtactgtgcttggctagttgcactgttgtacatgcatgcatttgccggacggttgggacttgggactttgggaccaaccccaacccaatgcatgggatccggccggttcacctgcagtcccagctctagccagtgcgactgcaagttaagcaatcacactaggatgtccagtttaaatccaatgattaaatcattcgagatatcgttgaaaaaaaaaaggtttttactgtagctttaaatctaaaccctccatagaaaagatagatagccaagattagatcttgtgcaatcgttatcttgcggtccctagtggaactgtatttgatctcaatcctaacgtatgtagttacacatatcattgaaagatgaattaatgtcgatcgttttctttattacaacttttttatttcttaaatttggagtgcacgctacagaaaattatttgtggaggtgtcttacatatttgtctacaagcatatcctaagatgcacccgtatgttgctaacgcagagggacctttaggctaaatgaacacctgctgtaatatgttatgcgaggcagatgatgaataaattcgtccaccgtgactagattatgaaaagtatgttgtatattgtattctcatgtatacgatcaaaacattaggttagcagatattataaatataggatcatttccttttcttcagtttgatagccacacgagggagcatggaggtgacttattgcaaatgtgaagccacggtggattgccatgtcaggggtcgtagccagtcagtcgtgctttagtttttagccctatgtaccatgatatattaagtcaagattacggctccaaatatatgattcacaagattatggatctaagtggtaccacgacacaattaaaagagtactagctactctaggtttacactttattttataatacacttgtgaatagagcgagagagaaagagaggtactccctccgtttcacgatgtagttcattttagcatttcccacatttatattgatgttaatgaatctataccacatttatattgattacaccgtgcatcaacagctgggccacaaagctgagccaaaattacaccgtgcatctagacatatagacataatataaatgtggtatagattcattaacatcaatataaatgtgagaaatactaaaatgaattacattgtgaaacggaggaagtatgttgggaggggggcatattaattctctcgaaaagaagagaagggatattaattggttgagtcctgttgaagacactatacatgaacaatagtatcagctgaccctaaaagtcggatatactagtaaaatgccttcagaaagccactaaaatacgtacggctatgtgtcagcattgacagtgctgcatgcacacacactt

SEQ ID NO: 45056 - DNA, 3828 bp, Oryza sativa
aatatggacagtgctagaaagtcttataacctgaaacgggggtagtaattagttccaaaacataaaactgataccaaaatacataagaaatagtgcacaatgatgtaagaaaagagagtaaattatgatttaggggatatatattcttgctaaagttttactttttcctccctccattttacaatgtaagtcattctagcattttccacattcatattgatgttaatgaatctagacatatttacatcaatatgaatgtggaaaatgatagaatgacttacattgtgaaacgtatatgtctagattcattaacattaatatgaatgtggaaaatgctagaatgacttacattgtgaaacggaggaagtaccactcttgaaatgttttttctttcactttggactagctacataaatattttttcacttgggactagtagctacgtattgttgccagtgttgcactttgtaccttatgtccaagtggcccatatataagtgagacacggacaccagagatggttagtctcattgatatattggtcatcggtttaaagtttaactttttgttgaaaatacctagtccaaagtaaaatagatacttttaaggtggtttgaagtgaaactttaatatggcaaagtgtaatttaattttaaagaagatgtgctaaaaaactgttgacatttttttcccaaaacattcagtttgtggactgttagatcgcgtggagattcatgcaagggaatgaacaattctttttacatcgccatgggtggaactaccactatgacatgctgtggcgcatgccatagctaaccttcttcgcgaatacccccacccccaacttcccagaggtgtttttttatcatcgccaggagcggacctaccactttggcatgctgtggcgcatgcgatagctaaccttcttcgcgaatacccccacccccagcttcccagatgaaccatcgcttcaatgaggtatttcgtgactgcaatgtgggcatttttacgttttttctttgattggaatgaagggggtgttcagattccggggtgtaaacttttggcgtgtcatatcaggtgttatatagggtgtcgcatgggatgctcaggtattaataaaaaaactaattacagaatccatcagtaaaccacgagacgaatttattaagcctaattaatccgtcattagcaaatatttaccgtagcaccacattgttaaatcatggagcaattaggcttaaaagattcatctcgcaaattagacgcaatctgtgcaattagttatttttttagtctatatttaatacatcgtgcaggtgttcaaacgttcgatgtgacagggtgaaaaattttggtgtgggatctaaatagggccaaaatgctttgaatcaactcgtttgtcttcgccatagctatatttttatcctgggtccgccactatacatcgctatgccggctggagagtgagagcccgcaacctcttgggtgaacgaaaattgcgttagccagcaaccaggtttttgttgatcttatagtagttacatacaaattataagtatgcaattacattctaactatgcatttaaagtttttcgacaaaaaaatgtcggatgtcatataagtactccaaaagaattcacagctacaagctacatagaaaacgcatctacacacaccacacctactgaccaacacaaacacgcacgagtacgtgcctttcaactgagtttaaagctttcacaagcaacccaataatggtaataatacaaaggttgctttaacttaatcccttgtgttagtttggtgtctccagaggaatgctctaattcgatttatgcaaaaaagaacccaacacttcgagcaagaacacctggaatcggagcatgtcatatatgccatcgatcaggaccttagtactacatggcacgacacgatggacatgacatgacacgacacgttgggtagactgtcccgaataatgcatttccatgtgatcgacgcaactacaataattccatcattccacgtccacgacgcactcatgcgccgaggaaaactgtcggtcggagcgccatcagcaatccagtcattatgtttcaacaaggaaggcataatttagctcacacttcagaaaaaaagaaagaagaaaggcacaattagctcactggtctggtcatgtccattctactatgattgctctcctagactccatccattgcattttacaaaactgatgagataatacacaacatatgtcaggtcaggttagcggctcaccctaaataaaggcaggcaagttggcatgtatgtaacctaatatcgctggcattagccagcttggtgctccacctgagtacctgatagaaagaactctagggtaccaaacagctgaagttctctttttgtgtggttagcagctcctagatcattcagtctgatggtgaaagcatcttggatcgatccgcaaaccatacttgcaacaccaacaatctgtggacagaatatttgaatgaatactagctgcaaaacaattttcggtatggtgtgcatcagatgcatgcaagtcacctgcagacacctcagcggaattcatcatgaaaatagtcttcgtcgtcgctaaggaagacgctgccataaaatgcatacgggttctcaatcatctcatccaaagttagtcttccatcatgatctttgtcagcctgcaatttttggattagccaattgaacatgtcatcctcggggaacaagagacacatcatgcatcagaggaaagcacataatacattgagatttttcacaggcaaacttttggacaaccttgtgcaaacaggaaccacgacagattatcgagtttttttttaactttttaatatatttgacaattgaactctaccgaaacattatttacatatctaaacctttagcttcttcattctcattagtgtggcagcacaatgctgaagcatgggttaaaaaccttggtgtggcaaagatttggtcatgccgctcatagagtcatactgatgtggtaaatcagggttgatatggcatgaaaagagtcggtacagtaccttatatatctccactattcatggagtagcaacatttgccctccacgtgtgacaaaaggtgtatttttcaaaataggttgtttttgaaattttaaataagaaggctcaaaataaaaaaaaatctcagattatctgtgattttttctatgcataaaaaactagatttattgaattctggatgatactataaaatgaaaagcaaatgatttgcggtggacgggcaacttatacacctatttaatagggtattcttatgtcccactatactgagattagatagttacagcctgtattaggttttgacaatatcaaatcaggacatgtcaaacctattaaagactaaaagttcatctactgctatgttcaggaaaactatagaaagctgtagacatgcatgacaaagggaaaatagatttcaagatatcaaagaacaatagaaaaaatgtagaaattccaggaaaacaatgagaatcaaacctctgaaatagcatgggcagcttgttgtctagcataataacgttctgaaagatggagcttatcaagaacaggttctagttcgtgctctgaaataaacctacataggcaaagagtttatcttaaaaatataaaatgaaaatacttcagtaaataattatatcagaggaagtcattaattaaagctccacttccatacccatcactgtctttgtcaagtttggaaaaccgctccttagctactgtattgttcccaatatgggaaatatctgcgttctcg

SEQ ID NO: 45057 - DNA, 1044 bp, Oryza sativa
ggtaaggatctacagggctaggcctcctggacgagctccttcgcagttgagccaacaagctcatgtattgcagcagaagttggtggtcggaacgaggggaataaaaggctcctacgtgcactgtgggtggggacgtggttgtggacggcaagcggcatgccggagggagcataaagcgagtgtaggagatattgcgcgcagagatgggggacatgatcctatccctaagattcatgtatagataatgactctatgctccactgtgcaaaatatggaagaataaatctaatatgcatatgtgttgccccgttaatgccgttgtcgagcatggtctggtgttgaggaacaagtggcatctacgactatggtgtaggtgcgcaccaggcttcgttggcctggaatctacggctgagccatgagaaggggaacaagctcctcgctggccgtacaatatcgtgtgtcatggatgtctccactatatgcatccattacagccacagcacactaaatatggagatccgtcatagcttttctgacgccaatgcatgtgccctatctcctgagtctgtttctcaatcgtgcgtcacagttctctcgtgtcttcatctatactaccgacgtctaaaagataatagtgatggtgctggtggttagcaagaccattgtgtaggtataaattgtaagtgtttggtcagcctttgtatatattttgtatatactatgcagtctttacttttactctgacaattctttaattttctattgatttgcctcttgttatcttgattaaaaaatcaaaaaaatttatgtttttattttaatttaaaacgagatagctagacaacgcaatttattgacaagtacatattttataattacaagcaaatacacttgtgtattacaacacgtgaagaaaattttcacgattaataaaaactctgtcaatttaaacaacaaaccaaaacaagacaaacaaaacaatagcaaacaaagtcaaaaatcatatataacattgaacccggttatactcgatgcatgcatcat

SEQ ID NO: 45058 - DNA, 1518 bp, Oryza sativa
ctcttgcgggcacgtatcactgttgccaccgcaaacgctaaaacaaaaatgttcgatttttagtctattagattgactttgagattcgtgttcatggaacataaaaaataaaaaaaaagctacgcacgatacaagaacgattttgctatatctcactcgaaagattttttcttatctctcactcgattttctcactcaaatttacagtgcattttattgtaagttacagtgtaatttatgaaacttaccctgtaacttttgtaagttacactgtaatttttgaatcttcgcatgtaaattttaaattttgtattggatttagtctttttcttgaggatatggtaatttagtgtccataatgtgtttcttaattgctttttgctttttattatatctatcggattttaatccaaagattaaaaatctgtgtgatacgatcataaaaatctttcgaaagatgtataggtactcccatacaagaatcgaccccgggaccttcgatctgggcccaactacttaaagaaagtttatttgctcagttgggataaaattagtttttctctctcaataattttaagcatctttctattttctattttcagaaatagcattagtaccattttaattatttattactgcttaataatttaattccaactaaattgaattaactaaaaatttgatttttctcatgatatggatttatttttcgactaaaaatataattatttatttgtcatgatataaatttagactaaaattaaataatattaatatgaaaatttctaaactataagagtgctcatttttttattactttactaagttaataacattaattttttccgttgcaacgcactattgaataataatttattatgagctactatatttctctctatcatttgagactttttttaacgagcaaaagtaccaaagcagtgtgaaaataacttcgcttaaaaacaaatatttttagttcaatacaccgtagcaaagcacgggcattttgctagtaatactaagatcctttcaacgcgtattgtctccttagcatcaataatactagaggctggggcgcgccaatggcgcgccgcctgtagacaggtcgatggaaagatgcgatgcacacgttctcttaactaagaaaagctaaaaagcatatggtaaaaagaaacaacaaatagtaccatagtagctgtagtataacaagccagctgtttgtacataaagtggttaattgttcactcagcttatggataacaaaaggagctgaggacaatgataagcagttataggtcacgtgcttacagagcaagtgaagttagatagaccgcaagcaaaggataatagagaattatagtagttgttccagtgtagataatagcagcgactactgaagatgcaggtaactttcacagagcatctatggtgagcgtgaggtgacttgtcctaaaaagtggaagatgcagattgtgtaagttgatgctgttggctgctgcaaagctaaccaccctg

SEQ ID NO: 45059 - DNA, 716 bp, Oryza sativa
caggttatgcattcaaaatcatgtatggctaatgcacaagatactggagatatagaatataggattattatgctcaaaggagaggaataataacttgccttgctccaacgcaaataaatccgagataggcaacctgattatccgatccttgaaataccacaggttgccatccaaaatataacagactctacgtagaagagaaagaaccaaattcaataaaagtcacaaaataataagaaagcgataaagggcgagaaaggctgggtttggggtataaatatctcctttaaaaggtatagggattattggctaatatttctgggttctaaagggttggaggctaagatagaaaggggatcaagcaacaaatgtcacttatatttcatgtgtgggtcttggttgttcggagagtaagagatatgactggttaagcgagtatgtagctaatattggttggtggcaggtttaggtagtataatatctagggtttggttatatttaggccgattggggataggacagcatattggctaggctctatattttatgtataggttctaggtagttagagagtaggtgactgagagtagggtggataggcgatactggtgggtgtggaatttggatgacaactgggatttaactagcaaggtgtcagctagggtttggttgtgtgctagtcgatgctagtgttgaacagcataacgactagattt

SEQ ID NO: 45060 - DNA, 1133 bp, Oryza sativa
ggagggctggccttctatttataggcctcagacgtcggttgtgaaggtcggttgtagaggagaagatggagttggtcttggtggcggcgacgtggagaaggaaggcgacggcgccggctgtggcttgtgattggttggagatgtcggtttgctccagaggctgacgtcggcggcgtgaggtggcagatgacgtcggcggcgatgccttagcggcgacgacaggacgttggcggcgattgcttggcgtcgaaggcaatatggcggcggcggtagctgagttgtgcacggcggcagtagcgggcgcatggcggcgcctggaagcgcccacggaggaggaaggggcggctcggctgggctgggccgaagaggaagatgggccaaaaggaagagataaagggattttagcccaattaaatttagaaatcaattctaaattttgtaggttatttgtatgatagaaattggatgagattagtatttggaaggaatctgaatagggaattttgaaaggaaattatatttggatataatttccaaaagagatattttctagtttgagtgcaatattttgagagatagaatataacggaatttatttgatgcactcaaatgagagggagaggaaataaatggaggaagatagataggatttttagcctcaaaatatatggcatgggtttcaaagaattgtctgaggctaataggatatttggatagaatttgaatttaaagaagatttggatgacaaggatataatatattatcttagcacaagagcaattattcacaatgtttgtaataatattattcttgtgccgagaaggaaatcaagccacagaaattagatcaccggctagatcaaaaggaagaatttggatcaagaatcaaaggatatgtttaaggtcaaaggatgggctaacaaataatcccgataaaattagaattactttggtttaggttcaatggcaaaattgggaaggtttcttggatcataatccataaaaaatagtaagggttttgaaactaaatttgaataaaagaattttagtcgaaggaaggttttaaattaaaaccaaatcaagaaatacctcatttaaccaatatatttttaaatgaaaaacacaaaagaaatt

SEQ ID NO: 45061 - DNA, 589 bp, Oryza sativa
atagttattctagaatcaggttgaatttgataatgacgacgtataatcaactcaaatatggatgacgtactaaaattctggtggaaacatcttcaatttttttaatagtagagatagagatatcaaaagacatctcttattagcatgatgggagtcattgatctatatggaaactaatactatctttttttaagatgaagaagctaatatttttttcaacaacaacatactccctccgtttcacaatgtaagtcactctaacatttctcacattcatattgatgttaatgaatctagacagtctagattcattaacatcaatatgattgtgggaaatgctagaataacttacattgctagaatggcttacattgtgaaacggaggaagtaattgtttttgctgttttgaataacccgtagcaacgcgcaggtatttggctagttatgagataaggaaaggatgagaacttgagaaggggttaggagaaagaacatagtggattagaggtattctaaccatctagattgtcacatgatggaactgctgccatatgagtaccacataggatcaatattgtcttaagatagg

SEQ ID NO: 45062 - DNA, 601 bp, Oryza sativa
caggcggggggagcaaaattgggcgctccccccggccccgctcccagcgcgcggccgtgcgcctgcatgccgctggcccaccacagtgtctggcccaccacagttgtcgggtcccaaaactaatgatttggaaaccgacatattaaaactgtatcaagccttggatcagtagattgatacaggtttaacaatttggatcctcattgcatacatttaaacatgactccgaaggatatgttattacaaaatatttatgggtgtttacaaatttgtggctaattaatacaacagaagctatagaatgactcaactctactattttgctatagacttaaaccatttatctagtctatacttgaggattaagttagaatggaactaacttatatgattgaactcccagcttcggtaagaacatcaattgactctgaaaaagggggttgaagcaagggtgagtacaacgtactcagcaagctattatattcaataatgaatgcatgaaatggtaatatctgagtagatctaggtttacttgcagaaatcaaagaatatagaggaataaagcctagaatgttttaaatgcaacaatatttaataaagt

SEQ ID NO: 45063 - DNA, 690 bp, Oryza sativa
tgttggcggctacactcactactagaaaaatgatttttcatggcgttggtctatgattttcgctggcagaaaaatgccaaaaccgccagcaaaattgtaacgagggggggtaaggggcaacgaccaccagcgaaaatagatctttgctggcggccgcgttataccagtcgccagcgaagatatgtctattttcgctagcggtcacttatgtgcaccgctagcgaagatggataattttcgctggcgattgtgttatacagaccgatagggataatacaattattttttctggcggccaacttaagcaaccgccagcgaaaggtagatgaaccaccatcgatctattaatatgaccacacggcccaccgccagtccaccacctacccgccccctctctccagctcccctccctcccttctctccctcgcgtctctcctccctctcttctccaccgccgtcggctgctctcctctactctatcctcctcccaccccacagtcggcggcggcgttttcggcgtggcgacgacgacaacgcgaggcaagcgcgcggcggtgacggtaggcgggcgggcgacggcagcgagaggcggcgtggcgagctcaggcgcggcggtggcagcggctctctggtgcgggcgcggcggcgctcgggaccgacggcggctcgcggggtggccgggtctgccgc

SEQ ID NO: 45064 - DNA, 548 bp, Oryza sativa
gttcaagaaatgttatcctcacgtcgcattattttatcatttccggtggaaactgagagagaaacattggttaaagacaagtttgctcatgaacccacttgtcaatatcacatatcctctctttctctcttcctcttcttcctcatgttgttgccttctctctcttatctctctcttcctcttcctcttccccttcagtcaggagcgaggcatcgccgatgagcagcgatgggggcagaggggattgcggcaatgagcgacgatggttaagggagcgaagggagccgacaaccccgtcctcacctcctccatcgccacgccctccactcatcttcttccgcgtcactggatcacgcacccgcttgctggcttcgtcgccaagaactgcaagcgcatgggggaaggtgtgtcccagctgtcttcgtgctcctcttccacgaacgcctgcagccgccggaggaagggagtgaatgggacttcttcctttgtccgttggcctcaccacgtctcccaccagctcatcggcctctccgccattagcatcctct

SEQ ID NO: 45065 - DNA, 820 bp, Oryza sativa
caccgcggtgttttgtcgctctccaactagggatccccccattttctactttgtgttatacaaggatgtctagttcctttggtgtacttaaatacttgcctatttgttactggagaaaagatgatgtgctcatggcaatctcccaagtcccaatcattggtgctgcaaatccttcttctccattttattccactcttttctttatccagaagactgattggaaaaaaacaacccatgctcaagcaagccaagcatgtccataaagcatttagcttagggtttcctattgatcaaattcgttaagaccctattgtatttgaaatttcctgtggagaaaacagtctcaagttgtgaattccttctggaatatttttaatagggtgtgttatgctgggttacctggaatatgtactgaatgctggaaagaggtatccaaaagaatgaaagagaattagtgcctgcttacgttagcagtcatgattactgcttaatgatatttcctacttagttgcttcttttatcatcacataagactagttagaaactgtcttatctatttgaactttgcctgcataagagatattatagcattaaaatgatttaatgggagcacttatggaacttgattaattgccctttcaggtatgtcccatctgtgctacaagggttggagtggacttgataggtcacttgacaatgcagcatggaagttactttaagatatccttttttcttctctataatgctggcaatgaacatatgcaattttacatttttacatcatattcagttgaagatacatggcattattggtacttgg

SEQ ID NO: 45066 - DNA, 948 bp, Oryza sativa
tgtcacgctcttttttttttcttttttcttccctttttcccctcttaatttctctcatgcaagacttgtgatccagaattttcgtactgctgtcctaatcgtgtctgttaattaatcttctttaaatctgggggctgcaattttgcagtgtattattcgcacgtctaattatgcgatactgggttaaattaatcttcttaacggacagcgattaattgagttcaagaacgagtaaaagtgtaaatttacttgtatgttttactcatcgatacaaagacttcgaagaaatcattttaattatacttgcggtagaacatcctagtatagatatccgcgatgtccatagcacacgcactacggcactacaatcctaatagtgtaatccattttttagaaaattgaggtgctagcggccgcatccgttaatcatttcgactaaattatgtgcatgacattgttttttttttggggtgtgaacatgatcttaaaatacaattagaggcttataggaatctagagatattgatggttgtgacaaattttatttatttgaatagaaccccttctccctctcacaagtcacacctccacctccattatgaacactagaggactattagaggtagaggagcacatcacaataatagcaaaagatggagttgcaaactggaagatgataatgctagtgaaacaaactactcaggtactcgcagctattacaatttagaaaaaaaggttcatcgcttatcctctctaatgatgctttgtaattacaggtcaactcaacgtttctacactctacactgtaggggtacgtaaggcctgacgatgacttctcaggtttattttacggattaagtataatattccccctgtcccataatataagggattttgaagggatacgacacttcctagactatgaatctaaataggctctctgaccag

SEQ ID NO: 45067 - DNA, 1532 bp, Oryza sativa
  unsure (1)..(1532): unsure at all n locations
cttcctcggctggagccagcagttcagttgttcggctgccgccacccctgttgccaggctccctacgaaggccacgagcctggnttggnaaacnnaaatcatgnacttnatagtttggtttgcattatgcattaagagaagtgatatgttatgtattgtaggaggtagtgtgcatactagttccatttcattagaacagtaggctagtaatgcagctcgtgttgcacaaacagcacaaaagttagtaaaacaagattagcggcaagttagttaggagcatgcaggattagtggagcacgttgtggcgtggctcgcggtcagcccggaggagcgaatcttggcgtaagatgcgcagatcgttgtatgagtgagtggctcgtagtcgtgcgtgcgacccggccgggctgttagctatgtgcatgtacgggaggctatataagccgtgtaatcatcagttagttttagcagatcagcaatatcagagaagccagcaaagacgtgcgtcgccgacggaatctgttgtgtgtgtgtccacccaatttgctgctcgtgtgtgttctcccgtgagtttgttgcttacgtgagtttgtgattttcttgggccaaagctaacagagcccacgacagcgcctggggcgagggacgacagcacgcggaaggcctcctgtagcccgttgacctcgcgcctcctggtcatcgacgccgcccaaggcaccatgcccactggatttgtgcgtgacgaggccaagggaggcaaatctggtggcgtcgcgcccctccgccgcccggcggcacatgtcccgtgctccttcaccgctaggagtgcttcgagcaagaataggggtggaggagtgctcgcgacaagaagtctacgaaaaggcaccgacaccggcgagaggtggcaagaagtgctgtaacgcatgtctttcaggctctcatcactcacctctcgtctcgctagcaatgtcacaccaaatcctcaacacctcagcacacattcaccaccgcgccctgcatcggcgacttgccagtcacggccaagccttccaggatgttagcagggaaaatcaccattggcctcttcggcgacgaggtccccgccggtgcgtcccggctcctgtcgcttggtgtcggctagttaagatagtgtggggctacatgcaagcaggacggtgtggtgtcacacccggccatcccggcgctgaccgaccggctagcggcgaagatggacgccgcacgcgcgcgcaatgcgatggggacaggagtggcgtccacccaactcccacggcatatggtgacggccggcgaggcagcggcggctgaacaactgagcttctagcttccgtcgaggaagaagcgaccgaacgggagagggagagagagaggaggaagagagaagcgaggaaaaagaaaaaaaaacaaataagtgccacgtaggacatgtggggttattgttttttcttttcactgacatgcgggtcccctaagtgccacataggatgaaaccgctatcaaacagccgagggactcat

SEQ ID NO: 45068 - DNA, 1694 bp, Oryza sativa
cccttcagtcccctccccccgcaagcacaaggaactgcctactgtcatcgatctgtgtacgcatgtcttccactccacatgcttgatgagcccatgactcatcatcatgtcaattaataaccgctgccaccaccgctaacccgatcagcgtcttaattaactttctatgttttaaaatatagctatcactaaaaaaaaatatagctgccattttaagttcaaagttgaactatatattttaagatggagaaagcacatttataaatatttgacgtttagagtagggttcgatcaaagttttaaaatttaaaccgtcgaaagtttctcaaatgtgtagtttaaaaccaaatgaaattgtatatatatagatttacctcgaaaagtactaccgtgatattataaacctattgaatcttataattaaactgattctaatatgaaattgatagaagtgaattttaaagtttgaccaaaacttactgtaaacgtcaattattcattgccggagggtgtatttcaatttcttgttcattttcactagctatatatactatgtcgttgcttggtaatttggaagaaatcaaatcaataaaaatttcagtatagtccgttttagcgatatttcaataattcaattctgcatataacctaagccatacgtcacaattaccagaaccagacagaactcgtctaccatggtagaaaaacaagcacttaatttgatacgaatcattctcatgcgagctcaaagctcactggaagcaactgagacatccaaagtacatcaaggtccagcatagtcaacaaaactaggctggaaacttaagaacttaaccaattaatcgatgtccagtttaggtgtgatttgtgcacactccaacacaggaccaagtctaggaaactagtgaggggtagttggttcttgtgtaccaaacacctgcacagaatggccattacccatgtcatgcatggtttttatagcaattgggactagcttgcaatcatctcccagtgatccatatgcctctgcctgaatattaactcaccaaatggttcaagggatcacattttgcttcatattcagtagccatccagagttccccaagaagcaaggctgccatgcttctttaatccagtgctgcattttataagcagctttgttgccaattcagttgcataacctgcacatataaagagggactgcaggctaggtgtgctagaagcagaatctcaagctgtgagggagtagtaactgaattttgatcagttcattcagttgcatgtccttgcatgccatggcctgtctcaagctcagacatgtgtgcctcactgtggtgctcttctccattggtatctccagctgtagaggtaattaatctatcttagatccacttttaattaacatatgggatgcatggcttcttgtctttttgttcaaaagtaggactttggtcttgtttggaaatgatcagctttaaatttgaaaatgccatagttttaacgtttccagataggggtattgagggatttttcagcatatataatctgaaggaattttacgatccttgcattggaagtatcatcactccatctgtttggttctaagtaattaagtaactgtatttatctgaacaatgcagggcaaggaggagggggagcaggtggtggtggtgcagtagttccagggacacagg

SEQ ID NO: 45069 - DNA, 1897 bp, Oryza sativa
aaatagacacactattaactttttttgaaaacaaacaatgctcatagccaaaaaggtttattttttttataataagttatcagatgttcaattcgctttttccataattacagcgtggacaattgttctacaatttggtcagcttaggataaaattaacataatagtaatactgcattttttttcttatatttaacattattattacaaattatgcatggccggtgatctcctctgtctgtatattaccagtgtcagtgacttttgagtgtcgtacgttcgctcatcacccaactaaatgaagaaaaaaaacgtttaattatattaattaatcttgtggcaggtgatcaacgggtgcctgcaatcgatgggcatcaacgtcaccaccacaaccggtggcagcggcgccaccacgtcggctccggcggcggcgaacgggtcggcggcggcgaccatgtgcagcgcgccgtgcttcgggcagatgaccatgatgatggggtgcgtgaacggcatcttcggcaacttcgccggctacagcccgggcctcatgcagggagtccaggccgtcttccagatggcctgcggcaacgtcaatggccagggcggcgccggcgccgccgccggtggcggtggcggtggcagtgcaggagcctccggcggtagtggtggtggtggcggcggcgccggcggtgctactggtggtggcgctggatcggggaatgcttctcctaattcaggtaaaaatgttgggctagcagattaccagctaattagttactcttaactctccatttagaaatatattcgatgtttgataagatttgattaaatctttaaaattttgacctgtttaagacaagaaataaaaagagtaaaatcggcttgaaaatcactatcattactccatccgtcccaatatgtcacgtctggagatgtagcggcaatttaaaattccaatcaaatttgttataaatatcaaataatatttctgaaggaagggttatttgtttttactatgctttacactggtcatctaaacattggtgtttgatgaatatgtgcccatgtaggctcacacgtggcggtaaagcgtccgggttatccgaccagcggagcagctgggcccactgtcagcctcacgagggtgttttcctctctgctaatcgtctgggctggaacaaggctgatggcctgattgattgctgctgttcgagcagcttttgactggacacaggcaaacgttgctgaagagttcaaagatgtgttgtgttttctttttaatttcctgaatagtgaatagtactgtagcatattgatattgatttctacaacccacgcaccagtgctgatttcatgtaacaacaatctgtaatttgtacgtcttttgatttgatgaataataaatttgatgcgtgtttgtttccttcaccttaatatcgacggttgagaaccggttttcttgatcgtccattcaggtcgaaaagtcgaattgatcttgtatttttgtattgcaatatgatacacaactctccaatagtacaatgcaaaagaaaggagttgaccttgttaatcatatttaccacatctttttcctcaaaaaaaatagaacatatttatccacggatataaacatatttattaagtgccacataaaaataatacaaatataaatcattctcaaaaggaaaaagtacaccgaaggtattgttccccaaccacaaaaacagatatatgacattccttaacttataaaaccgttcaccacaggtcttttggtgggtttgaccccgattttatctgatgtggtagctgagtcagcgtaggatccacgtggaccctaccagtgaacacatcatcatgctctccttctttcttctgtctctctcttgctctctttt

SEQ ID NO: 45070 - DNA, 2388 bp, Oryza sativa
gcgattaaaaaataatttgttttaatttttttatatgtattcttactatttaaaagctaatactgaaaaaaaagtggtgaaaacatattaaaattaacttcaaattaagttaagtttcaaacttaaattttactttgacttattatttttttatccttttaagaccaccaacggggctcttgattttttttattacccatatatacgtgcagggacgtttgagattagggagcgtaagcagtgcggcgacgagtactaccactacagccaccacgagcagacgacggagcagcaatacggtgggtactatggcagcgaggagggcgaatacccaactacgactagtacgcttcctgcttcagactactgctacggcgccggcgccagcagcctaggccttcgctacagcctgctgcagatgctcatgctcttctccgcttctatggtgcttctgctgcttgtaatataaggaatacaatactccgatacagttcatcgttttatatctatactttttactattttttagaatatgtaaaaggattacgcacttttgtattaagaggtataaaatttatacaaacagcagcaaagaagagacgggaaagaaaggggaaaaggaaaatatatgaacttaagcctacttgctattacaatgtgacgactgaatgaccaaacaccctaactaggaaactttggcgataggggacaggcgagatgccaaagggtggcctcttgcaccatggccgtgacaaccttaggccagaaccgagaacggttgttgaacacacgactgttcctttccttccaaatagaccaagcaccaagagtcacaatcgtatcgaacccatgacgacgctccctcgaaactttgagccggcaagagtagtgccactcatggaaggaatcagcgccagaggggaaacactgagggaggccgaggctcgaaaggacagtccaccatagctggagggattcagggcacccaatcagaatgtgatcgattgtctcttccagttggtcgcagaagacaataggttgggttcggcagcccacgcttctccaatcggtcagtcgtccagcagcgtcggtgagcgaccagccataggaagtagcgatattaaatccaataaggcaatccagcgaaagagaaaaagaacgggaagaaaaacaaaaacatcaccgggaagccgccgccgacgtcgccgttggatccgccgcgggaagccaccgccaccagatccgcccgtaggaagccaccgacgctgacatcgctgccgttgctcatggtgggggagggcgctgtcgccgacagaaacaaagaggccgagagggagggacggccgtcgaggagagggagaggggaagggacggccgtcattgtcgtctctgctgctgtacctctctacggccgcaccgtgttggcaagacggaagggagagggagaggcgccgccagtagggaaaagagaggggaggggaggggagggggagaagcgccgccggtagggagtgggaatgatctagggttagggtttttttttttgcatggggggttttgattgatttggaaccgatctgagtcgtttatcaaaatgaacggctcagattgatcgagcgttgggccgacctccattgtcgaatcgcagcattgctgggccgcacgcgggccagcagtccaacacaaaacatggttagattttcggttacggcccacacggcaagtttgaggaggagtagggggatatcaattagactttagttgcttcctgggctgaacgcttgctcgcggcctgaggaaagcggaccggctcggttgcgggttgaaaaagaaaatgggctaaaaatggctcttataaaaaggaggatttttatttaaataaatattgaaattatgtttgtattatcaaaattagcaattaagatctggaaattctaagaaaatttcaaaaagtgtaagcaatatggagaatttaataaaaattaaatccaaccatataattttatttctcacacttattttacttgtaaattaacttaattatatacctacctacttagaaaatacccaaaaattctagaaaatatgtattttaattaattagataatgtaaatctttctcaatctttcctcaattttctcgtcttttcttcccgttgtaacacacggacactttttctagaatgtatgtcatagtttctaaaagaatattttaacaaaaaattggtaaacttttaaacttttcgctacaattttagtgcagtcatctgtccgccactaacttgatgcctgctgcaagacaacgatcaattatttttttaatgaactggcgagccgccaattttattgaacagagaaggagtaaaactgtacatacgcaaagcgcaa

SEQ ID NO: 45071 - DNA, 4387 bp, Oryza sativa
tcagcagtgaacctacctagcttggaatgccagaaatgagcagaaccaccaactgaaagacataataagatgaaacacgcgatcgattgatcgaagagaaccgaacaagctagacatgagaaaaaaaaaggaacataaattaaaacaatgaaattaagacaaaattaaaccaacagatatgcgggtcaccaaaatggagtatttgtgcctcctaaaagcacatagtaatgaataaagttattgaattattgttgtaaaaacaacagaaatgcgatggcagattggcatggataacgagcaaaactttgtcttcctatgtgtcctcctagattttgctttaggaaagatagacttgcaaatataagcatagacctgggaattcttttttttttccttgtgaagaaaatatacctataattatttttcacggaactaattaataccagtgaatcagaatctctcgtcgaggaattgcttgggagaaggaggattttaagcatatatggacacaataagatcgatcaaaattttagctcttggattcaaattttgtaagtgtacaagagaagagacaagagaggcggtgagatgttgaaacatgcagaaatcagggtatatttgaaatcagggtatatttattcgagtgcatgcataccatatacgagcccaaaatttatgccggttttgggccaaatacgggccttccgaacagacaaattatggtccttatatatttgcggtggatatttctataggtagaaaataaattatgttcttaattaataaatctatatactaatatatggttcgccatttttatatattaagatgccatgtcgagcacaatctaattaacatagtacagtataagttatcatatcctagctgccaacgaaatataatcaagatgttacctttcaaaattcaaacagaaaagaaggaaaatcgcagtatacatatagtagtacctctggtatcatataattaaccggaataaagtacttaccatacgacacagatacctttacataactggtgcaattaatacttttgccaaaaattaaaaaaagaaggttctgccttacaaaaacgccattagaattccataacacgatggggatcgatcgatcgatcgacgtccaacgtcgcacccgataataaacttaccaataaaggaattaggtaccaaaatttttttgtacctgaggtactactcccgtatctaagataccaaattttacatttaaaaatatgatacctttgataccttcttaataacgatgataaaattaccctaccaataattacaacgcacattccatacttatgcctataaaaatacagctccatcgcatgcagccaagacgcactcgcccatcgtcgtcgttgcacgaagctagctagctagcatcttcaccgccgcacaagcagacacagctagacgacgtcgtcaacaatggccaccggcgccgccgctgccaaccacggccgctgctccctcctcctcttcgccgccatcgccatggtgctgctggtgttcgtggcgacgacgacggccgcggcggcgcgagatgttcgtcgtcccgccgccgtggagaagaagatggcggctgtgatgaggcacgatgtccccagcagcgggccgagccccgtgcacaacggcgcgccgactcctccggccgccgccgacgagcccacggtggccgtgacggagcgtctggttcccaccggatcgaacccgttgcacaacatgcccagtcctctacaaggccgcacaccgaccaagaagacggttaattaattgagatgattccatcatgctcaattccaagtggttattaattaggaaatttaattatatagagaaattttatagttcttgagtattttttacaaatcttcgtaccttatatagtatcggaaatataaaatttggtatccctccgtaccttctcgaggaccgtaaaatctcttagatagatatgcatgtatcacagatgcttattataattattaatcaggtaccatacaatatgttttgcgtgagtaataaataaataaagagatttgcccctagttagtcgtactgttaatttatcatgtgcgtgattttgtatttggttttaatttgtgtgcaatggaagattttgagtttgaaattttcaatattggtatgttgcgtacttgcgtgttgtgttatgcgcctggccggaggtttccttgatattgattgatgatccctcttatctgacgatgtttgccacgtacgcattcaccactaacactgagaaactaattattttttttgatagactgagaaattaattattggtaacatatcgagaggattagattgcttgttcgatgtcaacactgagaaattaattattggtaacatatcaagaggattagattgcttgttcgatgtgtggaatttgctggtttactgttcattcttatcaaattcgctttaataataataataataataataataataatattattattattattattattattattactattattactattattattattattattattattattattattattattattattattattatgcgcgtgaagtactgaaacctgttgaaaaattaaggcattatattaagctgtgtgcataccttcgtctttgaacttcgatcggttttctgaactctctctccttttcttcgcttggtagattctctctttttttttctttctcgctggtaccgtttttttcgctgtttctttctctttttttttctttttcgctgtttttaccgtaccgtacgtaacgtaattagtttagattagtttttttactagtgattagtttactagtaatttttaattcttaactttaaaatttaaaaatttggacttgaaactttttaaatctcgagttgaaaattttctaatctcaagttgaaagttttcaaatatttcaaatctggacttgaaagtttttaaatcttgagttgaaaattttcaaatctcaagttgaaagttttcaattttttcaaatcttggcttgaaagttttcgaatctaagttgaaagttttcaaattttttaaatctggacatgaaagttttcgaatctcaagttgaaagttttcgaatctgagttgaaagttttcgaatctgagttgaaagttttcaaatccgagtggaaagttttcaaaatttgacttttaaatttaaatcttaaatcaaaagttttcaaatctaacttaaaaattttcaatctgttggtacaaaaatctcccaaaaaagaaaaaaaaatcttgagaatcttccctaattactagtcattagtagttaagtgggtgttaactaatagtactatagataattagggaggtgaggtgctcgctgctggcgcgcacgcgccagctagcagccccctgaggtatatatttcgtatgtatgcaaagaaataaagaaaataaacgttattgatcaaaagaagcccaacaagaaagcctagcaggctgcctccctcaaattcgaacccaatttacaaggttgcctaatttgtacattaactgtgctgtgatggcatgatactaatcgatatatacttggttggtagattgtactgcatatgttctttcacaaagtacatcataataaatcaagaaatttgctaaaaatcttgtcgcaagttctaattcaataagcagtactaaaataccatattgttgatcatacgtatcaaatattatgctcgcgtgttgtaaaatttttttttaccccctttccatttcgaatacccaatctcaaaatcttgggcccgcccggtatgaaatcgattagtccgatggtagttatggccgtaatggccccattgttttgcttatttgtggaataagctaattaaacaacatatttgtaaacgaaaaataattcataaatacaacttttatatacttgctcttagcaatctaaaagtaaaggttgaataataaacttcgatgaaaaaaccctaaaattaacttcaaatttaaggttgaaaatttaaattttagcttctattaagcgttgacttagtccaacgttagttactcatacacaaattgatctgtgcgactaactttcaaatttgaaactttcaactctaacttgaaaactttgaactcaaaattaaaagtattaattcaaaactttaaaaacctctagccaaattttaaaattttcaattcaaaatttcaaactttcagcttcaaattctactcatattttaaaactttcaaaataatttattttttcgtttttctataatagttaaataaaacgctaagtatactaggctaattagtgttctcgatatctccaactacaaaaataaataatttattatattattaagac

SEQ ID NO: 45072 - DNA, 766 bp, Oryza sativa
tatgagtccatgtacaacacaattagagattaattgaaatttgaagtaaaaacaaaataaattccgaaattaaaaataaccataagagtttaagttgcaatactatttagaaataactgaaatccggaagaaaaattaggaaatattgaaagaataattcatgtagaatacagtgtgagattaattaaaatttagaataaaaataaaataaattatgaaacattaaaaagaaatataagagtttagatagtaatataatttataaataactaaaattcggacaaaaaagtaagaaacattaaattaagaggccaagtagaacatatttagagattaattaaatttggagtaaaaaataaaataaatttcgaatttaataaataaaaaagttcatgtaggaatacaatttagaaacaactgaaaatcgtaacaaaaaataagaaatattgaaagaatagttcatgttgaacacatacaagattaataaaaatttaaaataaaaaatagaagaaaataataaattagcaaaaaaatataatagttcagctaagaataaaatttttaaataactaaaatttgaataaaaataagaattattgaaataagagaaaatttaaaacacaaacaagattaattaaaagctataataaaaaataaaataaattccgaaactagaagaataaatatgagaattaagtagaaatacagtttagaaataactgaaatttaaaataaaagataaatattgaaaaaataatgtgtagga

SEQ ID NO: 45073 - DNA, 2147 bp, Oryza sativa
tttcacgaaaaccgtgactagtggtccttagtggcctagttttcatgagaactcccttactggcttagtttatcaaaaatttaaaattcagtttgatattttttttaaaaaaatgatggtttaccgagcgacttttatcttgagcaaaaaaacctttcagtattcgtgaaaactgagcggtttctatcgcctcttccagcaaggccatgcaagctaggtggcctgtgtccagctccaatggtacattagtacttatcaataactttaaaaaaatttagtttaaagacactagaataacttatatagatatgtcttacaaagtaaaaacatttctttattgtatataatagaaaaacataatcaacaatatattttggagatcgtgtcattatcaatagcgatcggagggaataaattttcagtgctcctatacgactagatgatggatatgggttaggattggatatccaatggctcaaaatccagctgaatactttggaacttgggaatgcacaaacagttaactgacatggacaaaccaaagaactcgaaacctaatttgctctactcgtgtaacttcgatgtaaatcgacagaatttacaacatagccaacattggcagccgacaatataggaactaatccgacaatatagccaaacaagtctgacagctttctaatctgcttgttacatgtgaagaaatgtaagttttgcaagcaccccatgagaagggcaaagtatcttacatcaaaattttacacactgtaaatttcaaatggccaatagcaggatcaactaagaacctgaaaaacaaaaaactgagggaaggctccactaccatcaattagggtttgccttgctagttacttcatgtcagcaccaggaggcctgtcaggcctccaatatagaattgtattagctccatctgcaatatccatgccaacaactgcactgatctatcctagaattatatagttttgggctcgtcgcagggaaaaggagccaaaagaaggacaatgaaccagccagaaatgctactgatgccactcctggaacacaaagcaccaggtaaaccaatgtaagaagtagcatatttaagactcaaccatgcttttgatttctcgaaataaatcaaggtacacacctcttttttgtggtgatgagaaaactggcaaacccattatgttacaaaatatgtgggcaacaataggagagacgatattccctgcagtattttttgaacgaagtgattgaacaaccatgttgtcagaacaatataaagcttcaatcaaacaattgaattaggtaagtgcagtggaaggatgaagaaaaggagactggtgtattcaggaccttgctttaaagttcagctcttctagaaacaggttacatacttcataatcagtggtaacaattgaacttactatgcaaatcctagaatcattcacaaaaagatgtcttctcaaatatagctacctaaactaatttgaataattggagaagtaattcccgcaacaagaatatgcatagctggaaacaacaaatgcacaatgtacacatgcaacacacaaaagaaagagtaaaacctgttcgggtgaacaaaaatactgcataccacccaaaaattacagtgtagcctaactggacacctgtgaatgaaaggcaaaaagttaaggcaagcccagcaaaatgaagcaaaagtgatatactttgagaaaaataatgtacaaaatatgacgaatatattgaaagatcaaacatttgtttatagtttaagaacgaatacaaaggaaccactaacaaatattgacacctgtagttgatgttgtacgaagtcaatactttattttaaaaagttaacagtgcaatataatgatgatgataaactaatatgctaaataccaatgactgtgattagatatgaaggtgttgctacatcactataggttgcaaatcaacacggtgttgaaataacttcataaacaaagatacaaaaaaaatcgctttaatttcacatattagaaataaagtaagttaaatatagatcaaacaactttactctaaaaatcattaaaaggaaggcgttacagtaaagaatagaactaaaaaaataagaaagaaaataccaacgatcaggagtgatctcg

SEQ ID NO: 45074 - DNA, 1619 bp, Oryza sativa
aaattcaatttttggcttactacggtccaataaatccacttggatcgacttccattttatctatatttaacaaatgatacataaaataaaataaagttgaccgaagggagtacttatgccatataacaacaaaaagaaaaaaaatggcaagaaacattcaggataaaaacacagagcaatgataaaaataataaggaaaaatttaataaagaatgttgtgacttagcggttttagctgtagaacatcgtacaaaagtagcttttggaagaaaatactctacaaacgtaaaaattaactcatggatgccgtacctattaaaatattgatttctaatttgatgggagagaaacaatagttcacaactttcacattgttcctctcccctatttaatcataaatcacctttatagtgtttttttctaaagtcacttgtgtaatgtcgtacggtgaagatatcgaagtcatgatgtcatgtactcatgtaccaaattttgccaaatacctatgtttacgaaccaaagtcattgataagagtcacgtacgtgtaccaactacttaggcacttgggtagtacaaacaagacaaaattttgagctattttcaagtacttggacaatctacctatatattatgtccgattttccaatctgtccccacaaatcgagagaagggggagagatcagtacaagccgcaccatggcgaaacaaagcaacataattcttcgtgcttatcttttcctctctcgctcgctgtggatagcgaaagaaaacgaaacgaggaaaagaaaaataaaaaatggtccccgcgagcccatctgggccgtccggtcgattccgcctcgtccccgatgcacggctgccgttccaccacgtcaccccccgggtggtaagcggcgaccagacaccgccgtgggcccccacgtcccgccatcgatgacaccggggacccaccgcgcggtggtcccacctgacagtgacgtggtcgggtgacggggttcgttgagtcaaaaacatgtggcctaactaataagctggtaaagttctacacgtacacgtaaacgaggactacgtgtcaatgactcgtgggccccacggccttggctggtgaccacgaatccgctcgggtccacgcttgtggctgacatcggggccccgcacgtgagccgccgcgccgcacgtgcacgacgggcgagaaagtcttcacccaaccccactgacacgtggaccctcggaatcattcccggtcccaccgtcagtgagagggggacgccccacgtgggccccacgcctccccgaggaggaggaggagaagcatatgagagagaagagagaagggcaggtgaggtgaggcgaggcgaggatgtcgtgacgacggaaaaacggagcagccgaggcgaggaagccgccaccgccaccgccgcgaccccaatgcgcgcgcctcccgccgcctcagatccccacccctaaccctagcctccgcctccgcccccgccctcgggccgcctcctgctgccgcgacgagcgcgccacggccgtcgcgggcgaccccccggaggcggatgcgatcgggcgccctcgcgtagcgcccccgggcttcaccttctcctaggggtagggg

SEQ ID NO: 45075 - DNA, 570 bp, Oryza sativa
tatctccggctcttcatagcctccgccgcacgaattcgccagcagccagagcctcgcgacgaacgagccagcgtacactagcgatgtaaggaggaggggaatcgccaccgcttgaagctgcagccaagcaccaacaatttcagaattgaagcatcaccaagctcaaacctgttagtattactgacatgttcagaaaggaaaaaaaaaaaacaagaacagtaagtgaggtcgcttaggctcaccaggtgatctctccgaatgccaaacacggcgagcacgacggacgaatctccgatgctccacacctaggaaggatggggaggagaagacgctagggacatgagattccgtttagggtttagggttcggaggggacaaggtggggggcacttacgcggaggagggaggcggtggcgaggagggaggccgaggaggagaaggcggcgcagaggaagcggcggtggaggaagacgtggagggaggtcgggggcgggaggcggaggagggccgtgggggcgtagagcaccgcgacgtaggagacggccatggcggcgcacgcggccaccgccg

SEQ ID NO: 45076 - DNA, 666 bp, Oryza sativa
tccgtgtccatttgatctcggctcttgggccttagctgggtgctacggtgccagacaataataattttgggctctctacgaacggtctgcacgtcactggagctttgtgtttgttctgtccagcatcggctccatctgggaatcgttgtcgagccctattcaacgactgggtctccaagagagaaaatgaagcatttcttatggttttgttatacgtttgtcgataattatttcattaaaatcacacatatgttggtgtaattaaaatatactccagcatgcaactgtaactagcatgtagtaaatagtagaatataagtcccacgtaaatacagaaacatttctattgcgtaactcggttcttttatttgtatgggactatatactacctacattgtaatagttatattattattattattattattattattattattattattattattattattattattattacattcgtatgattttaatgaaatgaattgttgataaatttatagacagtcccaagtatcctctcaaaaaagaaaaaggtgaacatcaactattttgtttctttcgatcctgctgtaaaaaaaaaggtcttctcccatcaagccgcagattgtagtagttatccttttccactgccattttaggtaaaagctgttaaaa

SEQ ID NO: 45077 - DNA, 575 bp, Oryza sativa
tttttcattaattcagttcttgcagtcactgagaagctactactgtagctctctgaaccagtcaagtgaaagcaatagttcactcaaaaggagatactagtactaatcatagagtagtagtagattacagagtgtatagtaccaaagtagggactagaaaacagaataacacagcaacacataggatgaactaaaagaagggtgagtggctgataccttccctggcaacagctcaaatgctcaatcagtacagtcttcttttaaacaccagcattaatgtatggtcatgtttgggtccccatacagatcactaatgtagggtcatgttggatcccctctacagatcactaatgtaggaccatttcatatgtttggctcctctacagatcaatgacgaacacttttgtctgatagtcacaacaccacatagttctttggtgctctaagtacgtgtaacaagggttttgacataaaacattatgatgaacaaaattcactggtcgatctgaatgatgcccaataacagaactcattgatatctgagctgaaaatattttactgccatgttttgttaa

SEQ ID NO: 45078 - DNA, 1073 bp, Oryza sativa
gcgcccctctacctactctccaccggggaaaggggggaaaagaccccacttcacctttttggccttcaagacgtgccttctctcggaagctaagccataaccgatccttgagcggaacccagcgccgtcccccgcctgacacggtggtcagcccggtcattccctcataaatgatcgaagacatgcaacagcccttcctcgagcagcactcggatgtgacgggtcacacctacccccattccgccggggtcaagggtgacgtgatgatatgattaccctatccatcggatgtgacggaaacgggccggtcacagaccggtcacatccgactggcaggggttagccagacgcaccacacgtctgccgcgagggacagttggggtgctgtgcatttacggctgttcagcctgtgctcccctctgccgcgtggcggccaggcgagggcctcggggcgaaggtgcgatagggcttgagggggcgatgtcataccccgagggggcgacgtcgtaccccgagggggcgacgtcgtaccccgaggccccccccgctgcttctatgatacgcgtggcgtgtgagtggggccatccggccaagccacgtggccagaggaagagtaattctcctctacctcacatacccccgggcccatatctccgatagagggagtatttctttttatgacggatggtggcctacgtaacatcaatactttaaagaaaaaatattaacaaactcggttttagagattgtgtcgacaacaatctccccagaccgcccgcaaccactaattgccacactatgcaccgccatcaccgttctttcttcatgagccaccattgttcctaggggtgggtaaaaaaaagactgaaccgaaaagatcgagactgagaccgaattttgtttggtcaattcggttagtctcctcagttaaccgaatagaccgaattaacaagaaatgtctaaatgcaacctacaatccactaaattcaataggattaaactctaattttcacatccctacttcttcaaggcatgcaacctaataagagtttttattcatacgtgtacaacat

SEQ ID NO: 45079 - DNA, 675 bp, Oryza sativa
ttaaatgatgctaactttttattcattaatggggagggattatttttaaaatatatgattattttgtttttcttagcataagggtttcaattgcttctctagtatattatttatgtgatattaaagtataattatacgaaagtacttttgatgacgaatccctttgcctggcaaggcggcggcttcctcagaaaacgagaataacattgattttgcttcacatatgattgagatgtcacaccatgttgaattctacatgaattcctcaaaacatgtgtttggatgtactgcaggaaaacacaggaaattagaattatatgttgacatgttagagagaaaatagaaagagaaagagaaagagagaggatgcattggaagtcccaaaggaatttgaaaaatgaggttagacatcatgctaaaattcctcaaaatgtgaaggaactttccttttatacgtttttcctttgaagtaatcctacacaccaaatgacttatatagatattttgtcattgattggattcatctagatttcctttaatgaaaatcccttcaacctaaaggagtccttaccgttgaaagagcactgtgtgtgcataaatgtaggtggttggtggagttgcggggtggattaggggtgaaaattggataggtatttccgaccacccaccttactt

SEQ ID NO: 45080 - DNA, 937 bp, Oryza sativa
aaatacagtagcagcagcgaccatacaaacagtaagtagtggagtaatgacagtgagccagtgaccacagtgaatgtggatttacatgtacgcacctttcttttcttcttcctccgcacacagatcgagcaggcattgttgcatgtttggagctcgccattgatgggcacgacgcatacagctaagctagctgtctcctatgtgggcttgagatcttggaacatggactcccatcgcatgtcctcgccgtcgtcgtataggtcgtcttcgtcgtcgttgcagcggtggcagcggcggcggccatggcgacggcgcgcataggggaggaggaggtcgaggcggaggcggtgcgtccatgcgtgaggcggggtggcggcgctacgcaggtgagaagaggaggaggagggcggctagggttttggtgcggcgtggcgacatctgcgccgttcattcccgaaccgacgatcgcacggctgaggaagggtgggcacaattggacgcgtggacggtcagatcgatgttaggcgagatccaacggacgatgacggtggatagcagcgggaaccaatgcgtaattaacaaaactgtgggggcttttttgcaaaagagacatctgacgtggcacccctacctctccagcaatcccacggtgtctaagtaaaccaatatgcgggggcttttttgcaaaagcgacatctgacgtggcaccctacctctccagcaatcccacggtgtttaagtaaactaatatttgtgatattagttaagtggataaccattagcttataaagatatagaatcaaataagttagtttatctatttatgatatattcttaaaatacaatcaagccccgtttagtccctaaaatattttctcaaaaacatcacatcgaatctttggacaaatgcatgaagcattaaatataaataaaaaaa

SEQ ID NO: 45081 - DNA, 1093 bp, Oryza sativa
ttgttctagatttttttttaaaaaaaatcattttttaagaggaagaaacatcctatagctagctataagaaaacataagaaacaagaagtgcacattctagtagctcttttagtggcaaattaaaatgttgtgatttgttttccttttgttttggtcaattaccatatgtgtcaattgctgtgcagcaatgtagccttgatatgctgctaaaaaaggagaaagcagttagcattttatagtttttctagcctttttagatgctctaatgagatggcttacttgataaaacattacagtaaaccacactttgctccacctaattcactggtttctagctatagcttctcatgaccaccagaatagcagatcagtaacaatggcctcttcgtgttgtcgtgtagtagattctttacccgttccggtctaccacgatttctatttatacaccattgaacctttaaaaatcaaatcttatagttttttagagtttagtgatcacgttatgttcttttttatagtttttagaagcactatcaaatgccgccactatactcctttatggcttgcccgcagcatccctttttagtgttacttggatttgaaaaattaaacttgatcatatttggtttccttttttaaactctggaagtcccgccaatcgtcgcgaacctactcctttatggtctacccgccaccgttcctccttttaatcgtcattagaattctaaaaattgatcctaatcatcattggggtgatgtcccatcaaccgtcaccaccatacacctttgcagctcgtcttgccccttttctttttttgtcatttgtaactattatattctagatatatgcttttttaatattcattattttttattttgaatttttttatttctaaattgtattcctatctgatttttactctatatttaagtaatctcatattgtattttacgtggactcttctttcatcgctacttattctttttattctgtgtaactgcgtggctaatatctatacaaaattatatattttttacacatgattttctttgaatttcattttttttaaagaaccagtaggggaagcccca

SEQ ID NO: 45082 - DNA, 2761 bp, Oryza sativa
aaattaatttgcagtatagctagtgaacattacttggatatagatatttttgcaaaacattttttgtgtgtgccaaactatcatatatatatatatatatataggaagaaattagatcctatatacagctatgatcaaacatgcatttccatatgccaaaagactcaaatcgattaattaataatgctaattaacctgcacgatgaaccacaaggcgtagctcaggcagctgccgcacagtagcagtgtgccggagatcgtcgtgccggcggggctcgacgacgatgacgacggcggcgccaccgcggcggcatgggaggcgcagcaggtgggtgggccagaggtgcagcagctgacctctgaagaggctgacgaccatcgtgccgctcacggacaggaccgtgcccaggaccttcatcttgccggcgcagcttgctatcgccagcttctcagcacttgatgaaaaagaaaaaaaaaggatgaaaaattgcaaatatatgttgaatgtcaccatatattgacatgacaactgttgattaattattttgtctattagtaccttgtatatggtgagtattaattgtatattttagtattaatatatatcacgaggtaaatttaaaaagtatatatgatgtcatacttctatatatagtttatatatgtgtgttgttaagttttttttaaaaaaattatatattgtgcatagttaaaagaaatgtaccggaaaataacggcgataatgaaagtgacgatagggatgagattcagaaagttggcggaataggcggcgttcgtgtcacgcagaccgtagtagtacatccctgttgccagtagaactctacaaattgtcaaaaggttgttagtttcaaaatgttagtttcaaaacatagaggaaattatattgtgaggtttggttttttaatttcttaaataaaagggcaattcacttttggtttttgctacaaaaggagtcgctaagggaacagacaaggtggcggcatatagcattcggagacgatggtgatggaaggatatttcaagcatgcatggatgcaattaatagcttttgtgctttagatggttttcattcaagcttggagtagcattggtatcattcaagcttggagtagcattggtatagcatatggctaaaacagtaaaacttttcctcccaataaaaaagaggtaaaactgtgtgatattagtagtggacggttgaatgtaggccttattatgcagaggctagaataaaaaaaaaatctctgtctgaaaaagttataatttaatgcaaattttgcgatcatatataagagaataatgttgagcatgacaagtaaaaacttagccttgtcgttgagtataacagtgctaacccgaacgttgcgttgatcgaaatccagccacacactacggcgttcatctttttcatcattcctctgaaacatacagaagaaggaagcacaggtagaaaaccagaaatacaagcacataaatctataaacgagtagcatacatttttccacacaccaatgcattgtacatcgctacatatatatttgtccaatactcaccccagaaataaacaagtgtggtcatttttaagtattgcttccatacatcgtcaaaactaataaatttctattgcatcatggtatatctttagaagccataaagttcatctaaatttgaggcatgtcatctttagatgatataaatatatataatgtgcctggtttatagttagttctagactccattatcaaaagttctacaagatgagtatacgttaattacatttagaataactttagatgcatatgtcctctatatctatatatacttcccctttaatttctccatatttatttatctatcaccatttggctagatgtagaaatcaaacggcctgatgcgtcacgagcttttgcgtgtttacatattattgatgcaattaagagcaaaagaggtgatcatcaagaggacggcccatggtttcactccacctacatatgcggcgaccatacaatgcagggctgaattcaagtcattttttgtctctttctaacttagtgtttctgttgagtgtttgacacatgcagtgagatgatatttgtccgtatccagccaagtcaattggctcttttcttttcttgcaatttttctttctttaggctgtttttgacacacgaaacgataggatgtattagcacataattaattatgtattagtaaaaaacttaaaaattacattaatatatttttaaagcaatttttctataaaaaatacaatgtttaaccgtttgggaagtgtgcatacaaaaagaagaaagtgtgagttggcaatatagacataagaatacaaccttaaaatcgtcaactagttgggtgggcggctaaaaaggtagcctccagctacgaatgctctcgaactttcctcgactggtagtatacgtacaaagaaacatatatagacaaagataatagcgtaagccatgtatagtattactctagtagtgcaattaaatatatttattatttctttttggaatgaatcaattaattagaaggcatgaatgctatactatgtctttgctcacggctggcactgagatttcgcacgtttcccacgagtttccaaagcacctctctctttaattctcaatttctcatatagtaaatgaattggatcaggcaaataaaatcgtcgttcgatccagcgtggattagatttttttttaaaaaaatggtttgatttctt

SEQ ID NO: 45083 - DNA, 1512 bp, Oryza sativa
tgcgggcagccatcttgcacgacgcgaaggtagaagtggcttggccttcgcatggtagcggttctcaaccatgcaggaggcgacacacggcgcgagacttggggcccttggccttgcgctagtactcctcctccttggcgcactccatgcctccatgcggtcccaacggttagccgccgtgatcgcaagccacctttgccttggagttgacacccatcttctttggcatcgcggctgttcatggcggcagtggctggtggcacggtatggggcttgagcgaagtcggattggcatggtagatgctgaaacgatgacgacgaggtatatatatcccaacctacccatctcccttatctctgtcctctcctcctttgcagccatagatagccacggtcccatcctctccccacggcgagctcgagctcgccaactccctcgcctccctcctctctccactgtcacgggccaccagagcctcctcatcatcgacctcccactgctattgccacctcctgcaaacgagctcaccggccactacccctctccccctcgatgagctctggtggaagagaggggagaggtggagagatgggggaagagagaggataggtggtcggtgagctcttgtggaagtgaggggagatgtggagagatgggggaagagagaggataggtgggaagaggtaaaaatccacttacatgtactccctccgtaccaaaaaaagacaaactctgggtttccgtgttcaatgtttgaccatccgtcttattcgaaaaaattatgaaaaaaattaaaaagacaaatcacgcataaagtattaatcatgttttatcatctaacaacaatgaaaatactaattataaaaaaatttcatataagacagacaatcaaacgttggacacgaaaacccagagtttgtcttttttttgggacggagagagtagaactcacatgtttttaaatatttctttttattgactaggatgccacgtcaagacaaaacaaccattcataatgtcatgagacttgattggacggttttgctaagatgagtaaagatttctggtatcacgatttagcgatgttaattaaactctgaccgaaagatttaggagacaataagtggacttattcctttgagtaatgcaaattttataaggctagtattgggccttagggaccagaattcaactaagcccagagaaaacaaatagcatactgtttacgtgctttataaaattttcattctcaaaaaaaaatctaagtagggcaatggtacaccgtacaccacacctctcaacggaaccatatatggcgagtaacgcagtgctgggtgtgtttgtccgaggcgaaacaaacccttagaagagcagcttgattcagagttgatacatagtagtaatagcatagagccatagaccattccaacatgtacattgtacaaagcggagtctttgtcgaacgaaacaatacccaggagatgctgcaccacaaaaaatcgaagcaaaaa

SEQ ID NO: 45084 - DNA, 1233 bp, Oryza sativa
catcgagtttggtatatttaatttgttataattaatgactacttcatttgtgaggtcatcgactaagatctagaaagctaaggcgtgtctatcgagttgttgatgatcaaattagcgatgccgactcatagctaggtcgccgacttgttcagtggcgttagtttgtcaaggaacaaagacattctctcttgattgatactcattcatatgcttttatatgtgccgtagtttatcagcgttgtagtcgtgctcatctttcttgtgcgttttaagatgtggagcacttttttgatagattttctcaattatatttgtaatctcttctattttaatataatctaacctgtttttgctttgttttttttttcatgaaggaaaggaactagctaatctagtgcagtcgcttcctgttgattcgcatttactttctgaacccaagcaaaaacgtaaccaatgatatcatatcttcatattgtagaattaagctgccagatactagtacttttaacaactaatgataaattaaattcacgtcatgagttccttctttttcttccatgggccaaatggctagaaactgcattgacaattattttgcttatcactcagcagtacacaagtacactgtactgaaagaaaagaaagaaattaaagaaagacagaaaggacgaaggggaaaagttatctaatcattcataacttctcaaatacaccatccataatgttgaattgcaaatccatcacagagaatatggataattgacactttttccactcttctgtaccccataaaattctcagctagccattagggaggttttgtgcctccttcacaggattttgttaggtgcttgatttttccttgaaggacaatgcaaccagaaactcctatgactgaacaatctgccactcatttgcctcttccaaccaactcatgtatatattgttgaagtgtcactaggagagggaaaaaaagataaaaaggaaaattacaaataaagttgatgaacaggaaatatgggacagtcaaattcctgatgccctttgctccaaccaaaagatgagaacaaccattctgacatgaccgatataggggcatacctgaacctgatgttcagtatttataatgtccttttgggaattatgtgatggttgcacctctttccagctctctcttggcttagaatccaagaaaaagataagtttatcagcaattcagcattacttactgac

SEQ ID NO: 45085 - DNA, 610 bp, Oryza sativa
ttgtgttccttgagtggctttgtgcatatatgaagagaggagagctactcgcaatgtattaggttctctctattttatttgatcaatgtaatgtaataataggaagtgttgtacaactgtattgtaatcccaatggtatgtgatactgctttgttttgtatttattgaatagccagtgtggccaattgatctagtactacatgccaagagagctagagaaaaaaaaagctagcgaatgcacacaactgttacggctggaaggctagacgagttctttgcctccagcttcactgctacctctcctgaagcgtgcacatgccatctcttcctcaatcccctctggtatgaattggttaggactagtaagtaatgggttcatatcctcttccataatgtcactaccgttatcaagatggaccataatggcactaccattaccatggtggaaataaggtatgtctccataccctatgtccacaatgttcaaggcaagaaaggcaagaatatatgttaagtgggtcccacatttatgtaaacaaattctacttcaaggtaggtcccaccataccataatctattctcatcctctttaatgtgtatctgtgtttta

SEQ ID NO: 45086 - DNA, 634 bp, Oryza sativa
agagaaagttatggaaccatagacatccttattggttttcatagatgctttacttctaaaagcctcggggaggccatgaactgccttagactgctctaatacctctctctaatttcacatttaacactttcattaataatatgtagtacgggctaaggtcgctctacccctcacatacaattctgatccgctcccatctctactccactccatttcagatctgatggtgtttttggttcgactcgtgctactttggatgaggacttatgaatctacggcctaccaaacaaccatgaaatactccctttgtttcatattctaccaaatagccttgaaagttaaaagaagtttgactaaatttattaaaaaaaatcttagccatatgtacaacacccaacaaacatagtatcaaatgttagtctttaatgaaactaatttgatattataaatgttactatattcttatataaacttagtaatacttaaaaatgattaatctttactattaaaaaatcgaagatgttttcgctggaattttggtacgtcatccatgtttgtgttggttgtatgtcacccgtatccattcgtcgtgagtaaaataactattacacactccctcctagtccaatccaac

SEQ ID NO: 45087 - DNA, 1259 bp, Oryza sativa
atagtacaccctccactatattcgagcatcactatgtcaccctccactgtcatggcatgtgagtgcaaatcaacataattttacatgagaaacgttttgtttgtttttattacgaacagagcccaaatattttgatgtgaaaagtacgatagacaaggaaattacatttctgtcttgtgtactagctttttactctatatcatttattgaaaagttatagccgactatcaatgcttatatatttagcggcgctggcaagatataccacaccatcactaaaggcattgtgagtttgtgactaggataccactcaaacattgatataagatcaaaagctttgagatgcttcttctgctgtcttctttcctttccttggtctattcttttcttctttccctagcctacccatatgctgctgttattctgttgaaattcttggtgatgcttcaatgcttaagatcaccttttgtagctcgccttctctttctttctttttttctttctttctttctttctttctttccggcagatttgatgatttgtcagtctccattggacatgaaatgctacactatgctactactggatagagttcctttccatttcaatcaaaactgcaagtacatttcagaattatgataagaaaaaaaagagaatagtacaaaaggtgatggaaagtttgagttcctcctacgtaccagctgatgttaaagtagggttcacaatctcaatgaatttcgatccaatttcatgaattttgatcatctcgagatggttctagatgcgcatcttgttcgaaatttgtcccaatttatatgaaatgcttcaaaattagcgaaaattgatgccttggtggggctcgggtttcacttgccaatcaagatcgtaacccctgtgttagcatgttggcgccaactaaggggtcctggctccttgtgttaggcatcctgcatggcgaatattcatattatagtgtttttcatcttttgttttggttctcttttcatgatcgctaaagaggacaattaaaatccccgcaaaaaaaagaggacaattaaaatattgttttgatttcttttaaaatcaaactttgaaattcattttaaactttaaaaacacttcagtttacagtgtgcagtatgctatagcagaatcaaactctccaatgacaatcgagtacagtacggggttctgattaaaaaaattaggatacaagtatgtttacgggagacttgatttcgctggttgtctgggctgga

SEQ ID NO: 45088 - DNA, 1215 bp, Oryza sativa
atccaggcacgccctagtccctatagtttccgcattcttctgcaaaaaagagcgtcgaaacatgtaaaataactacattatcgactcatcaaagacattttcgagaagcatgcctaagaatagatgaactatcatcacaaaaagcgcgcaggtgcgacctcacgaccagctggggagatggacacgctccacgggctattgtgaagcggtcctctccgccataaatgaaacagatttatggggagccccagccagcatggagttgaaaggatgtagacaagacaccagtgttgagtcattggtgccggtggcaccttggatgcgtgtcgaacatgccctgcaccacctgattaagccaaacgggcagaagcgaggctgtggcattgtttcagacagcccgggttccaccaagcccaccactcgccatgtgttgggatagctggcgcgacccagctgtctcggacagaagcccgggtacacggggtaatgcagatttcaaatctcaatagggttttcttgaagatgtgttaggaaaccagccgacaacgacaagatagctgataagacaagacaaggagtatatttgtaataatgtgagcccctacttggactataaaatgaaggggacaagctacagatggagggctggactctttagatcggtataattcattttgcagcctgaaaaagcctcctttgtaagcagctgatctagggaagacaacgaaaccaacacatgagtagggtattacacctccggatagcctgaacctgtataattcatgtgtcttttgcatggcggggagcttgggccccacagatccgatcttgcttgaatctttttctaagtattgcaccacaaaccccttggttgaatcttcccacttgggggggaggggtctccactcctcgttgtccaaggaatcactcccttgacacctacataccccttaaaagttgcccaagtccttttatgctgctgagttttattcattctcttgcataccctagactttttgcttcgatcccttccataccttttctgttggttgattgttagttgatcattaaattcttataaaaaagtctattttgccatttagtacgaagaaacatgtaattatttatattattggagtatagaaatttactgtatgaaacttttatatttatgagtttgtcatgcgagatattatttacgacaaaatttattta

SEQ ID NO: 45089 - DNA, 1004 bp, Oryza sativa
attttatgaagtatgggttgttcaaagacacagactcaggaagactctgaattcaatcaatgcaatgaagagcgctccctgtgcttacactcattttctgacttgtcacatgtttctgcagctacttttatgtatcttttgaaggactgctacctatatggtatacctagttctttttcatgctattcgaaaactactccttccgtttcataataactgatactcatattttttgttgaatatttacaaacctagaaatgataccatgttactaaagtggggtttgccctaaatcaaaactttcgttcactttggtctaacaatttaagggcaattaattgtcaaagtttaattgggaaagtcaaaattgtcagttattaagaaagaggtagtatcatctatgtggcactgttataatttaatatctacatgattggtgtgctaaaatatttctttctgtaagcttcggtgcaactaattctgcttgattatgatatgaaaatgctgtcacacaatcttcccagaaataaacacgtgataggaaaataaataaagttacctacatagtaataattacaggttaaatccatagtagtttgtatggaaccttggttgaggtaaatatcatcaaatatgattttcaaattcggttaatgcaaaatgcaggctcttgaattccttgggtcttcaaactttttgcataaccaactctctgctatgaatttgctacaagcttgctttattattttattttatttgttttcgatatcaatttcatccttgatcttatgcacttattaattgtccatactctgatgttttacaatcttttttgaaaaatcaggaactgacaaagcaaccccaaagttcaagatccttcagctgcaggttaaaagggtattaaataatgatcctcagccaggcccattcacgtatgttgttcaatgcatgtatattgtgccactgctggggaaaacccatgctgaaggcttcagccatatgtt

SEQ ID NO: 45090 - DNA, 702 bp, Oryza sativa
taacctggtttttatttgacgtgccatttacatggaattattattaacaaatactccctccatcccaaaatgtttgacgctgttgacttttttaaaaatgtttgaccgttcgtcttattcaaaaaatttaagtaattattaattcttttcctattatttggtttattgttaaatatacttttatgtatacatatagttttacacatttcacaaaagtttttgaataagataaacggtcaaacatgttaaaaaaagtcaacggcgtcaaacatttagggaaggagggagtataaaactaaaatacgtggggcccactaacatgtgggcccatctctctttctcccatttgaccccttcatctttgtcttcaactgctgccgtcgtcaaaacttgcccgcttgttggcaccctccttatgttgatgttgatgctgatgccgagttgccgacatagcgggacttgacatacctggtgtagctgccgccatgcccaagggaaggggtctattggtttcccacgaccaccaccgtgggccttgaggatagggaggataccaagccactgtcgtcgcctcgatgatggtagttccaccccaagtcgccctcgatgatgatggtgtgctggagatggcgaaagctatcgatccggcgaaggctacaaaggtgtcgacgacaacgggggtggtgtagaggagcttgggca

SEQ ID NO: 45091 - DNA, 807 bp, Oryza sativa
tatgtcaactttttatattaccaaaagaacttgtaaggatatgatcaagatgaaaaataataacaaaaggaaatatcaacatgatatttcaaatatttcaaataacaaaagaacttgtaattccataccctacttgcaacaaaatatttcaaataaatgctcaaacgtcataaataccttagggggctctaataattgtgtcctcaactttgctatttttgctttcagttgtccaagatggtattctgtatgacaaccagaaataaaaattattcccagataacaatatgcaagacatttctcacacagtattgagtatgggtgggaatgtaagagatcagagataatcgttcattagctaaatacaacattgttaatagcaagttcacgttcagatacataaattgcatatatgcaaacagagatactcaattactcagttatgcctgttcttctagcaacaaatttggcatctgactgttgatactggacgagtatagtgtgtgtcaatcagaaaatggataaagcagggtatgcagtaaacataaatcaggcaataaaagacgaattccctgagtccactcgtcataacatggatgaatttgtgccaagcaaagaacatgtggcaacaaatcaacaatttcggatctgaacattgactagtggatgcacaaataaatggcccactggccatcattgatccaaatgtccataacactgaataccaacatgaagagaaattttagcaacaaaataaactggaaggttgagaatcgtcagtggccagtataactaattaagcagcaa

SEQ ID NO: 45092 - DNA, 759 bp, Oryza sativa
aacgaatttatctttaaattcgttgtactagaatatgtcacatccagttctagatttgtttttctttgagacggaggaagtaattccgtaagaataggggatatcatataacctctagggaccaataagggtcacaaaatccacttcaaaatagcactcacatgtcccgtgatgaagggctttagatttggggagttttagattataataagcaaccggtgggaattcaaccaatgagaatctagagaagtttgaaaaaccgattttagtttacttattggattttgcactacagcctcttagaatatgtaagaaaaactggattgtttggggggacttgtctattctgtgagaagtcgtagttatcaaagctcccccaaatgattctgaaacataagccataattcatgtgtagttgtgtacaaagccaatggctgcagttgtaccaccagcacacgagggcatgttgaatgtgcttgggggaatattatcccaatcatctgaagcatacattttaatattaaccgttcgttcatcttatcccatttcatcccaaccatccattcgtcttctttttttattcccgcccttaataatccatataagttccaaaacatcctctgagataaaataaagagtgaattccactttggaccagtttttattaccttgtttgcatattggaccaggtataagcaaatttttttcacttagggctagattttgtgaccaattttgcattttgaactattggatcca

SEQ ID NO: 45093 - DNA, 1076 bp, Oryza sativa
cggaggagatccatggccgcgggcggcgccgggcggcggcggaggaggaggagcgcggcggcggctagggttttgggggtggagacggcgaggcgacgaggtggggggagggtggaagaggggaggagtgattagattagagatggaagaagaggggttaagttggtattggtaggggcaggagacttgtacgggaggcgatttaaacacgggggttagtttggcttttgccggcgcatttattgtcttgtttttagattttctttcagaaaaggcacaaatactacccctctgtcccataatataaaggattttaagattttacttgcactgtttaaccactcatcttattcaaaaaattttagaactattatttatttttttgatttacattattatccaaagtactttaagcacaacttttcgttttttatatttacataaatttttttaataaaacgagtggtcaaacactacgagcaaaaactcaaaattccttatattataggacggagggagtacttctttgtttgatattatattttgtttttttctaatcaagtttcattaagtttgattaagtttataaagaaaaccaaattagtttcactaaaactaatatttaatatattatgataatatatttgttttgttttgaaaatgttgctatatttttttataaacttgatcaaactcaaaaaggattggctataaaatatcaacacggcttataatagtaaccagggataaatatgtgaaacaaaatgatacatccatctatccctaatgattttttttcccaattacaccggggacttttttttttgcaaagtctgtgttcttccccagtatacccaactcacctctcccgttctccacgcgcacgcttttcaaactgctaaacagtgtattttaaaaaaaattatataagaaagctgttttaaaaaatcatattaatcatttttaaaaaaaagttaatacttaattaatcatacaataatacgtatttttcgttttgcctgttgaggatgaagggttcacaacccctcctgcccgaatacaaactaagaacagtt

SEQ ID NO: 45094 - DNA, 749 bp, Oryza sativa
tgaattggccatgctctttgtctaaattcgtagtattgtaaagtgtcacatttatctaaaatctcttatattataggacggagggagtatcacaagctaaaaaaaaatcctaaaggccattttggtttgatactaaaaacataccctaccaatttgttggcaaattaaatagtatatatgtattagtttggattgagactaaatgtttgttagtgcccctatcatatttagtcatattctaaaagtttctcaactataccgtgagaatttagctttatattggtagcgatctaaatgctagctaaataattttaccctaccaatattagaatttagctttatattggtagcgatctaaatgctagctaaataattttaccctaccaatattagaatttagctttatattggtagcgatctaaatgctagctaaataattttaccctattaatattttggtagtgccaaagtttaccaataaattggtagagtaaagaaccaaacaaaccctaaaatcaactctaaaattgtcagcactaaaattaagtttgaagattttttttcttttttgataagctgactagtctaggccctattgtttagattccaacttttttcttcaaacttataacttttctgtcacatcgaaattttctacacataaactttcaacttttccgttatatcgttccaatttctttaaacgtctaattttagcgtgtaactaaacacagcccctatgtctgatt

SEQ ID NO: 45095 - DNA, 7124 bp, Oryza sativa
atttaatttcccggttttgaccaatttcaatgtctcttatttaatttcgcatattttgttaatacaagtacaaaacaaatatgcaagtacaaaacaattgtacattagaaatgcggatattttgggaaggagggaccgagggagtagtactggtaattaaaatcttcgggttgcttgggctgtcatcgttgcgacccagctgctagttgtcatctgaagcaacccttttttcccagcattccgtgcctgtccagcttcagctttccaaccgccatgggcctcacgctgttcgatcgacaaacataatgtagatggagacgtacatatatctgtttgacgaagactaattaacactagttgacccaggcttaagctaatcaaccacccaatcagttcaaaacacgcaagccacatacgtgtggtgtctgatccgagcacgtagtagctgctgctgctgctgctgctgcaactttagacatattaatgctgacaatgctgggtaactgaagcttttgttcgatgtttttggtttgtccaacgctattagcatgtgcttaattaatcgtgtagtcagccagtaggctacgtgtccatgtcgttggctcgatctgcctgcgtgtgtgtaccaacactaggacaaaccaacactaggacgattaattctaaggtgtgttttggtcctttttgagacagcttcctttatgaggtccatctgaaggctgccaactgtagtcagccattgtttttttttctttttttttttaaaaaaacttgtagtcagtcgtgattcgaatttaagacctctaggcttgatatgcatctggctgacacaaaataattgcagttttcacgtcagctgtagtattgtattgaaatataagtgaattgctcgtcttttcttgtcatcttaatattcaagatgaactagatcggtacatgcaactctataatttgcaaactcattattgtgcagtcaccctgctagaaacaagtagagcagcaggtaggaaccactctagtatgtgtccattgcattgcatgcatgcagtgacctacagtatgatgcaagttcatctttttggaatttgtgtcagttccatttgtatgcatacactgttttctttctgccactgataagcactgctcgttgaaaagtacatcccaaattataagaatcttttttatacgtcttcaattatatattttgattattaatttattttattttatgctctccacgaatatgaaattagtatcacatgaaaatattttaaaatatgaatatagtgatataacattcataatacttagcctatatatgattagtatgcttactagttaaaagttgtcaaaaattatcaagtttgattttccttaaaaagagtgtcttataatttgggatggatggagtagtagtattgtgcagtactccctacatactcgtaaaagaagtcgtttaggacagcgacacgagtctccaaaacataactttgacttcttttttctataaaaatatttattgaaaagtgatatatgtatacttttatgaaagtatttttcaagacaaatctattcatataatttttatattttcaaactcaacaactttattcatgatttatattccaaggtttgacttaaacattgtcctaaacggctttatttatgagtatgctttagagcacccgcaatggtaaagtaaggtgttatctataaaacatgtacatctcagcaatagactagattaatagtaaatcatctcaatagtatgtctacatgggtatctatagctctctaatacattgcctcgtttttctctatagactatctccaggttagtagatagctttgctctctctcttcatttaatctcttccaagtaggaaaatatgctgacatggatctcttatatagagcctatagataaccattgtgggtacccttatgagtatgcagggagtactcctgcatgagaggcgaacacaataatgattcactgcatgtctctgcatccattccaaggagggtagataacccaatactgtatcgggcattgtcattggattgcattgctttgctactagctagcatagcaagcccagccccagccctgcaacattcagatgttcagaacggcatctgcatctgcattacatgcatgatgcagctttccccagtgcaatggagttgatgatgcctctcgaccagccagctatcagcagcagctgcagctagcagcatccggcactgttccttccatcgctaaccacctgactgttcatctatggatgatcatatccgatccccatcttgtttggaatgtacagtttgtatatctgaatctgatagattgatctggagccaaaaccaacatacagtagctgtagcattacacatcaacaccactgtccccctgcagtagcactgttgcttagcctaggctagctgcagctgccggtgccccccaacctgactgattaaacatcgatgatattatccctgtccctcccggccaacccttctgcagtgaaaaggccatgccatggattctagctagagtacctcgctagctaccaagatcaagccattcatgcatgctgtctgcattatggagtggattgaataatactattagttttcgaggatttttgtcggaatcgaactggttcatgtgaaaatcctgtaagattcctgaaggagaggctttagtctatcacatccttttgtttctttggagaggatcgatgttatcctgggaattaaacgctggaccaggttggtggatcaacattaatcagaagttcagaacagaggagcattatggagtggatcatcatgtatgcactcagcatatgccaattcagataatttcagagaccattacgcttttgccgtgctgggtgatcgatcgaaatcatggttgtgtgtgtcatctgccatatgatcgtgccagaaaaccctgatcctgggtggtcctctttggggtcgcagctcatcttgttcatggccaaaggtagaagaaagaggagagatctagagttattattactgcgtcgccattaactgcgcgtggtgattaagaagaaatcaatgtgcctcgtttgtcctcccgtcttaattgtgaaatttacggccgtatttacacaccggcaatgtgtatgtattgctgactgtcatggtcagtcacacacacacacacacaaagaacagtagacaacgacgatggcatcaaagtggcagcaacttcttttactgtttctgaaccaccatccttttacagcttgaaaaggagaataattcaacgtgaaaccatctctccctgtttcattccagctagcagtctgtctgccgttgtatttgcatcgtggtttttagtgagatgtcaaataccgctggacgatgcttgggagaggtcaaatcccagcctctgcatcgcgagatgcacataaccagccagtagttagattcgttcgggctctaaaagttatttttggctccgttatactaaagccaaccaatagatatcaaatacttaatgcagttagatttatctgggctctaaaagtttactcggttctgtcacgacaaccagcgtcatatcgtttcgatcgtttgtagttagatttatccgggctctaaaagttcactcggttttgccacaacaactagcgttatgtcgtttgtagttagatttgtccggactctaaaagtttactcggttttgccaccataactaacgttatatcatcttgtagttagatttgtccgggctctaaaatctttctaggttccgccacgacagccagtgccatgtcgtcgcgcctggctgtcgttggcggagtagagctcactccatctccagcatcctatcctacccttctactggttttgagctttgaggcagggttgagttgcgtgtgctcgaggcggccggccggccatcgttatcctccatgtggtgtcacaccatgaaaccaagcagcaatccaaattcccaatccggcacaaacaccttcatgcgaaaaacgggatagctactactacttgctactaatggtaggagactatgatcttttccagggagtaattaattgcacgtttgtacgagtgccatattgtggatttttttaaaaggtttatatatatattcaggcccggattggttggttccagatgaggttcagtaaagatcagaaagcgaagattaacctgcaaagaaatcatcatatatccggtttttcacccatatccatcttgccttacacatggttgcacctcctccttacaagtgttccaacctagctcccttccatacctctagctttcaccatggcacctgaactacaactacatgcatataaatccagccacgcgactctccgcgtggcggatccaggaattttctagagcctagacaaatactacacgcggattccggtttacggatagtgttagataatgaagcccggaaaaatacaggccatatatcacagtggcgcgactcgctggcgagcctagttggcatgcctactctgcaagaagataacaacaaatcgttgtctgaaaaaagatgataaaaaaaatggagatgaggagatgaaaaatgaggtggcaatggcaaaatgccgcgggcgccgtcggtgtccggggctccggctcgcccggccggcgtactgtggaggtcgcggtgcctgtccgggctccgggtagacagaaaggccccaatggagcccgccgtatctgctctgctacacctacccatccatgtcaccatccatagatagacgatggcgacgaagacggtgagctctttattatataattttatttatgttttcttgaggggagaagtttgattgatccaaatttgatcgaaaaccgacggttttttaatttctttgctgtgcagggatgcgtgcggatcaaaaataaaaaatcggtggcattaattcttggaattgattcactggacggacagtgaatattgcatgcaacaactgatcatcccctgcaatggcttaatattgccctgtgttcagtgacttggctgccgtgctgcatgccagctatggagggagagagatgaaatgaaatgatctcaatgggaggaagagaatgatgccgagaaattaaaatctctcttgtgttcatgcattcaatttgcttctgcacatgctcattcactcatccagtcagtcgctcactcactcactgggctcagtgacctagctttgctactactagctcactcatcattctctttgcttccttcaccaaacttcagatttccagtcccctggattggcttcctctgcaaccatcacataaatttcctctgcctccatgtctgtactgactgcctctctaactactcagcttttgtgtgtgtgatggagatagagatggcatctgatttggcattggcactagtagtactttgtactagatttgcttgcaagttgcagcctctgaaaatctgaatgttagttgaggaggcctggccctgtgtcctaactcctaatgcacatatgcatggcatcttctctggttttgcatcattcattcatgcatgcatgcatgcaaatgagggggtagtagtcagtagatcatagatgtgtccaggctgaaatgcaaaaagtaaaaagggatccctgcagagatctccaatttctttcactctttcagaacaaaaggggctcccttgtggccttgtgcttgcaggaaaagcccaaaccctgcatctttcaggctcttgccccacatgtattatgtacatgattcgtaaacacacagctagcacatagtgttcccggcataaaaaaaagaaaaaaaaagaaaaaaagaaaaaaaaagaagctagcacatagtgtagccctgtttcgaggagcttctcggagccatggcttctctcgaaatcttcgactccctcaaacagaatcctaattaattctttaacaaaattccaagaatttatagttgtaaaatctaaaaaaataaactagaaatcaggaaatacaaaatccagtttagttttactttttcagattcattcattcatacaaaatccagctagctactcatcttagctgcttctcagaatttcgagcttccctgaacatataaccatgtactatttcttgcttgttcttctcttcttctacatcttgcattgtatccgtgtggatcatgcatgcattgtctggcccatctggtttgttaacttgttgagagcatgcttgcttgcacaacagtacaaagccagatgtgtcctacaaagttgcagacttgtagctgcactagcttacacatccatggcctattccactgtaggaatataaatatacatacacacacacatctatacaaatacatgtctagctatactagctagtggttctcatcacttgcatatatacatacatgccagtacaggatcaggttcaattgcttaaattgtacaagttcctatcattgaccagcctggctatagcttagctcgagccaaaatgccaaacagattagtttaatcaattagatgcataactaactaataatcagtaacgacaagcttgcagcaacaaaacaaagcacttaatcagcagccagggtacaactagaagagacaacacagcatgtccttttcgttttcttttccttcttcttcgatcctcttctctcttgcttgaagatcttgattctttttctacatctagataaaattaagcctaaccaataattaattaaccacactttttttttcagttctgaaatcagaataataatcttaattattgcatgcttaattagattaattaattaattaattatctccatctagctgtctgcttctctgctcttgtaattcttgcagctgcagatgctagctttgcatgcatgcatgcaaaccattttgcatggaggaaaccttaaacacaagtaccaccattttctcttctttttttttttgctctattaattgtttctttttttttttgcgtgagatcgaggtagctagtagctatagcttatgcgtggacgtcggcggcggcggcgacgtcgtcgtgttcgtcggcggcggcggcggcgtcggtggagaccatcttgagggcggagccgccggtggc

SEQ ID NO: 45096 - DNA, 997 bp, Oryza sativa
aaaaccagatcgagctatatgaatcgataggaacatatttttgaataataatagaaatattatattagtccaaataaacatgagaaaaacaacttaattggtaaatgaaaatacacttgtctcaactcaatttgatttgcatcacacctcaatttacagtagtactactactttcttcttctcaagttatttttcttggaatctttttgggatatagtaaatgcaaaagatttcattaacaagtcaattatgttcttcacagcagaggggcatatatacatttttttttgcaactacaaattctaaccaactgcattgcgacagcaagccctgtcaccaaaccacagtacagcccgctaataatagaaaaatggacagggttgcatggcacttttggggtatcttttgtccaatattgagtgtagtagctagtagatcaccatgcacagagtactctagtcagtgcatcctatggactctctagccttaggacgacctcaatggttggagccatccagctgaaaagagaaggaatcttagcacaatggaatctgaaaaaaataaataaataataatcatatgaacagcagcactactcttaactctatcaattagtgatatgtttattgttcattcatcttggctggttagttattggacatatatagcagttgtctgtaataactgtcttatactatactatttccgttctaaatagctaggatgacgttctaaaacatcgacagagtcttcaatgttttatcatttttttcttgaactatatatttgtcaataatacttaaagtataactatatgaaaaagagggtcttttgtcaagaatctaccaatatattttttacatcttaaatcctgatattttttattaataatttaattttcgaagtttgactgcgctcatatttgagcgatatgtcatatccgctaataaagaactcgtatcgataattgtaacaatacgtttctattgcggtgtcc

SEQ ID NO: 45097 - DNA, 1727 bp, Oryza sativa
agctatagctagctagcaccagtagtgagagatcagagacagagagagagagagatagggggataaagcaaaggcatggtaacttcttgcaaagatcaaaggcacacaaaaacaaaaagaaaaaggttaattctgctcctcctctgcatgcaggaggtttcatgtactacgtaccaacaggggaatcaacatatctcctaacattacgaccagatgggtccatattgcatatattgcaccatgcattgcattctctctctagatctctctctctctctctctctctctctatatatatatatatatatatatatatatatatatatatatatatatatatatatatatatatatagatttctctctgctccattcaaatatgtactgcctgctttctgaatatctctgatcagtgtttgtacactgcatgcatgcagttttgtttttcagcatgcatgcgtgactgaaaaactgaaacttttgttagccacgtcttcttgtcctgttcaaattacactgttttagcctagctgatcagctgctatgatctcaatgtatctttctttgccattaatccttttttttttttacagatcaagatgctgcctgcctcatttctgtggtaagtttaactttacaacaaatctaagaatctaccgggcaaatgcagcagggaaaaaggggaaaactaaagcttaacgccggggtgcgtctgattcaagggatcgaattaaagatgagctcaaagctcaaagtagtccaaagagaaccttgcaagagtctaagagaacccagctaggtgtcttggggaatatttacattttacctaatattgggttttaaagcatattgcaatggggataatcaccagatatacctagctgtgggaatcacaccaccctctctctcccaactccccaacttgcattacaaaaaatcaaaagaaatctatattagtacctaaatttcaaccgggaattatcgataccgatattcatagattctcacatccaacagacaagggccaattaatcaacttttcttttctctctctctctctctctctctctctctctctttactggttgatgttctaatgggtgaagattctttacatgattaatcaaaggaggaaggaattaaatgggtaaagcagtactaaaagcatatatcacacataattcaagccaaagatatgaaaaaagatcgcatgccctaggtctctttgctttgaaaaggggtgagctgcatcccttcacacacaagctccaaaattcttctgtgctcttcttcttcacacatgcatgtgtttatgtacatgtatatgcatgttgtggcactgttatagcacatatggtagtctagtgagtgtgtgtagatagagagatagctagatagataggaggactggcacactttgcattcacaagggaatatatcagcatggctcaagcaaggaatatcttaaggctttggagggggatatgaagcacacgcacaaaaggacaccacaaaggaagacatggtgtcctttagagagagagaagagaggggtgaagggaaggagaatgtgagaatctccctgctgctactactcttggctttttaggaattggggaggaagctaagaagattctctctctcttgatttctctctctagctagttcatacacacaagaagaggtgggagaaaggtgttgtgtgtgtgtgtgtgtgtgttttagtg

SEQ ID NO: 45098 - DNA, 3095 bp, Oryza sativa
tggtgtttactgtagtgtccaaactataaagttactaatatctgaagattgttcagccaaatcacttgtagtttttttttctgaaaaaaaaataaatcgtaactcggagtacttctatgaagtagggtaagaacaaagcgtagggaagagatcacgtgagctccaaactgctaaagaacaaaggtttacctgtatttacacatgggaataggtgctttgtggatatcaaatccttcttgtcccttagcttgctgcctgctgttctcatcaacacttgtgctttgtcctggtgcgagtgactaacaagcagttttactgtagctgcgcgtttcaacaaacaaaaaaaaccacatttgtacttaattatttttagttgtttcattcaattttatcaaccgagcaaacgagtgtccaaagagtactaagagagaagatcatactcctaggcctggtttagattcaaagtttgaacccaaatatgtcacatcgaacttttctacacacacaaactttcaactttttttcgtcacatcgtttcaatttcaatgaaacttccgattttgacgtgtaactaaacacaccttagtactctaaaaacgtgtggatgattgaaattgccagataaacatgcaagtatcagagatcttgcaggcatgaacagtcatgcaggtggtacttattaacagtctttaacaaccatcgtaccagactactgtataacagagccaggagattcatctttcaatttcatggctctacatgtcaggacttgacagtgctgagagtttcagatccaaatgacaccaaacaaaaatcatgtggaattctgtttctgctgttctctgcgcttttacagatcccctgttcatcagaaatgccagcaactcagcattgttgctgctgtctgcaaatgaaagattctcaatgtcaaaaccaatcatatgttaggcagttaggccatgcaagttcatgccaatggcactatgccaaatatcaagatgccatcttttgttcagttctgttcttcaaaattttttgtctagaataaatttacactttgttgagcaaaaagtgctgtgaaatcatgggagaaatgatttttcaagtgcaaaaaatattttttaaaaagaaaaaaaggccgtttgtggttcgctgttggcgccacttgttttgggggccttttgggagtataggattttaaacccctcaacctccctagcgataggagtttttccctcttagtagctagtactccctccgtattttaatgtataacgctgttgactttttgaccaacgtttgaccactcgtcttattcaaaatttttatgcaaatataaaaatacttatgtcttgcttaaagaatatttgatgataaatcaagtcacaataaaataaattataattacataaattttttgaataaaacgaaaggtcaaacgtttataaaaaagacaacgacgtcatacattaaaatacggaaggagtaacatttttgtttgttacttgttttcggttcttctatccttgtccactgacaacagccttctgctgcttgtgttgtgtaattaaactttacttttcttcttcttctattttacttttcttcttcttctattatattgatatgtaatcattttgcgcattagtgaaaaaagaaaaataatctatctattatattattaaaacagtcttgaaaggaggcaccacgttcgctgtggaagctagaaattctcacattaatcggagaaaaagaaaaggagagtccaagtagaaatacaattcaaaaatagctgaaattcggaattaaaaataagcgatattgaaagatgtgtccatataagaacccaatacaaaattaatcaaaattcgaaataaaaataaaataaaatccgaaattagaaaataaaataaaagttcaagtaggaatacaatttaaaattaactgaaattcggaattaaaaataaggaacattgagagaagagtacatataagaacccaatacgagattagttaatattcggaataaaaataaaaataaaatccgaaattagcaaaaagaaaataagagttcaagtaggaatacaatttaaaattaactgaaattcggaattaaaaataagcaatattaaaagaaggatccatataataacccaatacgagattaattaaaattcagaataaagaaataaaataatatccaaaattagaaaaactaaaagagagttcaagtaagaatacaattttgaaacaactaaaattcaaaaataaaaaataaaaatattaaaagaatgctatatggtattaaataatttttttaaaaaataaattctaaaataagaaaaataaaaaatatttcaattaggaatacaatttataaataactaaaattggtgataaaaataaagactattgaaaaaaaagaccatataaaacatacgatgagataaattaagtaacaagcctataaaagagtagagtggtggcggttgatacgacatataaaaactattagtaaaacaccaaatagaatcttaataatgattaaaaggagggatgataggcaggccatgaagcaaacgtgtaagatggttgccggacttctagaaagtgaaaaaaaaaccccattgataatcatattcgattttcaaaatctcaatgacaataaaaaagagaagcagcgggcatgatgtataggattatagttccagagccaccgatggttggcgggacttctagaaaataaaaaatgaattgaaacgatagttatgttcgaatttcagaatcccaataacaataaagagtaggcggcgaatgggtcgtagaggagtatagtggcatcatttgacgtcacttctaaaaattataattaaaaaatgaaacccaacaagacaataaattgtaaaaactacaaggtccaatttttaaaggttcggaacttctaaaaagtaaaaaaaaaaacccaatgataatcatgtataattttaaaatctcaatgagaataaagaagggagacaccgggtgagccataaaggagtacaatggcaaagccactgacggtttggcgggacttatagaaagtaaaaaaataaact

SEQ ID NO: 45099 - DNA, 1324 bp, Oryza sativa
ttttcctcaatggaggcaagtgtagcactcgtacttacttccttagtgtgtgtgtgtgtgtatatatatatatatatatatatatatatatataaagacaaaccctacatttttgtgtcgttgaccatccgtcttattttaaaaaaactatgaaaaaaattaaaaagacaagtcacgcataaagtattaatcatgttttatcatctaacaataataaaattactaattataaaaaaaattcatataagacggatagccaaacgttggacatggaaacttagggtttgtctttttctggaacggagggagtagtgcactgcatccgtggctccgtgtcacaaaatttggtaaagtaacaaattaaataatttattatcattgacaccttagtaaattttggtattttcaaaaactttttcctataaaaaatactaccaaattttgatcaggctatcaactaaacttatccaacattatcgaaatttggtaccgttaaaatgtgccaaacatttaagaataaaaaatttaataatgttgattttgacatcctcctgaacaaatgttgtgtttagttacttttaaacttctaacttttccgtcactttaaatgtttggacacatgcatggagcattaattgtggatgaaaaaaaccaatcgcacagtttacatgtaaattgcgagacgaattttttagcctaattacgccatgatttgacaatgtggtgctacagtaaacatttgctaatgacgaattaattaggcttaatagattcgtctcgcagtttacaggcggaatctataatttgttttgttattagttacatttaattcttcaaatgtgtgtccttgtactttaaaaaaattaaaatggaactaaacacggccaaagtcataaacatagggttgccctgagttgggaacctttccctccaacataaaaaaacgaaacagctcattagcatataattaattaaggattaactaaagctaacttaaaaaaaataaagtaatatgattttaaaagtagcttttctatagattttttcaaaaaaaaatacacaccttttaaccgattaaaaaactcgcacggggaaaacatgggtaaaagttgggaaagctcactgccaaaggcagcctaatttccagccttcgagtgttttgtgagtgctgaaatttcccaaaattcatcatcattacgggtgtgttcggacctccaggttcccaacccaaatcactagtttttcacatgcatgtttttcaaactgctaaacggtgtattttttacaaaaagtttctatacaaagttgaataaaaatcaaatta

SEQ ID NO: 45100 - DNA, 3661 bp, Oryza sativa
tacggagggtagtagttagttatctaatcagcatagccaaatttgaagtttacagtagaacctagttttaaagttgattttgagtccttttaatgttggattttaaaccgtttaaaaatatatatatatatataaaagttttacatatggattactcattttctagggtttattagtctcaaatcaaacaatcggaggcatgttttccggcacgagctttcaaacaatcagagccaagtttgtaatttgctttttctactgcttatcggctgaagctgggtcttgtctcagttttcatcattttactactggctcaaacttgcaaatactcgtatttctttgactctgaaagtatatatccaggagtattcccgtgtgagtgcgtgacaggaaaagttcagacctgttttctgcctgcagaaaacaatacaaaaaccaaaaccatcgcctcgcccgtgtagtactagtaaatgttcaggcttcagagttcacaagcgatgaaaatgtcttcttggcaatgtgaatgtgtgatggaacgaccagaaaaggacggtgatcctgttcttcttcgtttgatacacgcacctgaacttctctgaactgatgataggatacgagaagaaaagaagcacatcaaaagctcagagtttcagtccccgcaaaaaaaaaaaaaaggaaggaaaaagttcagagtttcagagaagcccattaattcgcaaatggtctcggactaacatggccgctctgttcaggcccaccgtttcttgcaggaaacatcttgggctgggctaacatgttaagcctatttagcgtatttaagcctatagagtacctaggccttagtaccttttctcatctccaaactttaactttctcgcttttcgaactactaaatagtgtgcttttactaaaagtttctatgtagaaattgtttaaaagaatcacataaatctatgtttcaattttataatagttaatacttaattaattatgtgctactgagttttcttgtttcgagtgcgctgaaaatatacctgcatagtgcataccattgaatcaagaggagcctaaggccctgtttgggggagcttatcccagctgcagcttttcccaaaagctgcttctgctagaagctgccccaaacagttcacagcttctgagaatctgtagttacatattctgaaaaatgaattaagaagccagaagctggagaaacggggtttcagagcttttccagattctcagaagctggctaccaaacaactgcttctcagaatctaaagctccccaaacaagccctaagctgtgtttgaggaaaatggaaaagagatacgtaaaacgaggtaagttattggtatatgattaattaagtattaattattttaaagttaaaaatggattgatatgattttttaaaacaacttttctatagaaaagttttccaaaaaaatataccatttagtagttcggaaagcgtctgcgcgaaaaagatgtgttttctctctcaatctcccagcaacgaaagcagcctaagtgtttcatataagtcgttttttttttttttcatattttttaagtttgaataagtttatagaaaaatataaaaaattccacacaaaatattaaatattaggtttagtaaaattaatttggtgttgtatgcgttgtcatttttttaatttaaagaagtttgattagaaaaaaaataaaagtagaaggcttaagaatccattatttttccaaaaaaaaaacctaacttttcctcaggccggcggcggggagccggccggcgaagcgagggttcctgccgcagtccgcgtggcggcgtcgatccatggagctagccgacgactctctctctctctctctccattgcgattctgacgaagcagacgtcatggcgccgacgcctttcgcggcgttccaagcaggaggaggaaggctgcggcgccgagaatttcctcccgcccaatcatcaccaccaagaacagccacgagaatgagattgattggatcgatttggactgagacgccggatgaactgcagctcacagacagtcatcagatcagatgctgcaagcctggagactggagtagctgtaaaattctcttctcttcccccgggagcagagtaaattcctgcgtaatcccaggaaacctaggtgcaggtggagcaggaggaggaaaggagaatcaaatcaaccgggagttcagggacaagcagttgggaatgtgctttgtttttttcctgacatgatttggtgtgtgtgtgtgtgtgtgtgtgtgagagagagagagagagagagagagagacttcctctgaacttctgaagagaaaagtagaaaagagaacaatttctgattacatttcaggcttttaccatctttcattttttgagtcgtgatgttttgttcctgcatatatgttcgtttgctcctgcttacaagttaaaaattgccaaatggttctctcattcgcaggaattcagagcaatttcgaaatcccgaagtgaaacgtggcgattttggcggtataccggattactggttcgatcttgtagtaactggagtgcatatagttgttgttactcctagtactgcagtattaaggctatacgcaaagagaccgtgtaatttatcattacagtgctgtgcagttcagtagcaaatcaactcagatttttttttcctggcgagctgatcagctgaagagatattttctgtcaaatggcagcacggtaagtgatgaatttctctatcatgttcagcaggggtgggctaagagagcaatgtgcatgccatgaacatgatgaagatcgatggcatgagcatctgacactctgactaaccaaagttacagtacttagtactactattactgcagggtagaaacctcctatgtgcagtgaatacatgaaggttcttcgtgcagtaaactgtaattctgtataacactgaaagctaggtgagctaaactgaagtttggattggcccaggaaaaatgcagcagccagagcgtgtctgaacttctgaagcagcatggtgtggtaatctccttttttactttatatccttgtcctgctatgtttgtctttacctcttcacagcagcatatgtggttaaatcccatcgaagaaccctctcatctaccaacacacactagcagatcataagtacattgtgcaatgtactatatagccttattcacaaaccaaaaaaacaatctaaaaattcagagatggccatttgcctctcacatatacgtggggtgaaaaactgctaaataattcagtaaatacagctagggatcatgctgaactttgctcaaattaaatacttgtctgcctagtcataggcttccttgataattttgcttacccgtgtttatatcctttcatctacctggtgttggctggtgctctcagttggcatgcatgcatgcacaattgcacatcatagttcaaccaaaccagtgtgagtgtggcacacctgaaccgtgacccccaaaatgtaagcaagcatgcgtgagaattttatagattctaatgcacatgtctcatgagcaatcaaaatctggtggttcttgctccccttttgaccacccaactaatcaatgacactaggggaaactgttttaaacactcgggtggatgtccacccg

SEQ ID NO: 45101 - DNA, 657 bp, Oryza sativa
ctgctggtgtctggttggctggctgttctacttgtctgtccccgcccattttgatttgacggcgtggccgatcgagaggcagtgctgggcgacacgatcgcgcacatgccggggggccatttggcacggttggctgtcccctgcgccggcgacgcccacaccatgtctctgtcgccggccggggcccgggccctcccacatcggctggcggcggggcagcagccacctcatgccgtgcacacgccgctgtcagaatcgcaccccctctatctcatctcatctcatcttgggcccagctcatctctgtcttgggcctcctgtctcgtgctgcttcttgtcgcctgccttcttgcctacccatgcatccatgccttctccaaaccaaaagcgtatactcccttttcgtaaaattagacttcgtgcgacgttggaactcttgcccaattaaaaccttccgcttcacattgtccacaacctcaccacattgtaattctcacagcctcttcatcatggtaattccaatgagagtcactcgcctatacgtaattcgttggtgacgatgtcttctctgccaagggtagccgagtttggggataggtcgcacgcctcacattacacgtgctcaatgcaagccaccgacgcatttgcgatacacat

SEQ ID NO: 45102 - DNA, 761 bp, Oryza sativa
gacttcttaggggtagaaacgtcatatcgtgtgtgtgactggatcaagacggacggaaaacgatcgagaattgacggaagtgttaaaaatgggaacatggtaaactttgggtgctattaaagtgaaccggtaactttcggtgctataaaaccaaaaacgtgaactttcgatgctatataaccaattttgccttaaaagtaattcaataataagctaatttttttcatcggaatatatccatgtgtaatcttgttttgaagatttaattgcaacgaatttaatggtgcaatcggatcatgatttggataagtaatttaaaagaaaaatcagtttaaagtagttttacacgtaaatcggaggcgattttactccgaattgatcgggcgcccgagcctaggctgccccaaaataccgtttaggagtttagcaatttgctaacgaaaaacaagaaaattgtaagtcgtcgttggaggttagaatggggcctaagccgaagtgtcagatttggagcccatctggagaacgccgtgcatgatgggccgcggtctgtcatttatgggcctatctagagcggcccatagccccgataccgggccaggccaaagctgactatgtgggctgcatggcccactcgccgaatttcccccctctctctctctctctctctcacggcccatgtgctcgcaattaccaaaactttgcattgtggcctcgtcctgtaaatgacaagggatcagatcaagcgctgcacaaagcacatg

SEQ ID NO: 45103 - DNA, 765 bp, Oryza sativa
actcatatctagcctccagtctagcaaagatatggcttgcatatggataggagagtttggcgaccggtttgccagaaccaatttgattgaggtcgttgatgtgtaatgaagaagttgtttgggggtggttaaactataaaagcgataaaattcaatggtccaaagtaaaaagattggtttactggtgattcaaagaaaaactataataataaaatatagcctaaatttcaatacactatttttttatgaaggaagtagcagtatggtagcatggaaatgaaacgatggactaataaaccgagccatcatcatgtctagctactactggctactgatctcaaacggattcgtccacatcttgtctatgactttcaatgcaaatgatgctcagacagattatgatattatcctaacaacttttatccttcctaagcgatcgatcgacgattaatttcacatatcgtatttaggctaagatttgtcaattgaatcatgttccattttccggtgctttgtggtagcacaaaaggaaacaaaaggacattgctcatgggaccccatgctgaatgaaggagccacacaagggataagagtgatagatccagcttataccaacatgaaacactgtgtttggcttatgtggatgaatcagtggacactatctagtgtatggagaggatccacaaatggggtacttggcaaattgagcatggtgtttgcccccctggttcaatggacttgattgcgattgatgatgattttaat

SEQ ID NO: 45104 - DNA, 1449 bp, Oryza sativa
taatacttatgcaggtgttcaaacgttcgatgtgacagggtgtaaattttttggcagggatctaaacaggcccttagtcaatctcagatatattaataaggatgtgaaaaaatgaatacgcctttcattaactgtatgcttctcctaagctttgatgctcgactaaggctgtgttcgttaccggggttgggaacccatctcctccgcacgaaaaacggagcggtccaatagcacgtgattaattaagtattagctatttttttaaaaaaatagattaatttgattattaagcaactttttatatagaaactttttacaaaaaccgtaccgtttaacaatttgaaaagcatacctacggaaaacgagatgaaagggttcggaacaggctgaaacgaacgcaacctttaactcttcacatggccaagctctaattaatgatatttgcaacttactattggaggtggggacgacggtaatcaagggagataaaaacgaggataataaagtgggccaatcgacacacgcctaaaaataaggtcttttagggtgaagcgaatagatagtaggttgtcataagaaatttaatatgaattactagtgcatgttttaagaccataaaagttgtacgaaaatactagcaaatgacttacagtacatttgcaatcaaagtaaatattcattctgtttcaatttacttgtcgtattagataatttcacactaaactaggtggtgtggaaggggctaccctcattaattacatgctaaccatcgtacgtcttctcaaagccagcaataaaattagaaaatgctacacgtacgtccgaaatgtccgactcctgtacgactgcaacgtccgtccatggcttgatccccgcgctgtttaatcctccaactcattgagcctcacgccgttgtgcatttgctgttttgacgtttagtcgtacgtcggtgggacaagaaagtcggatgtatagcagtctctccaagttaaaatttagaaattttagcaaaaaaatctcattccaacagcctctctacttgaatggctaaactagatggatggccaaacttcacctcccactagccaaacttggccagccaaactgactggccaattgtgggccccacgcctttccccccactctatcgatctatccccgtccctctccgcattgctcgtctctgcccgtcatgccaggttgcgaggagggaagagggcgcgtcggtagggcaacacgactatgagcgtcgcctcggcctctggctcgccgttgtcacgacgacgagcgtcgcctccggcctctagcggaattttctccgccacgagatccgcacgtggctgtgcagaggaaaaacccagggaaaagggcgacgacagggcggcacaacggcaagcctcgccgtcggcctccagcgccgatttctgccgccttgccactgtcctctgg

SEQ ID NO: 45105 - DNA, 2441 bp, Oryza sativa
agttaattgaaacggagggagtaacgaatatgaattggcaaaattaaatcttgtgtgcacctacagtatattttgaactatacagtaacattttgtattaccaaatgtccatgtccaagtacctttgactaatctctcctacagatgcaaaaggaggtcaaggaaatgaagaaacttctgcatcgacgatcatgataaccggcatattttcataaagatattctaactgctttctttcacaacgatcacttcacaatttcaaccaacagtcctgtctttgatcgatggtgcttgagaaactacaaagccggtctcctcttttttgtttacctaagggatctatctatcctagctatccaaaaagctaattagctagtgtatgttgtacatgtgccatgtcctacacatgaacggttttaatttagtacccaaacaattaggtttccccagtgctgaattaaattcttgtatagcaatagcattgttcatacatgctgcacatatatatgcatctccactgagctatcagtgctggtcgtcttgtcaactaagatacactacactccatccattcccctattctcctttgtggctaccaaccagcaccctcacagcctcaccaaaggacatcacattacacccctcaacacccaccaccctcacacaacatgttgtcctaatgtttcctagtgttgacaccctaagtgtgtgcaggtgcatcagtatgtacacaaaaaatgcttccattggtgggagtttgtcccatggaccatgatttttgtaccattccgtatagatgcggccaatcccatatatatacacatgcatgcatcatgtgtgtgataagcattttcattttatcatcgagttgcatgcaccgaccggttggattacttgatcgcgttgctagatggcaatatatgcatgccatatgtgtaatggtggagccagcggtattatcgagcatggatagttaatagtattttttgacaaccagctagtttttacgggcatcgatggtaattgtagtggtaacagtagagcttgggtggacatccgacatgccaagaactgccttctgcgccattgcatatgtttatgttgacgtgtacgcgcctcctcggttgttcatactttcgattgactatgcttttgcactgtaattttaggtaggtgttaccccacatcatgtgacattcacatggtagacaagagtctcctaacttcaattcatcttgtcatatttggccagccctggcctgacaatgtccctagacaatatgtgttgggggtttggaataaatgccgacatggtgagcctccatttagaactcatttggttaatttgtgtactatttatatagcaatgtgttttagttttcttttatttgatagtaaaactacacatacttcctctattccaaaaaaaataaagaatatgatacattacagtacaacaaatttataaaaaaaacttgtacaaattcattgcattaaaataggtcgcatcatatcatattctagtcttagttttttttccttatacaaggagtatatagctgggtcgatctgactaagggggtgtttggaagagaggggcccctaactgtgccctgccatatggttctccataaatgcctgctgtagcatccatgattgaaccatgtgtaacaaaagatggagcaggctagccaatcaaacaaaggaatccaggaggatatatgctactgacatgctagctcatcacacactgctctgctatgggtacccccccaccccccaacacacacacaaaatcgacgagggttatctatagtactgcacagttgtatcattaatatgtgggactatagatctacctgctcgccgcttccacaacaggggcggtactgtagaggatccgtgtcagagaaaaaaaaactttcatattttcctctctaaattaatttgagaataaaaatgttatacagggcctgtcgtttataggttttctttttatgcatccagaaaaaccccatgtcggtcatagtatatctgtatatgttactaagtaattgactggtatttttagcggaatgtgacatgaattggattagcttgacaaggagatcgtgccggaggaaaaggacaaatgatatttcatgatagaagatgctctacatatctatcgaaattatgcatttggtggctagctagctaggtccccttacgttctaaaaggtcatttttactcgttttccttttcctttaagttgcgtttctttcttgacctgaaaattatcagcagagatagcccaatgcaggaattttgcctgattattgtgaggaatgaattatttcctatgaaatttcttcaaaaattctgaatacgtgatatatatattataaatttatataccaaatgagtcaaaataaaagaaatgaaactgttttcgttatat

SEQ ID NO: 45106 - DNA, 580 bp, Oryza sativa
ggtgaataggcgttttttgaaattcatactttgcagggaagtaaataatctgaaacttccggtctgaatctggaacttctggtctgaaccgaaacgccacacgtagagttagatatagagataaagacagagaagtgtgcaaagttttctacacgcccttcaacataataatattattataagacacttttaaatacaaatataatcatatatgacatacagtaaatagaggagtaatttgacatcctttggaaataccgtcgcacccactgcacggcaacgtgtgggggtgctaatcctagttatttccgaaacatggagctaaactctgaattcagataattaatattgcagcaatctaatgagttactaagaaaaacataatctaattgaaccgtctccacagcatgcatatataaatgcggatggcggtgcgtaggcttagttagtggccgtcctccggcggcggcggcggctgggcttgctgctgcttctgccggatggcggcgatctcggccttgacgctggcgagctcctgctggaggttccgtatcacgccgtaggcgccgtgcacggggtc

SEQ ID NO: 45107 - DNA, 624 bp, Oryza sativa
aaaaaaaccagcaaaagcaaaagcaaagtaaagccctcacattatccatcgatccatagttccatacatatgcatcacatcaacgagtgagacaagctcaagctcctgctccttctctggtcggctcggctcggctcggctcccgttctccgcgcgcgcgcgccaacaaaaaatcacttttccctttttccaggtgacgctaattaatctcccggattagcgcgattaattaagctactagctagtattattactaatgagtaattaattacgacgcgtggtgatttgattggttggtttggttgattaattagtagttaatcgctcccgcgctcgtggtggtggtggtgttgatctcgtcgttgtcgtcgtcgccgtcgacggcgtgggcgttgttggtcgccgccatctcgtcgtcgtcgtcgtcgtcctcccgctcctcgccctcgccttcctcctcgatgctctcggacatgtcccttccggctccggaggcggcggcgccgccgccgccgccgctgccacggccgtcggagtccggggacccgagcctcgccgacgccgacgacttggcgctgtagggaggggccagctgctgctgaggcggcagcggcgggggcgggg

SEQ ID NO: 45108 - DNA, 710 bp, Oryza sativa
tatggcacaaatctttctgtgaccactttatataggagtatcccctactagctacctttgcagcaaatttcagagtccaactgctgtcatttctgaacacacattgcatccatccatccttactactgtttttgtttttgtgagagggattaaagtttagccccactttagtccctccaaccaaacaccaccttactgctgttctctttacctcatgccaccaatcacttgtcgcattgcctcttggaacctagagtatggactgcaggagacagaagcttgggctcataaacccaagccaatcatttggagatagatactgccatggctggctgcaaacaagaggtatagctaaagaaaacaaaacaaaacaaaatgcttactactcgctctgttccaaaatacaccatccgtcctagaaagaataaacttctaggctcagaagttgttgttgtctcgtttaaaacaaagggagtttggagtattaaggatttataggttgtttagaaaatactaagtttagggcaattttttttgtcattttagttgtcaatttttaaattttgaattgcatagattctctttccaagcatctaattggctttggaattattgaaatgatgggaattgtagaaatcagagaaggaatgcttatatgagtattaaaaactaaatactagaaatcctgatattttgaaacggagggagta

SEQ ID NO: 45109 - DNA, 1156 bp, Oryza sativa
tgattgttagtggttttatacttaggcccttgttctttttctcaactccaaacttcaactttctcattttccattaacacgttttcaaactgttaaaatgatgtatttttgacgaaaagtttctatttagaagttgtttaaaaaataaataaatcattttttcaaatttataatagttaatacttaattaatcatgtgctaatgagttttcttgttttgcgtgtgcagaaaatattcctcaaactggatgcaccgaacaggtctactaatccgtccaaaaaaaaagactactactccattaaaaaaaaaaacaaatcctagctacaaatctgaacacacatatgttcaggttcctaggtaggaattggtgtttttagacggaggagataactagctaacaatagatgtctaattgtgatggtctatacctatcaatagatatattatacagttttattaaaaaaaacatggtaattagtggatacccagtacttgatgggcatggacatgggttatcttttacgccagatttaactattaggtatgggtgtacgaggagtttaagatcttggattggacatgttcttacttctcctgaagctgatccacccatttccacctctacctcaaacaggggtctcctgcaatggacacggtgacccatgatatcgacaacctagaacggaagcttatgctagtgtgctacgcatgcaaagaggaatcatggattggcagccaaagaacaagaatttcaccaaaagagacacatcggagctgctgaatagccagcatgggctgcataagacatgggtcaagttgcccaactttgatgcaggaaacattaaactttctacaaaatttcttatctaagggtagatcctgtttaaattgttcgagggggtgaactctcggggtgtaacggggtatgtagtggtgtatgtgtgcacgtcttctatataaccggggaaaaatatcctgaaagtagggatgaaaacgactcggaaacgaacggaaaaccacttctaccttttcctttttcataccttttggaatcgaaatcgaaatcagaaatcctagatacggaaacataatcgatatatgaaaacagagtgaattcagtggcggacccagcctaaaattatagctatggtggagt

SEQ ID NO: 45110 - DNA, 720 bp, Oryza sativa
atccctatttaccagagtagcaacatcatctcatatatttttggttgcgtatggtggacttaattagttacacaactgcacaaccaacaccatgacttctccagttctcctccccctgtccttcctcttccctcatgatgagagttttaacacctaattgaataagctagcccaaaaatttgaaacacaacaaattaggtgcagaactaaaacactagtccataaagcttagatccatgcaaggaactgtccaaatttagtaggcaattatggacagggaaccttagttcattttcttttggcaatgaatcattaaccgggatcattttctaaatatgaaaaaaaacttaccttttatccttgagtaggataaaaaaacaaaggtttgaatccaaccaacaacttcttgccaagaacaacaatgatttttaggcgacctggatctgtggcagggctagatccttgtctgttagagccagagccaaaccaagcactactagatcctcaattttttaaaatgtaaagtgtgtcgatctgctccacaaaattcatagagaggctggagctaccatttttcgaactcagaactccagctccatatcatatatggaactcaaccaaccggacctaactgtacttagatctagaaaacgtcataattaatctgaccaactgtagagaacctttaatttacagagtccaaaaacatcaatgcttgca

SEQ ID NO: 45111 - DNA, 1159 bp, Oryza sativa
acaggtgcacatccctgtctatctgtctgtctgaaactctgaacatcaacaaagttgctaaagctgaaaaggaataaagcacaagggtttggaagtttccttcagtgggaatttctgtctcaggtcacattcagtggcatgttttgtgtaatccattacctccattagtgcatgaaaaaaaacattgtctttggactaagaggaagtgtgtttgtgccgtttatgaaatgaggagtttgagttcctataccgatcaactgaattataataacaggagtttccaagagatgttattgcgaaatcaataccagtccatctgtccctctttgcttcttcttttgggggatatgcaaaaggagttgtgttgcatcatgtccaactttgctgctcggttttgcaaagaaggcttcttgattcaacaccctctacagtccaaaatttgtggttgttatgatgtgttcattttctaagatgatacatagcattgggtaaccatacacaaagaaggaattgtgccattttgcaactggaataataaaaaagaacaccaaatagtaggcgaggtaatcccatttggaatccaattattagttattttaaacaaaactcgcaactctaaactatctgctaaaaaaatcccttaataaatactccatccgtttcaggttataaaacattttgactttggtcaaagtcaaactgctttaatttgaccaagtttatagaaaaaagtagtagtattttcaacccaacacaaatttattatgaaaatatattcaattattgatttgatgacactaatttagtattataaatattactatatttgtctataaatttagtcaaacttaaaacagtttgactttgaccaaagtcaaaacgttttgtaacctgaaacggagggagtagtggttttccaattgatgtactgttaaatttaatcttatgttctagagcacataatttgggataatcagctaaccaaacagtcaaacaccaacatgcccaacgggtagtccaaccaaacaagagtacgataatccttcgtaattccattccaaacaggattttgggcatgtttggtacagctccaggtctagaagaggtggatctaggtggagctctcttacaaaatgaaatagactggtggagctgtgtt

SEQ ID NO: 45112 - DNA, 1701 bp, Oryza sativa
cataaatttcagactcggccgattctagtggcaacttaactttgtggtcacaaaaaatgtcatggtggcaaacattggtcatcacaaatgttatgcaatttttcattagaagtttgggctaacacatggtgagaaagtattttgtcatagaacttggtagccatggtctcatgggtccaccgtagccgatcccatttgtaagtatgagattctatgacaaaatcgtcataaaaaggcattattcatcacaagagtcaaacctgcacatgacagcgaagtattttggtcatagaactctagcaatagttgtcaggaagacccacatgtaaatataaaaaaaaaacataaaggaggagacgatttgtccaatgttcacatgaactgtgtgcctttgcccgatatttgtttttccaaataagtatagtctgtcgtatggccgtatccctctttgagctgatggagctagaggaaggtgatcgagataaatgatttgagccaatgccatggctctgagctagacaagacaacgccaaacttgagaaggccaagtccaagatcgttgagctagagaagaaggccgaaatagagtagaactccgggttagtttgattaatattgtaatatgttatactaataatattgtaccaatcattttaatatgtatctactagactgtttttttctactgagtatctactagactgtcgattcaataaattgtttgctcaatattatacaatatttgtgaattttactagacaatctagcattcatatatttttctactattaaaaaacaaaggatttggtaataaaattatcacataggtacaagcatagcaccaagttaaatgtaatactaccgcatttataacttcaatataccagtagcgttagggatttaaacattaaaatctatggttttgcgataattttaatatgaaataagtagttattgttatacattgtcttaaatctatagcgacctacagcgttgtggtcaattgcgtgtaaatagtatggtactaagggtggcctacctgatagatggcgcgaaaacaagaccatgagctgggccttacaaaaaaaggtcatgtgaaaaccatagaggagaaggtagaagccccacaatgtgggccttttggaccaataggccaaaccatgcccatgtacgacactacttgctttctttcattcagtaccatatcgtctatcaaactagagcatgaccaattaaatagtttctactagcctctctgttgtaatgaacattacaacatgtacaaattaaatagggcaaagtcatttatcaatatagatatatcaaatatatgctcatttattagattgtatctttcctttgaggtagctacaattgttgcgaggtcactttaattagtttgtgaataataaacaactctataggtacgaaaaaggacaaaaccatttatcattatacattgtatagtatatcaaaattatcaaatatacggatactgtgagatatgacagctaacttttgtgccagtgaattatatatttgcaatatctctgcactataattatgtgcattcttggtccattttcctcaataacagttcaagataactctatgccaaaagtttgcaatgtcgtccccccatgtgcttgtgttggatggtacccatgttgatcgacatgttgtttccatggccttaatgca

SEQ ID NO: 45113 - DNA, 672 bp, Oryza sativa
ggatccccctaccctcacccctctttggaacctgacttagcttgtcgattacaattagaacatcatgttcaagcagttataccattgttcgttaaacattgttgtttgctatttaaatccgccccttcaatcagggccagtcacgggctgctagcgggggagccagcgcacaatgaagtgacgcttactgcttcttcattcacgcagggaatatcagcaatagtgaaaagagtctacaatattatttttctgtcataattgagatttattgcgttgattttgattcggcatcacgagtgaatgtaatattttgtcaatgtataatagagctattcatcacaataacagattttagccttaaagagaatgttgagttctggggagaggtgaaaaatgatttattagcgttttcattggtatgatgcaagtgtgaaagaacatcagagaaaaaatgtaccctgaaaagcatggctcttcaaatgccttcatattctaaatgtgacatttatcaatttacaaatgaggaccacatttttatgcaacagtccttggttgctatttttaccaagactgggccaaatttctaatcattttgctgattctagaaccttgcagtacacaacaatacttatatgctacatgattaactttccagatcgattccacgccgtt

SEQ ID NO: 45114 - DNA, 508 bp, Oryza sativa
gatgaaattaaaagcgctttgggacttgaaggcttgaggctatcattattactctctagtaatgaaacagtaggcacgtttctcgcaatagtcatctagagtataataataataatactatgacaagtttatatagcgcttgtgacaaaagtttcaaagcgctgtacatgtacacaaatcaaaattacttcaaacaaaaatcaatattactaatagaattaacattactcaaattaccaagaaaacaaaatattactaacataacttaacaaattatcattacttaaattaaccagaagatcaaatatttctaacataacttaacaaattaacattacttaaattaccaagaagatcaaacattactaacattactaaagaaattaacaaaacatgtaaattccctggaaattaacacattatatcagtaatagcaataatttaaaaagacataatgaaggcatggtaatatttattcgaacttattattgaacttaacttttggtat

SEQ ID NO: 45115 - DNA, 542 bp, Oryza sativa
atatatgattcgacaaccttagcaccgttgatgatacctgatcttgtgatgttcttacctgttgttgggtatggcaggcagtcgatctcgtctttgacggccaccaggacgccatccatggcagagagaggagctcctgcagttaattagcatcaagaacagtcaaacacttgacataatccaagaacaattaacagttaacagaagccaagaaatgaaatggtgcatgcaatcgatcaggtaaaagctgcatgaatgcaaagagtaaacgatgagatactgcaacaacagatgcatcagcacaacgagatgccttcaattgcaacagatcagcaggccaggccctgcaaggaatgtagtattggcctctgcgtgcaaccacatgcagtggcaactaaccgtccctatgagctatcaatgctggatcaggaccatgcaatgctttcagattcgatcaagcaagcaaagagctagtctagtcaatgcatgatcattaggggatgatgccgatgccatttctatggaatctttcatcagaaagc

SEQ ID NO: 45116 - DNA, 3168 bp, Oryza sativa
tggggatgtcgacagtgtgctccggcgatcttcggcgcgctccagcagggtggcatcacgatggcgcagaggagatgggcaccggcaccggcaccggcaccggcaaagaggagatggtcgttgtcgccggaggaggggaaggggaagggtggcgacggcggcatggcgcgaggcggcgacggtggaggctggggcgctgggcagcggcagcggcacagccgccgcctccaccgaccgcacccgcacctccgtcgtcgaccggagcagccgccacaatgccgccgtgttccgtgcttggtcgcggaacggcaccgtctccctcctttgcgccctcggccggagcagccgccacagcgccggccgtcgccggcaaccggacctcctcctttcccgcctcgccccaccggcctccctgtcggtcggccgtcggcccgcgcagactccctgacaagaaagtgatggagaggagaaagggagagaagatgggaaagagagagatgacgtggactgacatgtggggcccacgtgggtcccacgctgactcagccgccacatgtactaaaaccggggtcaaaaccaccgaaggatctcgggtgacctgttttgtatagttaagagaccccgcatatctggttttacggttcgaggatgttttttaatcccgataacaagttgagagaccttcggtgtactttttcctatatatgacccactgcgagcgtcagtctaggactctgatgtgccgaagccacgaattttttttcattttaatttttttatttttttaatatatatataaatattgtaccggcgaaaatatttacagaagtagagggtaacgtgaggaacggacaagatgaaaataaaaactagaaaaatgtatttttggcatggcgaaaattgtatttacctccttgcagcccttgcagaaggcgataagagatctcagtgcaaaatgcgcacaccttgccgccctccacctaggtggcaggggccatttctataaatattttggatggtttaatatttctgtaaatattattagaaaataaaaatttaaaaatgaaaaaaaaaactccccaacccaccgtgcacggcccttcttctagccccattttacctgctgcctcttccatgtctcttctgtttctagatcgagtactgcagtgagcaggggcgccaggcctttatccggattggtcccagttgaaagtagcctttatccgaaaaaaaatagcatttcagcgggttggtctcagttgaaagtagtatttggacgcatcctaattatagcatgatattttagcgaagcctcgttttaactatggtataatatggtataatgcctattttctcgaaggccttagactcacaatgcggctgctaagcagatctgtacgacttgctaaattcataggccataggccacgtatccccaataataatcaactcgtactactatgactatgtactcagtgatggaccacaacaatgggtcagacacacaggacatcattttgtcgtatgaattaacgacaaatgaatataacatataacgtgcatggtgactttatcatcttaaaggcgtcgctctcccctggggcagctcgcaaggccacgacccgtccgccccctctctcccacccctctcctccgcctcgccgtcgcccgagcggccgccgccgtgccgcgcggctgcaaggacggcggcggcggggcttctcgcttcctgaagctcaggcggtcaggggatccgtccgggcggcggcgaccgccgatccgcgccgctcggccggatttgacgagatggcgacagcagctagcaacggggacggcgacgctggcggggtttgcgatgacgatgatcgaggtaagcggttccgggcggggatgtggccgatggtggtggggatggtgatggtggagtcaacggatccagtagtggcgtgcccggttccgacggcggcgtggcggctggcgacctgcaggcggcctgcctcacgtctggcgcttggccggcattggtggtgaggaggacagccggttcaggctaggtccagatccggcgcgtccttagtcgggtcgggggtggcatggaatccggtcgttgtgcaggtggtgtgcatagtgcagatatcttcggtgtgcaggtgatatttggtggcttccgctgtggatgctatgattgagggggactccgaggtgaaagccttgctctagcaacggcgacgccctcgggcgccgttcaccttgttgaaggcgttgctattggagccctcgttcaacgccacttcaaggggattctccgggtgaaaaccttagactcgttaggatcggacgatatcgttgttctgtcggtgtacactactacaaagatggtttttgcatacgggcgagaagggttttcacatgcggttgcgccaaccgcatgcgccaaattgtctgcgaagatcgcgatttttgcatgcggcccgtatcgaagattaaatttttcaaattttattttcgcatacggctccttaagacgcccgcatggaaaaatcgggcgcttaagtgagccgcatgtaaaaatgaggtcatctttacatgtggacctcttaagaggcccgtatgggaaaatcgatttttccatacgggcgtcttaaggagccatctgcgaaaatgccgctcgatctttgtagacgccactagttatggtccgtttgcaaaaattaaggggtcccgtacagaaaaatcacttttgtagcagtggtaaccttcttgaagacttcattttagaagctttctcccttgttgggtgtaacgctccgcttttcgtgagacgttaaaaactaattcggcaaaaatcctaattgcgaaaatttcgttccttgagtgttgagtctgagttgtgccaaagatctcaatttaaatccctcccttgtctcgataccctgttatcaaagatcgtctcctcaaaattaccatcccaatgtagtcccgaagctcgattccttctattcggaatcccctcctggaaccccatccgtgaactttgtcgaatgtccgaacccttctattcagacttctctccaaaatccttacccacatatctcgttgaatagtcaaactcaaactcccaagttacactctcttactctaaattatccatgcccttttgactcgtct

SEQ ID NO: 45117 - DNA, 751 bp, Oryza sativa
acgttgacacgggaagccacagtttgccctttttttttttgacggggacggagggagtagaagacagttgcaatttctttcatatctgaaatggataatgtcgccggtgccgttacggaagttgtgagcgcacgtcgccggacttgcgcttttggatggttgcgaggaatattccgtcgtcagcagagtagatgcctgagccgcgcggcgacggcggcgcgattggccggtcggccggtccaagtgcttgggccgtttcgggaatctcgtcatgccgacccatgggaaagcttttcttacttcgctgggcatgcgtatgcatatgcatgtgtcgctgccgccgcctaccgggatgctctagacggttgaagaatttcaacaaggatatgcagtcgtgatctctctctctgcttctttttctgcttgcgtttgcgtttgcatggctaaaaaattcagcaatggaggcgcagcgccacgttgattgtttcatcacgttgctctcctttacttcttgactagggagactgagaaatttgcagctagaatgggcagatttgaaaacttatctgaaaatttcataaaattccgtccaaaattgctcccgtcggccgatccacgagacccatgggctggatcacaagccacgttgggccgggccgtatttttatctaccaagaaaagcaccaagttgcgggcaattttttttaacgactctgaaaaatttttggatctcgtggtcgtaacaagaaaa

SEQ ID NO: 45118 - DNA, 512 bp, Oryza sativa
attactcagcaaatcagccctgcaagcatgccatgtcgacattcttgtaacattgaatccgcagcataaattgcatccttgaatgcagaaaggctggatcttggcagattggataactacataattgagcagaaaaggacatggcaacaatttcggtttcagattggcacattttcttgggaaattaaaaagatcccaaggaaaatagccccagaaggaggcaacaagaaaatgattccacaagatgcaacctgtctcctcaccagtaaacaaaaatactgcaatttaaggaacccctaacattgggcaccgagaagaaagaaatgacaaagcaagcatttctgcaaatcagaggcaaccccgagaaatcccacatggcaggagaagcgcccaagacgattcgagcaaacccaaccgatccaagcacgatgcaacccaggaaacacaaacaggccagtcaatcgagcaagaacttacggccatttcggcagggaagctccaagaacagcagc

SEQ ID NO: 45119 - DNA, 2387 bp, Oryza sativa
taacgccgtgagctcgtgacgttaatctccgtataaccaagccatgttgtcaccatactcagtcacgtattgagttgttttaccgtttgatcgtacgctggtcggacatacaagtcatacgtatagcattgttcgttgtataatttgattacagactacagtcatatgagatgatagaacactgggtgtactgtaccttatttcaggattgcactgtatccctttgtcatcctccctcttctctttaggctcttctgtactttcaatttttcgtcacatcaaatctttcatacacataatttttcaatcacatggttttaatttcaaacaaactttcagaattaagtgtgaactaaacacacagtcttgtttgtttcgagtacaattactgtacatcgacagacctgcatcttcatccgatctacgtgtcgcagaacacaaactgacgacaacgatgggattttttttttttaaaaaaaaagttcaaattgtgaaaccatgtgtggttatagttcttttgtgatgggaaattgacaagtaccggatgtgcaagaagtgtgtgtgtggactaacgttggtcaggttgcgacatctgtgccaagacaacggttgtttggttcatgtgtgtgcaggtgatcggggtcgatcttggtcaacggcggatcgggactagactcaaggaggagttgaggtccaaagcgatcaaggatgccgggtgacaagattggacacaaggttgcacacggtggacgaacaccgtgtgaggaggtctttgcaacaggcttcacaaggtcaagtgtgcaagcatcggattcgcgaagaaatcagaagggactgtgcaagtgcattgctgctacagtacttgctgtaggtagcatacatgcatgtacacgtactgtacttgtgcaaggaggagcttgcactgtactggttgctactagcatggctcggtggaaaagtcaagctagctagctgtgcatgtgcgctgtgattggttggcagggaggccaagccaatccagccgttccacgtggcccaagatggtgaatggctcggctcggcaggcctgcatcgtccaagcagcgacggcccaagacggcggcccatggcgcatgggctcaggaggtgcaggcagcttgcatgcgcaaggacgcgcgcgggaaaaccgtacgcggcaacctccgtttcgcgtgactcgatcggaggcgggtgcaggagcgcgggacccacacgcgattttgcaagcgcgcgcgggagcggctcagcgggacgcgtggcggcttcgggctggttgggcgctggcgagcgcgcgctgaggaaaaggagacggaacgcgcacgacgcggctgggcaacgtggcaagtttggattcgtcaagacggagagcacgcggattcatcagcaagaagaccatgtgagggttcgggtcgatgaggtggcaatcatctggagcttttcctttgagtagaaggaacaatggatggaccagatctgttctaagttagggtttcgccctaggggtatttgagacaatgtcttaggggtcttaggctataaatagagagatggatgcaagggtggaggttgctccttttggtaatcattttgagatgctcggtgagagagtttccgtgtgagtttggagtgtgtttgcccgagaggcttttgtattaggattagtttggagtgtgtttgtccgagagattttaagtttgtgttaatgttcctctgaaggtgtatgtttgctcctagttgagcggttattttgcatcacctataaatgaaatgatttgaaggatttcatttttgccttgtccatttaaattccgcaatttaaattccgcttgcaatttgaactttgcgatgatgagttttgctctctctttctcacctctcttctagtttcgggaattccttttctcttcctcctctagtttcgggaattccttctctcttctttttctctcttcttttctagatccggcttctaatagccgcgattctagtaaggattttgagaaatccggcttgatgagtattttcgggggcaagatttgaattgctatattcaccccccctctatagctgttcttggtctttcaattggtatcagagcccggttaagttcgttgtaacctaaccgtggcaacgaacgcagctatggaggaaaaatactctgcgaaaccatttgttttcgatggacacaattttgtcatttggaaggcacgaatggaggcctacctccagtcgcaagggcataatgtgtggaataaggttaaatctccttacactgtgcccgatgatgctgacatcacgcctgcaaatatggctcaggttgattttaattatcgtgcaagaaatgcaatcattggtggaatttcttctgg

SEQ ID NO: 45120 - DNA, 913 bp, Oryza sativa
ttctctgaaagttgatcttgagtctgctaagaaagagaattcatacctacaacaatctttagagaggtttgctcaaggaaagaaaaagttgaacatgatcctagaccaatccaaagtgtccataaacaatcaaggtataggctatgattttgctgagtctttgaggataggtacccatgagattttaggtgtcacagatgggatgatagaactagctcaaaaacctataaccttcaagtctgcaggtttcattggaaacactagttctagtacacccaaaacctcagaaccaaagatggtacctatgactagcaagtctaagcctgtagagttacctagacccaaaaatccaaaacaagttgagcacaagcaaaaccagagacaaaccaagcctgtagagaaaaccaagtatgagtgcacctattgtgggaaagctggtcatttggtaggtttctgctttagaaaggctagaaaagagcgacaagaacgtcttaggactagaagagctactagagtccctgagaggttcgagtgtgcgtgtcattgtcgttcaagtggtgtatctcgctttcctcgccgagatgtgcaccctcgacgtgacctagcagggttggggcaaaacagacatggtcatcttgcatataattctgctcataacactaaagatgcttgtacttctcgcatggttcagtactggattcctaagtcatttttcactaaccccagtactgaatcatcgagatctgctgtgtctttcttgtaggattttggagtagggagaagtaattcttggcttgtggactccggttgctcacgccacatgaccggtgaagccaagtggtttacttctctcactcgtgcatccggtgatgagaccatcacttttggggatgcgagcagtggacgcgtgatg

SEQ ID NO: 45121 - DNA, 526 bp, Oryza sativa
tcacagaagacacgagatttaacgtggaaaaccctccaaaaacaggagagaaaaaaccacgtgtgccagccagcaaaatatctttactatatctgaggtgaggttacatcgccgtaaggcggcttacaagaggtatatatatggtggaactctaaaagggatgacgggcaggcctcccggcgacgctccagcccaagcctcccgacgacgggcctccgctccgctacggcagaagctggcatttattaagtgcaaataaatttggaccacaactcaacaacaccaaacagaagatcgactttagtggagtttatcttgagaaaaggtaggtaggtaatacattctaccatgagatacaatcacacaattaataacccaacaattgcagattcggtaacgatcctacaaggaagtcacaccatatagagagtaagcataaggatagtggctagaatttcattcgaaatcaatcatcaagcacgcgttaccaaccatgatgacaactctcatttggccctgaaactgc

SEQ ID NO: 45122 - DNA, 791 bp, Oryza sativa
agagagaggagtgtgaaagttcatggcccctgctgcctgctccgtgctctttttgtgattgataatggcgcttaacgctgctaatcctaaagttgcagggacatgcttaactttcaagagattttaaaaagctgctacgagcaatgcattagcaaactttactgaaaacaacctttctttcttccatttagataagtatatgtgtttgtgttaaagtaggtggttttttaacaacagctcacacctttgtagaatgtaaatttcatgctaggttcctctggcaaaacggcggtgggatacgaaactatgaacccataaaaacacttcgaaaatcgaaagaaatttgtgtatacaaagaaattcgtgcaagtctttctgcactagtagaagtagaactgtacaagtactgccctggctattcttttttattctttcatctgctgtatttttggacgattctgtaacgtgccagtacggggacttgcaccgtgctctgccaatttgaccaagtgtgattcctgcattgtcggcagatttctggtttacaccctgcatttctctcctctctgtaaaacgacggcttatctcatcgtcgtcatttgtgaaagaccaagaacagctatagagggggggtgaatatagcaattcaaatcttgcccccgaaaatactcatcaagccggatttctcaaaatccttactagaatcgcggctattagaagccggatctagaaaagaagagagaaaaagaagagagaaggaattcccgaaactagaggaggaagagaaaagg

SEQ ID NO: 45123 - DNA, 528 bp, Oryza sativa
aggatccaaatccttacgacaaaggctaaattttaaccaaatcatgaaaatccaggccactttcaaaaaagtaaaaaaaatgtatgaatttcctttttcttctttggaaatgtaaatgctgaatctgaacaagcacggcacctgacatgaaaaaatcaggttcgtctatcagaaaattcagagtaattgcctgaactaacattagtttgcagcgcatacagtatgggcttagatgggccatgatgggctgggccacgtaatgttacattgttttgcattgttttgaatttgttgcagtaggccatctgaggtgttgggagatctttcggcactatggctttctgaactttagttcagcaatagcatttacagagctgaggatttttttttcttttaccttgcaaatcccaacggttttgtcgacaacaattctgatagttacgcacatgtttcaacttgagtaacgacagttcatttttcagcagcttgtaccagtctttccattttttttccacaatgggaaattca

SEQ ID NO: 45124 - DNA, 729 bp, Oryza sativa
aaacatgtccacagagccaacgcacttgggtaagagaataaaaggttgcagccagttaagtccataagttccaggggagatttatgattccatttctcatcctcaatcaccattcactcgatcatgttgcttggccaccggtgctgtttctgtgtcatcagttgacaaatgcaggtggagactggacaatgaagtaatatatctgctggctgcctgtagggatatttgctgattgacttcatatatgtttaagtctctcagctttggtgcttcaggtagagtagtcaactctgggcaccgtctaatatctaatttgtaaagctgaggaaatgttacctcctcccttggagttccatcgactgcctcccatttctgaaagatatccaaaccatataattccatttccttcaatgctggaaatgcagaatgacacacggtgctaactccgccagacaattctgaaatcacatttgacgcttttggtaaggcagttagcctaggacaacttttgattatcagcttttcaacctcaggaaatatcagctcttctccttttacctcatttgtgtcccaccatgtctcaaaatttctcatactggccaaggtaagctccttcagtctgcaaaatgtaaaggaggtgtatatgtcacagttgaacaagcaatttaaaccatccagtccttcaaggcaaagaacttctagagctggcagctgccacagtggaggaag

SEQ ID NO: 45125 - DNA, 576 bp, Oryza sativa
tgtatcggaaatggtatttttgaaccagtgaaatagtactacataaatattgaataattataagcaagattggctagctactgccttttaaacaaacgagacaaaaaaatgcaggattttttggtaacaaatttatcctattgaaatgcaaactaattgtttctgcaatatccaagactaattgtgcgcctgattctgtatatgaagctacacactgtattttgctttggagaattgtaccaattattatcaagttacagatcaaaagatatgcaacaaccatgagttacctttgttttgaaattaaactactagcctacaaatagttagcggagaaaacacctttatattaacaaaagcgtgagtccgggtgacaaaacaaagtgggggaatcactaaataagagcatatttttactaagtgttgcatatcatgtattcatgttatataaactgtatcatagccattgttttcacttgtttgacaccactaaaagttgtttaagagtaaaactcaagtgtgacatagttccctgatgccagaatgtaacagaactttgtaagcttgcatagatac

SEQ ID NO: 45126 - DNA, 1082 bp, Oryza sativa
catgaatttacagacatttattttctccatgttttttccccatgtatctatattcacactgctgaactttgcattctattttgcagttgcaagatcttggcagcacacttattgagttgtggaacctaatggacacaccaactgctgaacagaaatgctttgaccatgttacgtctttgatttcagtctcaccaaatacaaaaatgccccaaggatgccttgcacgtgaacttattgagaagtttacaattgatcgaccattttatgttcttttgctttatttggattgtcattgaagctaacttaatttttctgtaaaatccggttgaggttaagaggttgaattcttctgatcattgtcaatacaactatagcgattcattgagggtaagagctcacataacttttatgtgctttactaatctttttcgttataccttccatatttgattactatgcagtagtaattatttttctgatcattgtcaacacgactacaaatatattttatagtagaacctctcatgaattacactgaaaaacaaaggccgaatcatcgcctgcacaattgatctttaataaattgaacctgcccacactacctgtatgtgccacagttctatatagaaatttcgtgattagctacgttatgtaatacctacaccaaccatcctataatactatcactataatttcattgtaccaatatctactattaacaccactattcgcttttatcaccggcaccttccacacataaaaatacttatagacaaattttcatacaggtggacattcaacgaattatgtttctgcgcaaaaaatgtacaagccacacctgatctaaaaaattacatcaatgttattaagcgtttcctacagcattcgagcaaattctatgctgagactgttaacaggacattccttatgcagaatagagttgtaagttcgtacacctcctgttcattccttcaaatttataatacatactgctcgttttttctgcgcaccacagaaaactaacataacatcccagttgcagtactttgctaaagaattttcagaggtacatcgaaccactg

SEQ ID NO: 45127 - DNA, 746 bp, Oryza sativa
tctaattagttctgcgccttatgtgcttatcacatagtttatgctcttctgcagatgtcaggctccatctatatatatctacttattactattagaggccagtacaatgcctgtatcaacactcctgtgctaactggtagatacttttgatgcacctgtttacaagtgtttatatactactctatgaaatgaacttatgcaccgcaagtggttaaattctgaccatgtttcgtcagatctgtttacattgtttctttaccttcacttgctccagctgcttacgtacagaaatcaccactgtttcctgcttcgtttctttgttggccgttcaggcggcgcgcaaaggcgcgccccaggctctagtacctctaatacgtgagactagtgtggtaaccgactacaccacccaaacttgccgatttagacttggcaaagaatttacatatacattttttctactcgtttcttaagtttagtaagggtatctactcatctgccatggcatgttgtttctgcttcttaagctcctgacctaacttaattcgcagagagcaattcagggaaaacatctatgaaacaattcatggcacgtttaatttagattattaccatgaactgtctactagattataaggctacattaaatattttaagaaaaaaaattaacaacaaaaataaaacaaatgatttaagcaaatacaacagaaacttttttaaaatttttttaaagcatgtaacaaataata

SEQ ID NO: 45128 - DNA, 975 bp, Oryza sativa
ctatatttttttataaactgaatcaaaataaaaaacgtttggctagaaaaaaaagttaaaacaatttataatatggaagaagtattattccatacaatagtactattataaaaataaaaccccatgcttattcgatttatttttctatggtcgtgctaataaatatttatagattcatacaaagaaacatttttagatggttaaccagcagtgttgataataaacacaaaacagcagcgtgcaggaagccaggaagaggaaaaccgacggcgacgggacgcaccgggccaaaattttcaaacttgttactagtactgttctcttcccttctctccacttcgcaatggaaaaaaaaaaaccgggaaaaaataaaaatgtttgggcgtaccacggtggttgtacctagcagcaacgcgggagcacgacgccgttaacgcgctcgcccgcgcgaaatgacgctactaccctcgttgctcttatccactcgcgcctcgtaccaccacaaccctcccggtttccctcgtaaatccggaaaccgagcggaggtaggatggtcaattcaccgcgccgtccgacttccccaccgtggcgttggatataatcttctcgtatcgtctcgtccctcttccgttttttcccccaatttctcgtctccccccttcctccaatatatcggcggcgatcccggctcgaggagaggaggctccgccgcgattttttcggtgtcgcatcgaaattatggtgagttggtttcctccctccccctaattcccgatccgcaattcgattgcgatctccattgcttgggttctgccttttttgggggaatattttgggcgatatcggcgaatatatgctgggctctcgcgcgattcctttttgattatggtggttggtgttcggtgcgcttttggttgaggaatcctggctctaattcggtgccattatgtgggtttgtgtttaatttggggatgt

SEQ ID NO: 45129 - DNA, 684 bp, Oryza sativa
atgtcagattctatatttatctagattgtgaatatgtgactttccaaaacagttttgtacgtcgatttgtcaaatgataacagcaagtatggatgagcgataactgacgatttgtgaagctgtttttgtatgagatgattcctgtgcacagagctggtgtgtgtgtcttgtgctatgaaacttgaaggcgtgtgatatgacctactgttttgattttgctgtcgtggtctagtacctgccatatcctgaactgaattcatgtttgtgaaggctcgcattgatgcggccaacgacaagttatgggcttcctgggcgctggatgaatctgacatggatgtaagggtgtagttcacgccaaaattgaaatgttgattgaaattggaacgatgtgatggaaaagttcaaagtttgtgtgtgtgggaaagtttgatgtgatgaaaaagttggaagtttgaagaaaaaattgggaactaaaccaggcctaacttgttggagcgatggcttgtgtaccgctttgttttgtgggtgtcagctcaatctttgtgcctaggcctagctgccactgtgcaaggaggcatcaaaccaccactctaatctgagagttaactgcacactaaacaggttttagccacgcagaaagcgagaggcagcaagaacatggcagtcacatgaccaagggggatc

SEQ ID NO: 45130 - DNA, 1273 bp, Oryza sativa
atgatcgaaatgtcctccgagataaagcaatatgtttttttttcctttcttatatttgaactattgttgcttgtgggtctatttagttgctttataaaaaaaaggactataacactgagaatcgatatgtttaataccattttggttgaaatttacttcacacatttgatcaatgcatacacggtaaggaggtgtttttagaaagaaacatagaataatctatgtaaaaacataatacaaagtggtgatatgtctattatttataaaatgttcaacaaaaattacgtataaaatcgtaaatcgccgagtaatgtgggcattgcaagtacacgtaacggaggaaacacaaaatatacagtaaatataagtatagcaagccacggacatcaaacgtatggagaaggtattagatcaaactagtggatacccctcacgttgcagtggggaatttacaaatacttcaaataaaattcgaagagaataatttgtaatccgtatactcgtaatgcctaaaaggcattattttgagctccttaatagttgatgtggaattttggacgtgtatatcctttatagatatagaggccagattaataaaaaatacattatctaaaaaaatagttgatgtggaattgcaattgcacatcacataggaatggttatgtattgggaatgtgaggatccaatggttattgctttccgcgttatacggttaaaatgcacattaagatttatagcaataaatcaataactacagtaagtaaatttatagtgtattataaatgcatatgacatatagatggttaagattaaattatgaaaaggaaccaaacactactattttctagatattttgatgtaccataccctaaaagttcgaaatcgcaatcctaattactaaataggttggactcatgctcctttatataatgcagcaaatttgcagaatttttttttcacatgatttagttcagtttctcccgaaatatctaaaaaatcatccattcagagaagacataagtggcatctttcaaacgccaccggtataaccgctggttctacgtaaggcagtactagaccataaaatatctgtccataatcaaatgatgcatgttttatccaagataaccaggaactagaattggccaaaaactccgtgcagaggggagggacacaccaaacttattgatgaccgcagtcaacacgcagcaccactcacatgtatggccttgcttggtataagtactcggcatcgaatcgaagtgtaacgcat

SEQ ID NO: 45131 - DNA, 626 bp, Oryza sativa
ggagtatatcactgttttgagagtggtttgcactgatatttccccggttatctgagcccttgtgttttagatgaagggcccagattaggcctaacgcaccactctgcactggtaatacttccgtggatccgcatcgtcctccttccttgtcgagccgagcagcgcatcatctccatcccgcctcaactccgccgctcgatcgcctccacccgccgccgttccgtctacctctccgacccccggcgggcgccgccgccgccgccgcgcctaccatggtaacctcctgcccccaccttatcccgttccctttctctacttacgcctctctccggatctggcctctgggccggcgccgcatttcccctttccgcccaccgcgacgaggcctcctggacccgccagatctcgcctcgaaacctgaacccttcctctggtctactccacggtatattgatggatcgacggagcccttccgataaccgatcacggattctagaaggatgggatgagattgtttgtcgctttggttcgagattgcattctatttctaaaaatcagattatttgtggcgtttgctttggaagtatgggtgagtgctcatgtgtttgtgctattgtaggctaata

SEQ ID NO: 45132 - DNA, 676 bp, Oryza sativa
atatgtttatctagataaaaagatgctaatactatcttaacatggatgtcacaagtgtcaggtgcacttaaggtttgaatttttttttcaagtgctagcatgagacatccaagagagaatttatgtaactttcaagtgttaggaatgttgtacaccatgaaagagaggaagatacactgttgatcatcatcatgcaccagcactagcaaagcagcaatgacaaaattaacaaatccaaaggcaatcaaagagtacatgatacatgtacaatcccctctagtaggtcctaaacaaagataatctggatcacaaatctcaaactgaggataccataccatactctaccacgtacagatctctgtctgtctctactttctctctgtccttctctctcaccaaacctcaactttccccttctttcaggcctccccctctatataagctgccaatcatgcatccttggcaacaaagccaaaaacccaagaaaggagacactgatcattcttgccatatattctaccatatatacatacatatacacacaatttctgtatatatttcttgctaaccattgttgctgctagttgcttcttcttcttctcctctaccttgtcatcgtccgtagtagaagtaatcaagaattcaagatttctcattggctgctgctgccatgaag

SEQ ID NO: 45133 - DNA, 685 bp, Oryza sativa
actaattattattctatgatagataatacactcgttaatagatctcaaaacatatcagccattctttcaaatgtgcacacgctcaaaacgtccttgtgataaatttatcaatctcataggttgaatcttctctcgaagatgagcttatttatactcttccacaatataagggattttgagtttttgcttgcaacgtttgaccactcgtcttattcaaattttttttccaaatataaaaaatgaaaagttgtgtttaaagtactgtagataataaaataagttacaaataaaataaataataattttaaaaaattttaaataagacgagtggtcaaatattgtaagaaaaacctcaaaatcccttatattataggacagagagaatatgtttttgtattgagttttttcttaaaagaagatattaatgaccgttgatggcactggtatgcaaaaggcaaatgacaatcccacgtgggcagtttggtcattgcatcatctccatgtggtaggcctgcgattcgcaccttgcagagctcactgcacggtcttctggctccagtacatttctttttcttctgagcggtcaaagtgagcggttttcaagctagccctcgtcgatttcaccgagacgatggagaaagatgataaggcaatgcggcaaaaggaggaagcctttcgtgcagag

SEQ ID NO: 45134 - DNA, 645 bp, Oryza sativa
caaatatgtgataagaggaaatggaatgccagcatatcaagtaacttgatcatagggtgcatccatatgttgcaaaacagaaacaggtaacacgaaaaggacaaacaacttacgagggaaaatgtattcgaaatcggacatgttggtccccaagatacccagcctggttgggcaatcctgacaatagtaatatatttagcactttgctaggaacacactctggtcttagatttaattaataattgcataatttacctttaccccttaaaactataacctgccctggttgaactcctttgggtatctgaaaaaaattcaccagatatcaactacgcaaaatacgaaaattcacacttcaaacacaccatctcatgaaatttatggtaacatggagacatgcttgatgcttccataaagtcaggccaagttaccgggcattataaatataaagggatacattctatgaaacattgcatggctaggtttgtaaatacaatatgtaatgaagaaagtccaactttggtcgctcaagacttcatgtcttaactttttccaaataggatgatgtggatgatatgtgctaactaatgatctgtttcgcaaaagaaaaacgaaaagtaatggcgcgaagccacataaacgcaa

SEQ ID NO: 45135 - DNA, 3706 bp, Oryza sativa
gactggtagtgtccatgtatctcatctatctagatagtttgtctgagcattcagtcctgtggaaaaggcactagtttaagcggtaccattagttagattagctgttttctgtagcttaagcaaatgagaaatcctattccattagattttccttcagttatcatgccacatgatatcacaaatatggtaccatcaatgatgctcatgtaatttctccctccaactactgccaagcatgttctggggtgtcagttgtatctgagttaataattattgggtatgactggtagtataggatatgtcagcattttatatgatcgcttatgaaactactaccatgtacttttgcaaaatttaattaaagcttttctaaaaatcaataactgaatctagatcatgtcctagtgtcgtaaataaggtgagcagacaataccttttttttaatatatatatatatatatatatatatatatataactttaaatgcttgatttttttagagtatgcaggagaatatatgcttgttttttatgatgacttgctgaataaatacactacacaaagctttaaggttgattgccctgatctagcatatactgccatatgtacggtcgtccactagttctcatttggcatgcattgccctttctttttgacccgatctagcatatactgtaatatatacagtagtccactagttctcatttgccatgcattgtcctttctttttgagtaaagctctcatggtattgtttgatgtcagatgggagagggtacttggccaatgcaaagatgtatgtttgcccttcatgtagaggtgcaggaagagtaagtatttgcttttatattcaattttccctttctaacatgaatgctggatatgctttctaaacatatccactggtggtttgtgcaggtttccattaacccattcacatccatttgtacttcttgcagaggcttgggaaagtaattaaggtaagggttctgtgagtaacatgtcagatttttctttttttaccctatctcatttgtgactattttcacaggattactgcctgacatgcaaaggttcaggggtggtagatggcatgaaatatgtaaatgtgaccattccagcaggtgctgtgcagctaaccttaaattatcgttgttagccagctcctttccctgaaacggctacaattgtcaaaatgatttacattttttctattccacttaaaaaaacttcaaataaatttcacaaaaccccaggtttgcgggtatgcataacacgacttttaccagtcattgtagctatattacagacacacgtcaggctaacacatgccaaaacctagctctattactgcgccttatccacatatattgcacatgcattctcgtgaaaaatgtaaaatctaagttagcttgcatatatattgctccatctctttgcgttgacaggttcattcaaggaacatctggcatctgggctgctatgttgtcattctagtttctagttttttcttttctcaattgtaaaaaggatgttgcttcctagtttgctaaggttgttttgaaactctttataggtatgacatgttgcttacaattaaacttaagttgagactgtgaattgtgttttcatgttaattactccttgtttcactcaacataggggttgattctggcgatacaattcatgtaccagaggctggacatagtggtggacgtggaaccctacctggaagtttgtacattaagcttcaagtgagaaaacacctacatgaatgcttgacctttttttttatgaacttacaagttctgtgaatatattggtgcacatagttatttattattgctgacataagccttatttgacttgtcaatgttaaaagtttgttgcttagtactgaggtgctaatgaggataaggaagataggaaaacatgaggattacaatatttcgatttgtcttggcgtatttgaagtttagaatgaaaataatatattaatcagtttaaacaattgtgcttgtagattttactcattccatttttgttcggtactatgttgaaggaaaagaacaatattttctataaatattgtagcaaagtcatgaaatcatgcattagctgagatgattcataggtatagagagtcttgcatttctatgtaagcaccttaagtccttaacagggttttcatgatttttgctgcaaattacggggtcctggctctcactatgtagcttgttatggattagtttgcatgtatatgtattaggacagactagtttccatcctttggttcatccaaatatgtgcgttaaagaatctatgactctgaccaaaatataatggccacttgttgcactataggattcctcatctttatgcaagtttgacaccatgggacttcataagtctctctatgttgtttcattgtctttcagtcatggtcatgttctctgttattccggatgaccctccaagtagtttgttttgccgtttatcctggttagttagatctatgtagtataaatacatgcaatgtactggcttgtgccatgtgtgagcagtacgctattagcctcagcttatctcaattctcaagcaacccagctgctgattcttccatcaactatgtatatcataggtagcaagtgatccagtgtttgttcgtgatggtgctgatatccatgtagacaaaaagattagcttcacacaggtagtaacaaatattccttctgttattaatatttaatatagagtaagcatttgtaagaaatacactacttttcaggaatattttcctactgctaacatatgtacttcgtagcttgcttccctcctaatatagactgcaagttatgcgaatcatcattctaattacaattcaagaaaaatctagtccattcaggcaataaaaactctccatttttcactataaatactatcttgagagatgtagaagccttcagaggttgacgatgctgtcttggtgaacctatagaggtggtgaaatcagatgtgatagtttgttagatttggggaacactattattgtgattattctctgttgaaaactcttgtatcaaactgcacttgatgaatatctgtgcctctgtggaggcccttcgaatttgtgctattaattaatggtgattgtgaattgtgatgatattgttgcttattgttttcttccttgaaaaaaatgacaggcaatgcttggtggaaaagttgaagtgccgactttagatggcacagcagaagttaaggtaacaaattagcaatcctcatatactactactaaagattaggcacttctgtcatagtaacattttatataattttgactatttgctaatcttgtctatatacatgtacacacgtataaagaactagtaggataaaaaacaccatccttcaatttaagggctcgaagttccaactgtaaatcctaaaatggaacatagatgttacaatctctccttattgagatataaatatataaagagagagatgatgagagagaaggatataaacggcttatttttggttgggggctggttataccggttgacataattgatggattagatactagaactttacagttgtataacaaatacaactattgtagttttccataaagaccttgatattgtataacaaatacgacaggaaaaggtccatcttttgtcccttaactctcatcagagt

SEQ ID NO: 45136 - DNA, 2025 bp, Oryza sativa
taatatcataagatttatagatttattattttaaaaagctatgaatttaagccattgttttgggatacaattttgtcagtaaatcgatgctccatcattagtggcatctttctttttttataaaactaaagatagacaatttattcacaaaactacatattttaaaaatctatcgtggtaataggtgtacggatagcatatctaaaatctatagttttgtagaaaaaaaaagacaacaccaaatccatagttttgatgtacagtaacttaaatatgtaattttgtaatattatagcttagatatgtagttttaggatgattttgttaaagtgtatgtagttttataaaatttactttgttttttatgataggaaggaaagaaaaaaggaaggatgcgtctaatacagcttaatactatgccttacaatcattatgtatattatctgtaaggtcaaatcagtaattatgtgaagtgatcgaacacgggtcaaatatggattttctcgtaggttttttatgatgaaactagtccacctaagtttaagtcttagacttgatacgtacgctcgtatttacggctaattattatttcggtgatagataacatacccatcgatacgagatagtcatgatgacttcgtgaattttaagatatatcgattcagtttttattttaaaagtcttgtcgtgttcgtaacagtgtcaaataaaatcgcagaactataaaaactttcttgatgaaattcttttgcatatacaacaagtatagtgggaaagaaaaggaaaattaggagataaaagatgaaagagggatctcggactatttttttccttgaagggcggatcctttgtaagcacggcatttgttcgtgttttgtgcgtgtcttgtggtaaacttgttcaatatactagcgtgcttactttgttccaaaatattgatgtaggttacatgtgtattagtgcacagtattcgtgtttaatagtactgcttgtgaacaaagaatccagtctcagcatgcatcgttggcactttccggccaaaaagacttgcaatttattgtactactctttaccggcaacctgcaaagcaattaaaatggattaataggtaggctttgaccaagcgtgctagggatctatttggcacacatctgcagtttcatttttttagctgaagcccaactaaattattccgatattttatagaaagagtgaaacttgttagagtgttcttacaaaataaattaaagaggtagagttggttttagagtttagacagttccacaactccacttcaaatccaacttttaatgttaaatttagaagttggagaccttccaaataggccttagggtgttgaagacaaaaggatcgaaattcatgtaaatttcaaaggaatttgaattgtcttaaaaataattgttgcaaaagttctataagttccaaaaaaagtggacttaacattagctcactagtcactactcactacctatgaagaagaaaatgagaaaaataaataaaaataggtcaccaagttgaagctgtagtttaattctccctttatcccaaaatataccccctcaaccagagtttgatcatcactaattaagcaagagacaccgagaccaaacaccaaagcatccatcattctaaaatcaatcctcatcaatcaaggtgcttcttcgctgtgtatccaactgaaattaatttacactttaaatattgcatgggttgaaccaatagaaaaaaattggttggttgtatgcttgcatgatatttcacaatgcacatttacagtttgcacaaataaaaaaaacatattgtatatgatgatcattttgagaaaacctaaaaaatcttaggtgatgatataacttagataaaaataaatgagacaaaaccaccactaacacaaataccaataaataattataaccacatcaaatatcatctggatcacctcaataaatacaatacatgtacccgatagaattaagatactaaagggtgggaatttaaaaacaa

SEQ ID NO: 45137 - DNA, 1273 bp, Oryza sativa
gctttatctcaagtcgggcatcaattgatgacggacggaatcaacaacttcgatcatcgtttatttcaattggcatgctcttttcgaccgtaaaattgattcttatggattattgtaacggtatccctggtagtacgtacgagcatgtgtggagattgacttgaaatatgctagcgtacatgtcctagtaatcgtgtcgtgtaatacgaatagaatcggatgatttgagcaacgatgtacgtgatatccatacggaccctgcgagtttcattcgctcagtatccacatcacacgaactctctttcgcagttcgctcgaaagtcctgacttttcaatgaatattacgcgtgacaggaaacggatacagatgacgtaccatagttttgacaaaaacatcttcaatttttaaatcgcgggagaggacgacgcaatcctaattgaacatgaggcaaaggcaaatcacgcacgcgagggcatcgcgggctcaaattggcatgaagaaaatcactcgcgcgagggcgtagcgtgcggcaagggacacgtgaaaagtgcgggcccaattaatttacgtgcatcttagatatgagggacactttggcataagataaaaggaaagtatttgatagaaacttaaaattaaaaccgaaacataaaattaaaacagattcaaacatggatgatgtaccaaaattttagtggatactttttaaatttctataatagtagatatcttaactacttaaaagattcgtatttttccattcgccacccctctattcgttcgtatttttgtccgtccctcaaatcccaatccgattttgattttttgaatgatcaaaaaaattgaaaaaaaaagagaaacccaaacttcaacacctgaaaaacgcaaatatatcgacccaaaacaccaaatacatcgagtccgttgccgccgctcgggattggttgggcgccgccgccgctgctgcctgccggtgatgggggagggcgctgccgcgccgctagtggtggggggggagccgccgtcgccgctcacggggggaggccgtctccgctcagggggagaggcggcgccaccgccgccattgcttggggggaaggcgccgccgccgtcgtcgctcggggggagaggcgctgccaccgccgccgctgctcggggagagatgcactgccgccgccgcttgggcttggaggggggaagaggcgccgccgcttgggggaaggatgccgtttcgagagagcggtaaaagaggggggagggggttaggtttga

SEQ ID NO: 45138 - DNA, 1041 bp, Oryza sativa
taggtatgtggtatccataaccctgacaatctctttcattatgaccgatttccagaatcgacaagattgtccctttatatggaaagcaacgaatataaagacaaatgatataaaactttttaatgttactggccagtagatccacgcgtttgtgcgacaatgacctccctcgctactaaatcatctcattcgccgaaaaacctaactcagcctcgccaaagaacgatgacaaccaagaaacggaatcatcgtcttcctcatcctgcaattgagaaaaacaagaacctaacgaagttcgagcaacgtgtgcagcatggatgtgagtcttcagtcgggaagcagaggctgccaccacctccaccaatcatgacatcctttctcacatgcttgggcatgacaagcttctcgtgatcgatcatcatcccactctagcaaaggagtacgttgttggtagtacaggcgagccctacgccccccacgccttagccggtgccagtgttagccagcgatgcacgcctgatcccttgtaacagccttcccaccagaaccgcgtagccagcccatccgacgggcgggcccatttacacataccacattaccactccacatagtgtgaaagctttcatgtgtaaataaagaagagtggctagctgtgatgtcctacgatccttttgttccaaccaaattatatctcctgtgcatagaacttctcttttatccaacacaggttcgtaactgcatcactgtcggttttcgaaccaatgggatggaaatggctgtaacgacactaattttgctcaaattaatttggtttagagtagccgagaagtgaagaacttctgcagtctgctagatcaggctctaattttgtcttcatcacgtcggattggaggctatagctacaacatggttttagtggcacaaaaatctaaattttgtgagcttaccctatactcgaaacaaattgtcccggtcagtaagtttgtggatttgttgaatagagagcatcagatttgataaagagtgctatgccggttcgag

SEQ ID NO: 45139 - DNA, 665 bp, Oryza sativa
tgaacgagaacgagaacgatcgatcgaacgagagcgataacgagaacgatcgacggaagacaagtgagaacgagggaacgaacgtgaacgagctagggaacgtgaacgagcgaacgaacgaggacgaacgttaacgtgaaatgcaatatatatatatatatatatatgtatatatatatatatgtatatatatatatatgtatatatatatatatatatatgtatatgttacttcgcatttgactatatacatctttttgtatcttgcagaaaagacgtgttgtcggagtcgtccgtcaagcctgagtggaagagctagccctagaaggaattggagcaggcaagtgacgtaataatataaatgattgttatatttgtaatgcaattaattaagattattagacctgtaattagacttatcatataagattgtgtagtgttctaatattatttgagttttaatataagattgctttatttgtaattagacttagtatgtaattattgactacggaagtggtgcgacaagtagcaattgactattgtagtcttaattagacttagcatatacgcacgaaacacttagcatacatgacattttagtcttagcatgtaatattatttgaatatatatataagattactttatttgtaattagacttag

SEQ ID NO: 45140 - DNA, 740 bp, Oryza sativa
ttcctgcagccctgcttttgtctgggtttcatgatactacacttcctagaccgagcaaaacctacatgaaggagagggacgattagacatcgaatgagatcatggactttctattgggcttagatggatttttctctgactgattggtaagtttagtacttgaagaaatttttagactttgggaccccaatatattggcggcccagtaggtaggctcaatggcactgtgtttttttatctgaaacagtgggtggacaccaggcttaagttgaaaccggttgcatttgttctctatttcggagaaatgcccacaatacgtgttcgatgatttgcccgagagcagtaggaggaatgggctggcttcggggtgacccactagaagtgaggattgttgtggtgtggagaggtcaaaatgagtaagaagttaagtgcggttgttgaatccttgtgaaaagaatgagggtgtaatgatgaacactatgacagcatatgcattggtagaagagttagggttttaccgtggtaaaatgacaaggttaggtgttttgtttcaattgcaggtttttaataatttgattgatttaactgaggcacctggagttgatacaatcatgcaatataaaacatatccaaagcttaattttaataccctactcggctaatatttgaacttggctcattatcatgttctagtttggcccatatgtgatgtagtttggtcccatgtgtcagatgtgttc

SEQ ID NO: 45141 - DNA, 1534 bp, Oryza sativa
atcgttcactaaaaaccggcacatatgtaataggtgcaagttcttaattagaaccagcacctattatctttgtgacgtgtccgggtcgagacaataggtgccggttcatagtaataggtgccggttctcattacgaaccggccctattacattttaacatggctcgggttatcggtgccgacttttcatgtaactgtgcggtacgagcgtgtatcactgccctctctacaaaatctgtagagctcgatgagatctacaactttgtagttggtaaccttttgatttaaggtcgtttgagtgtccgaaaatgtgttataatgtgtcgaatctatttgcgtaagtgaatatttaaaatttgtaaacagtctcggatcgagacaaagcatatataaaagttgtagatctagatgagatcttcaattttttagttgatgaaaatttcatttgtgctcatctatggtgttaaatatggattataagttaggacaacaatgtctcaaaagattagcatttgtttccaagacaacaaattttcgtaggtgagatggtaaggaggctttagatggagttcgaaattttgagtttgaaacttgcttgaggcataattatgaatatgggttgaaaaaatcatgggatttctgggaagtgaagtgtgaccgtatagatgctaaataaattgcaaatatttttttcgggttttaatttgtagcacctacataaatttcaaatgggtgcacccctataatttgtcggttataaatttagaatcggcacctatagtatcacataggtttgtaattagaaccgatacctatagtcaccaataaccgaggttattggtgccgaccaatatgtgtcggacctaaaaccggcaccaattggaccatggttgtatgtagtagtgattataggcaagattcagtaattaattacatatatatatatataatagtagtgattatatatagcctaattgttttctggaccactgttcttgtctatcttgaaccactgatcacctaaatctttagaacttctagtgtttccataagactaccttaaatttaaaaattaaattaaacctcaaataaattgtttgacatatagatattttgcccacggcaccgagatggcatagaaggtaacattgcaacatgaatgctcactgttggctgtgtagaaacagtattttgccacgctacgacggttggcgtggtgaaatctttgccacatatactatggttttcaaccagcaacaattttatatatatttccaataccattgaggtatgctgtgacctaaattttgtgtagaacttttagagcatttcatacacggcgatgttatacttcagttaatgctagccagcctgattttactgtggaaatgacagcaaaccaggcgctgcttttttactgcctctggtagttcatgtcactgtatgatatttaagtttatttattatatgtgatagattgtagggacaatcatcatatatagccaacttgttgcaacaaaacattagttatgcaa

SEQ ID NO: 45142 - DNA, 1532 bp, Oryza sativa
attttgtacagctagcgttgctgttgatgggcatatcagtccttaggattacatacatccgggcggttgacgggcacattgattccttacaactaaagtaattagggtgaatagctaaagtggtcctccaagttttatccgaggctcagtttagtccttgatgtttgaatctatctatattagtccttcaagtttttattttacttcacgcttatccttgaagccacttagaagccacattgctaaacataaccaacaacttccttgataaatgacacttataccccctcattcacatatataagagaaaaaattgcatgcaatgaattttttatagataatgaatagtaatttatgtataacgaaaataaattatgtacttgcaagtgtatcgatagccattgcttaagtttcatgtgcacatgctgaaataataagaaatacatctgcaatgctgtttgttcatcttgattttctcttttctattgtatagttgtatagaaattaaaggcaaataggacattttccaacaaaaatattgactagggatggccatatggcatatatattaagtggctcatggatgattgccaaaacaaatacttaggggatctatgtggataaaataaaacctggcggaccaaattgatcattcggtgaagtttgaggaactaaatttgctattcacccaaacaattacatgtaaatacaagtgcatatgatgagtcaagtactcgactctcatgaacatataccaccgtaagaaacctaacatgatgtattttctgattttcgatggtacattaaatccatttctctatttatttgattactgatacaagggttttagcaactctatgggctggttgtatatttgtgggttagctggttgtacattctctcttttttagaaacactttttctatctttgcaatatcagtatcgacaaatgtagagtaacgtggtcggaaaataaataaaataaattgtgctcttagtctacgacaacagttccacgtgcataatgtgttccattgcatcatcaatatttttaatatacgtacagaagctataaatatttataaaagtaagaacttctcaaatacagtaggtcatttctctttgcaatatcaacaattattgggaaatcacattggttgcacacaatgaatactttatttgccatttttggcactaaagtttggattttgctcgctctaccaatatgtgtcacctagttgcaatggaattaacaattcacatttaacatttcaaattagccactttaccatttaacctaagcatcacgtatgatatcctaataattcggacgccatattctttcaagttgacttccgatccatcagcgaaaacgctttctcaaggcatcaagacacacctacgcatgaatcaaacaagaaacgatatgcgtacacaagttctttctcaacttaactcaacattatcacacaacagtattacatacatatatatataagtcataaacatgagataatcacgagtgtccaaat

SEQ ID NO: 45143 - DNA, 1279 bp, Oryza sativa
accattcatccttaatgctgacatatttaggtttatcccatggcatggcaaaaaggatctaatggtttttaattaattactgcccactgcaaaaaaatcacacagaaaaaattaatgacattgccagcttgattaataatgcaattatcatgcatggaataattaatctacccgacatcggcatcaatactctcatttcctagaacctataaccggatgagacatttcctagggttagggtttagggtacgaatccggatgggaccgcacccattggaatatttatttccagttcgatagaagagagaaaccgcgtgaaagttttaaaataccattagccccacttgtcaggtctccatctccgctctctctctctctctttcttggccagtgagcacacaacgcatatggagttggctccaccagaaagcaccgaggcaacgtagattcactatgcgagtggtgagaccgggtctggtgctgcacgagcaccaaggcattttgccgcagctattctcaggaggcaaacacaccaacgacaatgacactcgatagcacagtgtgcttgacggctggatccctagatacatataatcatcgtgacgagcttgatcaaggctggcgcagacttaggcggcaagctccttggctagccagtagtcaccgtggatccagtcggcgagcttgcatgaagtgagtacgggtctaagtggggagcttcgagtcttgcgccagccagctctgtgggcatcacctctcctctctcctctactccgcatcggctatcttgagccttcttctccagctcgtagattaaggtggttctgtcgggaagcatcgaggcatccaggagaaggagatagagacctgactttgtatattctttcaagtggtatttcataactttcaagtgctttctctcttctattgaaccaggaatggatattttattgggtgtggtgtacagcagcaaatttttacattttgagagtgtttttcctaaaagtcacttcgtgtgttgtcttacaactaaaaccgtgaaatcagaatgttctttataaaccagccacatttgtatcgatgttaaccaaaaagcgatagaagatacaccaatgtgggcgaaaattatttggctttttcgtaggggttaattcttatttaattacactcttgtctcttagaaagagctctaatcaatcggataagacagatggaggtaccttgactcttccaagataaacagatggttgcatataaattataatgcaatgcaaataaa

SEQ ID NO: 45144 - DNA, 4708 bp, Oryza sativa
tttttagctgtattccaccattcgcaaatttgtccatcaccgccaagaccatcttcaacattcggtaagtacatgataatgtcatatcacttaattgatctcttcttatttgcaaaagttatgccatgcattcaaattaatgctccgttattgttcaaattgtagggatcgcaagagaaaatgaaaataattgcgttcctctttgttggtatgatttttgtctgttcatgcactaattgtgtgttatggaatatagaatcaggtagaccaccggaggatttgcaccagaataaaatgaggaatttattggccagcactgatagaaaggttgctcctggcgatagaattgatcatcggtgccaacgtatcaattatccaaattgcaagtgaatgagctattggtaaagcaaatgaggtaccttaaagatactgaatgtcagtgtaggaaataagatgtaattagctaggctggtttgtatttgtaatataaaattttatgcataactattcaatttagtatatattgttcaatcatattgagaattatacacttgtgatgttttgttggaaataatatgtctcatggtgttagacatcgtagtgcatgtggcattggtaggtagtactttgaatcaggttggttaacttttttgaatttggcaacaattcttcatcccacaatgaaaatatttttggctgtatttttattgttttatatttagatggtaagattcttattattaaataataagagagattacaaacctgttgtttaaagaaatataaataaaaaatatataaaaactaattatatgtaatatctttgaatgccacagaatataaagctgaccaactcttgcaaatgcaaaaacttatgaacaaaaatcaactaccttcattattcttccaacagaacaacaaaccgttgtcaccgaacaaattgatgacccatatgccatagatggcaccgctgatttgattattgacaaccgttcaggcgtgcaatccttgtatttatcgatgacctcgctagctggagagtcaccaacaaagagttaaaaatccttacatcgtaattatcatggaagatgaacaccatgaacctaattatctaatccttcaaagacttcattgagaaaaccctaaaaacatacaaaagacagatgaaacactggagtagcaggagatgtggcaagacacaagggatgggtttatgatgtttcccattcatttattgatttcctagaagtcatgattataaaaaaatattgttcctataggagattgcaagtattatttaatttcttaataccatggatgaggtctatattcatttattgatttcctagaagtcatgattataacaaaatattgtcctataggagattgaaagtattatttaatttcttaataccatgcaggacgtctatgctttgtgtatgcaatacccaagtatccaaatacacgcaattagctggaaaattaccaaactacacacactatatcagaatttgtgataaatatcaacaaagtctaccaagtatttgtatagaaatacatattatgtacacactctgtcccaaaattatatagtttgcttggttaaggtcaaattttgaaagagggggtgattttgattggttgagatgagaagcatatatgaaaattaaagaaaagataggtatcataggttgagatgtaagagtaggtggaggaaagatgtttatgcttagttttattgagggactaggtcgaatagttatattcgtgacaaaattttaatgaaagaaataagaaaattttgtagtagttaataagagtactactagtagtaaataatattcataaacaatatgtaaaggcaattggttgtggcctgcgagtcttcccttcatccttatgatgtcgctaagttttaagatatcctataagttcatccctagagttttccgtctatccctatttggtttgttaatatcattaatttattatgtaatgttttaaaaatgactatattgccttttacttggacataggttcaagattaattaaaagaataattctcaaaagttgaaatcaattttagctcttaaaaacagaagggatataattatttgtccccatatttgataacggaattttaaattttgaaatgcttttcagtttaatttgttgtctcttcaggggtacatttcacttctacctctatatggaaattttcttcgaatttggttgggattgatttaaggaaatacaaatttttttttggtataaggaaatgtagaaatgggtgatttgtgcaatttccacttttgaaatttcatcaaacttgatttatattcatttaaaaaaatgtttctcttttaatcccttctatatccattttgtttgtcatccttaagttgacagtaagattctcattgttacaaatccagtgccaccttggtataaaaatgattttactagtgagaacatcaattataagacattaaatggttcaaagttgtttcacccaaatttccgaaacaaatgtaggggataagctaaaactcatagaacaaaaatacagaaaaactttggggcccgcaaggaattttcacaaaacaatgtaagccctgtttagttccaagtgtgaaaagttttggcgtgtcacatcggatatacggacacaaatttgaagtattaaacgtatagtaataacaaaacaaattacagataccgcctgtaaactgcgagacgaatttattaagtctaattaatctatcattagcaaatgtttactatagcactatattgttagatcatagagtaattagtcttaaaagatttgtctcgcaatttacacgcaatctatgtagttagttttttttgtctatatttaatacccatgtacgtgtccaaacattcgatataacagggcgaaaagtttttgcatgggaactaaacagggcctaagacaactaacaccaagaaaatcacacgagcaagcatgaaatacatcaactgtatttacaattacaaggtttgatatactgattatataaaacaaataagtatagttaattggatatactaatatactacactgaaatgaaaattaagggcgaaatcttgcagaatcacacctttccaatatcatcctttgcgatttatgattacatcgacgaactctagctaagggactaacaccacttgctggtggtattcacttctaatgttctattgtattgatatttgcaaaactgtggtccatataatcgaagatctctcaaagtagattgaaagttattacttttattcgtgtttacaaagtgcaacaacactactcctctcaaatagatcgactaaactcgaaaccctaacttttctctaaactcaattctcacaaaatttataccggaaggaggcatcaactcccctctctatttatacctgaggtaggtagcctaaagccacaaactcaacttgtacaagaagtcctaatctccaaggaaacattcccgcaaaggaaacaaactttacaaactctaatcaaccaaactggacctttccaaattctactcttcatctcatacgcacacaatatctccaccgtatgccatgtggaatcttcacaaaccacgtacattgatccttagcctaagcatctcggatgctatcctgatcatctggacgtcatattctcgtaagttgactcccgatccatcagcggcaacactctctcgaatcacacctacacatgagtcaaccaagaaaccatatccgagcacaagtactctctaacttgactcaacatttgcacacaatagtattgcttacgcattgtatccatctagaagtcataaacatgaattaatcacgaaaatccaaagaaacatcctgaaactgaaactaacacagagccgacaggttagaccatcgggctggccggtttaaccatgcaacacacactggtctgaccggccgagtccacccgatttgaccggacccaaattgacaatcacaatcctatttacatcttccaaaactacttcgctaaatatctccaatatctacaccaattatccccaatacccattgctcatcatgaaataatgatcaaaacacactttgattttatagcatgatctcatgtttatatctacaaaactactatgaaaataatacagtaaactggccatatttttttttagataatggaattacttccggcatttgctcaacgagctacaaccatttattacaccaaatcgctcaaaagcattcacaatctaatgaaaccacaaagcacaccaatttaacgtaaagcaacacaagctaataagcaccaacacaagattaaagacccacaattattgaatcctcttcgtggacctccatctgtagttggcgaaaatctgcatgaccattgacacaagtttacgacatgcatcatttattagcttgatgtcttcatcacacctttgtagttgagcccaacactgaagccagtatgttgccctgaaaagtacatgtatataagatttttatggtgctttataataaccatatcatttctactaagccaagcctaacatattgcagatgctcctacaaggataagtttcttggttttttatcaataccccaagccaatccctaaaaatatgatatatactatgtggatggtataacccaaaagcaatatgtactgctctccaaataaatc

SEQ ID NO: 45145 - DNA, 780 bp, Oryza sativa
gggctaaagatgttctttagtcccggttcaaaagggcaacgggcatatttgatctttagtcccggtgcgcgtccccaaccgggactaaagatcaactaaagatgatctttagtcccggttcgaatgctgtcagggcatgtcaggccctccccgtatctttagtcccggttgataacaccaaccgggactaaagatggtaactttagtcccggttggtaataccaaccgggactaaagatcccggtgatctttagccccggttggtgctaccaaccgggactaaagtcccacccctatatatatgtcttcttcctcctccagctgcccgagcaagcttcaaaatttcttcaaaaaagaggggaggtcatgccaaaatttctattgaatttattttggtgattacatacaaatcggaggtgcctaaaaggtttgcaacttcatcctccaatgttttttttgtcatactacatttgcacctatgttttgcacactttttttgtctccaaaatgtagttgtaagttgatgagagagaaaatgtgtgtggggaagaaagaatatatagaaatttagttcatttgctaaacaaggttttataaaatagttgagaaggaaaactctagtgaaagttaatcttaaataatagaaaacaaactaaaatgaaaattaaaagaagtaaaacacattaaaattagtttaaaactttacaaatagttttaagaattatttggtgtaatattttatgatttttgtatgaataaagatatcttataattattgta

SEQ ID NO: 45146 - DNA, 6532 bp, Oryza sativa
cccgtaccaattttcatagaaaaaacggtacctcatggtaccttctcaaggaccgtaaaattattctaaacttatatatggacgtattactcagagatattacagatttcctattgtttttgtttggccatgattttaacatataggaaagcagaggtatctggtcgatccttttttgaccatatataaccttggaacagctgatatttcttgccaggaagcatccctcagtaaacatttgtgcttttcaatggaaaacttgctgttcatttgtactagtaccatgttctcaaggacaatgattttgaatacctcagtaaacaactcgttctttaattttctccaagactatattataaataccatgttctatttgaatgcaagataggactacatgctcgtgaatgattattgcctgtgatttgtgggagttacatgctagcccggtctcgttctgaaaattcattcgacaaagatgcttctgaaagagtgtgttcggtttccaatcttatgtagaataattttctagagactgttttaaaattgcatttaaaatcaggaggtccacactatagaggtaaaattttcaaatatcgcctagaatactttcaccttatctagggacagtttctacagcttcttttaggcactttttaattagctttttagttttattctatctagaggtacattttaggaggttaatatgcgttagtaaacgggcaataggtttattgtttgtacaaactgtgtctcctcttttataaacataaaagatgcttctaaaaatgactaaagagtcacaagacataaagatattgtgtaatgtgttttcatttgtagagacaattcaccacaaggcatttgttaggcattttcagaacgcctctatgttgttagaaaaatgtctctgtagtgttagaaaaacatatctacaatgtgtttttgttgtactgtaaatctgaaagtcaatcattttcatgtatttggtgacaaaatcactaccattcacttttgtacatgccatgtcacgaattatttatcgtgtgctcgttgttcttatctatattcgtgccgcacaacttcattcgacaaagatatttttaaaagagatgttcggtgatgcaccattcaatcattttccgtgttattggtgacaaaattattatagattcctttatggccataacacgccaagaattattcttcatgtgcccgctgtttttgtccgcttagtaatgcgcatgatcttgatccactacattccacattagttgtggaatggttgtcttctttgaatgatagcaatgattcttttcaggtactttgcatggattaaatacttatgctttacttgtgatgttgcccttattttcataatattatttatgtctttgatgttgtccaaatgactggctggaataaattcacaaatggttatatttgtgcgtgataacacataactataagtcaaattaatcacatatagaaacattttttttgtgttatagtatattatcccacgtttctacgaagtttgtcgtttggtccaaaaaaagagtcaagggaaccaagatgtttttatatagggcatcacacgtacgtatttaattttgctcctgtagttatccggttctgtagtttcataaataattatacattttatttatttcacgaagagatttgatataattaatgtaaaaggaaatgtttgcagagatatattgtagtacaccaacttgatcgtaactatgttgccagctccctaatcgaattgttaccatgaaattgttttgcagaacatgtgcccatgttgtgtcctttctccgatggtatccaatggttccattcttcatgtcgtagagtatggattagggtgtgaaatatcgaaatttctaggttaactcaagtaatcaaatgcatttatagatgcaggaagatccaagcgtagggcaaaagaaattgaacaacacaaaggcaaccaatccactgttgttacaacattttttgagattttagaacttcccttaatttgaaagagaaatttgattatccaaatggggtgcatagttagcttaatttctagacaaggcatctcttgaagtttgtattgcaggcatctagttccatatcatctagctacattgctaatgaacatttattggtggatttactggtagtctacattggattgctattatgttatagaacttttctatcttgatatgttaatatgaataaaactaacatgatggtcgtcatgattaaacatatgtcatgtataagtacaaggggggaaggcacaaaaaagtaagtgtgggttgtctagctagtttgatcagcaaaccagtactatgcaccatcggttaaaataaatgttttagcataccttaatctatattttgaaaagtaatcacatattgatgcaatatgtctaatatatattagtaatatttgatgcaagaatgtaacttgacaataatgccagcgcaatcataatttaacagttttgtgtatgaaaattttcagtcacttctcaagcataatagagaaaaatgtatcttctagccactttttagttagaacctggcgacaactacatatacaaggattcaaagattacagtgggaagtttccatgaggaacttagaagatcattatcatattttattcaacctggacaatcagacatgggaaatggtggagtgactagttaaaattatggaagatgaacaacctaattagtgtttatgaattttgtatctatggtgctcaatttctgtcgcagtaagtaatataatatgattttcagtataccctcttctctttgagtttacatatgttacaccattacctcataattcccacaacgtgcccattacttgagattaattctcattatttacccattgtgaattatcaattgtcagttgattatgtaacattaaaatgtttctttcttaccgactagcaagttacttttttgaacaatgatatcgtggacctaagtaaatatcaacacagaattgtatcatcttgtagaatatccagtaaaagagaagatcatgaaccaaaacgccgagttttcttgggcacttttccgctgttcaaattgctagatccctatatcattggctttgtatgggaagacatgagggttgagaacctttgaacacaaaagaaatactagctaataagtgcagtgcatccaaaacagatgttttattcattagacaaactggcagatctgtcagcgcacatgtcattcatgttcaatactaaagttaaacaatcataagatcagtcacaacatttatattatgaaatttctgaggtcaattcagatagctaaattttatttagcatatatgcatgtttttcccatttccctcaacaacatggaattttttgtagcactgtttcttcagaaaatcacactactggataaaccatctttggtcggttgacccaaatccacaatagtctcggttccattaaaaaccgggacttcacctcgtgtcagaggctgtcaggtcccaaaaatctttagtcccggttggtaacatcagccgggattaaaatcagtgattttttcctactgggactaaaaatcaatataccgtatataatcccttactcttatcctcaaaattttctatcttctattcctcctctctctctctcactcttatcctctccttctattcctcctatatctctcacactccttctattcctccttctctcgactctcggtagcgccggtgactagcaagcggcggccaacgaggccggcggcggggaacgtcggtgggggcctgggcacggtcgacggcccgcggcgagaggcaagaggtgcctgccgcccacggcaggagacggcggccgcagcccgcgacagtagctagcggtggctttatttctttctctttttttaagaatttgtgattcattggatctgtgttatttgatctgtaatgtatttgtgatgaatttttttatagaatttgtgatgtttttttctgacaatttgtgatgtgaatattacgatttgtgatgttgttactttgatctggggatgtaggagaatctcgatttggattttgtgatggtgagattggtgtgaaatcaatatgcaaacaccaataaaaaaaagagaagaatgggacatggcactaccctctttactaatcgggactaaaaattcccctctttactccctattagtgttactaaccgggactaaagataacgatctttaatcctggattcgtagtcttggttggaaaaccgaaactatagagggcttcaaaccgggagtaaagagcatttctccaccagtgtcactttgaaaagatggatcgatctgaccctaagtcactaaattaattcaaaatctacatgtaaatctgttctgctacaaaatgaattgagataaattacactattggaccacaagtcaagcaaattggtacaacatgaagcaagtaagagataattgtccaccagagatatcaaccgcgttcacatcactctcatatgtcctccacgctagttcacaagtacgtaaaccacatcatttgcttatccgccactctctcaaatttcaaagaggatagatggtttacaattgattttcattagattcatcacaaggacaagagaaataactgaaactgtgtcatgctatatgttttttttaaaagaacatatggtaacctgtataaagcttgtggtgcaaaagtaaaaaataatgcttggtccttgcactcaatttagattattcgacccaagtttacttaattgtatttacttagttgtagatgtacatagtcctacggtcctaccacaatcgcacatcaccccatgcccagacactaacatgctaatatgtaatgactccagatttgagtcctcaaaccatgatgtgatatctaaacaagagaataggagcaatagttcctccctatttttaaattatccaattctccaaagtagttatttagcaggacactgagggctgtgagtgcaagatatggtctgttgtctatatcttttgcgtatgttttcagttttgttgctaagataagataataggatttggtgatgggacaaacggttgctccacataaaattatagattaccagctgattcaatgaaaaaaattcacataggttttaccaagttatagtatatatagatatactatgccattaatcctcatagatgaaaagaccccttagctgccaatgcaagagtgcagggccttcaccattgacaaaaaactgaagttgccctaaaatttttgaagttgacagattactattctattatcatgcatgactttaacgacatagcacacactttgagatggatcaggatcctctgcagtcgaagtcacgtgactttgtcactaacatttgggcttgatgatccctggacccacacatgtcagtgacaaaggcatcatacatttgactgcagaggatctcaatcccattatattgaggtcatccaattagagacgtgacctaggacaacccatctcagtcacaattgagtggaccatatttagggaatttaaaacagaattatttattcatgcttgacactataaatatagccattgcgatgcgagcattaacactatacttcttttcgagcatatgatactaaggtaagtttatctgtattggacaatgtactacattcaattccttgtttgctttgttcctcttaataaaataagctacaaactttggcctaatatcatgtccctttgatatgtatagcaaaatcatgagcactgcacgagcaaatcttgccgcgctgtcgatcatggcactgctcttcttaggaattgtgattggtgatgcggctagagagactccgggaacatatttttctcttggtagaatggatggtcataatcctacagtggcttatggtgcaaatactcactcagacagtggggatatgaacaaaggagagaactcaattgcaggtcattctagtgaaagaaaactagggaccactacagatggagcacgttttgaaacccttagttggtattgcagttatatcgggaaaaaatgtctgtagaatatatgtatatctagccagtccagtcctagagtaataagtgtggcagctttctttcagtacatcgctatactataatgttgaaataaataaatctcttggactgttggactgtaaggcatgtatgctgtatttacatgtactgtaaggcatgtatgctctattttcaaatcaaggaggcatccttgtagaagttgaaatggaaaaagtaataatataaattaacttacatgtggtaatcccaatctctctagtttctggctggtatggtgttggtgtgtatatattgaatgatttgagcgacataccatcatcttttgtgtagcatcctacttttcctatggtgcttatgattgtgtgcagctgttgatttgattgtgcatgcatgtaggaacagtagaagcctgctagcagtgaaattcgtaataa

SEQ ID NO: 45147 - DNA, 3546 bp, Oryza sativa
ttgcatggggtttccatcccatttctaagtattctccagtgccttccattcatgcaacaagcatcgatcacacctgtagtgattttacaaaattttccatgttcaacaccctgatcccactgtgcattcttggcatgaatatttttatccaattgactttttattttccccaataaggtctctggatcacactcactggaagtatttcctttgtttgtccaacgcctccagccaaggattcctctgtgactttcaacgcggtgaagaggtagacaagttgtgagtaaaggactgacttgaacaaagttgtttgttcagggctgtcttaggggcctaggccagttgtgcgactgcctagggcccatgccattacagggcccatcaccagccaacccagccaacaaaatgccagttgcatctatttagtctgaaaattatattagaattttgttttgttctcgtttattaatgtgcattgtaattttaagtgtttataatgtttattagcatcatttttgatgatataggataactttcttcaaactttcaacttttttcaggaactaaacacaacctatataacaagaatgagcatgattgcaccataaatacccacacctaataagcatgaaaaagtttaaactatcatggtggatagtgaggagagcagacgattcctacattctatagacatccgatgcacgaatgaaggattaactcaagagctgccaccatcttgagttaagtctcacggaataatagaattgtgacctgtcaccgttttgaaagaaggtttatatcgagcagaataatatatcactacaaacaaagattgtgaggccgtcttccacttttgtcagtgaaaccccatactagctaggctgtcatctgcatgtcactgtttcgcaattttgctccatatcgagctctgtgctgaacatttgggtattctcttgtcgttctgacgagcaaagcatccattttttctagcattcaagctttttttctgccatacactctgattgctttaactctcactttagctgtgtataacgtcatatgatgtcctcctggcaagacaatcactgctatctagcctactcttgtctggtttcagttgtatgctaccaacatgttccgagatcagttcaatgagaaatcattggggtctctttaaagatatatgtgttgcaaaatagtctggaaaacacacgttgttcttggaagcatatgattcagagctggtttaatatgtccaatagaataaacacgaccgtatgtgttattacttctaagttacatgcagtgacgtacgtatggccatatgctttgatattatttggactgcaggactaacggatatttgagatttcatgccctttctgttccttcagttggccatatcttttgaacatatatacaaggatggatcgctcactaaacaattctgtttctcaaatgcaaactagctactcatatatagattttgaaagacatgttctattttgatgcaccatactacactgacattattggttaatgcatgcaatttttgagagttaacttctgccatgcaaatgaaatccacgagcatactctctccgtcccaaaaaaagacaaaccctggtttccgtgtccaatgtttgaccgtctgtcttatttgaaaaaattatgaaaaaaattaaaaagacaagtcacgcataaaatattaatcatgttttatcatctaacaacaatgaaaatacgaattataaaaaaatttcatataagacggacagtcaaagttgaacacggaaacccatggtttacctctttttgggacggagggagtacttctcaaagattatgtttggtaaatgtgccattctatgaatttccatattattggtcataaattactatcattgacattatcatgtatacgacatgtcaagaataattcattgtaccctcgtggttcttatctactcatgctagggcaatatcatttgacaaagagtaacatcgtttgacaaagatatttctaaaagagtgtgttcggtaaatgtgccattcaatcattttccgcgttattggtgacaaaattattatcgttcactttatgtatgtgcatgacacgtcaagaattattcctcatgtgctccgggttcttgtccgcttagtaatgcgcacgatcttgatccactacatgcaatggttgtctattatgaacggcaacacaatcatgttttactactttgcatgggtatagatatgctttacttgtgaggtatcccttattaattctaacaatattatttctcttcatcattttttcaaacactactactttcttcctaactactgagcaaaacatgtatggtgccgtttcaattttatatcctacggttcaaattggggaagaggggaaccaagatgcttctatataaggcatcgtgcaagttgaaactgatattgttcttcttgttttctaatttcatgacttaactcattgttcattttgtttttcttgaggactcagtatactgcaaaaaaggaaggtttgtagagagctatcataggttattcatcatatatgttgccagctccctgatcatcatgcatggtaggtatcactaaaatggatttcatcgcatggctttgataccagttgtatgatatataattaataagaacctttctcactgcaacaactagcttataaggtgagtagcccccaagttttaagcttggtgtttttttgttcaattcacaacaaagttggaccattccatggaatggtgatttttgtgataattagctattagcataatgaggatgttacagaacttatctggattttttttattatgaatggaaatggtggtcattatgattaaacatttcaagtatgattactgattgtgttctacacttgcacaaaactgagggaaaggataaaagctagccgctgtttgtctctagctagttttgttccgcaaagtgtcataatttcctagtacgcacacgatacattgaaactataatatataataccttttagcataacataataaaaaattcagtcaattctcatgcataattgagaaatcatacctcttatccgtggatgatttgttaatagtagagccaacttgttggttataacttcatgatgagcaatataaatagaaaggttcagtttaacagtgcaacaaaaacatgataaacttaatagttcattctcatatatatattttatttattttggagaaactggtagtaatttatttccgagctccattatgacaaataatttttcaatagaattaaaagcataattttccattttccatcggcaacatgcaaaatatttgtatatcacaataattatttccttttaaactaactcaccgtggaaacaaagaattgaccctgtgtcactaaattgaaatcatatataataagcccccccccccaccccaccacaccccttcccccctctcgtccttctccgtgcacacagtaaggctaggtgatctataaatacacaagatttgattccct

SEQ ID NO: 45148 - DNA, 750 bp, Oryza sativa
tgtgctaagttgagaagaatgtgatggataatattaatctcattacatttttaaagattttgcatcaaaaatgtttaaaggagtgtattttttcgtaagaagccatggatatttgtaatctctttatttgtgaggtattattgatggagtcgctagacagttagagtttgacctttattcaaggtattcatattagctccattttgatgttctttggttatatatagaagatgttcaatgtttattttatcagaagatatatggtttaaaaatatataaatagaaaacacatcttaagggcctacaccatcaagctcgccctagggcccttgaaataccccttagttgccaaagctgtgaatgcaaaaaaaaaagggctttctcacaatctcaccaacggcaaaaactgatcttgcgctaaattttttgaagatggcatgataacattctattgccatccggccaacactttgatgacataacgcattataaactcttcacagcaaagacgtgacctaggacaccccatcatagtcatcacaagtgagtggaatgtatttatgtaatgtaaattaggattattcattcatgctttgaagctataaatatagccattgtgatgttaaacattcagaccatacctccttcagagcatctgctaaggtgagtttctatgtattagagattctgctacatacccttccttgttttcatgttccctttgtaccacttaataagggctgcaggaat

SEQ ID NO: 45149 - DNA, 558 bp, Oryza sativa
tatgtttgcatgatattatgaatctcttggatatatgttgtggattacggattatagtcggtaaaagtaaaatcacaaacgttcttatctgacactattggctatatgtttaatcaaacagacattgcaagtgatgtcgatgccgagcaactcctggactccaagcctccaattctgtccagtccatacaagtgtatggcagcaaacagcaggtccagcttgaagacatatggttattctgaattattcttagaaataagataggaatcatttcactctaaaaaggacaacttgaacttgaagtgtgaacactagaaattgcagaccatgagaacacataacaaaaagtgtaaatttagctaaaaaagttaatatcacctattttatgtcattgggctggtggttaaagttaaaaacacggtgcagatcttttcttctgctggttatttggatcctaacttcatgttcttttgtagttaagtcaaattggccaatgtactgcttaagctttgcatatggtatggtttgatggcatttgatcgttaaatgcttcatgaa

SEQ ID NO: 45150 - DNA, 722 bp, Oryza sativa
tcatttttttttaatccacgattccaacggttgctgcaactcaaacagaaaggtaaatgtcattgacatagcccaaaaatttttagagtaaaacatacgtgataaaaaaaaagatgagcatcacaacaacctacatgcagccatgcagactgtttctcaactaaaaacagatcgagtttgaggctggaggtgcatgtgtctattcacacttgctgcattagcactgcaaacatttgaatgtaaattaaaatcttaaccacaatttattactaaagtaaccaaggacttatccactgcaatatggattgtgggtgcttatagcactctgcttacccgttattgattttgttgatcgagcgggcacgactcggtgtcagagtgcttctagccttcgaacatggcgtgttcgggtatctgatccgtgccaacgatgccagtgctgcttccatccaaaccgtcagctctgcaaccaaaaggaaaataacatcaaagagcatgtataagagtctcattcagcagaatccaaacgggagtcgggcggcgcaagggggcggctcaatttattcatccaaaaccacgatctgaaaccatacatacatccaccatgcatgaccatgttgaataaaaaaggactctaataagctggatctgaaaaagaaagtaatgaaagtatttatctgctccggaggtgcaagagcaagatagatgcaaaagtatacacc

SEQ ID NO: 45151 - DNA, 1363 bp, Oryza sativa
tcaccgtcttccacaaaggctcccgctgtgccccctgcagcttctttacctcactcatgctcatgctgctcctccacgtcctctacctgtcctaatccccttcgtcgctgcattgggttcctccaacccacttgctctcttttgcatgcctctaacaattggtcaacccaacccttccttccatttcaccttattgggttggtgggcaacgctgaccacctcctcctgagtcattgttgccgttgtggagctttgagggaggagagcgttcgatggcggcgatgagcttttttcaccgtcagctgcataggaagaaaagtccttgtcatccccggatcccagcaggggtggagcttgagctagccagccactgtgtccatgggaaggtgcttaagtgctaattaactgcatcggcgagggcggcggcgtgtggagaaagcgccatcggccaatctttcctcgccaaatctggaggttctggcaaagaggagtgcgggtctgcatgctagtagtgcggttaagatgagctccgaggctagcacacccacgccgccagctttagggagaagcatgtggtgacggatgagatgctgatgagggaagaggagttacagtgataaggtgtgactctggacaacatgtgatgttaagtggggcttcaatagacagcagcagagtaggtgttgtacgtcaaatccatctcgctcacactcctcatcggtgccttcctcccaccgatctagcattcacacttctcactagcaacccggatgtctgagtttgccaagctcctctcaacgaggtctcaattccggatgtggacaccctccacgctgccctacggtggccatcccccttcgcgagcctttaattgccatcgccatcactcggcctagttaggccaatgggagttcgtaagatgagggaagtggaaaaaccgattgggagggtttaactgacttgttttgtctaaatataataggttgtaagcgctatgtatgtgccatgtcagtatagatgcaccaagtcattgtgccacgtcgggtgaaactgcacgcaaaaccattgggggtgcatttacattggatttaatacttggggatacaatatactcagttttacagttgatgatacaaattttaatggacttggtcccgttcttttctccaataagagttggataaagattaagagtttcgtgctacgcttttcaaactgttaaacggtacgtttattgcgaaaatttctatataaaagttgctctaaaatatcatattaatctaatttccaagtttgtaataattaaaactcattcaatcatacgttaataccaccctgttttatgtaaaaaacttaatcttca

SEQ ID NO: 45152 - DNA, 743 bp, Oryza sativa
gcgcgccttttggcgcgctatgtttctagtatgacagagttgatgtgcacatctctttcatgaaaagatgtacagagaatgtggatgttactagtagctactagtatctgctattcaaacaggtgcaattgcatatggcaaaatcaagactgttcattacagatcatgtttcaggcctactgtcaacagctgggcagttaagtatttaactatttgctgcttttagatgtgacgtttaacaatttgttacaatttgctactaatacgtttataacatgtgggtccttgtgtctataatatgttaaatatctcgtcagcaaaaggcaggccatgtatgtgttgtttgcaatccaggaatgcaggtgataaaaacctcttgtttccccatattgattgatgctattcctgcattgccatcccaataattcatcaagatatgctccttttagcctcaattagctgattctgttacgatccatgctataactgcacctaggcatcccagcctcatctttacattacctgtaaatgtaaaatatatcttcctagtaagtatcatgtatgtacatgcagcccataccagaagttcatgaaagttgcataataggagcatctggatttggagtctttcgcaaaatacggcgaaatctaaagtcacaactgaatcaatcctgcaaaatgtcgacaagattaggggaatatttttccatcacatgctgtgatccggtggatgcgggctgcag

SEQ ID NO: 45153 - DNA, 1484 bp, Oryza sativa
ctgcagccctaataggtttatagctcaagctttgccatatttggtttatttgatctgataaagaatgaaatagagatgggtgcctcagaaagaaccttaatgtttgtcttcagatgcatgatttgtatttcagaactgctcagctaaaatgtgccttggcatgtgttcaaaactttcaagtagtggctttaggcacaagtaggccgaaactctgttgaattttcctatatctgcaatgctaacacagcgataatatcctaatcaacacatttgttcaatgttcgtgagttatcaccttttggtctacattgtctcaagtagtactaacgcagtgattcattatcagaaataatacgtatgctatacgagagccgtgacccgcgtgagattcggtgaccgggttgaggcggagcgagggaaagaaaagaaaagcaatagcgccgtcggactcggcgatcgacggctcacattcgtgtgcgtcaggattggcttcaccgccaccactacgaacttttttaagtagtagagataataagtgctttgggtaagcacatgaatagacgaaaaaaatggacagtgattatttatccaccgacacatatgtacaaattaaattggctctaaccgttgcaacgcacgggcatcttttcccgtaaagagaaaaacgtacccacgacatcagtttcctaatataagaatggttgtatctagttgggactctaggtcatgccataaaacacaagacaacgttgcgactgagtcctactctctctggtcgaatatatatggaaaccgtgtgtacccggtacccagattctgcacaaatcttgttcttaagactggatagaaagagactcttgtatacagtcatcaactggtaaataagatctgcatgcatatttctgtgggatgctaaccgcggcgagccgccgccgatttccttccctttcagtagaaagagttattatttaattaattttcaatcgttaatacacctaagaactacagtccaggcaataagacaaacaaccgaagatgctaatgcaatacagtaatacgttttgcacgcgttttccattaaacttcgatcctattggaccattcgctatgaagcaatcaactaatccaccaatccacacggtcggctgcccgcctaagtgcattaaattaattaagatcatttcaacggattagcaacgtacgggcgccttcatataattaattttacgcgcattccatcgcctatatatagtcgtattcatgtaaacactccagcaaacgccatgttagctacaccgtacacacagcctgctcgctaacacacaaggtttggtaaatttttttaccattttcattccagtggcgtgcaatcaccctgccaacgcaatgtcgccatttcttttttttttcttttttttagagatgagtatttcttacccagcctatatatccaaacttagcttttgaaacaaaccaatcaaaaa

SEQ ID NO: 45154 - DNA, 3876 bp, Oryza sativa
  unsure (1)..(3876): unsure at all n locations
tcctttgtttcacagtgtaagtcattataaaatttcccacatttatattgatgttaatgaatctatatagatatatatgtctagatttattaacatcaatatgaatatgggaaatggtagaataacttacattgtgaaacggagggagtatatagaacttgaacggaactcaacatactaattggggactaaaatcaactcgatggatgtgatattttttcttattaatgtggaaacttttaacagtttctgtttaatgtatgaattatataatgaatatattttccccttgcacttaaataagcggaagcttaaaagaacatcattctcaacatcagatcaatttcaattctaaaaatatagtaggttatatgtatatagaatcatttgactgcaaattttaaattttcatgtttttgaatcaaattcaatgtaatattgaatgccagtttcagtgcatgctgtgtgtgtgtgtttttgtagaattttcttcaaatttggttcgagttgatttaattcttttaatataagaagcatatataataaaaaaatggttatttgtgtaatttctcttatgaaatttctataaattttgattgcagtcatttgaaaattttattttttcttttcaaatttagggtcaaaaacatttgttcccttcatttttttcggaactaaagttttttaacttgacaaatatgtcttataagttcagacttgagtgttaacccaaaacatgcgttcagactcctgcaaacctagtaataaattaaattatagcagagtgagtttatttttaagtatctgttatcatatcgcctccttaaaattatattcactataaaagcaactaatctaataatctaaagctgctcttttgatagcttttgattggttcacttggtgcctcttactttggagaaaaatcataaatctatactagagaaaaaaatacctaataatcatatgtgagaaaaaatctagagaaaaatatcacatatggattccagaggcttccaaaactatcttccctttccaaccacatgaacttttactcctttaccttctataaatataccacccctacttggtactactcatataactctttaaacccaaaattattaagaaaaaaaaaatctaaaatagcgaatttacattcattttccttctttaagtatcatacgcctacttggtactactcatgtaactctagaatatatagtaaacccaaaattataataccaaaaaaatatgcaaaacaaacaaagaaagaagacaaccttattttcttatatcatcatacctactcagccttgttttcttatatcatcaaacctacttagctaaaaaatgattgtgttttttttttacacaggatatgttaaaaactctaaatgtactaaatgcttgatctttcaaaaattcaaattcataagaaaatatatttgaatcaattaattctgataaatctcaaaatttcttttacttgtttggatttatcaaaatttatgtataaaatgatgtggcacttgtagcaagtacttttatattcaggctgaagaagcgatataaactgttaggttgttccttatttggtcttttctaatgcctaatgcagtagcacacatggcaaattggcaatgcatgacgttagtattaggaaataggaggtgatcttctaccactaatgtgagatttaatgcaagtaagactgtttgtttaagaatatactatataatataaaatgcagtgtgctagctaccagtagtacagctgctgttgtctttttatattttagagtttatgtatgcatgaccagtatgcatggagtcataaaaattcatacacgagatggttgggaaacttggcgatgatttttacctttaagggttgnnaaagaggtatgattgtttgatattgatacatacttgttggtggagttcccattgctggtaactattacattctgggtgtgctgaatgattatgcttggtggtagggtgctagaggaggtggcttggtggtagggtggtagactaggtggatgtggaggtccaccgtacaacggtgccgacatccatggcctgcatctagatagtatgtttctcattctcttataatatttcaagaaaacatcttaaccatacaatttgatctagatagtatgtttctcattctcttataatctttcaagaaaacatcttaaccatacaatttgtgttttttcctgttagatttcaatcgctacattgtgagatttaagggagttaccaaagacatgattgttcggcagatgttttgtattatgtctaatcctaatgattttgatctgcttcccgataatgatagcctcagtgtggtatgcttctctctattagtttctcttttttttctcctctatttttctaactataagtggcagtttgtcaggaattatccaagaaaaagggtacattgtgagatttaagggagttaccaaagacatgaatgttcggtagatgttttgtattatgtctaatcctaatgattttgaccagatagcctccgtgtggtatgctgctctctattaggtttttttgtctcctctatttttctatctgtatgtcttaatgatctgcttttgggatgttggtagagggtgtgtgtctgttcccaatatggatccagatgctgaagaagaagacgaacaataagtctacgtgtttgttggtctccacgataaccataagtggcagtttgtcacgaattatccaagaaaaagggtaagacacaccaatggcaggtaataaaaagaaactggtcagtaggctttttgccgcgcggtgcgccggttagacgcagcgaccgcgacgccacatttgaaaacactcttggacgactagttatattactcttactcatataagtacatgcagatgcaaccatcgatcgacacgtgttgtatttgaatatatatgaacctgactcatatgtattcctaggcatgcaacacatgtgttgctgtaactcagtaggatttataatatgatgagggcgtgtttctgttcccagtggatatggatccagatgctcaagaagacgacgaacaatgagcctgtgtgtttgttggtctccacgataaccatgagtggtaccaagaagaagaagggtaagacatattttttcatatctatgttcacatgcagtaggctaggcagtagatagtaatcatggctggtcggtaggctaatcatgactggcagtttgacagaatttagcagttcaaagtacactgattagtaggctaggcagtagaaaattagcaagttggcattggtgagtaataaaaagaaactcgtcagtaggctttttgtcgcacggtgcaccgggtagacgcagcgaccgcgacgccacatttgaaaacactcttggacgactagttatattattactcttacttatataagtatatgtagatgcagccatcgatcgacacatgttgtatttgaatatagatgactgatatgtattcctaggcatgcaacacatgttgctgtaactcagtagaatttataatatgactaactaaattcatagtggatttaatgtaggacaacaactcttaatggatccaagggtcatttcggattgctgcttaataattataaaatgtgccaagccaattaatccattggtaactcgattctttggccgaatttggattacaaccaacttataaccacaaatcaatgtcataacctaccaaattgctgttggtacggacagaacggtaaattaagaaccaaaatgcattatcattaatgcattaattggtcagattaatcagaaaaatgaaatcagaccatagtccacacgaactttcaggaacatgga

SEQ ID NO: 45155 - DNA, 516 bp, Oryza sativa
tatatatatatatatatatatatatatatatatatatatatatatatatatatatatatatatatatatatatatatatacaaacacacatatatatgtatgtatacatatatatatatatatatatatgtatatatatatatatatatgtatatatatatgtatatatggttcaacacatatgtatatacatgcataatatatatgtatttatacatatatatgttatgcaaatgcatatgtatatagatatatatatgaccaaaatatatttacattatagaaaatgtgtacacatgcatgtagaaacatatgtagtcatgtattaattacaatccattatatgtcctagctagttacgatttgacgtagtagtagtcgctgctagctcagaagctaaggaccggtgaattgtgtttccgtcgtagtagaattcacccttgggatcaaggatttcttcgttgatgaatcccatgagttgttcttgaaccgctgcgataaattccttgtgtgtgg

SEQ ID NO: 45156 - DNA, 3500 bp, Oryza sativa
  unsure (1)..(3500): unsure at all n locations
tgttagatatgaaccgtgctagaactacatttattttgggacggagggagtatatgacagttgagtcggatgtataacacagctcgtgatgaaaagtaactgatgggctggggctagatccctacccacgcaagggccccatgaaagcaaccgatttttagtgtttaaaagatactcctaattaattaagttcaggaatagtcctgccagattggtgccctgtgaccgtcttagaagtatctgtcgtttgtggtgccaaggaagtgctaagtactcctagatcagtccaacaagcttctgcaaacgatgttatattattaccatctttaaactatccaacggtttctgtgatgattagatgcaactgatcacaaacatatatggtacacgtgttggcttggaaacgaagaagggaaaagaagacatttaacattgctttcgtctcaacttagtggagctatattttcataatacatatgattgagtataaaattacaatgaaattcaagtatcctttagatcagagccacattgtatctctgtttcccaacaaaaagtacataatttcttttgtgtgctgaatcaaaatttttaacaatagcaccagcaacatattatcactatattggtacaaactaatacgtacatataagtcatacgaatatttatgtaccttcagttttcattcgtatgactaaaaatttatagttacacttatacatgtaattaagcataatcctttttctttctatataagtgcatccttaatgttgagcaacataatcaggacagttttggccatctcaagtgaatcagattattggatacatcgtctcaaaaaaaaaagattattggatacatgccacaataaatttactactttggaaaatatagcttactagttacaattctctatttataaccattccattgcaacactcgtgaaattagatctatgccatgttatacancttgatacatgttttgaatcttttttggtatatttttttttgtactcctgccaatcctctcttaaccatagacccaaatcccaccaaccgaagctccaaattccccaaatcccggcagtagcgatgcgcggcctggcgacgacgatgaccttagcgccaacttgcgtgctatccgagctgatccagcaccggtggcggtgagctcagctcaagcagatctagtggagacgacggtatcgggtctggtgttgagctacgacgtgcggtctgacagaggtgacatggccaacggtgacaagaagcgtagctgcactgcatggtccgacaacaacaatgagcttagcagagagaaatatttaaccatttgccacatttagatgtgacaattaactttttgccactgaagccacatgtaataaatacatgtggacccacatgtcattgagatagagatggcaaatagttgtttgccaaatctaaaagtggtaaatagttaaaagccgtcgatgccaacgacggtggggatgggatggccggctcgggtagtcatcatggatagcgaccgctccaccgccctttcttttttattatttttccattttctaaatttcttttaccaatttccccctttttcccttgtatgtataactatgtttaccgaaatttaaccacagtttttgagctgtagaagatacggatatttgggtccatatataaatacagtggataagaaatgattcaaaatgtgtatcaagtgtacggcatgttatggatccaattttaaaaatgttacagttgtacaaataataataatggtattttttcgaactagcaaatttataatggcatgaatccaattaattaaccagttctatttccttgactcactcgagtctatcgaaccatggatggggagctccttcctcttctcgattcccttcctctcgtttgataataataaccaacaattttgttccttgataaatatgtaataataaacccggcttttcgatcaattatcctgcagccttgtacttttgacactgtaaatcttggccaataattttatctgttctttacattgtccatcagatttatctctccactgaaacttgattacttgatctctccactactgatttattggcaaacctgttgcgtgatcttatatagttgtcaataattaatatccctttttctcttgctccattgttcacagagagtttcgtattacaccctccgtcccacaaagactttacctttgagttttatgtccaatttttgactgcacgtcttatttaaaaaaataaaaaataaatacacacaaacaaagtactattaatgttttatcatctaataataataaaagtgctaaccatataaaattttaaataagatgaagagtcaaaccttatattaaaaaactaaaaaatagagtctttgtgagatggaaaaagtaaaagttagtagtacattacatagcaatcctaccgtaaggtgcagggtatcaccgtattatctatcacccgtctgtctcatcacatcgctctagtaagagacaaacacaagaaggcaaatgggtgttggccggacagcctagcttccagagcccctgaactgatcaagtgccgctccactgctctgacgaagtcgtccatgatttcatctgacgctgcaaaatgctgcactattattggctcaaatacagctcttacgcgcaaggctaccatcttcagatcgagcaaggctttgcccgtgccgtcatacggatcgtgcatcatcatcttgttgacctcaaatgaaccctcctcctctatgatgttgttaacttcactgtccatagggcagcacaagggaatgtagaaggagtcaagcttttctttgctgataacaccctggcattgaattgaagaaaattcagtataacagagtagatttgtatcagtgtagctgctttgtataaaatacatataagttgtagagtaattcaggtaataaattaacctagtttggtgcctacatatgcacttgtgcaagtacccctatgagctgatttatttcgaaactcttttaatccctaaagggaggacgcctgaaaagttttgcagcacatgttctgtcactcaacatccaactgtcactggactggaaattttgtgggacagtagatgaacgcacgttgtacatatgaaaattattttcagaatttaattaagaggttattacccgtatgccattaagaaagatgatgctggcctctgtgccactgaaaagttcgagcctccctctatgccatcgtcgaactttatagcgccctacacaccattccgtcctttttgtcctaacggtagaaaacagcgcatctaaatgacttagttgccattaggcgttcttgccaacgtgttcgttcgttcgtccccaaggcgccgaggaagggggaggaggggaacagctcctggccgagcaccgacgtgacgagcgcggccaccacgtccacaagcagcgcctgcgcgccgatgttgtgggagg

SEQ ID NO: 45157 - DNA, 4961 bp, Oryza sativa
tgcagcaatcattggaaattaacaacctagacaccgcctctatacaattaattactacttttgtgtttgtaactcaccaaagtaatcactatttataaatgagcaatagttaacaatgatctagtacgctaataggaactaacttagaggtaattctcacaagtatatcttaattactcagaaaagatatttctattaaagtagagtaattaacaaggtacaaaaagcaaagaggaaaataccgacaactccagaatttctctgactatttctccttactctcttcctaatctagtgtacgtaaaaatacaatagagccccttgtaattcatctcgaatttggtgtgtgtcagaatggagaacgagagctccgtttataggctgataatgtggcttgtagcggttggaattgttctaaatgcaccgtaaccatcattgggaggtaatcctggacgtccacgtggaagcagatggcgaggaggcatgatggcggtttggctgatcctagggtttggccgaaccctcgcgtacccctcagcctgtgggcttcctcctgggcctagatgtttgtctcctaagcccaatggtgtgttgattgggcccactttctgatgtctcgatgagttgatgagcccaaatcatcgatggatttttgtttgtattttctctcaactttggtggtttattacatgcatacaattattcaacaacactcgtggaaattgttcgaattaagtcgtaccactatattggatgttttataacttctgatttatgcacgtattgacggcataaaaatggcatttaacagccgccaacaaaccaagagaggagacatgtgatttgtttcccgaagttcggatccacggattctacgtctctgttgaggggccacaaaggctaggtctatttcaaccctttcctcacgaggttgcacaaatgcacttctcgatttcactcttgatttcttcctttgcggaaacgaaatcaaaacattcacaaactttctgagtcacaccacaatcttgggtgctcaccggcgaagcctagccatctaggaaaactcagttcccaaaaataacaaacacaatcgaacatttgcttgctatgaaatcgagtgctcaaagtatggagtaaagctcaatagctctcaatttctcaatctttcaatccaactctctcctcttctcaaatccctctcacaaagtgacaccacaaaggtaaggaaatgatgaaggctatttggttttggatgtgtctaatgtttcgcaagaacatcagccactcaataaggggatgaaggggtttatatacctgagcacctcaaaattagccgtttgagacaaaaattccattactggaagttccgagatgcattttcagacaagtctataaccttttgagacaaagattccattttttgcaagttccgaaattacaaaaaaccccagagagcgaaacacccataactttttgctcggaagtccgtttttgatgatcctgaactctatgaaaagcttactcagataactatccaactcatccaaaaggaaggtctataaccactcaaaggataggttaaaacttgggtttcactcaaggtagcagtaggataggtcactttgagtaccgagtcaaacacaaacacattgaagttgcttccctattaataatacgacattcctatacacaaatataaacaggaaacaaattataccaataagaatgccttcatgccatcttcctttatttgtcttaagagataccaacgtcaaaacagtttcatcatatattcttcaaagattgatgagggctccttgtagctttatatggcctcgcacggtccatcacgactaatatgatccgttgtcaaacgcagcctattgttgacgttttttatggccaacacgagatcacctaacgatttgcggtgtaatcaatagagtcgccagaatcgatagatcaaaatcggctagtggaaccgatttcgagattaattcactttcgtggaatcacatgactaatttacgagcaaattagtaaagaagataatatcgtacttacataacgacgaacgactagtttccgagcaaactagcaaaggataacctcctcgctttcgtggagaagcatgaccgtttttcagcgcaaaacagcaaagattaaccaaattctagggttcctgaactcagccatgaaagtaaaatagaaaataacggaaaagtaaagaacaagaagaatagtagattgaaattgtgttcggggttctaatatgatctaataccctggtatatatatagagagaagacctaagcaccggacctacaagccccacgtatgggaactcaagtgaattaactaatacgatttaatctaaattaattaactaccaaaatatcctctcttccttcgccgcaacagacgctgtgcatggcaacgtgtcctcgactcggtcatccggttctctgcagcgtgggtcatgcgccagcctcccatggcacggcttctgcaagcaagaagggataaaattccagcaggctaggcagcagccaatcagctgctccaccacgatacatcaagcttcacaccaaatttcttctccacactgaaattcctcgactgcagcaaaatccagcaaaacagaacagcacatggtttcttttactgcagtgacatgaaactcagatgatccaatcccagctgatatttccagtaaaccaatcaaaaatacaccagctattccaaataattggcctatgcaaataaaactagctataagccaaattataatgcaaacaccaacatgatccgttcttaaacgcagcctacgataaatgctcgcgtgatgcatgggctaccatacttgtttatcctaacattgttaatcagacctcaaaagtcatcgtcttgtcaatcatttttggtgagaagtaggatttgcacggtttggagaaagtaactcatgattttttttcaggaaacatagaatcgtcaactggcttggatcgacaaatatcccgtggcacgacctaaagtagatttattatcagtactactatgttttttttccaatcacgtgggagacatggaattttctaattaatccatgcaaatcgtacaaaaaaagttgtagccaagttagaatacctgtttttttctttttacgatttacatggatttattagctcgtgtggtattctaactctttctgatgatgtttgaactccctcgtagagcatagtatatggttactatgtattacggttcaatttcaactcagtgacttgatagttatcagaaaaataaattgtacatctcaaagtgaggcggaagagactaccgattgggcgcccgatccaggcgtggaaaaatagggcgttgacgttagcatgcatgcatacgtgcaaaaccactttaaactattttttctcttaaattacttatccaaatcatgatctgattgcaccattaaattcattgcaattaaatctttaaacaagaccacacatggatatattccgtcgaaatttttttagcttattattgaattatttttaaatgttgcacgatgttccaccaagtatatcggaattgtttcgctaagtagatcgaaaatatttcaatcgtttaaatcaggtgttgtttcaccttatataaaaacaatatttcagcaaatagtgaaagaatgttttagttcactgcaacattatatctgtatataatgaaacattgtgagtacactaggtgaaacatttttggtgggaaaaaaataaaaagaattcccttaatagagggttttcaaaatatgtgggtgatctgttgcaaaagaatatttcagttcactgcaatattagatatatacatagtgaaacattatgagtaggtgaaacatttttgctggaacaaacaaatgaaacggattctcttaatagagggtttccaaatatgtgggtgatttgttgcaacggcacgttacataatatcgcaatccactgcaacatttgatccgtacatagtgaaacatcataagtacactagctgaaacatcataaaactactggttgtaacatcaaaagagaccatatgcaacattcaaaaaatatcaataaaaaagctaaaatatttttttgtcgaaatataattatgtgtggtcttgttataaagatttaattataacaaatttagtggtgtaattatatcgtagattagataaatagtttacgagaaaaaatcttttgaagaaataagagatgggagcatgtgaggagagattctttgcatgcagtggcaggtacacccatcgtctgattttactcccctcccgtcgggtgcccgacgaccagcattatcgaagtgaggctgacaaaatatataccactcctatttgtcggctaacaagagcaaaacccaggacgacggcgatctaatgttggtccacgagtaccacctctggctcctcccctccttcctccacatcggctgcccgtgctcctcgttcttcactgcaatggagagatggaaaagtatgaagataagggagggtggaaggaagaaaataaatctgacgggtgggtctctcatacagatggagaagaagatggaaaccgtgacggtgatagcaatagttctaattttacgtataatcaaatagtatggatacgaatagacgtatgtaataatatttatctaaaatgacacatttcgaatgacactgattaaattaacccaacaattgaaacacaccggccacttctatttgttggttggagaagataaatatttcgttgtcaacattcgcagtcaacaatttgaatgaagaccccgttaattcagaccaggcatcatacgatcctcactagcttaactatctctgtcaatcgtttactacacagctactgcctccgtcccaatgtaaatatatagttgtggattttcgtgtcaacgtttgactgtcggtttta

SEQ ID NO: 45158 - DNA, 733 bp, Oryza sativa
catatcttgagttattttgataatgttggtgcttaccaagcactacaggaaacagatattacgattatgatgcagtatgaatatgtatcaattatgcggatacatagattgaaatagctacataattaaaacatgtgaaccaatgatcacttcagtatttccaaatacttgtactggtagtgatatggtagtgatcacttttaactaggaattgtgccgtctatagggcttctgatttattctccatttagattgaagccaatttgaatattgaatatccattagcaagaaagggggtagcatgtgaatcagggattgagcttggctgcagtaccatatatagctatgtgtatgcttgtaagagccactataattagcccacgcactgatgctataagaataactgacatacttcaattctacatgcttaactccagtagacaatgcaaagacaccaaacaaggctggaattctcttgtggagcatcaaagtggcgtcctagtcctaacactgacaccaccaatgtagaaacaacctaaattgcttagagtaatcatttcaataatcatcatttcaacaggacataatcgcttttaccatcaaaaccaacagcatttctagaccaccgtcgccctacctagcatcaaaagcgaggcactagcttaattaaattgcagatgcacccggtaggtggacttactaccaaactaagaaaatgaatatgcagcagcag

SEQ ID NO: 45159 - DNA, 613 bp, Oryza sativa
gggaaaaagtgtaccggaggtccctgaacttgtcaccgagatacgaaaacgtcctccaccgcaatacgagatatggggtcccctaactatacaataccggtcacccgaggtcccacggcatgatttctccccgatttgtccgatgtggcgacggttttgtccgccgtggcgctttgacctcagtcgtcgtcgctgactcaggagcccggtagttaggatataatgaaggaaatgtttggcgcggcttgcttctcccccaaacaccgaaaccctagcaggtagcgagcgggcggcggcggcgacgacttggcgagtggcggtgtggagatgtcgagctcgatgagcgacggctcgtcgtcttcccgtcagtggaagtcttctcccgtgccttaccgggttggtcctctggattaccaacccgcggtgatgtgccaatgccggtgcccggcgaaggcggcgaggtggctctcgtggagcacggacaaccctaggtgctgatactacaagtgtcaacatgctagggtaagtgagggcttttggttgatatgttgttgaggttggatttggatagtttggggtttgaatgtagggttgtggtttcaggttggggggt

SEQ ID NO: 45160 - DNA, 714 bp, Oryza sativa
accgccactctgacccattgaacaccatttttgcacgggacgctcaaattgaaccagacatgatgttgtgcatcaatcaaacctacacgccttatgagtttgaaacatcatgggatcaattcataaagagttatgatttggagggctgtcccatcatgaaagctttatatgatatcagggaaaagtgggtgcctgcgttcttcaagaaggaatactgcaggaggatgacgtcgacgcagcggagcgagagcatgaacaagttggtgaagcacaagtttgctgaccaccaaaccgcgctgcaccgttttgctcggagaatgttggaggttataactgacaggaaggagaaggaggctgccgagacaagagcatgctcggttagtgatatttttactgggggaaacggtctgacatcactcctataattctactaaattttaactcacaccaactaattatatttctttttgtacatggaaagccaatgttggctgtacggtggccatctgttatacagatgtcgagactttacaccagggcggctttcagattgttcgaggaggtgcttcaggacagcactgacttcaggatcacacaagacgacaatttccgcaacgggtgggtagttgtcgacgttcgatgtcgcaatttcggtatttgcatagtatgggcatcgttggtacaaggataaatgcggggggatccactagtcta

SEQ ID NO: 45161 - DNA, 791 bp, Oryza sativa
cgaggtgtgtgcatgactaaactacttgcctgagtttgcatggtcaaagcaccttcctccggtacaatctgcatggagatggaggagaaatcgacaatcatatgtgaccatgccactgcccccgagatttcaaaatatacatcatgctggcggcaagtacacttaggtatgtgaaagataagacaaggttcaccattccttttactcatacttatcttcatttgaatgagacttgatcctacatggttatgtttcttttgtctatttgcatatgctctattttgggtgttcgtgcaagacatctataggctttttaaattaagcatggtgcttaggtcaaaatagtctactttaatcaaattggacataaagtttagtttgactaatgaatttcagagttaatatgttcatggacattggatatatatcttctgtggactaatccctacaggaaagtttttgttggtatttcttacaaccacagataagtccggaaacccacggaataccgctgtagcacttcaccttcgggtgacccctaaaggatatcgaactcagggaacgtgtgtaatctacctaaggctaagacgatccaaggacaacaactataggtaggcaggctacagagaactttctatgtattttaattacctaagctaagttgaaggtaatttcctatctgttgcttcgggcaccgacctctgctggtctaccagcgtggttccggctatagctctatgatgcatccgaacgtggaggatttctgggacagaattcagggctgtcaccac

SEQ ID NO: 45162 - DNA, 3348 bp, Oryza sativa
aaaattggctgtgaattttgcatttcgctccttgcgccctctgtaagagcggcaaggacctaactgaaaaattcgcagacggcgccgtcgagccactgtctgccacatcagcttgccgccctagtggagggcggtagggtctatttttgtaaatttttccaacgataaattatttatgtaaatattaaaaaaattaaaaatgaacaaaattctggtgcatgctgatgcagtcttgggtcaccctctgcgtgatgattctaggttttgtgttaaacaactcttcagcagcattgctcacgaatggtcgactccaactcctctctaaaagatttagttaagcaagggtgagtactaaccgtactcagcaagccaccactacataatgcatttagtgcacacaggggttcaagggtggttggtttattcgcataaagctagatttcacaaatcatttcgcaaacctatgacctagcagctttaactgaaaacaacgttaagttgaatttgtcattaatccgcgagggttcatccaccttggttcggtttaccctcgcatccagttttccacattcccaacatcatcatgaccttcccgcccatcgggcaaggtcacaccactttcctgaactaagcaagatttaaaatctatgaggctagtcaagtgtagtacaagtcccggcgctcaataaccgcgagcacggctattcgaatatatttgatttactcacactgcagtggatgtatgcttttaatcccgcactccgcggcttgcccaacacatgagcctagtcccaacccacgagacttgccgcggcccggtttttcaatcaccggggcatttcggcacccgctccaaggactatggatccccattgcactcccggcacaacacaccacctcgagccggcagtgaggagagtcctggcactcccaggatcacaatgggttatattacatataggttaggtgcattttagatttttggcatcattaaccaatccatatcccttcacaacatcacaacatctcacatcagaaccaccatgacaggggtgccgccccacgaggatttcttagtccaccgggtctatacccactcgagaagtgcgttcgtactctgattgtttcttgcatagcttcttgactcggtctttaactgactagggtcggcgactagccgtttctagaaccacccatattctatccatgccgccccagtcgaaaacattttgtttcattaggtttttggttttcgcaaagctttttgtgctgcgggtggcgctcatgtctccacccgccttctggcaatcactcttgacgagtgaccgccaccacacatccatatccaactactatggagtgtatatcataagcaatattaagcaatgtcaataattgaccatgcataaataatagactcaggcaacatggatataataaaggtaacaatataaaggatggttcatgaaagtgcatctaggcccctaatgattttggtgattaattacaatgcgattagagaggactaacatttttatttaagcaaatgtcaaggttgttatgtcctcaatgagttagcgtaatgcatatcccgccaaatacgttgacatgatgtgatgcagcaaatgagcaaatggtatattgtaccttttcttttcctttgagtcaataggaatgccacactattaagagggatggtgcattgacatatgaggagtgatcaaagtgctcaaaatctatttttgaaagtgtctctcctcagtttgaagtgttctggattttttcggagttgtccgaaactcattttcggaccttccaaaaaatacacagaacctgttgggcgcttctagaaatttttggatatgtccgaaaaggattttcggactttccgaaaatgactatgaaggcaaatatggttatgtatattttcggacttttccgaaattgatttttagagtttccgaaaatcatcagttgtcccaaaatcgcttctgtgtattttcggacttgtccgaaagggattttcggactttccgaaacatccagaaggtggtttttggttctggaaattttcggatttgtccgaaaagttttcggaatgtccgaaaaatctttcgttgactttattgttagtgctgagctggaattttcggacatgtccgaaaatctttcgaaatatccgaaaatctcaattattgtgcataacgagcagattttgggctgtggctataaatagcaccctcccctcacttgtgagggctgctggtcacattggatattcttgtgcccttggcttgctcttgttgagattcacttttgagccttgctttcttgtttcccctctcacccgtgttcgattcggatttggtgtgtgtgtgagttgtggattcgagtttgtgtgagtgcttgttgttgacttcgtgaagatttgtgagcacttgcatcatctccgggagttcattgcaccatttgttactcttggaggttgaggacttctaggcggctaggtgtcgctcccgagccaccgatctacttgtggttggccgggagaagtttgtgaaggtcggatctcacctccgaaagggaagagatacccttagtggaaagagggtgcttagtgcaacctcttgaggaaagggttagctaagacctagctcttagtgagctcctcaactgagagtagaatcccctcaaggattcgaacttcgggaacaacttcgtgagcttcatctttggtgactttacttcctccctctccactagctttgcttgtttgagtcgctataggtctagttgctgtttgtgctaacatattcttgttgtaggcaactagatctaggatttactttgtgtttgtgctgactccgaaaattttcggatatatccgaaaatttcggaaatatccaaaaattactgcttccgcttttaattgaatttttgaattagcctattcaccccccctctaagcctaattgacactttcaattggtatcagagcctaatctcctaattaggcttaaccgcttggagagatcatgtcgggccaaacaggggatgggaatgatggtgataagggagctaagatcccttatgactacccccctacatctacatcttatgtgagtacctatagcggcaaagctccgtacttcaatggtacggactatgccgcttggaagcataagatgaagatgcatttgaagtctattaacccatctatttggagaatagtcgaaaaaggctatattttacagaatcccgaagatcccactaaggaggacgacgagaacgagtacaagaatgcttaagccgctaatgcaatacttagcgccttgagtggaagtgagt

SEQ ID NO: 45163 - DNA, 3165 bp, Oryza sativa
atatccctccttcccctccgggttttgaagccgagcccgatgagccagaggaagagctcgaggatccatttgctgggttgcctcctgacttcgacttcattattgttactactttttattgtgagttactaccattccatcatgacgttattgtatgtgtgcagtaacaactataatttttacagtaacagtgcatgttactgcaatttcttaatagcgttactgcaaaacatgtggtaacaaccaaacacacaggtacatgacctaccacccactttgaaccagtaaatgtaagtgcaagtgatatcttttgaattctcatctttaaacaatgatatctctcacaccatctattatatttttgaaccgtttgcatcgtaatgctttaaaaaaagaactctacaaaactagatccgtcatgactatattttaactatattttattagtgttactgcatggtggttgttgacggtccttaaatcataatatctgaccgtcaataccttcgtataatgaaataaaacatggtatccaacgtagtggtaggcattattactaatcatttccactagtgttggtgaaatatgtgtatgcaggtattttgagaagaaaacacatccgtcaagcgacaaactgcacctccgcgcattcaggacacatttacacggattggaggccccataagtcaattaaacaactccaaatgggcccaactatcatgccaatgggctgagggcctcaaaattagtgtccacgacgaaaaacgggccgaacggagccgtcccgggttcggccgaagctccagttcggccgaaccgttttggtggtcgttgatcgtcaaattttgcgtggatggccctgatcgcatcctaatggcggttccggggtagtttggtcatttcgcataggctgtaaccgtcatacctgcctataaaaggaggagctcactctcatttccaacacacaactttgggctgaattacaagaggctctattgtatcttttgtacattagaataaggtagagagtgaggggaagctctggaggagtgcctagaagtttggcgctcatccgacttctacctcgacgagtgtaacttcctaggaggaattctggaggagtaccggagctgttggtacactctgctccgggttcggggaaacttctataaagtaagcattcgtgttcctttcttatgttatttaattactttgtttaagtaagatttacatctttgcaggttcgttgtttagtatttatactaagtgctctagtactaggactccggatagagaaggaagttcctgcgcaagtattagagtagtaattaataacttagacatggtgtctaggttagagattacctttgtttgttgtgtatcccacggatttgtcagaggtaggcggcaggtggtgacagccctgaatcccatcctagtaatcctccacgttcggatacatcatagagctatagccggaaccacgctggcagaccagcaggggtcggtgcccttagcaacagataggaaattacctttgcttagcttagataattaaaacacatagaaagtcctctctagcctgcctagcctacctatagttgttgtccttggattgtcttagccttaggtagattacacacgttccctgagttcgatatccttttggggtcacccgaaggtgaagtgctacagcggtattccgtgcgcttgcggatttatttgtggacataagaaataccaacagtggttgtcctgttactgcaccgttcatacgagacgaggacaacaaataggtgaacgtgggaggaagttagcacatgggttgaccgacgtggcagtgttggtatttcttaacgacattactagaaatataattctcaacaatggcgcagaaatacttctggtatattatggttacagagttcatccacaagcgcacggatataccattgtagcatttcacccgagagtattccaagagtatcgtatttattttatcccgtgagaagatcatgtagagacaactcaactaataatttatatattacttgtgataatcatattctaagcagggattaagataatccaagggtagagtgacacacaagcattaactactcattctcataatatatcatctaagctaagtggagagaaaagagaaagaaaatctattcctatacttctaatagtatacatacattctagttaactaatatactagctaataccctctatccgatgcccgcctagtacttcgagaagccacccctgactgccgagttccttacgacagcccgtcatgaccatacaaccggggctaaatacggagtaataccctcccagggaattaacttaggattatataccggcgcgaaggaatacccgtactgagctgtcaccatcagcggcccacctctcatccgtaatatataaccccaaataatgatatcctgtaatctagacaccacgcctaaactaccagatactactctaatatcatcgtcatgacatagagtaattgcataagcaaacattatacccgcaccaaaggatctcccagataagctagccgtatattcagtataacatgaacataatgtaaagtaggtattcatatacttgaaaagtatttcaataccataaatgtatttagaagagtattctaataaaagtacaaagcttacaaaagaggaaaggaaatctgctagagctatacccgaactcttccgaaggcttccggactcctgatttctactctattcctattccaccagctagatactactaaactaaacttgagagaaatgagagagctattgcttgaggtgtatgagtgaagtgaggagagcagctccttaaataggctgccaatgacggttgtggcagttggaatggtcggaattgccctccaaccttcattggggagttgatccacgctttccatccaaaactctgtatccaacggcaccgggggaggttcggccgaaccaggggccggtccatacctggcccatattcgtgtcaggtggcctcctctgttgttcttcttcgtagacttgtgaaatttggcccagtatgtcgtgttcaattctgagttcttggcccattcatgcataagtctactctcaacatcgtccgattgatttatcgtctatgttg

SEQ ID NO: 45164 - DNA, 1251 bp, Oryza sativa
tagtcatataccaaaatgaccaaaacaaaaaagttgtagatattgatgatttatacaactttgttgttgatgactttttctgttgaaatcatttattatttgaaaatgttgtttgaagttgttataatttgaaattcaaattcaaattattgaaacagagtcatatagcaaaatgaccaaaataaaagttatagatattgatgagttatacaactttgttattgatgacattttcagttgaaatcatttagtatttgaaaatgttgtttgaagttatcataatttgaaattcaaattcaaattattgaaacaaagtcatctagaaaaatgaccaaaacaaaagttgtagatattgatgatttatacaactttgttgtttatgacttttttagttgaaatcgtttagtatttgaaaatattgtttgaagttgtcataatttgaaattcaaattttacataggtcaattaaactcagatggagaaataaccaaaataaaattggtagatctcaataagttatacaactttgtttttgacaacttttttcacataagttcatttagtatgataaattccgattcgaagttttaatattttgaaattaattgaaaggggggaggcaaaatgcacttctcggtgagggaggagcaaaaggcctgttatgggccagcccttttgcttccgctagtgtttaagcagtcggacttaccgttagtgttgtcaatgagcttgctcgtgcttctcggtcaccacacacaagaagcgacagacaagccgactggtgagagacagctcatggcatgacagacataaattcattctgagattggagtcagggggcgtactttgcaggggttaaggcataagcgcatacctgcctatccatacgactgtatggacatatagccgataagggtataccttgcacgtatatggagttgttcccagtaaatatcgcggtggaatctgttttgcaaatatatggaacaatatgctgctacgatgtcagcgtgattattgccaagagtgcctactacggcaagggcatagaggtttgctgttatactgtactaggtcctatatcctcaaacctttccttgggggtcaagatgatccacggtataaaagggaccccctgggaggggttcaggaaatccaattccatcaccaacacacgcaccaaagtttacgaagtcggagtacacggagccaagtcgccaggagatcttgtcgaatccctcgactacgatc

SEQ ID NO: 45165 - DNA, 2189 bp, Oryza sativa
tgttcttttgctgaaatatctatgaaatgcctgaactgatttggcctatgtcatattgagctgaaatttgctgagttttgttgatttggcctatgtcattgagctgaaatttgctgagtttttttcaacaaaattggcacctgctatgttggtctgaaaatattgccttacaatgatgtcagattaattggttcattctacaattttatcatatgtggcctattgcacaattgatttgctcaaatttgtatcaaactaatcatttctttattacctacccattttcataatctaccatttcagagttcaaataacacacaaaatttgattcagaccatttcatcattcagctgcacaaatcctactcaaaattgcatcaccctattccatccattataccatttgttttcaacatccaactttccacaattcatccaacaaaaaccacaaacttagcacaattccattctagattccattacacaataccaaccaagttccattccataactgacaacattacattccactgcgactaaaaagatgccagattcatttcctacccatcaacatagcaaacacaacaacaaccagtcctaaatctaccaacaacatcacacatatctcaaactttaacctactattcctatccttcaacacccctaccacagcttccttctcaccaacaaccttcctcgatgtggccaactcattcctagctaaaaccagctctgattgcacacatcttccttcttcaacagcagccgaaaaatctcccttctccctcctcagcttccacacttcgtcgcgcaaatcgttcaacacttctctaacgaaactgttcgacggaccatcaacccaagcaaaataatcgcaacatccactctgcaacagtgaaccaatttaaccctagaactcagctcaacaaaatcatggaccccttgaaccctagaacttagctcaaaaaactcacccttgcattcacacatttgaagtaccggcacccgggattgtctgggatccacgaaatccacctcgccgccttgttgctgtacctgcataccaccgctggctcatactccaaagggccaacccgatacgggatgggggaggcagatgtgcgcctagaagacgccgacgagccctcactcctcgagctcgccattcaccgccactcatcgcgctagaaacttcgccgccgtcaaccgcgccgccactgtaaccccccgcgtcgtacccctctccgccgccgccacaacctactcgtagcaacaatggggaacgaacgagcgacagagataactctagaagagcccccgctatttattcccaactaccgtcgctgagtcagcgatgttgaccaagtcaagcagccacgtcagcgaaaactgcacgcaaaacagccatgggagtcagtttgctcgggatttcaaagtttaggggtcaagatatctggttttgcggcaaagggtcacgatttagatccggatcacttttgagggtcacgaatgaacttattcctactagaaaatctgtgcgcctattatcacacccactatatagcctgtttatttgtttatccatgtgcctattagtttattgcatatactttcccaccatttagtacataggattccatatttaaaatatatttttgaccttcatgaggccaaacaaaaatgatcatccccttattttctctcaacttgggtgattgtatgattttgcagatattttctctgtagtaagtcgtgccatactccttgctcaatgatcaatttaagaagacatttgcttaacattctggatttctatattatgcaccccaagtccatcatggtcattttcaataaatctatgcatagtagtttgacacaacttcagatctacatcatgctagtcttgatgactgaatgttaaattataggggtttgaaattttatatttaatttaacacagaaaaatgattcatataaatgttattaacatatccatatatttgtgagcctaaaagtacctacctttgatcgagttgtgtcaaacaagacctaagtaaactctgtcgacgggggatacccgtagaccggatatagagggtattggggtccgttggtacgaggatctacgtagtacgacattcaagcaaacagaagacaaggattatactggttcaggccccttagtactta

SEQ ID NO: 45166 - DNA, 745 bp, Oryza sativa
tcttgaaccccatctggtctagttgtctctcgatcccgcctatcaaagggcacgttgctcttcgctttcattgtgtacctctttaggatgtagacagcgggtatcttctcaacttgtacatgaacaaatgcccggagcatgtgtgtgcagaacatgcctaaattacatccaaaaaaaggagagagcatttaaaccaaagtattgcgatgtgtgataacggaatgctgaaaatgttaaacgtacataaaacatcgatatcgagtttatactataaaaatacctgtatgctcccactgtttgcacttgcatgtaaataccccttcatcgacatctgcaataaccttgaattgcttctgacactagttgtgtttttcggaatgtttggtgtgtgacactgctgtcagggttatggataccacatacctagcagtagttgactaaatctcggcaggacccaccacataccatgtcttatacggaaacaaccttcggatataggaggagttccgcataaggaaggatgactagagttctacatggaaacgataaggactactcggattgtatccatattggtttccctagttctacttggacaaggggacacctaggggtataaatacaaggccccctaggaggagaggggacacggaacaatagatcaataaacaagaacaacatacaagccaacatatgccaagacaagacgcggatatcgattccagagataagcctaggaaaaccc

SEQ ID NO: 45167 - DNA, 638 bp, Oryza sativa
atgggcgaaactatgtcattcttattgacacaagggggttaattattataccaattttaaataagaaataaccataaatatatccatatatccatcacgaccataaacaggtccataaaaccaaacacatgaactctatcatgtgtaccacccgctcacatgcggtgtcaacaattcttagcatatagccataaatagttccataagcatgttttcataagcaataataatatccatattaaatcaatagcatgttaaataattaacagtttgtttaagtgtttctcaaatcttgtcctaagcttatttgactctaaggctcattaaggtatttataacaacaacagaaaatataatgcaataatagcaatataattaacttaaaagaattcgtgcagtctatcgtactccaaagggcaagtacgctactaaaataactctctatctactgggattaaattgttcaagtgagggtgcatgtcttgcaaccttcgagctcgatgtagtcgtacaaatcgtcttctcctagcgcgaagatttcacttgctccaacgtcagcgttttctatttacgcaacaatcatcaccacaataaataaagaaaaacaaagattacccaaaggaaatattatcacaaag

SEQ ID NO: 45168 - DNA, 1541 bp, Oryza sativa
accgagacagaagtcggtatgaaaatcctttttccaaaagtatctggcctgttcctcatgtcttccttgaacagaatcgagctgaacgggtctatgaatagcccctctgtcagattcccattggagaacgatttgagtacatcgtatccatacgcaacggagctgtcaatctctagcaatttcacgctgcaagcataccatgaaaaaataacacgaaaacccgtaaaaatgaaagcaagccaaaaaaaggaggggggaacggatgaaaacatgatgcaccataaggacataatcaatagtgtgatgtacaccgacctgtccatacgaccaccattggtcaataagaagtccctgagctgaacgctcagcgacacgtcagatggcatgatacttgggccaacaaccaccggcgacaaaaatcttggaggctttcgaataaaccgctttggctgagaccatggtgttgaatttacgacatcggtgtcctcattggtctcggccaatagctggcagaaaaaaaaagtgtttaaggtggaaaaaaaaggttaacccaacgtagttgtcgatcgaactaagtgaaatgttaacttccatctttacgtgagtcactgtatgactccacatgcatatcacactataattgttgactgctccttttatatgtgacaaaaaaagacagatagttgaaaacatgtgtggaaaaagggtatttcagtaataagttaacaatcggttttgtcattgggataagtctagaacagagttttttaagttggagttaattatttactctacagttttgcttaaatgtacactagcaaaattacccttgtgttgatcctaaaaaagatgaactaaatgaattataacttaactcacaatgaaaacttgttgagtactcatccatatgtaataagattatttgtttgaaccacttgctgacttattgcttggtcagtggagttaagacatgactgcctaactataatttattactctactatttgttatattgtacactagcatatatacctctgttatattgtgcactagcaaatataccctaagtgtacatgctccagccggtgcaaaaaaaatgtgtgcagggaaaaacccaactatgtgaataggaatttatgctatgaagcacaagtgaactcattaaaaatggatggttgggagtacaacctctgacagtgtaggagccccctcgaccctgcaaatctcctcgattttatcgtacacttgtgtgtcggttgtcacgtcccaaaacgaccctaaaatatatcccttaaattatgcttagaataattaaaatcctagtgaaagcctccaaaaattaaaatgtgcaaagctaaaagtcaaataaggcttggaggatttttgtatatttcctaaaagcctaaaatgtgtaaataaaatttagtggaattttcagagcacaaataataattatcaagaaataaacaaagttaaaaaggtttataaaaagaaaaacaaccctaaaaccctcgcccctctctcttgggccgaattcggcc

SEQ ID NO: 45169 - DNA, 1539 bp, Oryza sativa
ttttgagatgggtgaccgaccgggaagatgtaagcctccatatttagccccggttccttggtaattcatatttagccccggttccctggtaattccctgggttctactctcaggtgaaatgctacaatggtatatccattgctgggaattatatttctagtaatgtgatagaaaatagggggttctactctcaggtgaaatgctacaatggtatatccattgctgggaattatatttctagtaatgtgatagaaaatagggaaaaaggttgtgtgccactctacccttggattatcttaacccctacttagaatatgattatcacaagcaatgtataaattattagtccagttctctctacatgatcttcccatatatccgtgcgcttgtatttctgcgccattgctgggaattatatttctagtaatatgacgcgtcacgtggagtcacagaaaatagggaaaaaggtgcagaatctgtgagtcgaactcaaaacctcctggtttccgcgagagcctcaaccaccaggctatgccacaagctgtgaaacacatgtaactcacatctatttgaaccgtttttaaccggcggtttgaccggtccaactaataaaccagtgaaccgagtgccttaacggttcaatcaccagtctggtcttaataactatgaacagaacttgttgtagcagtggctggtgccttccttttttttgctctacacaaaactctatggagtgtttgatagtgtcgaaacaatattttggcaatattaaaagggggtggcaatcaagctagaaaagtggatgggttagaagacacaagatttatacaggttcataccttctagatgaaaagtaataccctactcctgtccggggattgattcgccgagtgtattattgatcgtatgatcagagagaaaagttatgcctctagaggctcccggacccctccttatatagggggaggagccggaattacaagatacaacccatgttcctaacggactaggcatgtaaagataaattataatcgtaaccgatcaggactatcgggtatttccttgatacacaagttaacataacaatcgagtcctttactagatatattctatctgtatatggtacccccatacctaatcgaatatccacgccatgtgggtatggggtatccataatctccacagatagcaccaagttgttatcttgctgtggggctgtgttggtactacctcttgcaactgcatggtgcctattacaagaggttttgttgtgaccaacttgtttgcatttcttgcatctcattacagtgcccatcctagatgcctttgttggttttgcaggttcattggcctctcttcttgtctctgtccttggtcttccaggcattttgacatagccaggagctttcaaagcctctctgtcatcttcagggcagctgttcatgccctcaactggcagtaggcaatgctcatatgtcttctagaatgcatctactgaatagcattcagctatgtatgcatccagtgaattggtcttga

SEQ ID NO: 45170 - DNA, 4674 bp, Oryza sativa
ctgcttcaaccttgctccttcctctccgagtctgatgcaaaattatgttgttaacacatgccccccaattccgctgtattatataatgaggcagaattttctttcgtcgaacccgtgaaaatctagggtttctgctttgactgttaagcttataagcacatgcccactgtttcaaattttctttctccggctaagtccttcacaacctcccctgctgcacaagctctattatctccagtgattcctctagcgacccaaactcccggcggcgagcccctttgcttcgtcagctcaaactcttaacaatggcgaccacctctgacattcctgaggtaaattccttttctgccagtatctttcgtgtacagttctttcttaggccttagggtttcccgctctttcggcttttgttgtttcaacaccttagaagccaaatcttgattcatgtacttcatgtcgacacccaacactttcttggccctatgggtaatccagtgtaacatactgaaattttgaagaaaaaaatttgcgaaaagttttagttgtgctcttctcgacttttccattggagcaatcttgcttttaatcttttcttttatcttgaacctaaattttatttgcaaagttaaatgctctcttttaattttataaaatccttcttttattctctttttatttctttcgaactttataaaaacccctccatttatttttccctagcctctaacttttgttctggagcatatttcctttggatcctttcccaaacatttccagagtacatgaaacaccatttttcaatatccctagagttaacacttttcctttagaagcttatcatactatcaccaattctgttcctatagaaattcttacgattccccatctacatttatttccaaatccagttttatcctccaacaaatacttttcctttggaatctcgtatatcgaaattatccattcaaaatttcaaagcctactatttagcttggaccaatatttccccaatcggcccgtctctctgttacatctcattatccatttttaaccttgaggcaaaaccagcataattctaattttattggaatttattctagatcaaacctctatctagacctatctccaaaaatctttacttccactccatccaaaaatattatatcatttattctttggtcatgctcctatcttaatccagccgcctgtttaattgcggtggcttaatatccttcttggcacaagaataatattagcacaatattagagtgattgctcttgtgctaagaaaattattttaatccctttcttacaaaaatccaaattttctttagcccacaaatattttaccaaaaatccataccacatattttggggctacagtcctatttatttccctccatctatttctgccaccttcccaaaatttatccaaaattagaaaccttgccatttgtagtttctttccttcctatttgagtacttcaatttaaatttcaaattattagagaaaatttttcgtgacaagttttacatttgattcttattgaattctattaaaattggagcatttttattttgcatccttttcaaatttatatctcaaataaatatctttagttttattttaaaaatatttcaaacctctttagtactttaaaaactatattttatattatttgtcaaaatccaaaagtccacaaatatttttgtttcctttggatttcatctcctttgaattcaattcaaatttatctatgcaaaattctcaagagttactattcatccaggccaaatttccctctattcagcccattccttttctctccctccctccactttttttcttctcgggccacggcccagttggcgcatagcctagctgagccggcccagccgaagccgcctccttccttctctctctcctatgggcgcgccgctgcccacggcatggcgccatcgcccgtggtcctcctgccgccgccgccatcttgccgaccacggcaagtcgtcgtcgtgccgtgaatctccttttccgccgcccaactccactgtagccgccgtgtgtgcacgccgccctggccagccaatgaatggacgaggccagcaccgtgctccccttttccaagtcgctgccaccatggccaagtcgcccttctcctctgcgaactgccatcggcaaccgcctcttgtcgcctataaatagccggcaaggtttcctcttccttccccacacacaaccaagcacctcgagctctagctatctctcctgccatgaccggtcaccaccttgccactagccgatctcgtccaccggctctcctcacactaaatcctcacaccaccggcatggccttgcttcggtgattccatttttccactttttcccttcccttcctgtcgtaggctctccggaccttccattatatttgagagatgaagtgaataattcaagtcatcaaacaagcataatgaaacatccgacacctcgagagaggaatattggagacattgctgggcccttagcctgccagtcaacttcagcctgagatgtgcccgtcaaaccactcgaaggcggcgaccaaatgtgttacacattcaggagacttgacaaaaatggctaaagatctacaacctctcaaatattcctaactcatactcatgtgaatctagttcccaggatgtgcactagattcacactttcatcttaagcatgattacacatagcaaacacaactaagatgaaagaaacttaagacttacaacaacttaataattacataggccgaccggccaaatagacttattagagaacagcggaagcttgactacccaaacacaagcacaccgactaggggtataccccattaagttctcatcctagaagaagcaatcggaacccgcatcactcaaagactaagactaaacctgcaaacaaaaggttatatcaacagcaagagtcagtacattaaacaagttaatgtactggcaagcacaagtcaatcctaccatactacatgtaaggcatatattcaaaggaaggcaatatgtagttcattttcagcataaagcagttttgtttcgcaattcttttgtaaaagagttgatgcttcaattaacaaaacaaattttaagtttcaatatttaattcatcataattccattataatcaatctcctgttgtcatcctttgacaacaagtcataatatatcacctcacacacacacaactcaacacatttatcaatttcaaaccaatatcacatgatcacatttttaaaacatagtctatactcatgacacatcaccaaagcgctcatgaccgtgagcacggctaattgattagtttaaagaaccctgcagagtttgtacagctttacccacatgatatgaactctctagtttgttttgagtttgcaagactccatcacactcttcatgttgaatgtgatctagaggtcataacgaagcctttacactacttagaatctagccttgcaccagcacgatacgtgttcctccatcctaggcatacttggaaatatgtctagaaccgttaagtggcgggcccacgccttaaacttaacgccgtggtggcggacacaacgggaatccacccacgtggcacaataccgttgtattggacagacttagtcacctaaactaccacgtcggggcaaataggaagttcctctgaatcatcgactaattcctcagaattatcgactaactcatacacaccggcctaccagaatgcaaggctagtcctaaatagattaatcagcttaggccatcccatactagcacatgtggatgtacggataactttaaatgggtgacacaagttcggtccttatggacttgggcaaacacttcccctatcggtatgcaactaacaccatatgcacaccacttgccgcccaagtataaaatcacattttacacattttaattcgcaaatacccatcatattcattttattccagcaaaggttcaagtatcaaaaccacattttaattatagatggaatgagcatttgcatatttctaagcatggctaagcaagtaattgcacatagagcatatataaacccatttgagcacaaagagtgtactctaaccatttctaggggttcaaacagcaagaggatcaattattcaaggtggaatatgcagcaaataggtcataactaccttaacccaatttcaaataccgatatagtctaagttcacatgcaactttgcaaacaaatattttcattcctcaaatcatgggattcaatgtgttcaaaggatgggaggagaaaacttgccttgatcagagaattgttagcacctaatccacttcttcaccgattatgcaattatctagataaaggacacgacatgcaattaaacaccgaaagagctgaaaatccaaaatgctctaaaatgcatgatttatgcacagtgggttggaaatgatctaaaatgaatttaggtgaaataattcctattttattttattccatttgggagttatgaattttagaagttttatcggtttacaatagtatagtcttaggtagtgttatgaaatacttttgtaaagtgatttcttattagattagacttcacagggggtgtggagatgtgtttttctaagactaacacattatggtttcacaatttttgg

SEQ ID NO: 45171 - DNA, 3651 bp, Oryza sativa
tacttaaacaacactatgtgtttaaattcttatttcactaagttaaggttttgatcaatgttctctacaaaaggtgacaaattttattttactatgttgaagataactatttgctggttctatagaaactttgttcatttcatttggactaaaaataaattttctacaagttttacaaattaaaggctgctctatgttagtaaatccttatatgaatatttagagacttttactacacagtaagtatataatattatttcataacatggaaatacatgtgttagtgatcctacataacttaattttattcaaattgaagctaaattgggttctacatgaatttctaaagtttagcttatctaaaactagtcattttaaagataatagttttagaggcttttgatgcaaagtaagtaattacttttatttcacttaatcagagactgtatgatgatgaatgatgaatctgtagaatttgattttgtttcaaaatgagttgaaatgaattttctatgtattttataagtttgtacatgttttatgcatgacttatcttagataaatcttagagacattatttgtacagtgagtgtcaagttttatattcctggaataaagttcataacttcaagaatctacagaaactggaatcacttcaaaatgagctatatttgattttatatagattttacaactttgtgcatctttctgctaaacatataattgtttgggcattttcctaatttttcttcagattttaaaggatgggtccacatggctgtgagggaccaatatgcacaaaggcccttgagttttctaggaatcaacccgcagtcctaggcccatatgtcagtgtgtttctacaattgtaaacggatccctgcacttaatctaattcacagaagtcatccctctgctctaggcagagcagagctagccatggctgagctcgatctggagctcgccggcggcaaacggtggctcatttgaggttgaggtcaaaagataaaatgaagacaaagctctcgcgattccattcctctagttttcttggttagaggacatcggagtagcgccgatggcgagtgtgagcggcggtggttttggggtgaaagtgcatgtgcgcatggaagtcgattacgaacgaaaaggatgcatgcatgtggtcttctagacttcaggatgctcaccgtgggtcgagctagggttgtcgaggtcttggcggcagcggtgacttgtggaacggctcggcgacggcgctcctcctcgggtgaacgacgacggctcgaacgggacaatgagctgcttcaagcaagcatgcacgagggttgtgaggtcaaggagatggtgtatgcgcaaggaatcgaacaatggctcaccgaggcagcggtaatcgacgatgacggcggaggcgatcctagattggcgccggtgaagaaaaggatgtgttctccgtgttcttgatgtttccggctggggttcttgaggtgttttgaagaggaggttgaggcgatgacaatggcgcagcggctttctctgaggtggatgagaatggccggacgacgacgatggttgaagcggcggcgctccggtgcgtgctccaggacgttgtcggcgtggtcgcgttcccggcgatgcactgcacgagaggggtttaggtcaaaagaggaaatgctcggcattgtgtggagagatgggaacgcgaaagagatggaggtgaccttgactcaaacggagatggcgaaggtcgtcgtcactacgaccggcggcaaggtttggggcgatggagaggcagagaacctcctccctcggcttcttcagctccagagtgatgaatggagaatggcgacgcgtctgggaggagtagagagcgagaaaagggaaaccgagatcgacgacacgttgcggccacgcgtcggctcgctcaatctcttcctctctcggctggaacagtggaggaagtgatggacagagtcaaggcaagcttaagaggctgtcaggtgggtccaggtcgtggcaaactaggctagggtgagagggttgggtaagattctgggtaaacttgatttttagatcatttttttttcggaattattttctcctctaactttgtagcttcataacttaatgtgtagaccagaagaattagtgtagattttactggtggtagatgattacacctagattccattttctttggttgcactcaaaaataatgggtggactgctcacagaaattaaacaaagatgggctattagaaagctagattgaatttttaggaggcttaaacagaggaggaaaaatctagaaaaattacatttattcatgataactaatctagtatttgaataaattatttcccatgttcacttatgtgcagttaaatgtacttttggatgaaatatggttttagccgattaaatttaatttgatttcttttagttgtctgcttcgaccgattaatttgagatttcaacttgagtgttaacatgttaccaaaattacagaggatatgtttgtgctaatcactgtccacataaatttttccatgattttatcttgcacaaaatattttagagaattaggatgacctttgtttgtatatgtgttcccacttcataattgcatctaatattattatagggattacattaaacttcttttagactgagaagatgatatttgagtttaatattaagtccacatgttatcacccaagattaactataggtttgtttagtgaaataattcttttagattatgctcatgggacctattatggaatgcaagaccaaaactccaaatgcacaaagaactcgagcctaggcatgcattatgtacatgtatgcttgatgacatttctagtctaatgttgggaatgaaaagattttattttgttctcaaattataatcatgcaatggtttaaattggtcatcacctaaattaaaacggaaatttttggctctaaaaattggagaagttaacctctaactattttgacaagaaatttttaagtcctaaaatttcgggtatgttacacttccaccccaaataatgaggaaataggtcccgatcttttgataggtattgattaacaatcgatttggtggagtagcgacacaactcgatccggcttctgaacaaacacgctcttaagccccataatcgcagcaccatattttctctggttatcaaccatgccgaaacccggttgaccttgtcgagaaggctaatccctatatgcgaattcaagaacacaagcaagaacaagatagattgcaacacaattgcatatgaatgattagcactcgaatttggggttccacaaaccgatctagcggcgaaactgttcttgacagattaatctaagcaaaaccccctctaaacgatggtggctactgaataaatatgattagggacatcgtagggttgccttagggtgcacacccgcttgggttaagcccacgacacaattacaaggcccaaaacccaaatcagattcggactggataaggtatgtggcttgttttgcagattcccgacagctcggtaggaattttgatgtgggaccaaaaccatctgaaagtagactccataagtttttcaaaaccatctgacagtactcatgggccccgaaattccttctata

SEQ ID NO: 45172 - DNA, 1132 bp, Oryza sativa
gaatgcaagaccaaaactccaaatgcacaaagaactcgagcctaggcatgcattatgtacatgtatgcttgatgacatttctagtctaatgttgggaatgaaaagattttattttgttctcaaattataatcatgcaatggtttaagttggtcatcacctaaattaaaacggaaatttttggctctaaaaattggagaagttaacctctaactattttgacaagaaatttttaagtcctaaaatttcgggtatgttacagtctatcccccttaaaataaatctcgtccccgagatttgggtagggttggcttaagttatgactatctccagaggattgacattgacagcagataataatttcttttaagttgtatgacagacttgctaccataaaacatttggaaacttttatttcgcgggtgagtggcaagttctactcagttgtgggtttatggaagcttagatagttagttaaattgacactagagaagttagttccaacaagataaatgttggttcatattaacaggagcttataaccagatttctaacttagatgaacttatgtttacagattttccaaagttctggacagcaagcacagaggtttctaaattaaggacaaacgagttcttagttactattacatccatccaacaagttcttacataaatggagtacatggcagccatattacatatattacataccatgattttcttccagaatgggccaccacatacctagactattccttaagcttgtccttaagtcatgccaccgtggcagtagaggttagataggactattgattaatctctcatccttagctttaagactcgaccataccattggacatactctggcggtccatacggtccagtagttccgagtggaggataagcagtcctgacatcgacgcgcgaaggtgggtttctttcaatatacattccaacaggtggtggtatatcttctgctggtgcaagcatggcatcctcaccaaacatgaactccggtgtataatgtccttggcgataccttggcataatgcttctttctaaagtggctaccccggtgcggacgcgttgcagctcagcaaaggttgagcgataaagcatatctagtgagcgc

SEQ ID NO: 45173 - DNA, 769 bp, Oryza sativa
tggatccccccatttttgcgcacccaccaaatggtcacccatcctgaaattgctccaggacaagcacgcttaacctcagtgttctttcgagatcgatttccggaaaagaagttgcaacttgttgatatgagtattctattaatcctattaagccctaggccgggatgtcacatcctcaccccgggatgtcacatggtgccccacgaatacgtaactgcccaggatgttgatgttcagttacgcatcaaatgatataaaagcataaacttcgattatacaatacttaagtcacttagttcataacacaacataaatacaaaccattatatatatggcttataaagccttatttctacaaacagataaactgctagactccaccacaggaactgcctgagcgtaggatgacctagaaaccatagctgtcccactctaacggatcaacaggttctccacaagcatcttcctcctcatgatctgaacccatttatgagtacaaaaggtactcagcaagacatgcttatgataataaatacaataattgcaatataaaacatgcagtatcgagagctggaaggtttaaaccctaaccttaacagttatttcatatagcctaacataataaacatttgatctaaacaacactattgaacatttaatttaaacaataataacgagcataacaatataaatgttacttataaataacttgaatagaacattaaacaataaataagttaaccatattaattaatagccatttagttta

SEQ ID NO: 45174 - DNA, 2444 bp, Oryza sativa
ccttgggcggcctggagcggcggcgcgccgtgcagccggcggcggccgaacagagcggcgatgccgggaggcgacgccggcgacactccggcgtcggattggattgggaaagaaagaggaaagggagtactcagcatggagaatccatttttacattcaatttcataggatttgcgatgtatgcgacgaatttgggagctctatcaatggcccaaatttagggttttggggatttttcctccggtaatggcgatttgattcagcgggggtaggggcgaatttgaggaggtgaaagaggtttaaattgtgcttcttttgcctccggtattgtgccttctagttaaggaacgaaggagatacggaggcgggaagctggaggtgtcgcggcggcattcgttcgtcgttcgtcctcgtgcgagcgtgtgcgtgcgtgtggcgcgcgcggggcggcacgagctcagcgcgagcgtgcacgggattggcgcgaggcagcaggagcttgctcggcttggctcagcctggcttggcctagccgtgtagaggaagaagaaagaaaagaaaaacagagaaagggaaggagagggagaagaacagagaagaaagaaaagaaaaaaaaacagaaaaggaaaacatggggaaaattaaaatagataggattggaattgatgtggaattagatgatccgatattcggaatagatttaaatcggattcaagggaattatttgagggatgatatgcactttgcgacaaaattaaacgagaaaagaacatcgaaaataaacatggaaaataatattttaaatgaactattaactcgacggttatatttttagagaatcaaagcaaactaaatcgattttaaatagttgtcaaattttagggcttttacatgtacccgcaccaaagcatctcccagataagctagccgtatattcagtataacaagaacataatgtaaagtaggtaatcatatacttagaaaatatttcaataccataaatgtatttagaagagtattctaataaaagtacaaagcttacaaaatagaagagaaaagttgctagagccatacccaaactcttccgaaggctttcggactccgatttctactctactcctattccaccagctagatactactaaactaagcttgagagaaatgagagagctattgcttgaggtggtgtgaagtgaagagagtgagctccttatatagaggtagttatgatggttgtggaaggggaattgtccaaagtgccctccaaccgtcattgggatgcaatcctggacgtccacgccaaaacctggatccaacggcgccaggattggtttggcacgaaacctggtgagttacggccgaatcctggagctggcaccaatgccagcaccaatttcggctggtggccctcctctattgctctactccacggaattgtgaattttggcccaattcatcatgctagttctgagttcttggcccatctattcataagtctggttctcgacatcgtccgattgatttatcatctaagttgatgccgattctcctccactttattgtcattctctgcaaaagtttagtaaacctaataatagtagaaaattattactctaacatacttatgcattgcaagcataattattactctaacatacttatgcattgcaagcatcactagttctctcctattttggtaatattgatgttcgaaactgatcgataacgaccgtcaacagcgtcccagcagtcgaactaccccggtttttccccggttcttcattaaaccgtccggttcaactagtttactgccggtttgattgctcgccgatcttttagctgaaccggaccagccggcgccctggttccgatttttcccggtcgaaccgccggtctggtccggttctaataactatggttctattagcctaacacacaacaacagttcaactaaacagaaggttagatgttttccaattgttcttactttaatttgcatttcccaattctgaacctatatgcttattcacactgtctacataatttttcaggggctacatgatcatattgttaggatgaatgctaaggcggttgcaacacagtcaggtggttccgcaacagtcaacctgtaggcaattgtgccatattcccagggttctacatcagcttcaattcagatcatatctgggaaggcatctgtttcagtctcagctcaagaaccagcaaagaagaaaacatctactgggcctgctccatccaagaaggccaagactccaggatcaattctcatgctgccaccatgggaatctgacaaactttgaatcaatctgtgtgtattgctaagtattgacatgccttagctatttatcctatctgtgatgtaatgccattcatgccatatgtcatgtaatggttagaatgctgctatgccagacttgtaaggc

SEQ ID NO: 45175 - DNA, 689 bp, Oryza sativa
tttaaatcgcgacgaaattgctataacgtcacaggttttgggccggtttatgacgaaatcgataaattgtcatggtattatgggccttgtatccatagttgcatatccgtgacgatctctgaaaacatcacgaaaatttcatcaaatttcgtcacatattaaatagattcttgtagtgccctttgcctcacgatatcgattaagctcaaggctagatatgtgccatcctctaatagctcaatcattcacttgaacttgtgatagattatataacttgtgattgactcctcaatcacctttggcatggccatgcactttcataatctataacatcgaggggcccagagatatctctccataagaggggtaaatctcatcttgattattcgtatcgcactacggagtagcgtttagtagtccctaagtaagctactacacatgttgggaaccatgataatctcaggtctaagaattcaataccaacacatatggctcttgcagtgtctcatgttgggtctatccaacaacatgttctcccaacatgtgtccacattattaatttggtatctctataccatgatccatgagacatgatcatcaattaatacatgtgctgatcatttaaacatatttgttgcacatatgatatttgatcagggatcctttagaaatagcaacatacaacataa

SEQ ID NO: 45176 - DNA, 688 bp, Oryza sativa
tatcggatgaactcgagtgatttgatcaagtatgtaagttgaaaaataacttcggttttggtgtcgctcgtgcgcaaagacgctatgggtttttaattttagtttctagaaccacattgatcaaactgaacatacgacgatggatagtgagaatggatataattaaataaggatggaactagtcactgttgaatttaaaatacagattcatagatgaaaaaaaaagacaagtatcatatagactgtgttatataaaattggagtgtctatactgtaatcgtgcggaaccgttttcataactcccgaaatcatcgtctgcatttgtttgatcgtcatctgtatacccagcagattcagctgcatcttcagctcactcgtcgtctaaacatcttcgcagtgatggacccttcctgcttgatctccttgttgttctagggactgcagtactaactttgcatccaacattggtaccacgtcctctacccctgccggatccgcgtggcctgcccctctttcccttacccctattagcagccttcatcaccttgtcgaaatttgctgggtttgtcgggcatgtatttgcgtaatgcccatccctcagatggcaccacccacattcccgtgtgcacaactttttgcccttggctccaagttgaacttcctcatccgggtcataggtccttccttt

SEQ ID NO: 45177 - DNA, 667 bp, Oryza sativa
tcatagcatattggaatgatgagaacttttgattcaaaacggaacttccggtatgggattcgaagttccggtctcaaccgaaaagttaggcggataacggaataaaacactagctataaacttgtacctcaaacaaagaaaatgtatatgaattaaaaggtgacaaataaggtatctaaggaagatataaagttaccaactaaatcaattaagcatgcaagtagatcgggtaaaaacaacctcaagcataatgtgagagaatgcaagaatgggcaaatcaagagaggagacgcgtgatttgtttcccaaagtttggatccacggatcctacgtctctgttgaggagccacaagggccgggcctatttcaaccctttcctcacgaggttgcacaaatgcattcctcggtttcactcttgatttctttccttgcagaggcgaaatcgaagccttcacagactttctgtggcacaccacaaccttgggtgctcaccggcaacgcctagccgtctaggagaccttagtccccaagagtaacaaacacaatcgaagatttgcctgctatgaacttgagtgctcaaagtatggagtgaaactcactagctctcaacttctcaatctctcaatccaactctctccccttctcaaatccctttcacaaagaggca

SEQ ID NO: 45178 - DNA, 686 bp, Oryza sativa
catttggcccctttcaagtcttgcaaaaattggcactgtggcctatggctgcaattaccagcttctgctcggatccatcctatatttcatgtttcccaactgaagggcgccaagggtttttctcatccggttcagactgagttgccgactgacttcactcggtttcagattccccagcaattccttaattacagagtgactaaaaaacataattctgctactattcaattactaacccattggtcagggggtgcagtggaggacgcaacctgggaggacatgcaggatatacactacaggtttccacaggcacaggcttgggggcaagccggttttcaagattgagggcttgtcaggcctacctcgatgctgccaagggactccaagagcaagaagcctgacgtccgtgtacaagatggagaaatccacaaggaagcggaggtagctgatcgggagcgcgacgccaagatgatggaaggagatgctgatgaagcagagaagaatggtggcgctgagaagagggtgccggattccttggcccaaaaaccagaaggcccaactcacgtttcgtcggcgagcaatggaccaagtgaagcccagtagcttagctccagctggcatgttgctagcgagagagagagagagagagaactgcgtgatctgctataatatactccgtataacag

SEQ ID NO: 45179 - DNA, 1528 bp, Oryza sativa
tgaacaggacatgtaaatatctattccagatccaccttccttcatattctgcacaagaaattcagataaaaatttttagaacattgatgttcagatctttctagttccagatttcatatcagtataggtaatggccctttcccaaatcaccaagaaagacttctccagaaaattatatcacttttctggactcgatttagtcaaatttacttatcactataaaacagaattgttatctattactagttaccatctaccaaaattaggacaccccgtagctagaattttccttcaacctgacacatatagcatttttagaacacaagatacatataaatcttttccggaataggaacaagttagtatagcaaatccaaatcaacatgatccatcaaatactatacatacactaggtcaataagtgaagcatggtaatttctgacattgcttaaaaaatatgtggattggaatttaaacaaaactaatatttattttcatgagaacatgcatgttttcatatttcagatttctaaacatgctcagtgctaacaaataaattatcatctttaacaaatgtaaaaaaactatagtataagactaaaataagaacttcaaatgccagcctgaccaaataatatagatgaaatatgtctgaattaagactttgtagtacctaaccaaaggaagatcagccagacaaaaactaattcatattttagaaggttacaaaactaatagaactattttaggaggttacaaaactaattaagttgaacatattagtgaacattttagaatatatgagctaacagtgtggtgacaaaactaagtacttttagcttacaaaacaaaacaaagcaaaataaacaaaaggataaaataatgcagctcctaaatattacacacaaaacgaacaaaagtgtgcttttagtactcaaaagacaagaagtttgcagctagactatgactaggccagcaagcaaccgtcgagctaacctacaaagcaaccatcgggcaaaataccaaactacaaatgggacacacaaccttctcgttgcaactttaaaaaaaacacaaaaatgttgcataactacatcaattaaatttggtgaccaaaacaaagagaatagtgaaaggagaaaattacaaacaatgcattctaataaaacagggtactattagtaggcttgctaacaaattacacaaaactaagtataattagtaggttaatcagtaggaggtactgtccatttacacaaaacaaagtacaattggtagcaaacaaaactgtcttattagtatcttcattgctaacaaaattgacaaaactaggtacacttcaccaactacctaaaaagccataaattagaattgacgaccattctttagaacttcgtttctatattatgattagtacaaaaggaaaaatataagataaaaattcagagaagatgtcaggacctataaaatttagagaagctgaaatgtggggtatatattctgcaaaccatgagatgcaagccgtgca

SEQ ID NO: 45180 - DNA, 6017 bp, Oryza sativa
cattgccatgctttggctcctacggtcaggatcattacctttcaatgtgagaatgtcagagaaaatttagaggtttgtttgttggtagtatttcaatgatcggtattcctttgaggtgaaattgctcttactattgtctcttttcagatactgttctacagataatgtcatgggcaccccacggcataagtctccgatgcgagagagtgcgtcagcaaaacgggaagcgttctcactcttcatttggttatcatcatcaggccaatctacagtacatctttaatcttcagtcttgcagcttcctggaacatgcatctattttcacagtgaacattttgagtatgtatgcaaatctcacctccattgacactcttaaattcatcgtcggagtcgtcctcgagaatactgacggagtcaaaccaggcatcttctttgcagcaacctacataggtacgtatgatcgatcaaattaggtcgattcatctactcctacagatcagcttcagttagtagagtagtaccattggaatccctctggctgtggtgccactgcatctgtgtgaggtggaatgttttggaatgctctgattttccatggtttgatgatgtctcaaaatggacaacctcactcattgagaagtcagtcatgtgtcctcttgaatcgttcaaccgtgacttgggcgcctctggcatgatggatcgggaattagtacgagctcttcttcctttcctggtatagtgccttgctggtggtctctgctcaatgacagacttggaagcacaggaacccatggtagtgacaactcgtgtttgtatctacatttgggaagtatgatatacttcaagataattatccttcactaagacttgatacagtattgaagtaaccacaaagattaatctgcaaggaaaaaaacacatacacatgcatatgttttcggagggagtacctaaaaatattgggtgcagtaacattatttatgtgacaccaaagaagcaaactgagggaaatgtaccaagagactggaatgcagaataacggaaactcggtgaaatacatccaagaaagcaaacagcgccaagaatggcatgaaactgcaagagggggaggggagggtgatggagaagaaggcagctatatatgctgatatgtaatgatgtgggttcatgatcaagggacaagtttggagagcatgtgcttgttggtagtaaggcattctgcattataagcattatcatgaactgtagcatataaaaatatatattctttcacgtagagttatattttgcagccttagagacccctttgaacttcagagaaggttcttgcttggtttgcctaatgaagatcttccagttgaagaaaaatattgttaatcaggtatgtcttggactgtgggtaggggaatgatgttttgtactgcatatagctgcatcatatgctggaggctgcacatatggatgccgtgctcctgctccccagggggaggttatggcatatagctgcatcatatgctggaggttgcagtgtcaatgagaagcaaatctcagagaagcatccgtggcacaaccagggatgagctgggaaggatcgttaggtgaacaaacaatgtgcaaacgattaaggggtcaatcatggggttttgagtttttgaataagcctagccggcctatattttttcaacaggttcccacttctgtacttaacagatagtgataattttactactatgttacacacattcctgaattgcatatgtagtttatatgctgctggaaattaaacgaaagctggaattagaaaaactatagaaatggtttggattttccatctttaatgccttgttattagagtaagcagactgtaagtaaaaaaattgatgtaggaagagaaatctgatttttgatatatcaaaagaacgcttttaatttagagcatgctacgtggttcatatatacatgaacgtatgcagtagtctgaaatggacgtgatcgagtaaatgtttttctcttcgtcttttggcgtttgttattcgtagcaatgatcgtgccatatattagtatgtatattcttttaaattatctcaatggtgatggtgagtggtgaattagctaccacccacaatcagtgtcaagtgagtcctccaaacaatgaggtaaatggacttttgttccttcccaacatcaaaccatcaaacagggatttttttaaaagtatggtgaaaataacgacaaataatatgaccctaagattttacaatgagaatatatttattttaatttttgaggctttagagtgtgcggtgtggttctcttatttaatttccgttgtaacacacgagcatttagctagtgcattataatgtggtgtcttacatcgtcaagctagactgagaagtggagacaatagaagaattgaaatgaattgttgcaacagaccatgttcggcttgtgaaagatcggttttgtcaacttgggcaaaactacgtgcatgttatgacatgtaaggatcaatgtgaaacagattatttcctgtctcaaatatagcaacttctagtttttaatatttatcataaaacataggaatttctccacctatatttttttatcaaccaatcataacattcaccattcaccaatttcattttgtcaaccaattataattttccgtgtttgattttatccactccatatgtctaacccccaagacgaagctaccgggggtcccagaatgaacaacccccccccttttccccctacccacgccggcggtatcccctcacacggatagatcgtaattattaacacaggtgaatcgacaagatgcacaaaacattctgcgttgagatggctttttgatattgcatgcatcctataggtctgaagatccatacctagcaatcaccttcttattctttttctttaactgcaatggatttcaatttttttttctttagcccaattgggttttcttaactttgttggactccattgtatttggaggtgtttggatataagattttttggaagctaattagatttctagtatttctaattctataaatccgtggatctagatctataattatattgataatattttgataaatcattttatttttattttagataaaatatcaaatatcaaaccacaaatagtttaacatatgaactctaagatctggatacatgtcaaacaaggtctaagtatcccatgtaataatttctcttttgaccattgcactccattgtatcgtcaatttaatgacatattaactgtcacatgtaatattttttctgataaaattgctctcgtaaactgaaaaccttctctattagatcttcaaatggatactgaagtaacatgtaatattttttatgatgaaataagtttcacaaaatgaaggtctctagctgcggcgtctccaaactctgaacacgccgtgtgactaataatctatacagaaatctcggcaaccccaatatttaaatcatggcttcgtccgtgttaaccctaaacttttttagggatggtggttgtgtcgttaagctcttattggagttattaaacataatcagcggccttggttttgccgcaagtaacgaacgcagatcatcatatgttactatttaatttgttgtttgcacatgtattgcatataagttctccctctttcaaaaaatgtaagtcctatttctttttcaccaagaccaaacaagcaattaattcattcaccatgtgacaaaatcaatgcacatgcaaccaataagcattaaaatagcttcttgggttcctatcaataatttaatttagcatataataactacaaataggacttagatttttgaaaaaactaaagaatgaaataggtctcacacttttggaaggagggagtatgacttactacgagttatgacatcacgagttatgacttcagatacgtcagtataggtgggctcacaccgacaaatttcgatcccattagcttttcatttcaacccattttgacttaagagtatgttgtttatcacctcttttcaactcctactcatttgttttccgtgcgcacacttcctaaactattaaacggtgtatttttttgaaaaaaaaatataagagagttgatttaaaaaatcatattaactcattcttcaaatttatgttagataatgattaattaaccatcactaatgaatcgctatgttttacgtgtagggaggtgaagttcccaaacaccacctccgaactcgaaataaagatgataactggtttatcattttcttccttgtctttttggatgcttttggtttggggagtttatcagctgaagtgatttggagtttaggaattaggctatttgctttgtttagttagaagacaatggagatttttaattaggatggagaatggatgaaagaacttactgctttttctaggctctaggctaataaatcaacggctaagatcgtttctactggtagtatcatactgttagtagaaaggaccggagaatcactctagcctctaggtagggcttcagagttgaaaagatttcctacattatggcttggacaaatcttagctatctatttttatttaaaatctagtctctgtctatatttactactaattcgaaccatctttacccaacaagatattaggactaaaaatccaattcacatactaattttacaataaattccctcgtgtaaactcctaatgctcttcccaaacaccccagaatttatcgaaagttatagatgcttaaaatctattgaagcaaaagatagtaattcagattacagcaaatcatttttctaacttcaagacgaaataccccacggtgtttcccacaatgaaagaaaaaaaacactatatgtaatatattcaagtttcatataggcataacataacagttatatactatctcccttgacgtgtgatacagaccttattgaacacagcaatggagcatgcatgaaatccagaatatagtgtctcaaagatgttaatgaattggaagaagttaatcagagaagctaggggaaagaacctctgcaactacgagcaatgaaagtcgatatgcgtgcttgcatgcatatgtatccccctcccacggatgaacgacgacggcggcggagggcggcggtgtgggggtttaccgtcgcctctgccgtacgccgttcgacgtcaaaccgccggcgacgttgttaggagaggttgagtggtaaagagagaccgtagacaccaacgagaaatgttccgttatttagcactggtattgcccatatatagtagttttctttgtttgcatcaatgcttgcatgttggaggagagaaacaaggcggggaagatggcggcaagaataaaccaacagctagatatacacctcatttacgtggttgccatttattaacaacaaaatttggtaagatatgcttggagtcgaagataaacacctaggcagatttggagcagatacaatctttccagaaacagggtgcgtgtcagctggatattatatcggctgagtctgattcggacacagttggccagtacaagaataattggtttcagattataatttcgatattttgctatacatggatagagtccattacagacagttgtatctattaattaggaatattagtatcgatttattagagaattggcaagagtccgccttaaggacttgttcatatgtgtttgtaacttaggaaagtttgactcgtatctgatatggacaagtttgtactatgggtataaatatatgcccagaaccgtgtaagaaaaataacaaccgtttaatacactcttggtgcatcgccgcctttttctcttagttcttttcgacgagttcttgctaaaagttaaggcatcggtttcgacctcctgacaagaggtaatgcttgtcacggtggtttgcattatcgagattactatatcgctttagatatgttaatcttgctaatataatcactgttcatcagatatgttattctatttatatca

SEQ ID NO: 45181 - DNA, 717 bp, Oryza sativa
attcctgcagcccttgttatcttttataatatatgttgcaacgcacggcctttagcaagtttcctaaatgaatttacgtgtcacccgtattattgatggcatttcatcatgcgttgcacaagtagcagcataagtcggttgcaacctgtactgcagctatcggcctattcgcatttgttgaccaagtgggcatgcaaaatttcgcgttgctttctgggtgttttacagcgcggctccgtgtaccgcgcgaggaaagaaaaggtgggtgtgttccacttggtctgcaagggaggcagccgattggcagccaaaaggcgccacatgcgaccacagctgcacccacacacccaccttgctctttctcgcaagtgctggatcctctacaaccaccaccagaatgtgcagcaaccccagggtcaaacggcaatgtcaaaggctatgtgaactagaactacacgtcctgagatatttgatgacctcatgtgggattaatcttcgactgtttgttcgcggtaattgagagagtaaaggccatttgacgcagcttgtagtagaaaggaatgtataaaaatgttcatgtttttctcacttactctttccctccacgagattacggtagagaaacaacatgtttttaaaagattacgatagagaaacaacacggtttaaaagaaaaaatgaaaaaaaaaacttaaaaagaaaacgtgaccacaggtc

SEQ ID NO: 45182 - DNA, 651 bp, Oryza sativa
cactcaagacaagcgttgtccatcccaatacccaacttggatcgtcgtagcggtgtcggaaagcaaaagcgtagcacataaaaacgacactgccgctatgccacgatgttgttgctccgtgtatcattcatgttcatcaatatacttaaaaagcaagttgtggatactgttttcaaatcgggttgccgtcctcgacgacactgatggtgttgcatcaaggaaaccggaaaagtttccaagagcaaataattgtctgattgtctgctgctttctgggctttgcatcaggcatcatcaagtgaatagaagaactgatagtcgtagtagtatcctctatctcagaatatagcaacctaaaatcagatggaacgtattctaatactataaatctcgttttgtccgattctaaatttctataatctggaacggaggtaataatattttttcctctcttttccccgctttgggaaggttcaggctagatggagcccagcgaatttggcccggcaattccttctctaacaagcacgaatcatcatcgccatcatcgtccatcggctacgattagcgtcaggtcattagggcagaccggcagaatggaatctttggtctcttcccaatgcaatgctgctgctagctcccatggccatga

SEQ ID NO: 45183 - DNA, 593 bp, Oryza sativa
atcaaaagattccagtggctgcccggcaggatcgactctgattatggcccaatcgaaggaggcgcactgtcagtgccacggcaacagcttccagtccaccttcacgaagagcagccatttgatcatcctcagtcgcaggctatatagttttgttgcgcctgcaaaagaaccaaaaatatatatatatgttatgtatcctctgttttgctcactgctagagctccttggacatgcaatgcagcatgactacccctgttgtactaacctttcagctttatatccatctgctattactaagatcctccaattctatttgctttgcttgaatgccttcgccataaaactctaaaatactgcgttagctctatagccctaaatgaacggtggggaggcgccgcgaagcgcgccgaaaatcctagtgaagtagaaagcaacaacagtggtggcgccagcgaggaagcacggatccagtggtggcgcaagcaaatccggtggcaacgaccaagccatccacttcttgtcctgccgccagcttggttgagctcccgacaagccaccggcctcgtcgagctacagaggggctgatgctgtgt

SEQ ID NO: 45184 - DNA, 1083 bp, Oryza sativa
ttgctgtcatagagaccagcattcctctgagaaacttcttcacgctgaacagagcacatgcctggctaatgttttcaagatatctctacagtcttttgttcccatgttggatgaatgcatctcaaaccaactatgctctaattacttgctcttggaagcaaacattggaatgcatgggcctggcatggtatagcagacattctacacaatcatgattcatcctgataataccaaataccagcagatcagatcaactattatagctttctcaacccgtaattgcttgccatggctgatattctgtgcccatatatcgtttccacgcaattacgtccacatagttttcaatccaatctttacagctcaaacgtttcaaacgaacatcggtagcttttagaccaagcgttcatatatacgataaacaacacagtgcgttctccaaaccaccaaatgtgccaacccagctgcacattgaagagaacataaacgccctatctgctcacttgcccacttctcttgaaaagactttgaaaagacaacatagctagcaccctagcaacctgtctatcctcactctttaaccttcttctacctctatccgttctctcagccagacctctctctctctctctccttccatcaagaacacatcctcttttccagcttcacttcctccttcggttcttgcttgtgatctactacattgagcagaagaagaacggctcattgctattgctgctctgatattcatccataccaggtaccacagccaccgcatctcattctccaaactgatttctacacatatattatgctttcctcgcttatcttatcaaataaacataggtacaacaaatcgattagtaaatacaacggcagggaaattagatctgtttatagatagaacagtttccctacatgcacaagccaagcacattcacagccatatttttcttttatttttgcagcaacatggaacacaaccagacagggaggttactaggccaataacacaaccatcgacctatgtgaagaaacggccactagcagcagcaaaattttccaatagaaaggagacgtccc

SEQ ID NO: 45185 - DNA, 1698 bp, Oryza sativa
ctttttcgtattataagtcattttgatttttctagttaaaattctttaggtttgatcaattttatataaaatttaataacatttacaacaccaaattagtttaattaaatattaaattgaataaattttgataatatgattgttttgtgttgaaaatattgctatatttttctataaacttgtcaaactataaaacttttttggttatcgtaatctaacaatttaaaaattattagtgctatttacttattgcctattagctctaggatacttagaccatgttttttttggaggattagttgcacgtaaaacgagaaaggtaattaactattaattattaaaaacttaaaaaaataaatttatttgatttttttaaaagtatcctctgtgtagaaagatttcgcatgaaacatattgtttagcagtttgaaaagagtagcagctaagctcagatagctctttagaacatggccttaaaaggcactcattttgtagagcatattttacctactaaaatatcatttccacttgagttttattgagaaaaaaactatagataatcttgaatttagtatagataagttggttatatatcttggggtggaacctgtttccttgggtggtttaagtctttgatcagtatttgtgcttgtatttatggcaaatattcttatagtgataaacgtgatgactttgtcaatttaagatatatggctaagtctcgagattttcataaagacaataatagtagggttcttggcaatgatgacccaagtaggacctcgccctttgagtttttgctttagcgtggggtagcaaacttgttggtcggcaaggcttccctgaccctggcgtttcctagaagatgcggttgcccatgatggtgtgatgacgataacattgcttatctacccatgcgggtgagccttatttgatcttctagcttgctacttggttttgcaaatcttgtagtgaatagcgtttgctaaatgttgaacctgactgttctgtttttttcgtagccttctagtttaggtttgcagttttttatccgttgtagtcatggttttttataattaactatgcgaaattgaacaacttcttctttatacaaaacatcgcaacaacctaaccattaaaaaaaacaataacgttagggtgcacgcgcgcatgtgtataattgtatgtttgtgctgtgtttgaacgaaatataaataggcgtttaactttggttcaacagcctcaaccggttcacacttcgggccttctccctccctcgccatgccagcagccttgccatcatttccccctcctcctatacccataatgagtccaccgactacacctcccgcattgataaagctcatgtgcaagtttggtcaggtttgagaccgtgcataccagcattgagagatcttcatcaaaactaataagtagcttgttcatctacctacaatctgaaatgaaccctgctatacatccgacgttcttgtaatctcaatacctccaatactaccaaacttgccagagttactagtaatctcagtgattgtgcaactgcacgacgatgcttacaccagagtgaatgacccaaaacatacagccttatctatcataataggcacagacgcaacacgcaaagccctattagctagcagcaaactggtaaagcagacaatgccattgcagcacacaact

SEQ ID NO: 45186 - DNA, 547 bp, Oryza sativa
ggacaacaacaggaaagtgcagaaaccgtatggctactttatggttatgatgcttgataggttcatggttacaaataactatcagcaccttgattttaatggttactatccataaatctgggtttatcaatgccaggagctcatttttattgaacttcaggctactgtatggtgaaagtagtcaaaagtaccatatgacttaaattctgaagtaatttgataactcaaaagtaaactgcccgagaaaaacataaccaaagtgaatagttcatgccaatgtccaatagaattagaaaaataatgtactaataccaagtatggaaataactggcatgtcaaactcacccatcagaatacttttgttccaattccttgtacgcctgctgaagaacttcccttccaggaatgatagtgctctagaaaatagcataggtattatcgattttcatttcattttgaagcatgttatactttcatttgatctttgagtaaaacatgtgggaaccataagtttttgtactaaacagcaataagccaataacagtac

SEQ ID NO: 45187 - DNA, 2777 bp, Oryza sativa
cctcacccgcccgccggccctcgtccctcagccgccactcgcaccgccgccggttcccctcggccgcccactgccatgagtcgccgctctcacccgcccgccctcccggcgctgccgccggcccccgcctgccggttacggcgtcgaagacctggtcgacggcggccgagctcgccataccgcgcagcgtgtgcctcccgccgccgccgctgtggtcttctccgtcttcgccgctgtggagctcagcccgggcgccacctccgctcgcaggccaccgcgcctccgccactcgcaggccaccgctcgccgccgtcttcaccgctcgccgccgtctccgcccgccgcgggatagagagagggagcggcggggagagagaaggaactgagggaggggagagagaagggtcacgtgggtcccacaatctatttttggtgtcaatgacaaatggtcccacacatattttttaattctaaatgcttcctaaacgccacgcgtaaaggagacccggtcaataccgccacgtcagcgccacgtcagcgaaaccgccctccaaaaccgccaagggagtcaaattgcaccggttttcatagtttgggggtcaagatatccggttttgtggtttagggtcacggactagatttcaatcacttttgagggtcaccaagtgaacttgttccattgctctaagcagagcaaactctcttaggttgggcgaggtgggccaacttttcctacagtaacaaatgtggccactatacagtgcccggctgctacagtacagtgcagtactaggctgcgttttgcttctgctgttgggctgtgctgctagcttagctttgctcttcttgctgttgggctgggctgagctttgctcttcttgctgttgggctgggctgagctttgctctcttctttttctttttctcaattatttgcggggcgtcgtattctacctatctagctagttctacctctagtgcttcctctttagggattggtgtagagagatttggaagtgagtgcatgagagactaggctagcttttatcttgggcactcaagattggcatcgagctcgtttgtcactgtatttgttactctttgaggttctcctgttcgctagctagtgaggtgtcgctcacgagcgccggtgaagtttgtgaaggattactttgtctctctaaaaggaaaagaggtggcttgagtagataccgagcttgatctttgttgttgctttgtgagattaatttggaattaaagaaacctgactttttggagtccctcaatgaaaacgaaggataatttggaatccgaagttcggtgaaaaatcagttgtcttctcctttatccctcttttcttttgtgcataatcatttgtatcgtgttctaattgttttgtgctagctagctcgctagtttcctgcttctttagttttcatgttgctagttgtagctagtgaattaaagttgtgcttgtgagttgttttcccttcgtgggcttttcctacctaattggaacctccagtgttcttaagcagaacttccagagcctaccggaagttccgactataggaacaaaaaatacagatccctgtcaagtttaggactaccacgagggcatttgggtctctttgcgtgcaaatgtggcttctctctcgttacgatgtcttgtagcaaaatttctcctttttattgcatgaaagaatctagctgggagcactacaggtgagaagattgctgctcatgtaggatttgcctcaatattttattagagaaaaattcatggcagagtttatttacatacagaatatgtggtaatgtggagcaggaagaattgaacaatgcatttaaagaaacttagcctgccaatctgccatgtcattcattggtgaacggtgactttattttatctgaatgatataagctgccatcagagtttactaaaggacatggcagccccatctgttggccttgggtgtggaaggtaaacaacccctgcatcaggattcaacaactcccatctggaagaaataaattgagccattgaaaaaaaaatacagagggtgaattattactgagaataattgtacacatgtactgttaatgaaggtttggaagtttagtgaatacttgtaaccacaagagagatgatggagcatgatggtgagctgcagccttgccagcatgttgccggcgcagatcctctcgccgccaccgaacacctggtacgtgcctggcttcgctgctttctgatcaatcaatgcacttacgattaagttgacaatttatcatcaaaggaagaacatttacttcgatcgagtaataaattatgtacatgaacgaccacatatgtttagttacgttttctttcaaatttaaaaatagttatcgttttgataaagatacggtctccacaaaataagttttcactatttctattgtaatatataaaaagtatcagtaaatatataacattattgaagtacattttaagattaatctatgcatgtgttatatacgtatatcagtaattatttatagtcaaagtttttaagtctagcattgtagcatcaatgttttttttaaaagataattatttgcaacctgaagggagtaaatatatagcagatcggcactcaagtcctcatttataagcaagttttgtgggcttggcccataaaattggtttataagtggggctcctagtttaaataggattactttaaccgatcatctacttgattatagtagtaattaaagaagaatttttaagaaaac

SEQ ID NO: 45188 - DNA, 1093 bp, Oryza sativa
caagtacaccataagtccataactctgcagaccattgctatgtttagttcagcgtaaagtttgaattttggttgaaattagagataatgtgactgaaaagtaaagttgtgtgtgtatgacatgttaatgtgatggaaaaggactgaaagtttggatccaaactttggatctaaacacagcccatgcatctttctgaaagtttatctatcaaaattcaaagcaccagcctgcatggaaacaattcttcccctatctgttttatgaagttctcaacccccaatcagataagtgcctgtatatggtagatgcacacacatagaccattttatttctttgttatatggtagatgcagcacaatccaactatatttttttgggtattttttttttcattttcatgtatagttatgaaccaacttacatcccatctgtcggggttgaagctcaacggatcatcgtaatatttagggtcaacatgtagtgatcggatccacacaattactttccacccctctggtattgtataacctgcttgcatgcatacaattaaacaattttgagtgagaatttacttagtatctcgatcatgggttattctcgataattattcattagtaccattttccctctgctccagaaataattttggtagttttaattttctacagtctacaatacaaaattgtgattattcttgtagtttatataattgctgggtaagagtgcaaacatgctactagtatagattagaaatgatagtgtgaactgtgaagaccacgggtattggcgccacatgtcagtaacacattgatgttattttccactcatgtataattactatttcgattaatttgcccttacatgcaaccaacaaaaaaaaatatcataaaaatgcatattatggaggcgtttgataacacagagatccatttaactttttcttaattatgaccttagttttatgttaatgatgatcaaagtctctaaaaataatcattaaagtataatttattgatatcacctcggtactcgacatctctgagtgccacccggtaaagcatcggagatatgttggccaaccgaattgtttctt

SEQ ID NO: 45189 - DNA, 1312 bp, Oryza sativa
gctattgtctgagtacatcctacagatgaacaaggagcacgtaatcattaaaccctaacacggatcggtagcgctgggcactaaacatcaatatatcaagggaggcaacaaaggtggcctaagactgagaaatcaaaggggacagcagagaactcacccatccagaaaccaatccgggcgctcgccagcgccattccacgccatgcctgctcctcctcgttcctttcgatgcaagatcagatccacgctcccatgctccttcccgttgccgctaaggtttcaccgccgctagagtttcgccgccgcggagagaggggaatcgagggagaacagagagtgacactgagggggatgacgataagcaccggtcaacaggggttccaatatgccagcgactgaaagggcaagagtgacatttttcctgcctaggccgacatgtcagagctgccaaacggataatcccaaacagaatagcgacggaatagtgtggagttcatgataaagttcgacgatggcagagagggaggctcgaacattttagtagcacagatgcagacaccatctttcttaatggcacacagggaaaaacctctaggatatgggctgtgttgggcttagcttcaagcgctagaaataaacgggtgacgtggcttaacctcagcccaggaaaatccttagggtgtgtttgggattgggaaagggaaatggatgaatggctaagtttaaatgaggtgtgaaaaatggatggctaggatacaatattaccctttgaagggtgggatattatttctctatctcatttgccaaacaaaacctaataactacactaagtggggatcacttgtatagtattataggattagtttcctaattatcacggctcaagcgcaagaaagacacgcacctatggccacaactaaaactacaccaccatcagtctacaattttacaattttagtaggaaagtggaactgatatgtgtaaactcaaactcaaacgcatacacatatacatctatcacggcagccatgcatcattagcaaactgataatggtttcttaggatacacatacacatatactccctccgtcctattttaagtgcagccatgcttttccgtgctcaactttgatcgcccgtcttatttgaaattttctttaaaaaaattaaaaacataagtcacgtataaagtattattcacgttttaccatctcataacaacagaaatactaattataaaaaaatttaaataagacggacgatcaaagttgggcacgaaaactcatggttacacttaaaatttgacggaggg

SEQ ID NO: 45190 - DNA, 7383 bp, Oryza sativa
tcctgcagccccctcctgttgttcaccgtcttatgtcgaatttgtgtatttcgggaaatattagaacaaacacacgaaactttaatttttaaaccattgttcaaaataagcgatcagtaaccatggatgtgtagagctcgttgagtagtataaagtagactaggtaatcgaagtccgaatgaagtctcgatgtggaccgttagatctcttttctagtaactacctgcttcactaaacatactagtacataataaaccatacacgttttagtttattagctgattgtagtgggtcaacgtgatgacggagtagatctactaggtatctctagctagacaaaatatatgcaattaataataatgataattaactagcgcgtattcgagtgatgacttgtcgacttaaattatatttatatctcataaaaaaaacttttcatactagaacttcttttatttgttcaaattcgttgggaaaaaaatgaaggaattcctcaagtaaccataaatgatcataaaacactatttgttcaaattaaggttgaaaacggggcgggtatttccagccctcccgcccggccatattatttcgggacaaattcgggtacccgcgacttttcacgaatatcgggttcgaatacgggtcttttttggcggatatgagattgggttcgggaacatggtatccgacggatacgggttgtccggtaaaaaatcagggtattacccggataattatacggatattacccgtattatgtttttgcgaggtactttttggtaccatgtattagttctactatgatgtattgtagcctatttatttcctaaggtcctaatggcctaatataatcgtattatggatatatagaattgttaaatggttattgtctatgtgatatataagattgttgcttcgacatgatatcctaataaatattcgtaaccgatagtgcacgtatctattttggtacgtattcgtttcgtatttttgcccgatattatccaagtttgtatctgtattcggcactatccgtatccgacccgattccgattataaaatatgggttaaggtatgggaagggtgagatccgaccgaacccgacccgttttcacacctagttcaaattcattgggaaaaaaatgaaggaattcctcaagtaaccacaaatgatcgtaaaacacgaagtgagcgtaactcacctgtcaattagattccttgggtgaaaccaacccatccggattcaaattctagatttaatatggatgatcgtatttacggctaattattatttcattggtaggcgatgtactccacgatagcgaggcgtcatggtaacttcgtcaatcacaaaatataaaatgtaccggcacagtcttacgatgtgctcatgttagtaagatgcgcacgtgttgtgatcgcttacgattgactgtgtttctttaaaaaaaatcataaaacaaatgcatgcgcacatatttttgaataaatcggcggggaaggggtgccaaattgatacaacgcgttatttacgcactgattaggtcttcgtgatttgctccggtcagctcgctttgctagttgctcgtgcaaaatagtccacgtgcacgtctcttctttgattttctggaagaaagtgacgcctttgggatttccatgtgtctaaaaagctttcgcgaacgctttgacctatttctcatatggcacagggatgatatgatggtgacatataaatagtgatgtactttcttcatactccctcctccctgaaaaactactttcgggtttatatgcaaacccaaaagtaggttttttttgacggaaaaagtatttatataaatatgtgcactggcatagaaaacattcattcgtaagttatatataagttttatataagttacagtgtaatctctcgaaaaaaattacaatataattatatcacgattatattataattatatctgacaatttttttatgataaatgtatagatatataatccccgtattagtatctaaccgatagaagggtagtttagtaacgatgtcgggttcggaatcctacatgtggcctgccagttcagaatccagcaggaaatgccattcgtgtacttgtgatgatattgttgaattcaatcggtctttgaccgtaacttcgactattgttttatattaaaacatattgataatatgtataaccagattataattagtattgtaaaatttctgatacagaaaaatcttctcatatgtattttattttttcaaagtcaatatctggacaactattaataatcaaaattttaaaaagtttggtcaaataaaatcgatattttcatgtatttaaatacagagaaagtatctcacaccgttaatattccaaaatatgctctcagtaagtagtattacgaagagatttaatttggagggagataattaaactacaaaagtttcttacaattttttccttgtttttaacactactacgttaaaataactatagattttctagctagaaaagaaaatcaacgacgtaattaattaaaaccacgtatcagtatgtactactctatccgtattttatattttaatgtatgacgctattgattttttatcaacgtttgatcgttcgtcttattcaaagtttttatacaaatataaaaatatttatgtcatgtttaagagcatttgatgataaatcaagtcataataaaataaatgataattatataatttttttagtaagacgaataattaaacgtcgataaaagtttacggcgtcatacgttaaagttaaagtatagacaaagtatatcacaattcgaatggaaggtatgaacttaactggaaccacatattttggatgtgcgacgcgatgcatcgaacctgttttacttgttagattttcctcgtagggggttggtgaatggtggtgacgtgtatgtttttttccatagtcaaggtctaaactcttggagcgaaaacgtcacaaaagtcaggcgagtcgagtcgacggcatgcgtacgtgtgttccgccgtccatcatccgtccttgtgacgtcgacgtctgcttgctctttgcatccgattctactgggtccgtattatgctggaagtgccagccatatataatttgtacgaaagtatgtatatgtatgcagtgacggacatgtgataaatagtacttccctccgttttaggttagaagatgtttttgactttgaacaaagttaaactgctttaagtttgaccaagtttatagaaaaaatagtaatatattttatacaagataaatttattataaaaacatatttaagtattaatttaataaaactaatttggtaatgtaaatattactatatttgtctataaacttaatcaaatttaaagaattttaattcttataacctgaaacggagggagtaccaggattattacatactgctccctccgttataacctgaaacggagggagtgccaggattattacatactgctccctccgtttttgaatttatttttatagttatttaattttgagcaaatttatataaaaatataataatattttcaacacataacaaatatattatcaaaatatattcacggttagatttaataaaattaatttgatattttagatgttgctaattttttctattaatttgatcaaatttaaaaaaagtttgactagaaaaaaagttaaatgacttgtaatatgaaacggaggaaatattattaactagaaccctaattattatagcctaatacatgtaaaaattggataagctatctaatgtgtccggtgcaccaggataggtagctaccctatcctagggcggtacatattcccgtatgtacgtgtgtgtatacatgtaatataatcagtgataaagcccggaaaattttgaagtccataaatattttttaaaaaaatgtaaaacagcagatgctctgccgaatacatcaaacaaggagaaaaatccactagaagcgaaagcccagagtttcagatcacaagtgaaaacacctcataaaatggttgtttgaggggctacatgcgaagaaaaaccaaagatgcaagcaaagaaaacactcggctatagcctatagtaggtactccatcaccagataagcgcgattttggtggagattttggaagacttcggcgactcgagcactgctcaatggtgtgacagactgaaatacaaacaccctagattgctgggcaaatattacgccaggtggaccaatcagaaaccgcggcagtgcctaaaggtctcgttcctcccaactccataaaaatctaacagtcacgaaagaagaaagtgtgtaactataatattatactccctccgtattttaatatatgacaccgttgactttttgaccaacgtttgaccattcgttttattcaaaaattttgtgcaaatataaaaatatttatgtcatgtttaaagaacatttgatgacgaatcaagtcataataaaataaatgataattacataaattttttgaataagacgaatggttaaacgttgaacaaaaagtcaacggcgtcataaggtagtacgatttttagaagatcaatatatctattaaatatcaaagggacgcatggtaaattcgttggaaatccacaaaattaagctctcctaatggctcttgcgttcaccacggtgaaaggggtagttgaatgaggactcaaaagtagctagcgagccagagttgacaggacgatatcgtaagaaaatttgtgcataacatcgttcaacatttatgagttggaagcttgcagcccaaactaaattttacaagttgtgcatgactatggacctgtttgggggagctttagattctgagaagcagctgtttggtagccagtttctgagaatctggaaaagctctaaaacccagcttctccagcttctggtttcttatcatttttcagaaactgtaactatagattctcagaagctgtgaattatttggggcagcttctagcagaagcagcttttgcgaaaagctgcagctggataagctcccccaaacaggacctatatggccctggcactcgaggtcctggtgggtctcccttggccccggaatggccctttcatgaccaacatccaaagcagaataattaattatttgctacttttacgagagtggtgataaaggatttaccactagatctacatgccacaaacacataagggttcacatgtcatagatagcgagtggaaaaaaattaatttccacatcttaaaagtggcaaaaagttaaatatccctctaaagcacccctacttaatatatgcaaaattcacgaaattcttaaactcttgtagcacaagtttggatccacaggcaacgaataatgcatctcaacaaatttctaccaactactaagtatcataaagctgcaaaaagttattgtgaagcacttcatctcaccaatattttccgcggcaatgtgtgttaaaattaaggcacaaatcttatagggttaatttgatccgtgccactgtaaatgtgtctattcagataaatgctattataattcatctattcatagccatgccactcaaattttacaaaattagaatcatgctatcgccgtcacgttttccatcctcttcctcaatcacatgtgacccacccgtcagattatcttcttcacatgcggcgccgagccaagagtgcacaatgctggtggctactttggtggacggagtgggttggttgggtagagttatggaggctgagaagtggtggaaagagatgagaaaaaagagaagaggggaggatgggggaagaagatgaatctgatgggtgggtcccacatgtagatggggaagaggatagaaaacgtgacagcgatggcatggttctaattttataaaattcgagtagcacggctacgaatagacgaattgtaatggtatttatttaaatagacacatttgcaatggcatggataaaattaaccatttgaagtaactccggaaacatcttaatatcggttgataataccaactggtactaaaaatatctttagtatgggttggtgttacaaaccggtataaaaaagcatctttagtaccggttggtaacattatccaggactaaagattcaccagcattagtctcgattggtgctatcaactggtactaaagatgcatttttaataccggttgataacaccaatcaagattaaagatgttcctagagacttggaattttagaaccggtactaaagagctttagtaccggttctaaagagctttatcaccggttcttaatctatgcaagatatttgtgtgtttggggtattggataaaagataagttctctagtagtggtatatctctcttatttgtggatggcgcgagaccgggtatttgtggatgacaccagaccgggtgaaaggatacctcctagcgcgtactatgaggcccgtaattattacaaactttacaaatggctttatccgattttttaaaaatattatatgaaagtttttgcaaaaaatacaaaacaaaaaagttcggagttaaagaaaagaatacagcctaaggcccattttttttcttaacttcaaacttcaacttcctcattttccgttaacacgttttttgaactattaaatggtgtattttgacaaaatgtttctatgtagtagttgtttaagaaaatcaaatatgtgctaatcagttttctcgtttagcattgtcttctgtagttcactttgacgtgttggtgtaggatcaatcggttgacgagagcgttgtctaacttcttgagagggatgcttcccacctgcttctacttgcacctttgctttagcaatgatggtatgtgcggcatcaagttgtgccccatcagcagccaactcaattaccgtgttgacacctgcaatcctgacatcaaagatcatcgagtcctgtgatgtggttacctctgtctcctcctgattcaccattggagcagcatctcttgtgctaattgacgaggacaccaagtcctgagttgcatcgactagcaaagttggagcatacgcagccactagcccaccttgtccgactccatctcctgagctgcattgtctatgacaatactccctctgtccttaaatataagggattttagttggatgtgacgtattctagtactacgaatctggacaaggagtatgtctagattcatagtactagaatacgtcccttccacccaaaatcccttatattttgggacggagggagtaggattcagcagtcaaggacaaagttgcagcctctacttgtgttgatgatgctcccatcgaggcctccgagattgatgcacaacttgccggttccatctcgctcacatctgtcaattg

SEQ ID NO: 45191 - DNA, 2468 bp, Oryza sativa
tggccgagtagacgaccgcctccacaaccgccttcggcaaccgacctccgcggcctataaatagacgatgaggtcgccccttttcccctccacaccatccgagctcttcgagctctgtctttctctctctcttcctcaagaccggctgccgccaccgtcggccgatctctctcaccggagcaccactaaccaaatcctctcaccaccaacattgccttactccggcgaatccatttttccacttttccccttctctttcgtcccatttcaagccccaccggagctctctctctcctgccggttcacggtcttgagctcgtcgttccggccattcccttaaccccctctgccggccactaccttacctaggtgtgctgtacccgggaacaccaccggccgtcggcgtcgccgccttccgattactggagccccgacgcccctctcctcctcctctctgttcgaccggagagaagaagaaggaagagacgggaagaagaagaagaagaagagaaagaaaaagaaaaagaaaagcctgacaggtgggtcccctgtacagtgacttttctcattttctctatttaattcaaatcccaaactttagaagcccatgtctcctaaaccgtagatccgattccagtcaaacttggacctaaagtcatctaaattcaaaatctatattttgataccaaatttgctattttaagattttatttagatttccttaagttatttaaatgtcatttgcttttcaaatatctccttttattttaaaataccctttagccactaaaaagccgccggttggaactttacaccttccatggggacgttcgcgtggtctacggaccccaacgtcgaaccgttggttgtaaagctcggcataaaccaaacccaagattgaagtgctgctcctggcaccctacgcctcactgcgtacaatggtcggagcttgactatttcctcgacctccacagcacgctacacagttcgctctcaagctctgtgtgattctagccgctccaccgccactcacggttgtcggagtaacacttccaccccactaaacctgcacccacctcctatctttctacccgatatgatgtctatcgacaccagctagaaatgataccaaatctagtcgctatactatccaactctagcgatgactagcaaacacccaaacccctaaccgatatttatcctacctcaatattcgcctaaacaactaaactctagctaacaccttgttggttaaaacccaaccgtcatccaaataccccacctaccaatatcgcctatccattatactcagccacctactctcctagaacctatacagagcctaaccgatatgcttccctactccgtagtcggcttaaatataaccaaaccctaggtattatactacccgaacctaccaccaaccaatactagccatattccaactgaaccagttcaattatccaatatacatcctatccttttagcaaccaagcattcacatgaaatataagcaaccttagttgcctgatcccctctccaccttagccttcaaccctttagaaccctatacccctttaacggagatatttataccccaagcctagccattcttgctctttatcactttcttactatttcatgatttttattgaatttggttcttcgtctttcttagtagagtctattttattttggatggcaacctgtggtatttcgaggatcggataatcaggttgcctatctcggatttgtttgcgttggagcaagggaagttattattccctccctttgagcataatgatcctatattcttatatctctattctatgtattagtcatacatgatttcaaatgcataacttgaacatatagcaaactagatatatgctagcttttgcttagctctgcctagttagactgcataaaatataatgaacttagattgggacagtacggtagaaatagttgatttccgggtggctagtactgttccaaccgacataagactgccaagtacatgtgaagaacatatgagtacgaccgcaattctcgtatgggcatggacctagctgattaagttatctagcaaaggtggtacctctgtatagtggttcttcttaagtcctcgcacaggaggcaaatttatgccgcgaagggcaatattgtgatatttaccgaggcgcaggtaaatatttatttgagataaatcatgatcatgaattgtttgtgaaccctaattgcgaagacatggtgtcatacaatcagttctctctaaagatctcgggaatgccagaactcctctcgctgctgataacgctacgttcagagcgcatggggactagagttcatggaacaggtaccactgatgttagtaactgaaaagctttgccatgataaggctaatgtgtttggcacgtcatggattgcaggtaaagcgtacatctactgcagtatgaatattatta

SEQ ID NO: 45192 - DNA, 2838 bp, Oryza sativa
  unsure (1)..(2838): unsure at all n locations
aatgcctaactgacctgngataggatccctccttatatagatggagggctacttaatctaatcctaacaaaccttatctaatcctaacaaaccctaattctatctcatgggcctaggactcccggcccaaagcccatgacattactcccctctttttgagcagctcgtcctcgagttgcagcggaccctgctagactcaaacaaaacaccataacctaaactaagactcttaagccttttacatctcggcttttattatgaacaaaaataagaaacaattcatgcgcaggaggacctggtcctacagaaaccctgagcatgcctcccaccgaagcccacttgtccagcccaacagcaaaggaataaatagttgactcggatgcttcatgggccaacgtggaaaccacccagaccagaccagccaacccaattgggagaggacagaaaccctatcctcttgttcttcacgaggccacgccgccagaaacgatgcagccgtgatcgagccgcgagcttcacgaaccaacgtgtggacccggcgcaatctacgccatcgcgacgcacgagtgccacgcccacccgtcgcgctcgcgactcgagccgcatgcacgccgcctggctttgctccaaccgttgccagaatttgcgccaccaactgcggaaaccgcgtcgcatcgcctggaaatcgtgcccgagaaccggacacccaagtcgtgttgtgtcgctgtcttcttctccaccaccattgagggcgccaatggcgacggcgccatcgccagtcccagcggcaaggtcgaggttgcgcagccactcccggacttggcgccgcgcgccctcgcggacgcaaggccaccgcatgccggtataatggttcggcctcctcaaggaaagcagccggctcggttgactgagccgccaaggcccggagttgcgccgccaagttcatcatcttcttcgagatctcggcaagaccttcgctaatgttgggaaccgcagtgatctcggcacccatgggcacagaaccgaagctctgataccaagttgtcacgaacaaggaatacggtcctgaacctaaacggcgcgacgctctccgtcgcactgagaaggcaggccgatgggcactaagataaatattgatctaatgcctaactgacctgggataggatccctccttatatagatggagggctacttaatctaatcctaacaaaccttatctaatcctaacaaaccctaattctatctcatgggcctaggactcccggcccaaagcccatgacattaattagtgtgagtttcatcccgcgatgttctaaattgagcccctttcatcaagtgtaattccaacagtgctgttgttgtggagctcgacatggccaaatgatgcttacaggaagaggcacatgtctgcatcaatgtttcagaattgtcaaatgccacatggtcatacaggtgaacaccttttcccgcattaccatagtcatggcaaggcaactgttagaaattctgattactagacaaatatgagcacttcattgattacgtttctcaagaaatagagaagccagttggttaaagttgtttttgaacattcagttgaccaaagttcaatatgcagaatttccatggaaacagaactgaatatgatggattcgcattgaactccactatataaagtccagccaatttgcttgttcgcttagttcagtgcatctatagatgcagatagagaaaaaagagagaggacgtagttcccaccaggcatagttcagtgcatcgatagctgcggacagaaaaaaaaacacaaaaaaagaagagaggatgtagttctcaccaggcactatgttcacacaagcagcaagcttctcacttataatgctcccagctagcctctttcctgtataaaaaaatgagaaaggcaatcatctaatgctgctaaagaaaaagatcaaacttatcaaaataatatagttatgagtacagctaggaccgctgagtagcataatagaagctattcttgaatggaagctactaaaatagtcaatggggtgaggaaataatctctactttgttcagcacaggtgttgacaacttgtttgctcaagtcgacaagcacgatcgagacacctaaatgccttgcggtgatatggagtcgtcaaacaccttgatctagacaaagctaaaccaagatgggttttgcaagattaaacaggctagcggagccaatttagatgaaacaaggataaacacccgtcttgtgggcgaacagggtttacgggccgaacctacagagggatttcgcactctcacagcgaaggtgggcgatttactgcgcaaatcgacaaagatgaacaaaactaggctagaactaagcaaaaaagtagacatgatattgaaaaagtgattcaattggctaattgtgttcaaagtagattgtgtgttcaattgaaccggccttggtcttgttccttataaaggggttggtcttgcctcctacaatctcctccacatcaaactcagggtagagaccaattagaactttaaaaatacctcaccaagcaaggaaacccaagcaaggaaacccgagacttggtgaaattcaacttggaatcggtctgaccggccacacaccaccggtaagaccgacccataggcagcggtcagatcggctctgtgaaggaaaccaatcatttccaaattttggcgatgttttcctatttcgaatctaggtgccgaatttgggtgttaacaacaggtacaattaaatgacaataaaacacagagtaaatttcacaaaactacatacttcctccatttcacaatgtaagtcattctagc

SEQ ID NO: 45193 - DNA, 867 bp, Oryza sativa
aggtgaagatggtgaccggagaaggaggcgacgacgacgacgacggtgacctgatgagcgggctgatgcacgtggaggatgagcaaggtagacgactcgacgacgatgaggtcgtggataacatagtctcccttgtcatcgcgggctatgagtcaactgctagtgccatcatgtgggcgacctaccatctcgcaaaatcgcccagtgcccttgccaagctaagagtaagccaataatttactatagtatatttctctaaaagtgctttcaagtctcaaatggctctcacacatgaacagatcgatcccatatctggcatgttgctgtccgatgagcattcctacatatgaatggatcacttgatcacctgtgccatggccagaggcctaggattggcagcccattagtatggagaatttttaaccatataatcaccatgtaaatcccaactctctatgggccgacccaagccttgggccaatcctggtctgcccttagatcgatcccataactggtatgcttgctctccaatgagccctctcatcagtggcagattcaaaaaatttcttgaacctggacaagtctaacgagataaaagcatatacaaaatctatttaactatatataaattttgtagactaaaaccaacctgagaggttagatggattaatgtatcctgggctagacaagtatatttaactatacaaaaattttgtccttaataattgccatgtgttagcctagcaggatttgtactagtgtagcaggcggagcctgagcacctgcccatgatgatcgaccaggcttcatccctgcctctcatcatgcaaacaaacaaattatgtgagttgacatggagttggaatg

SEQ ID NO: 45194 - DNA, 1283 bp, Oryza sativa
agtgttagcttagctcctcttatcctctcctgcaatattaatattaccatttgcaagttaggaggggataaattaaaatttctaactcagttccttcttgctcacatcgcacatagctccatccaaaaacacacctgcagccctgacattatatgttgtaggagactttggtgcacaccgacaagtgtgtccttgtagtacgtttacatggatatttgttaaggcccatttgagtctatgaagataaaagatcaagtatgggtacgtaaaatgaaaatgctattaacacataattaattgagttttttaaaacataaaattttgatttatttatatgatatttcaaagcaacttctatatagagaattttcgtacaaaatgtaccgtttaacagtttgaaaagtgtgctaacggaaataaaagtaaaatctataacttaaatcaaaaaataagggtagggcccgaaacactatgtagcaacagtactcaagtccatcgtagcgctttatcgtaggtacattccatctaggacatcaaaagcaattcaagctgtggatttgtagcctaacctgcgggtatgcttttccctgatggctggccggaagcagagaggagctgatcactcaaacagattttctagactagttttcaatgtggattttagttttaacaatcattttggatggtgaaagaaattgaataaaccgttcccatatcccatttttctctccaattgttctaatatttcttcttcctattatacgtcctcctcatacattttgtcgatgaggctgatcgatccctatccatctctccttttaagtgcatgcatctattgataactttttttttgttcatgccgtcaaacacgatcgaaaacacctaattcttttcagtaataaggagtcgcctaccacctcaatctaaacaaatccaaaccaagatgggttttgaagatcaaagctggctaatggagctgatttagacagaagagagataaacacccatctcgtgagcagaatggaaggtttacaagacaaacctaaaaagggattcgcacttgaaacgaaggcagatgatttacggagcaaatcgataaagatagacgaaactaggctagaaccaggtaaaaagtaaatacgatattgaaaaagatattcaattggctaattgtgttaagtagattgtcatagataatgtgctcaactgaaccagccatagcctttataaagggttggccttacctcctataatgcattctccatgtcttactcgagatagca

SEQ ID NO: 45195 - DNA, 789 bp, Oryza sativa
gtatgaaatttggggtggggtgggaggggaagtagtcaaatctaaaagaaattaaacatggccaaagccattgaatatgtataagtacacgaaacattcaaaccaaaattccctccgctcattcctggaatttaaaatttgtacatgaatatacacatttcttggataataattagaatgcacataaatctaaatatttttaagggctgttcactttgataccatttcaaaccatattaccatatattttttttaaagttgacaaaaatgtgcatatgtttggtttcttaccaaactttggtaaatataccaaaaatatggcaactgcacaataatgactaaaattgggtagcatgtatggttccaacaaagtgaacgcatccaaaatagctagctatcttgctaaaatttggcaatactgtcaatcttgataagatttattttggcatcaaagtgaacaaccccttaaccatccagaagcttgggaatggcatttaacgattcaagaattcaaattttaactaatggtgggaactaatgaaaatatttttttccttgctagctaacctataaaagtacttatattttacaacagaggaaatattttgtactcgctccgtcctaaatattcgacgccgttgactttttaaaacatatttgaccgttcctcttattaaaaacttttgtgaatattatttaaaaacttgagtagtagtagtatatttaacaatgaatcaaatgatggaaaataattaaaaattacttaaattttttaaataagacgaacgg

SEQ ID NO: 45196 - DNA, 1023 bp, Oryza sativa
atttgggtttctttaagtcacaaccaatttttaattttgtaacttatttttgaatattaagtttatataattttttagctttataacttaattttatttttttcactttgatcactcatttggctttaggattgctaaagatagagtataagatatttccctaaatttattctcatatcatagctttagtaacatatctttcatttataaattacagccaaaaaggctcgaacaagcaagcccgatgtttcctcgaacagtggcatgtatggatgcaactcgattagtaagctgggttaattacttgtcgaccatgtgcaagcagctggcattatatttgctgtaagatataaaaaaaagaagaaaagaagattcccagggagctgtaagtgcgcacattcccctgttgtttatcatggggtttagtgaactaaatccccaaaagatcaagagatgtcttaacaaatcggtgcgtggttttgttaacttaatcatggtgaggcttttggaagattcgtaagcatgtgagagtggttagctagtagggtggcatgttctctgttccccttcaaccacacaaggagggggagccccccctttgtatgatggttgcaatttaaaatccaaacaagttttgtttgtacaaaagggtcactagctaaaatggatgactaattaattagacaatataaagtatcgtatttttttataaccattcatcaaattcatcctacaagtgggcgtagttaattatattgaaaaatatgaggaagaaaaactttcttacgttccatttcctcttgtaaaaataatcagacagcacatctccagcctgtggtgaaaattctgcatgcatatgatgagcaaattgatgaacacaacaatcttatctgctagaaatgcaggcttgctgaatgctgatggcccaatggctctacctgctaccgttaatggtttctttagcccttaatttggaaggataggagtgttaagttaagaagatagtattagaacatatctttc

SEQ ID NO: 45197 - DNA, 4226 bp, Oryza sativa
atctaaccgtagttagtctccttaatttcgttcttagagcctgttcatattatagccaaaataaatcctaacaaatttagtaatattgctaaaattttgacaggatttttttatgtattactaaagtttggcaagaaactaaatagatgcacatatatatttgataactctaaaaagatagtataatttaaaatgacataaatatgaacgagcccttaatttccgtggatgcatttcgtagcttactagtgccaactaatcaatggcatcgttcatatatatatggacggctgcgatgatccgatcaaaccccgggaagcagcacgggaggtcgacacgtgtccccccaatccgccgcgcgcgccgctgcagcttagctgcaacccacccacccccatgtgcgcccgccgctcccgtccaagaagacggcgacgacgacggcggcggcgacccaccgcggcggcggtgaacgcgtcagcgggaagctcgccgccggccgccgtgcacggcggcggtgggcccgactaggtagctactgacctatagctagatatatagcttagctagccgagtaaagctaattagcatgcagctgtagcgtttgcatgcccatgtgttgtgtaggcaaactgtgtgcctttactcggctacagtgtcattggctttatctgagaagatgggagatttttttttctttaaaagaaaaattagctagcagcacacatataaagtctactccaactgtgttttactccctccgtcccaaaataagggtttgtttgaggagaagaagattagggagattgggaaaatacgcaaaacgagatgagccattagcgcatgattaattgagtattaactattttaaatttcaaaaatggattaatatgattttttaaagcaacttttctatagaaaatttttgcaaaaaacgcaccatttaatagtttgggaagcgtgcgcgtggaaaacgatgtgctttctcaccctatatcacacaaacgaacgcagcctaagtgtagttttagcactgttcatgtccaacgtttgaccattcgtcttatataaaaaaagattatgattagtatttttatttttattagatataaaacatgaatagtaatttatgtgtgactaatttttttaatatttctcataaaattttcaaataagatggatggtcaaaacgcttagcacgtatatgtatatgtatggacggaggtagtacatgcgagcgaattcgttggctgcacaggagcagatgaattgaatgaagttcagccagcgaggttaacaatgacgtacgtacggcttaattaactatgtgttcttgggatgttgtctcaattttaaagagcttctttatcttatgggataatttccaaaaaaaaatataatacaagtatggttgtgtacttcacatatgggataattttagtataataatctttttcaaagttgggataattatcgaggtcttttttgtaaaaaaataataaataattagtgattttcatctgtagtgtcaaacaatgtataccatttattcagtattataattaactaggtacctccaaacacatcgggatacaaagtgatgatgtaaaaatatagattaaaatgctgatgcatgtagtatctatcatctagtataatatgaatattgtaaagagtaatatcaaacctaacattttctttgttttcttgatctagaaatgatttcatagatatttaatactctaaaattctaagatctatgcagtcaagatatatggttagcggatgtgtcttacatttagtttctaggcacaattaggtccaatgtaatcgcctcctatcaatatcgaacgattgcgatcgatataaatattagtgattggccaattataagggttgacactacacaatgcattcctcttaattaataaaaaaaattaaggaaccgtaacgtaggctatttttatagatatgccattatattagactacacttccatcacttcttccttctctagtcaagttatatattgtactcgtgcaaccatttcttctagtccactgtgcttattagtgaaggcgaccaacactcttggacttgacaaataatgcagatatgcaaccaaagctatatacatcaattttttttacaacagcattttacttttacaatttctagcatgtaatttctcaatttttatatattaatcctatgtttccgcctaaagacataatactccaccaagaacataaagaacataacagattatataaactaataccaatattggtgaaagccagacaacttacttaatttgttttttcaaatggtacacacaattgcgatcgactgctatattaaagacttactagtgaatatcttctgcttatgcatgcaccagggcatcacatatttaaaaagacattgcaaactttatacagcacaatacaaaacaattgatgtcaaaatgtacatgatgaaaattgtgagctgattgtgcctatccctttccaagatggatgcatctagaagggccccaactgattggtatcttattatatagggtgtatttagttcccttcaaactttcaatttttccatcacatcaaatgtttggacaaatacatgtagcattaaatatggataaaaaaccaattgcacattttacatgtaaattgcgagacgaatcttttgagcctaattacgccatgatttgacaatgtggtgctacagtaaacatttgctaatgatggattaattaggcttaatagattcgtctcgcagttcacatgtcgaatctgtaatttgttttgttattagtttatgtttaatacttcaaatgcgtattcatatgcttaaaaaaattaaaatggaactaaatacggccataaccttgtagacatactagtatacatagcatttgccggtcttcaccgctgcattacaataataatatattgcatgccctgccacatcaaaatgagctcattctcctcctctccctagcttctcaccaatcaaccatagacctttactctcttttattttgatttaattttttgctgcggttaaacaactcaatcaactcgtcaccgtcatgcatgcgtcactagctagctcctgcttttgcatggtgccatttttttgttgcccaaaggagcacattctatgatcaaaccctaggtactaatacggcatgcatgtatgataaattttacttcaattaagagtttaaaggttgctatactatagcatagtcactttcatctcggccttataatttttttcacctggggttatctctataatgagcaaatgatcttacaccaaatctagctttttttgttctgtttttactttgacgacctagctagaagtacttaagtagaactgtcacaactgggcctttttttacaattaccccccttaaacattcccttaaattaatatatcactcctcttcctcaattcaaccccactatctatatatcctctcccattcccaagttcccatgcatgttcctacctatatgctcatctcactgacaagtatggcccacatttatttttgtcaataggaacaaaaagttgtagggtaaaaccgtaaaagaaaaccataaaaaaaaattaatcactgtctccttcctccaagtatatgtctctgctagcttgtgccctagccagtagtagtaaaaactatagaaattgactttagttataattacccccatgcatgcatgtacaacttaacaatgccgtaatttacaacaatggcgtcaccaaccagccacaaagcaagcaatcaagccagctaattaagcttagctgagctcactctctcgctagctagctaagctctagcttctaccaaccctcggcgccgtaccaggagaggccgccggcgtgctcgtcgccggcgaagaatccggcgcctccgaggtcggcgtcggccactgcgccggcgccgccgccgccgacgaggagttcttggtggccatcgaaatgcgatgacgcgtggaacatggaagggaaggagagggacgaggtgagcgtggtggatggcgcgaagaaggaggtgaaccccgccgtgtcgtagctcgccggagtttggtggtggtggtggtcgatggccgcgccggagtacggcgacgcctctcgttgaacaccgcgctcgagtcgctgtccgtcgagccgtccaccaccttgctgttatacgccagtggcggcgg

SEQ ID NO: 45198 - DNA, 1540 bp, Oryza sativa
tttagtacgtgtttgaccattcgtcttattcaaaaaaatttaagtaattatttattcttttcgtatcatttgattcattgttaaatatactttcatgtatacatatagttttacatattttacaaatttttttttgaataagacgaacggtcaaacatgtgctaaaaagtcaacggtgtcaaacattttgaaatggagggagtatattactaagataagcaaaaaagaaactagcatattagttcgggagacctataaattaccacataagttagacaaaaacataaagattaatttatattgtttgatcagggtgggccagttcatgtaaattgatcaatatagttgtacacaaatataattgtatttatgaaaacataagtcaagaattatatatctatccaattcttaaaaaaactcttaaaattggtgaacacaaagcacgttaagagtagttgtacaatacgacaaatccaattcttttaaaatatagccccgcaaaaaaaaaggtctgcatttctaaaataaaaaagatctaaaaaaatagctccatacaaaattgcgcatgaaaatttggaagtatatatatgtacaatggatggatttttgcggcatgtccatgtaactatctggatttgaaattgccaaaatactatcaaattaattcttcacctagataaggacaaatcatcttttttttttcagctgatgatcgatccaattagtaagttgtaccatgcctattatcatcagccactgaaagtgattgttcatatgcatatgagagaagagagaattgaagagagagagagagagagagacatatatatatatatatatatatatatatatatatatatatatatatatatatatatatatatgcctgctaccctcccagatttaagacatgaatgatcatcaatatccattaatcagattattggctgaagctgcgacgcccatagatctcagactataattaatcaagagctatagctaagctagctataattaggtatatatagtacggtgatctcagcgagttatataattaattgggttcttagccaagaaattaagagacagacagggccaactgatgtgatcggtcgtacctgcatgcatggaggcgaattagggtgacgacaaaatgcagcagatatttcactgtttgtgatttatttgatctgggtctatcgacagcagcatatgcaggcaaacatataaacaagcagcagttcgttcgatcaatcgatcgactggcaggagtagcagctactaccctctccatgttttgatagatcagctagctagttattagctagttgctgctgtgtctacactatagagcttaatttgcttaattggggatttctttttgttataacaagaagctagccaggagttactccttaacacacactcagacatagcgctatactcctattataacaagaagcagctctatgttatttacacacactcagacataggctaaagattaattcataaatcgtgtggaatttatttaaataag

SEQ ID NO: 45199 - DNA, 3083 bp, Oryza sativa
aaaaaaattcgtggcaaaatgcgtgcaagatcgatcaatattacagcgcgcgacgggctggctagctgtgtaccaggtgaagagaggggctgttccttctttgccatgccggcgcggtgatcctcccgtgtccgccgcgccgccgccgccgccgccggtggtggcctctctgcacatgacaccacgacggcaaactcagcggccggcaacctgacgacagagagaccacacggcgacagagacagcaggtggagcagagtaacgtacatgcgatccaccctggacaagaacggcctccgttgatccagcgccggtgctcgcgccgccggtgtccccgcggtggcgccgccgccgaggcggacggttcgccggagcccctggcagtagagcgacgccacggacctgacaagggccgacatttttcacaacgatcgaccgcgatatatcggagtaaatgtctatttgatcaccggcctatatatacacgtccacatatatatatagttcaggtgacgcgaggatgagaggctggcttgcaaggcatctgaagtggagtaaattctgaactgatctgataaggatatctgaatatatgtgataggatgctgtgctgagctgggtgaatggacctgtgggcagtgtgcactgcattacacgtcaatgcaaagccactacacacaacattgcttgcaagcagcgtggtgctatgtgcgacaaaaagatacacatttttgtagagatggaaaatcaaccaaaaaaaaaaacaaattgagctaggcttgcaagcaacaggcaggggctaattcatccacttgagttttcttttcttcttttttttttgttctgttctgtgttggcacacaacgatactccctcgttctataacaaaccatgcaacacatcctattacaacaaatttgaatagaatgtaccacatccagttttatatttgttgttttttttgaaacagagggagtagatgtgaagatgagtaatacacccaaatccacatgagaagcctctttttctggagtgcgctttccatttgtaatgatcaaaccattttttctattggtatcagctataacgaagtgacacatggcaccattttcccgaagacgctattagttccatgcttttccaccgtttctttttctcccctacaatatactccgtatgtgcttacttaggattacgcatccgtaaaatgtactctgctcacaggtcatgaactcacaatatatcgaacgcttgaaatatggtcttaaacgtaccacaaaagctcataagcgtacagattaacacacttttgtccaatcatggaatctaatctcaccacgatggactgattacagggacaaagaatctcgaaaacgaaaaagagctggtccatgatgattgggtacggcccagcccataatggtctattcgatattatcaacctatgaagcccataagttatatttagtgggagaatttaggcatggttatttccagcaacttaattggattgttgtcacgaattagtcgttccctacctctctaaaactatattttctacaaagaaacttccttatacatttagatccactcattctaagttattcattcattaagtttatttatcaatatatttaatttgtatatataatcgtatggataatcttctacaataatctggttcaacatgggaccttttccattggtaccaaaacttttgcaccggaaaaaaaaaatcaaactccggtcgctacagctctgtgaaatctcttcgagttgccacttccattgtgaccggctgtaaattgtttttaatcttaacaattgtgctagaggagaggctagatgcagctcaatagaggtagggtgagttcaacgttttctcgcgaacgcacagaaaaattgcacgccaatatattagaaaaaaagaatttttttacacaacgcaatcagccagaccggtctaaactttttttttccttggattgcgttttgtaacaaaaactctttttctccctttccctggtttaattagaccggtcatctttttacttcacccgcagaccggtccaaaccaaaccaggggaagagagaaaaagcaaaacaaaagctgcagcaaggaaaaggagaaaaaaaaactacaacgatggctaagcgcaactctgatcagctggtgagttcaaagtgaaaagatgaaatacagagtgtccaaactaaaacttgaataataaaagatggtccaaattgcaatttactcaatttatttccccgtatcattttaagtgtagttgtgggtttcaatgtccaacgtttcaccgtcttatttaatttgtttataattagtattttttattgttattagatgataaaatgtgaatagtacttcatgcgtgacttatttttttataatttttttaaataaaacagatgttgaaacgttagacatatgaacccacaactgcacttagagcaaatataatagagggctgtaagaagatcaaatactgatgtggataagagaggagatgagagagatgagaaacgggctataagcttgcagccagcttaagcacaggaaccaagaaaatctgtgagacagatagatgggccatatatttatagtgagtaagtagctggttgtattattagcttctcttgaaatgagatactagctataattacagaggaatacaccgtttaatttctctagcatttccatcaaatctgctcggtgcaatgccattcacgagatggaattaggtgtagcactgtagctagcagtgccttttgggacacgtgggggccatggctgcactgctcacctctggggatttgcttccacgtcagagacacacaacatgctagcttcatgtgccagcaaagcttacgtgtacggccctgattcctcccatcacatattccaagtgctccttttttacttttcttttctttttctttttacaaaagccacatatattgcacgtgttttgtctgcactctcgattggctactttgcacaagaatgcgcaccacattcagaattgtaacatgctttgtgatctggactttctgtaggttttaaa

SEQ ID NO: 45200 - DNA, 1818 bp, Oryza sativa
ttttgaaacggagggagtatatgagaaggtactccatattaatgtttattaagagatgatgagagtgagattcgaacccgggctacgctagtccatcaacttgtgatatatagtcgataagatttgggctagtctctctcaatttaattttgaaccccttttccgttttaaaatatttcctatttatttttactggacatcgtcgatacattgtcttcgataatcacacacacacacagatatatatattctacacccgggatataaaatacctccccctcaatagcccaacccacctcccccttcttttattgggctcaaaacccacctcccaccctagtcaaagtatggtcaaaggacggtcaaatcgctgccacatcggtcaaacccatgtgctaacttcctcccacgtccacctatttgttatccttgtctcgtacgaacggtgcagtaacatgatgactatcatgcagtaacgttgtaccttacttgcagtaacactaataaaatatagttaaaatatagtcgtgacggatctaattttgtagagctcttttttttaaagcattacggtgcaaacagttcaaaaatataatatgtggtgtgagagatattattgtttaaagatgtgaattcaaaagatatcacttgcacttacattttactagttcaaagtgggtggtaggtcctgtacctgtgtttggttgttacctcctgttattgcagtaacgctattaagaaattgcagtaacatacactgttactgtaaaaattatagttgttactgcacacatacagtaacgtcataatggaatggtagtaacacacaataaaaagtagtaacaataatgatttagtattactacttatggagagataaatttcaaaagaccgatcttcgagaagaaatagtagtaacacactcgattactgtaaaagcacataaactgttaaaactctacaggacacaaagttccatagttgtaagaagctaagtagaagagaaatatatatgttattacaaaattcataacaagttactatgttttagtagtaacattatcgtataagtatagtaacacgtcacgttactacaaaacatataggatgttactgcacttttgatagtaacatcatggtgaaattgtagtaaactaggaatcgaaacaaaaatatatgagttaaaagtctacatgctaaccatatatttgttactgcacaaaagtgtaagtgttactgcagtaagacgctttgttactgcaaaacttataatatttaccacactttcataataatgttatgatgggattgtagtaacgtacaatagatagtaataacacttgtggagagttaaattttaaaagaccaatctttgaaggttctctctacccttgccccataagtaaaccgagccaattcatctctctctccatgttactgcacatttttttcttactatacatattcttgcagtaacattatcaagtaatcgcagtaacacactatgttactatgaaacttgtaatcgatactacatcttgtagtacgatattatatgattgcagtaacgcatagcagatcagcagtaatacttatgatatagtattactgcttgtggagagccaaatttttaaaaaaaccaatctttgaagggtaatatctttcacatcatgtattacttttaaaaaccatttgcaccatgatgttagaaaaaaagtgcttatcaaaagtagatccgtcatgattatattatgactacatttcaatattgttactgcaagtaagacatggtgttactgcacgatgaacatcgtgtta

SEQ ID NO: 45201 - DNA, 1864 bp, Oryza sativa
tctcaagtttccattgcttaattgcgttttttaaccttatcaagttttctcagacatagaccatttttaatattctcaactcttctttaaaggtaagacatcttagaattttcttccatgtttaattttcccgtattaaacaagtactatcccctatcacaaataaataaaatttcatttccaatccagtataaaggaagttgaggcgttttcttaattcttgggcataaatccaaaacaacttggaaccaaatggagtatatgtgtgtcaatagactattttctaaaggaaaaaagattttataccttaatgagataaccccctcattattttctgaaaaaaaaacaagcaaaataatgatgaaaatatttttaaaaaatttggagacattattaaagactattttggtgacaatggcaaatatatgtatatatccactatcctagaaaattccaactgtaaattcggcccatacattggggaggaggggggactccaaactatgaatagtacctgagctaattatcactttatttgtctcttttctcgttttggagaccatgttcaacttaaagtctttttggagtggtagatgtcaataaataatatattatcatttttttagaatttccataactgtgagtatatttgaggaagtaagtaaagagatatggggcacatcctttggaggtatacatatccatcttcttagcttattacgtctcctttggaaccaagaaaaaatagaagatttttataggattgaaatcatgtgctgctttagaatatttgagattcctacaaaatttatttggaatggcttaattcattggaattttggagcctttccaacctgaggttgaacctcataagaaatttttcttttgtctatctctctcctcaaatcctaagcttttcctatgaaaaatccaaacaataagcttcaacaattcatatgtttagaattcccaaggacatataccacttccattccttcgttttttctgtcacgtgttttttattcatgtttttttttgagactagggctgagccccccttccattaccggaacggataaaaagatcttttcttacaaactgaaagcaaacaggagaagaaagagagaaaacccccacccctatagcaagactaagcttcccatacaagtgcccaaaaagagtcacaatttggatgagggtggatcgtttatagggagatttccagacagaaactaggagaaacgacacaccaattgccacctaaaggaagcaggacagcagtcaaactcagcaaaagccaacagactcaacaacactccagtcttcttgtgcacggcttccatccaaatcttgagttgtatacatcatctgctacctgctttaccagcctggctcccagctccagtcttcttcgatttgcctccagtttctgcagaagagcccaagattcaattagattacagactaaataaaccacctcagtgggagttttgggcaggacattatcaaaacaaactctattccttgttttccaaatagcccacactactgctgatatgcccaccattagcagatttttcatatttttgtcatagccagatagccaggtaccaatcacctgggttctattcagagtgggtttaaaattgaaagcacaaatgataatgttccaaatcatctttgcaagagggcaatcaaaaaacaaatgttgaagggtctcctccctacagcaaaactgacacaacttatccccttttttccagccttttttatacaagttatctttagttaagattttatttttcagaaaaagccaaaaaaagatttctaatcttaagggggactttgatgttccagatttttt

SEQ ID NO: 45202 - DNA, 704 bp, Oryza sativa
taattgtcatatatcaatctcacgattgctatagtggtgttgagtcgtaggtacatggtttaaatcctggtgtccatgactatggttgtgtgtatttttagttggtgagagagttatacgtacttccattgtgcaataaaaataaataaatcgatatccatgctttgagttattccaaaactatagcttacattcataagtcacaagcaattgaagtaagtccaaaactatagcttactttcactctaaatgttgatcaaacatctaggatcatactcctatataattgaagtaagtcgttttaatacaatccgatcacctggtcgatctgatatatatctttgtatgcaaaaaaaagaaagttaaattccctttgaaaaattgcaagagacgagggtacccccaacgaatcgaagtcacaagcactatactgaagtcatatacatgacacgaaaagccttcaactacgcacactaaattgcatcacacctcttattaattaaccgatatagtgggtttcgtccggactctagaaaattttagatctcccaataaattaattaaaccggacccaatatatatatatatatatatatatatatatatatatatatatatatatatataagcacatgtatatcaactaggagcagtagtgtagttcctagctagggttgataatggatcagtacttgtgtagcgta

SEQ ID NO: 45203 - DNA, 806 bp, Oryza sativa
ctacggatcagttgctacgagatccaccaatcgaaaaggcggaagtgaaatacttgtacgaactcggtaaaccgcttgtcaagcctgagtagctgcagtccctaccgatacaaatgtacaaattccatcaactgtacatggagatgaacgccaccggtagagagatgatcggagcgaggatcagggacacggacttcttgcaaggagaagatattctctagatcaatttcaagggtatctacgaactataccagctggacgccctcgacgtgtctattatgagttgttggactttgtaagtatcgttcagttagatttctttttacgtttcctttaattaattaggtccttgtatataagtacaccatatataatatatacttccttttatcgttgtagaatggagattcaaagggcccgacggcggggggttttcgatactggattcatcgaccctcggaaagtaaatatgcacacatatatatagtacacacatatataaatgtgcacttaattaagtaaatatggcctatatttacagaagtgcgtatatgtaatatataaatatttatatatatagtatacacatatataaatatgcacttaattaagtaaatatggcctatatttacagaagtgcatatatgtaatatgtttttacacatatatatgcaatatgcatacatatgtataaatacatataatacacacatatatgcacataagtaaatataggcgacatgcatatattaacaaaatttgagtttgcacctaagtaaatatacacacatatattatattatcaa

SEQ ID NO: 45204 - DNA, 693 bp, Oryza sativa
tattattctaacatatttatgcattgcaagcatcactagttctctcctgttttagtaatattgacggtcgaaactgatcgataacgaccatcaacagcgaccagatgtgttacatattcaggagacttgacaaaaatggctaaagatctacaacatctcaaatattcctaactcatactcatgtgaatctagttcccagaatgtgcactagattcacactttcatcttaagcatgaatatacatagcaaaatacatctaaagcaaaaaaaactcagattacatctttaaatagatacataggccgaccgaccaaataactatatcagagaacagcggaagcttgactacccaaatcctcaagcacactgactaggggtttaccccattaagttcaaatcctagaagaagcagtcgaaacccacatcactcaacttaaactaagccttttcctgcaaaacataaattagacaaaacatggcaagactcagtattaatgtactggcaagagcactatcaaacctacaaacatgaaagctctaagtcaaaggaaggctatatgtggtttcaattttcagcataaagcaaattttagttcacaaaccatttgcaacgtaatttaagcaaaacatgttagcaatatgtaaagcatattaattatggcatgatatcaacataaatagatagacatcatt

SEQ ID NO: 45205 - DNA, 739 bp, Oryza sativa
aaattgacgtatccattatttttaactattaaatatattttttaaaaaagtcttaagtcaccatatgtcacgtcgtataaaaaacagaaataaccttataaaattcttagaaaaatgaaacaccatatcatcggctttcacttaaatcatttagaaatattagaaaaataaaatatcctccgcctcctcctcgccctcacacgcacacaacattgctcgtctcctccctatcttttatctattaaaataaaagagaaacaatcaataatgttggatatttttttgagaaacaaattacaaacgcaggcgctcacaacacgcacactcacacctatgagggcacacacgcacatcccttactggacccacatattttgagattgacaatgccaccacgagcgccccactgtcaatgggtatgtcatctaccactgaaagaatttatcagtctaggacttgaacccgagtgggtaagttctaccacaagtaacctaaccagttgagctacgtccacttcgcaataatgttggatattaaaacaccataatttttaagctatatttctggaatactcctatgccttttaaacctggggaaccattatttctaagaaaaacaagtgtgtatttatggtacatcacatttttaaaatattattgtgcaattatattttatcattattgtattcaggttaggttgcatagaacctcttacccactctacatgaaatattcataga

SEQ ID NO: 45206 - DNA, 5240 bp, Oryza sativa
cgcatgtaaatatgcatgcatgcatgcatgcatcgcctaatggccatctaaccctataattaaatcatacggagtataatacttcctgatagttattaatatttaatttctcgatgtccattatagccaatcttgtatgaaagaatgaagagttgcacattaaatctgagaaaatcattaagaagataggtggttggatttaaatatgtctatcataaataaatttttcagatttaaaaatatgtctatcaaaactagatggagagagtatacagcactattgttactactagctagcagtgcaagcagtgcccaactatggcatggtttatttctcaactttttctttacacacataaactttcaacttttccgtcacatcgtttcaatttcaatcaaactttcaattttaacataaactaaacacaccctatatatacaggactggactaaggtagcttgctagttggcagcgttggaaacgccgaataaccagtgatgaagccactgctactgctcatctcctccattgtagtgatgacattcttactcctcctgagcggcgccggcgctctcaccgccgatcacgccaccgtcggcgtcgccgtggccggcggcaagcgcacccgccacgcggaggaactaagtgagatggattcggtgccgtacccgcaaagaagggtgctacaaggtggcaacactgtctacagaccgcttggcagaggtgcggcttgcaaccctatttgccctggtcgcggagacaggtacactggccgtggctgcaaatcccgttaccagtgcaggggcatgtaagatatctccatcagggtgcatgataatatcttcacaccctatgtacgcatgcatgcttggaaattattgggcagttcagcagttgttctatgtacatcgatggagtaggttgaacactcagttgatctcgtcttttttcagtattgttacggtattccaggcatataaacactcatgatcactggtcatctccatgctgaatttgtctgtatcgcaacctaaacatgttcacgtacgatttcataggatgccggtcgtcgtccggccagacgcaaatggctcagcattgatctgctgttgcatgcttcattattgtattcctgttcttttccctactgttagttactcatctcattgaatgagtgatcctgtggtacttgcaaaatcaagtgttcaattttggtacacacggcacggcgctgtgtgagccggtttggtgagagccggcgagatgggagtcggctcccgattggacggcgaaagcggtgggcgatggctgtggcgacacgcagccgaggtcgtggcgcggcgtcgagtggcggcgacgggaacagcgggcggcagcagtgaatcggtgagtgatggcggcggagcagcggcggccgcggattggctatggcggcggcggcttaggcttagggggcggcacggggtgcccccggtttgcagcggtggcggcgcggtgtttgcgtggcggcagcgggtggcacgggcggcgcagctgggcggcggcgcgtcggattgggcgaggcggccacgcccatggtggcggcggcggcacaatgccgtggtgcgcccacagaggaggagaattaggcggctcgactgggcttcggctcggctgggccgggcgcagcccaagatagagtagaggtggaaggaaaaggaggaaaaagaaaggaaagaaggaatcggcctaatgaaggatttttggtccaaaggaataggaaacatgagaattttgtgtggaagaatttggaatagaattcaaaggaaatgaaaactaaaggatagattgttgtggattttttaaatttggacaaggaattcaaatagaattcaaaggaaattgatctaaaggaagaggttggtggactttttaactttggacaagaaatttgaataggattcaaaggaattgaaaactaggggaatttttgaatggaaggtttgaaatagattttaatggagataaaatttaaaagaggaatgtttggtatcttttgaactttataaaaagaatttaaatataaagttttgaaagcaaaaaggagtttaaaatatttttaaaataatatcaaagatattatttttgagatataaattttaaaaaggataaaaataaagatgctccaattttaaaagaattcaataaggatcaacatgctccaatagaattcaataagaaccaaatacaaaacttgtcacaaagattttctttaatattttaaaaaaatcaaagggaaagaaaggcaataatttaatttctaactttggataaatttttgggatggtggtaaaatggatggaggtaaaataaataggattttaacctccattatatgtggtatggattcttggtggaatatttgtggctaaaggaagttggattttgaatagaagggattagaaataagtttcttagcacaagagcaatcactcaattatttgtgatagtatagttcttgtgccgaggaggaaatcaagccgtaggaatcaaattggtggcttgattaaaataggaacttgaacacataatattttggatcgattaaaagaagacaaaggttttagagggtaggtttagataggggttgatccaaattaaattccaacggaaagggagttatactggtttaaccccaaagataaaaatggttaatgggatataacaaagagtcgggtcaatcagggaattattggcccaagttaaatggtagtctttgaaatcttgaatggataatttagatgaacgagatttcaaaggggaaatacttgtgggagtatagaactggattcagaaatatatgtggatggggatttttataggaacggaattagtggtagattggtaaacttctgaaggataggtatattgacttagagggatattgaaaaggatatctcatggactatgggaatatttaggtggagatccaaagggaaggttttggttatggggaaattaagaattggtatttcatgtgtttgggtagagatcaaaggggaaatatttggtggaagataaaactggttttgctggttgtatggtaagctctaaatgaaaaaggtattaactctagagagattgatatttcatgtgctctagagatggttgagcggctctagagatggttgagcgggaatgaaaagggtatttgtggatgttggagatgttcggtaaaggagtcaaaggaaatataatctagagctaaagttagagattaaagaaaataaatacactacaagaaaaattagctattgccacgaaagtattaccacgaaaaataattggtggcaatatatcatactattgccacgataaaacttttcgtggcaaataagtatattctgttgcaacgatgtataatcgttgtaatatcttttattttcgttgcaacaaaaataagttatcaccacaaataaaatatcgttgcaataaaaactaagctatcaccacaaaaaaaatatcggtgcaacgtacaagccctattgccacgacttcgatttttgtggcaataagcacacaatatttgccacgactcagccgaacctcccaaaatttagcgcgaaatatttctgtgtttcgcggttttgggcgcgtgaaaagatcgattaactcccgaaaaagttagttcagttattagtactatttatcaatctaatctattccattcacacggctgggcagtgctcccgtgacttccaaagtctcacggaggagcagcgcctggtgatttcaccgcgacggtgccgccgtcaaccgcgtcacgaggaattcctccactccgttcagtgattcagctttcagccttcaggtatcctccgttttcatcccctcatcctcctcgaatacacaatttcttttttcacggtctagccaaatttcccaatccgtcggcgctcaccgccttctgtgccgcctcacttgcgccggcgaccggatgacgcctgcatcccctccaattcatcttcctcatcccgatctgatcctccagccctagttccacaagcaacatgccggagatgtgtgcgggagggatccaagcgaggtgcctggctagaggcgccacatccgccggggaagacgagggttcgctggggaagacgagggttcagtcaacgcatgagagagccactacaatggaaggatgcgagggtacacagggtcggcttcggccccggcgtcgacgaggaagcggagccggaggatgtcgcttgctgcagatggggggtcggccgcggcgccatcgatggaagttgcacgcagcgccgccgccgtcgatggaagccgagcgcagcgctgccgttgacggaagccgggtgtatcgtcggatgccgaatatgccgcgtcgcgccgctgccgccgccgccgctgggcgtagcactgcctccaccgccggacgccctatgccatcgccaccacactaccacgtaggccagggcacaaagctgccatccaatgggttgtggaggtaattaaattgagttattggagaagatagagagaaatcagactggaagacatgatttattttttttactactgctattgatttcccaggcataaattcatattatttttgtatacatatatagacgtatcccgtatccatgtttttcagaaaatgatgtatcctatccatatccgtatccctgtatctcggtaacatagagcaaaggatgttgcttgctgcagatggggtgacggccgcagcggcagcgacagtgagtagtttagaacttcagattagctatcttagtaggcaagcagagcaggcagggcgagcattgctagcgtagaatagctcagatgagttatgtttgtttctgaatttctgtctttgtttctgaatttctgtctcccacaaggttaccttggttatactgcacaatatccaaatttgctatacacggtctctcatatttattaatttcttcagtttgtccaatttcccatatgaattttgaaaaataagaaacaccttccatgggaataccaatatatctgttactgtccaatgtctatttttcagctcaaatcctcatgattttgtttagttctaatttatctgttcatatctttgtacaggaatattttttctggtcagcctacagagacaagttctggcaaggtgagtttatgttcacacagtttctccattttccttaagatcataaagtgccaaccatattttccttgtttt

SEQ ID NO: 45207 - DNA, 506 bp, Oryza sativa
tttacattatgttcatgttatactgaatatactgctagcttatctcggagatgctttagtgcaggtatagtgtttgcttatgcaattactctatgtcatgacgatgatattagagtagtatctggtagtttagcgtggtgtctagattatgggatatcattatccggggttatatattgcggatgagaggtgggccgctgatggtgcagctcagtacgggtattcctccgcgcctatatataatcctaagttaatttcctagggagggtattcctccgtatttagccccggttggatggttatgatgggctgtcgtaaggaactcggcagtcaggggtggcttctctcgaagtaaccaaggaagggcgcccattccggggtaattaggaaagggggtttaattttaaaggcccttttaagggctttaatttaatcagttaactagaatatatgtatactatgaatattagaagtataggaatatattctctttctattttctttcc

SEQ ID NO: 45208 - DNA, 1592 bp, Oryza sativa
ttggatggcatatgggtccaagttgatgtatcctaggtgtacgtgagaggtagagtagtagctagtttaggtatgaaatgatttttattcctctctctcacctttagaaaaatgaaatataaattaaatgagaggtgtgtagatgatgtgttggctgtgagtgtatgacacatgggtcccacaagagcatagtcccacatgtaagagagagatgtgtagaaggagaaacctagaagctctaaattttgagtgttaaaactataccaacatgtagtttatttcctactcctctcttccatttaatttagaattttggggagacaaggttgctacaaggtagacaagaatttgatggttcaatgtgccaagttccaagatttaattactttttgagttaccatggtaatttagtaaataggcctaagatactatgttgactgcagtctaaatactgtttaagcaaattatggctctcatctcatgtggttacattttgaatttaattcagccattgaaccaggtggtagagcacactatgattagcattctgactaagtggtttagctagataagttatgactaaattttggtgaatgttcaaagtatgctaaatgatatgctgttttttccagatttctagatgagttgttggaattatttgagataccatttgatgtgataaattcaaactaaaattactatagactcagaatgttgtgtaatatttatgagaattttgtgctattcattgttgcttaatttagttttaggaatttttgtttagacatgacatgcatatgaaacctattatgagatgcaccaagaatatccaaaaacaaacctaaaataataaaatgcacataccaccaagtatatttatttccatttaggtttttcttattttaaaacatatatttccatttgtttgcttttagttcgaatattttgcttaggttagaatgcaaaaccaaaaggcttaaatttctatttaaaatttaaaccaacttatttgatttggaatttgttaactcaagattttataaaatctaattttggactagctctaatcttgtcccaacaaaactttgtgttttatcttattcacaggatttaaactctaagatcaactattatatatgctctcaaatgctttggttttcaaaaagttttaaattttcctaaaaaattttccttcgtgaaattcctggtatcttacagccgattattgtaatgaaccaacacttacagcaggtacaatcactgcaacaaatatgtcttataaagacatttttgtaatactatagacacatttttaaaatgactttacagtgttatagacaattcacagccaattcatatagacccattcccaacatcacatcagccaattcacattcatattccatcatagcatagccaattcacaaaatcaaacacatatacattcacatccacaacccattcacatatatatgtcattcacatccattattctctccaaaccgccgacatgcatcaaaacctgtaaaactaagttataaattggaacaattttatatgtaactagaaatgcaaatatatacagagacgag

SEQ ID NO: 45209 - DNA, 1230 bp, Oryza sativa
gtctgcaactactaccatatgcataccacatgccgcccaagtcaaatcacatttttatctcattgtatttcacaaataatcagagaatcacctctttccataatgttcaaaaagtgtttgcaaaatgtatagtaagtgaaccatagccatgtttttatttatcactaagcaaggctaagcatttgcactttataaaagcatagcatagtcatatgagcacaattaaagtactctaattaatcctaaggttcaaaacagcaagggatgatttttcaaaagggaagttatgcatatttttaggggacaactacaatctatcgtttggaagtatcgatagttagaaatacgcgtgcaactttacaatcaaaacatttagcctggaaacataggatttaatatgttcaaaggaagggcaacacttgccttgattgatataagacctccctgagaatagatataatccatctccttcaccggtatcgatttcgctgtctaaatgaaataacggtaacgataaataccaaaacatgtaaaaatctaaaatgatctaaaatgcatgagtttactagtgcggttaggtactggtctaagatgaatttaggtgaaagaatttatattttattactttgcatttgagagttattaattttcaaagtttaatactagctctagattaattaacctctaatcgtccttaggtgcattttaggtctaagttttgtgaaatgttggctttctgcagtcaaggggatgctcacaggagttcaacaaagttggtttcacaatttttaaggttagcatgattttattatgaattttacaagataggtcatatgctatagtctttattagttatttcgaattttagatatgttttgagtactgtatgtgtcatattttatttcataaaaactaagttcatggttcttataacctaagagacctgagatcacttcatttagactggtattaaattttatatgaattctagaagtttctataccgtcctttaattttaattcattattcaaattttagtgatgtttttggatatggtttcttctacagatttatatacagaacaaatgtacatgctattatcaaactaacaaattttagtttgtctcatttggagttaaaataaatcactcatgggttttatagtttctggtttacactatactagttattttaccaattaaatagttggtgatgattttatacagaaag

SEQ ID NO: 45210 - DNA, 603 bp, Oryza sativa
cactaccaccactgtctccggcgatggaggccgccgaccccaggtgattcggcggccggtctcctccccgccaccgccgccgccgccgccaatggcgtgcctcgcgccgcacttcaagtgggcgccctgcccccacgcgcaccaccaccactctacttcttctttaccgtcgtcgtcgtcttcgtccacctcggccccttcctcgtcgtcgaggtgctccttctcccgcgggggccccttccgcgtccactgcgcggtcaccgccaccacctccgccgcggcgcccgtcgtcgtagaagctcccggcggggggatgcggctcgcgtacgccgccgccccggactcctccgcgccggctctccaggtgacttgcctcctccactcggttggttgattgggatatcgtatcggattggggactatacgttttgctggtgatggtggtcatggaattgagctgcgacgaagctatttttgttcatttgcttttagtgcgctagtggagagctgggcagtaggcggatgtgggattaggttgttggtttggaacattcaagagtgaaattagatcgaacacgcttaccattacatactttacactaa

SEQ ID NO: 45211 - DNA, 552 bp, Oryza sativa
ttcctgtgcgccgacatgccaccacgacataccgaaaagaggccgtgacaggacccttcgcataaccctctctaaccgatcgcaccacaccttagggttcacgcccgtccccagcaggcaacgggcagccccccttttgtgccgcggtgaatccggaagccgatcaaccggacaccccggccgacccaactccatcacgcccaccctcgcctgggtacgtcggctagagaaaagctacactacaagcccagccgttgcccaggctggcttgtggtaagtacgataagttcttccagggcatcccgcgaaccggtccttaatcgccatgtgcacgactagcaaaaccatgcacccacagcccaccatgtagtgtattttaattaaccaacaccattgcggtggcactaatccaaagctattgccaataatcaaagtctatgctttaatgtgatccccttttgtgcactagttgaactaagcatggctaagcatctcctaaaccaacatctagtcattttaatacccaagttatcaatggcgtaagggaaacaa

SEQ ID NO: 45212 - DNA, 669 bp, Oryza sativa
actgcggctttcataaaacttaatatgccatctctatactccttgtactgacgcctcaagccagtcatgtacatccaactttgatccatcgctgaacaatgaacaaaatattagttaacatctcataacataagtactactaaattaataggaaattattagtacccttttacttacttttatgattttcatgtttttgtttgcaaaaaaattacaaaaattcgcccccttcaacctcccaccaaaatagttattagtgggataactacagacaacggactgctggagtatatatagtgtgcaaagtatatctcaatcgggccaaaaaaaagtcatctctaacgggcgcacactaatctctaacgggcagaaatagaagcccgacgccgataagagtcatcgatgacgggcattcaggccatctcaatcgggccttctttggagcccgtcaccgatgacactcatcggtgacgggctcactatttggcccgtatgaggatagtgtgcgcccgctcgagctgtcctaacttaggcccggtcgcgaatgactgtgatccctgactgtccacaagaagatgcaccccgacaagtatatctacaacggcaaaaatttaggcccgattgagatgacttcgttttgacggcccacgttgcccaagcatgtgatgg

SEQ ID NO: 45213 - DNA, 713 bp, Oryza sativa
attcctgcagcccaacaaacatgacatgtgcagcagaaaatgatcttagtgaaagtgctaaacatgaacatgctaataattaaaaggacatcattaaaaaatagttttaacctatagataagaaggtaacatacccgagaacgctccggtaaaacataagacattgttggtgttgttgcctccgttgatgttgttctcgcctcctccaatgctgttgcctctaccagcaccgttgacgccagcgcctccatagttgcttccactggtagacatgattagtgaagtagatgaaacagagtagaatcaatgtagaggaagaagacaacattgtgcagaactgatgcagcagagcaatcacactagaaagcgctcccgaaaaacttgatcgcagcctaccagtgcaggtactcaagcgaatggagtttcggaggcctgctcgtcctcgccgcctagcagtgcaggtactcaagcgaatggagttctgaggcctgctcgtcccaaacactgcaaccgaggatgcaaaaatgtagcaaagtaacaaaaacaggatgtgccgaggagaaccagtgtgggggagaggagagcagagaggtgttttcccgtaaccgctcaacaggtgctctccaatagtagcctatttaagttgagatccttccacatggatatttaaggtggtattaatccattagcattagttgtaggtctatcgaatt

SEQ ID NO: 45214 - DNA, 772 bp, Oryza sativa
tcaacctcgtcgccgtcgccgtccgttgcttctccgccgcttctttggtcaccggtgagttcgccgcgtcgtcctctatccgttggtgccttccgttcgtgccgaagcgccgccgttcgccggcgagcgtgcgctgtccgagccgtccgagccgccgaaccgccgccgccggaggtgacgtcaccgccgacgtcatcgtcgccctctcccgtgagccggtcgtggaccgttcgatctcggccgtccgttttggatagggttgatctcggccgtccgttcccgtgaaccgccgccgtgcacccggtccaccgcaaaccctagccgctgacacaataatccttcttttccttttcaaaaataattcattattgcgtcataattcaattaaaatccatataagtgttttaatccgatttaatctttaaaaattcacatttgaactcagtttaatgtggttcaagttgcaaaagttgtataaaataaagatctacatattaaaattgtccataaattgaatgaaatttatttaattctttttaaatgggctttaaatagatttaatcttgtaaaattcataataaattcatttgaagtcagaatgaggccgttcaagtctcctaattcatctaaaattatgacctacatgtttgtttactttttatgtattgtttatttggtttttattagtctttttcctcgttttgcgtgatagcttgtcgtttccgtcgttgcgaaggttcgcgagtgcgtcggaagtgttcaagaagattaa

SEQ ID NO: 45215 - DNA, 2502 bp, Oryza sativa
attcctgcagccccatgtgataatttttaaatttaaatatagttcatatcaaatgtaatcataatattttcactatacacatctaatttagataagtttattagagacggatggatgttgcttgtatgtataaagattcaaattagaaaacagtgcatagtatgtatgtacccggaggatttttttgtacaatccggtggatagtagtacatatttattgtacaagtgaaaatattttttattttttttgggtgaacagcacatacgtacgtttctctcgtagcaattacgtgggactgtcaactgtagcagtgctaatccttctttcttaatcgtaattacgtttttttttcttttttgcggtgagtagcaaagtacggtaggacatatatatgcgtactattcacgggattttttctaccggcgaggttagacgggatgtattttaaataattctaatctaatggtttgaaaatagtaggttcaccgaattaaaatcgaggattggatatttttcttttttctcaaaatttatatgtttttctctaataaatattacagacagcttggtagtgcttctagaagtgatctaatatatatttttttctttattatagataagataaatatgcagtgttttaaatagtcatttaaggattgatcgttgttattccagatagtatgtatgcctgtgtatgtacaattctctttgttgtttttgtcaaataacgaatagtgtactttttttttttgcttttttgggatacttacagatgtttatttcccgggccctttttctgttgggtcaagcatacgtatatacgtgggctgataagctgaggggtggggatagcagggagaaggagatggaaagatttatagagataaatataataataattaaaaatagtgggtccaccgatttatttggtgccacatggcattttaggagtgtttgtaggagtaccacgtaggagcgtttgtaggaagtttaatggacttttagtatataatagatagatagataacatgctacatgcttaaattttttttaaaagtaatacaattttaatggaaaattataaaaatataggtctgacctatactaataagctattatctcagcccatcatggtgaaaaaagtcttggcctataggcttttcaaccccaagcccagacattagcactactgcgtcgcagattctgctttgactatggtggatgaaagaggggcagctggagcgaagcagccgtgggatagaataaggtgggaagggagatgggccgtgggcgagtaacgcagggtgaaatgggccacacgagacttatcactttgcttgtctccggcgttggtcaacaagtatctccggacgattttgctaaacatctcccgcgtgatttttttcctggcatttgacgtttttttttggccacatgatctttgcgccaagatttgtgcagcaattgccgtggatgaagtcgacagggagtcaaggtgtgttagtcttggtgtgtgaataaaatatgtgaagtatgtaattttcatatgtcaaattaagaaatatctctatgttaatttacatgtcaaattaagtactaatcgatacaacaaatttaacatatcttaaaaatctaaataaaaattgatttttttaaccattgaaaaattaagacatttgaaactaaaataaaaaataaaaaaataaaattacggggctatctatacatcttgtgacagaaaatcccaccctatatcattcgaattttggaccattagatatacttcaagattcgtgcagacccttttaacctaactcctctcctcctccccaccgatttagatcgcacgccaccaccaccccgttctcacgcgatccccgccgcaaccgccccaccgcgccgccgcccgcctcgccggctagccggaaggggtcaacggcgctggcgaggcccccccggtgagccccctccccttcccccttccctccccttccctcctctcctcgaggtggcgacggcgaggtgcccccgccccgccgtcttccccgtctccggcggctccccgccgctggattcgccaccaccggccgccgcctcgccgcccgccggagtccaccgcccaccgtcggtcctccgtcgcccacggccatccctctaaaccccgaggaaatcccctcttctttctcttccaacccccctcctaccctcaccccaaccctaaaccataacctgccggagttagggtgtcgtcggcgctggagaagaaggagagcccgccggagatggagcagagaagccaacgcacaaatctgggcatggatctagtggtccaaaatctgtaagatttcttccccaaatttcattcgaatgacatataacaattccgtaaaaataaatgtgtaagtaaatatgtacttattattttctttaaaatataaaattacagtcctatataactaaaattacatttgtaaattaaatttagttaatttgatatgtaa

SEQ ID NO: 45216 - DNA, 915 bp, Oryza sativa
gcagtaacaagtatatggttagcatgtgacgctttaacccatatatttttgtttcgattcctggtctactacaattttactacgacgttactgctaaaagtgcagtaacgtcctatgtattctacagtaacgtcacgtgttactgtacttttacaacaatgttactactggagcatagtaacatattatgagtttcggtagtgaaagatattagaattgataatcatattactttctcacaaaattcttgaaacaaatggcatcattagatgaattgattacaagaatgtgttttgaactatgaggtcatgggttcaagtcttgaatttggcaatttattttttatttttctagaaaagagaaaaaatgtttcggggagaaaaaaacagaataaagaaagagagagagatcgggaggagggagggggagtgacgggagagtggtcgggaggagggaaagagagagagatcgggagggggaggggaagcgagagagaagggggaacaggaggaagggggggaggggaagcgagagaaagaagggggaacatgaggaagggggtatagaatacgggtgtagaatagtcttaccctatatatatgtatatgtatatatatgtatatgtatatgtatatgtatatgtatatatacatatacatatacatgtatatgtacatatatacatatacgtacatgtatatacatatacatgtacatgtatatgtatatgtatatatatatatatgtatatgcatatatgcatatacatatatatgtatatgcatatatatgtatatgtatatatacatatatgtatataggacactcatatggggcaccatggtgcccgggcaccatggtatcaaatacaaaaaatcactcaaatttttcaaaattttcaaattgtgagtatat

SEQ ID NO: 45217 - DNA, 2810 bp, Oryza sativa
aaggcctcatatgggtttaaactacttgatcattaacggaatgaaaataagccattaattcattagcgtggatgagcctaatagaccccaacggcccaaataaagaaaagtctaattaaaagagtaaaagagttaaaagtgtacggacggtacttaaatttattcaaccatattgcccaataatttcggaaatgctctttgccggtcgcccggcgcagggggagccggatcgggcgctccccccgcgccccctcccccacgtgcttacttgggcctacccacttctgctccccttttttctataaaagatgtttcacctagtgtatttataatgtttcactatttatagatctaatgttgcagtgaattaaaatactcttttacaacaaaaaacccacatattttggaaactctctattaagagaatttggttcattttttgttccacccaaaatgtttcacctattgtactcacaatgtttcactatatatagatctaatgttgctatgaacgaaacattccattgcaacaaaaaaacctacatattttggaaacctctattaaaggaatttggtttattttttcttctaccgaaaaatgtttcatctagtgtactcacaatgtttcactatgtatatgtatagatctaatgttgcagtgaactgaaacattctttcgctatttgctgaaacattgtttttatataaggtgaaacaacacccgatttaaacgagtgaaacattttttatctacttagtgaaacaattccgatatatctggtggaacatcatgcaacatttaaaaataagtcaataataagctaaaaaaaatttttgtcagaatatatccatgtgtggtcttgttttgaagatttaattgcaacgaatttaatggtgcaatcagatcatgatttggataaataatttaagagataaatcagtttaaaataattttgcacgtaaatcgaacgctgacgtcagcgcccgattttaccccttcccgatcgggcgcccgaccgggagtcatccccaataatttgcctaaataatcaatcagcctagatggtaccgagaactatgtggaacaatattcgctcaaccaacaatctctcaggaacaaatgagtcgatgtgggtattgatatttcttctgtatgctatagatctaacttagctatgttcatggattttgtggggaaatatatgtgatggaatgatatatgtcgtcaaatacaacctcgtttcgaaatatttgttagcatggactattactattcaattattataactcagtcatgtatatctctgaggaaatatatgtatgattgcataatctacaacttgtttatagctatttggacaacatataaattaaagggctagaataagatactaaacatactagtattttctaaatcaaaacatagcagttgatatgattttaagggaaatttggcactttattcaatcacattatcacattacttgtattaattacaatctaccacttaaaaaatctaatactgcagacttagtggcgagaaccacgtgaaaaaagtatttgctcgagcactaatccttcagacacatatgagctaatacatgttgtgatatttctcttgtattagttatattagttataaatgtttgtggggtaacgaatgatagaataacctatgttgtcaaatttactttttttttactacttataagactatttggatgagaataacatgaagaggatacaatttggtttcatgtgatatttgtttaatcaaaatataattaatatatctataaattttctacgggaaagaggagtgccaaggttcataaattagtatagttaccactattaattattaaaaaagagagaaagacagtataattataagatagttaatataaatgtagttgtaatacttttcctatatacaactaatttagataagtttatacttttatacggtggatgttttcttgtacgtataaagatttgaggagggtaggacggtgtgtactatttacgtgcacgggagattttttttttgtttttttctcaattaggtgaatagtagtacatatttatatgtacacgtgagattctttttcagtttttttttttgttgaagtgcgtatgaatatgtttctctcgtagcaattaggtgaaaggactaatacttctttttttcaatcgtaatcacgtattttttttgttgttttttccgtgagtagtaagtagttacgtatttatacatactatcacatgggatttttttttattccggagaggttaggtgggatgcatttttttaataaatgtaatctaatgctttaaaataatgggttcattcatttaaataaaaatcaagggttttctttttttttctcgaaatttataaggttttctctaatttattagagcgtctcgtggcggcgtaggaccgtttgtaagagcgtcacatagtgatttatgagtgtttgtagtaaatttaatggacttttagtatagaataaatggatagattgagccctacatttgagaattttttggctccgttattgcatatgggtgtgtttataggagtgattatgcgcgtgttatgatcgagcttatgtgtttgtactgcgtttaaaaaaaagaattgctaaaaaattgtcgcaagtatttttggtaaaaaaactttcaaatgtaactatatatatatattatagttgtagtgtaactacaatgtaattacactatagttacattgtaattaaaatgttgttattgtactgtaaccacattgtaatctctatataagttag

SEQ ID NO: 45218 - DNA, 905 bp, Oryza sativa
ccctgaaaaatgaattttagccgtatagaaaaattgtttgtgtagtagtgttggtatcctatttacattgtaaggtatgtaaaaaatcaacaattttgtaccggcggattctatcgtaaaaatggctttctagttttcaattttttgcaggtgtacgtaaaaagactgaaaaataaataccttacattttagtaatcatccatgcacggtctcatgttgcaagtcacaagtcacacgaattttcacgcacatgtgatgtataggaatcgaaccaggaactctcactctacatgtaacctccttaaccttctatcaacgaaacatttgattactataggatgaattctatgtgactttacctttctacaacttgtaacacatattgatacgctaaataatatcaaataaaaaagtcgtcaagtagactccatccgaggttatttgaaaaactcaatattttgttccttgtaaaatagatccaagagttcataactgatatttgggcccctaaacggtctcacataaaaaaaagttcaaccatatagttgtagatctcatcaaaggttataactttgatataatgtttgccatcatccaacttcatatataaaattttgatttttttttttgcaaatatgggttttttatttttagaggtgggccattaagagaactgactgcactaattagaggcagtgcttctttaagaagtccgcctgtgaaagagatttctttattcttcaaagattactaaactcaaacatttatagaaattttatcttaagttcaattgagttgatctatgatcgatacaatatcttattaaatatggcacgtccatatttttcataaagtatttcttgatatatgattatttagttatgtcaatttgtctgtgtaagagt

SEQ ID NO: 45219 - DNA, 634 bp, Oryza sativa
ctgcttccgagatcagatttattaggggcgccggagacaggagtagggcagttaattagggctgcagccctactcctcattctaattatacattagaattgtattataaaacttcaaaaatagaagattaattaaaggtaaagtatgtaaattacattagttgagtattaggcttagaagaatttgattccgccactctacgtagccataatgcagttaaacaacgaactgatctgaacgtcgatcgactgaggttgtggacttgtggacgtacggagcaagcaatcaagtgttcaaatatttattaatgcatatgcgtgcttgttatatatatacttacataacaatgcaagtgcagtatttatatataggcactaagaggcatgcaagatcaaaaaccatgtactgtgtaaactactgtacgaattacctgtcatgcacgccaattcactgtgatccataatcccattcccaattagtataagagctaagctcttagttaattagtcaatatattgacaatttaatatttggaagtcgcggcatcgatcgatcatgggcgtggtcagaaggaaaatgtcggaaatgctcgccatcagatgtccgacgcaacaaagaaaaattggacggacaa

SEQ ID NO: 45220 - DNA, 1371 bp, Oryza sativa
tcgtttttatccgaattttgttcgctccaattttgaaaaaacggaatgagaagatcaagtggatcaaaagccctaaaccaattttaggagatcgagaaagatttggccaaatttgatggggagaatcagctcaagcatcgtacgggcacggcaccatcttgtgcaggttgaagatggagacccacagctccacatgtgagttgggccaaagaaaggattaaaaacatcttacccattgcaacgcacgggcatttgttttctagtatatagaaaaaagaagaggagagaggatgctctattctatgtgctaaaaccctaaaccctaaacacctccgatcggtttaacgcactataagaggttcatgtagctgtctcaggtagtgccggtgaagacccgaaggacattgtgatcaagagagaagccgacgacaagaaattgatcgagtcgccatcctagagcatttgccgatgcaagaatcaaaagaagaagaagagaagggaaaaggaaaacgaaaaatattgacatcgatggcttcacaagcaggtcagtagtttaaattgttttgcaattagagaagtcgattgtttataggctggagtaatagctgatctttagcctactcagtcccttattcacatcatccctattattagcagccatatgtgccacttacaagttttaagattgattcagcttgtcttagattagattaaattagggtttaaatctatactgtctttgcatgttttaaattcaattttcaagttccattacttgcttagcagtagaattgagaaagataagggaagagaggataagcctgattgaatccaccctgaaatccccaaaattgaaaagaacccttattttttatgaaatcctagaatcccaaatcaaatccaaatcagaaattaagttattagttcggattcttaccatactagaagcgctattctcactagaaaaccgcacaacatcgtgcaaacttctctgggacgtggcatcgccgccgtcattgcacgggtgtgttggtatttcttacgaccacagataaatccgcaagcgcatggaataccgctgtagcacttcaccttcgggtgacccccaaaaggatatcgaactcagggaacgtgtgtaatctacctaaggctaagactatccaaggacaacaactgatcataggtaggctaggctagagaggactttctatatattttaattatctacgataagtaaggtaattccctatttgttgcttcgggcaccgacccctgctggtctgccagcgtggttccggctatagctctatgatgtatccgaacatggaggattactagatgggattcagggttgtcaccacctgccgccta

SEQ ID NO: 45221 - DNA, 2403 bp, Oryza sativa
tattatatatttgaacaaacgttgctacacaatgagtttcatgtgtttttgtttgcagaggtacttgcttgggcgaaagaaaagagaccgagtgtaaggaatacatggataattgaagaagttgattgggaccaaaccaataccttctccaagtcttcttttatctcaccacgtcacttttggtccatagaagacaagagataaagttctacacgttttggattcggattcgggcctcctgacagcatcaacttcaaatggacctagccgctgatctagaaggaatttcagggcccatgagtacttgttggaaagcttatggagtctactttcaaatggttttggtcccatgtcaaaattcctaccgagctgccgggaatctgcaaaacaagccacgtacctcatccagtccgaatgtgatttgggttttgggccttgtaattgtgtcatgggcttagcccatgggggtgtgcgccctagggcaaccctaggacgtccctaattatacttaatccgttgccgtcatcgtttagagttgggttttgcttagattattctattaaggacagtttcaccgctagatcggtttgtggaaccccaaattcgtgtactaaatcattcatatgcaatttggttgcaatctatgttgttcttgcttgtgttattcgattcgcatgcagggattagccttctcggcgaggtcaaccgggtttcggcacgtttgataaccagaggagacgtggtgctacgattgcggggctcagtagcatgtttgttcagaagccggatcgagttgtgtcacgactccgtccaaatcgactgtttatcattacctattggaagatcgggacctaactccctcattaacgggcttgcctacgcatgcgcttgccttctccttctcatggtcacgccggttcctccatgcccgcgccatcatggagcttccccatcatcactacttcgccgggacgggaacgttcggcttggctccatcccctagccgacaaactccagagttgcacggtgcatgactgtcgcttgtgcgctcccacttcttcaggctgtcgatgccacctaagctacacagctcagcgccgcccttgaactgtggcccccagccacgaagatggagcaccacggcggaatcaactccgctagcgtgcgcactgctcgccggaccaccgttgccgctatcgtcgtcgttccgctcgctcgccggttctttggatgggaggagagagaggggatcaagagagtgattagggttaggatttctcacgcacctcgttggtcacttcatcggcgcggagcaaatccgagacatccatcagatcagccccgcattgggctgccaccaccgatgggccacagaagatcactgggccacgctcgccaccgcactcggctcgcgcttaaactggccggcccggtttttgggccagtttttagaagtaatgggctgaattgaattttttttattttaacccgccgattaaatgtttaatatttcaagaattttggttatatccctcttagctaatttaaactgctaaaaattattttgattagtaagtaaattatttctagttaaatgaaaccatgagagaagtttagctacaaaggaataatgatatgaaattattttttgaccaaagtaattatagttttatgtcaattatatttgttgttctattccttagttattttctgcccaacggtgttttgacaatgaaaattctaagggtgtgtttcggcactgctggttcccaactttctcctctcgtttttcacgcgcacgcttttcaaactgctaaacggtgtgtttttttgcaaaaagtttctatacgaaagttgcttaaaaaatcatattgatccatttttgaaaaaaaaaactaatacttaattagtcacgcgctaatggaccgctccgttttctgcccgcactgttcctagttgggcctccagtagcgaacacaccctaagtttattttatatgtaattgattaagccaacataaattagttatatgcattattttcagcaatgggacaacttaagaatggaagaacaatattgtcaattcccttgatggatctacagtctcaaaacatgttttggcttatgcttatgagccaaaatttgaatattcaaccttaaatttagagttgaatttaggttttttttttctcttttagatcgctaagaacacgtatatataaattatatttacatattacttttcgtttgcaaaaatatcatttcgcttattccgtcgataagcgaaaccatagagtccctaatttcactgaatggaagaacaatacggttttgaatttagccatgttagattttgaccagcgagagctacagtgccgcgctgcactgtgctgctgctcgctg

SEQ ID NO: 45222 - DNA, 666 bp, Oryza sativa
cataaatttaaatctattgatatggatctatatgaaggtttctagtgcatttcatcatgagctcttttggttctaaatttggtccatttaagatcaattagaacactcagaaagaaaatggattatacagagctaatttcatactcggtggaataggaagagcatcatagagctgaaaaacaaaagcttaaaaaccaacccaacctcgctaatgccaaccataaaggcgaaagaaagatgtatcaaggagaacgctctaacagcaacaagaacaagtcaaacaactctcagaagccaagtgggagtaagcaagatagttcaggctctcaaactaaagatgccccttttaagactccacactgccctttctgcgaggtagatggatattggcaaaggaattgctcatgtttcaaagtgtggttagctaagaaaggtaaccataattttgaagaaatatctaatgttaatgaattcctttatgttgaattttcccttaatacttggtgggttgactcatgtgacattgtgcatgtttctaacttattacagggattcaataccgtttagaaagtagcaaaagaggagcaaagcctaacagagtggctgacaaactagccaaggaagctataatgcctagaagtgttcattcaatgtgtgcttgtcaaa

SEQ ID NO: 45223 - DNA, 587 bp, Oryza sativa
atatatatatatatatatatatatatatatatatatatatacatatatatatatatatatacatacatatatatatatatatatacatacatatatacatacatatatatatatatatatatatatatatatatatatatacatacatatatatatatacatatatatatatatattgcatttcacgttaacgttcgtcctcgttcgttcgctcgttcacgttccctagctcgttcacgttcgttcgctcgttctcattcacgttcattcgctcgttctcattcacgttcgttcgctcgttctcattcacgttcgttccctcgttctcgcttgtcttcgttcgatcgttctcgttctcgctctcgttcgttcgatcgttctcgttctcgttcacgttgtcgcggcaacgtacgttgacgtgttcgttctcgctctcgttcgttcgatcgttctcgttctcgttcgttaacggcggtgtggcggcatcggggcggcggttggcgcggcggcgtggcgacggcggcggcggcgtggcgttgtggggccgtggcggcggctgcatggcgtggcggcggtggcgtggcgtg

SEQ ID NO: 45224 - DNA, 681 bp, Oryza sativa
caaaaaaagtctgaaactattattttgcttgggttttattattttcataattctaatgtggtttcttgatggatttgcttgggttggaccgagacaccgttaatcagttcgttcacctctgcaattgctgtctcacaaagtcacagctgttcctaattgtgtcaaatttacttaaattagtttaattcacatgaaaccatcaatttgattctaatgcttctaatatttaggtgcttacctactggctttctcaaacaattggttgtttctatacccggttaacaaatacaaatgttagggctcaattagtgaatgaaggtgatccatttgttcttgtcggccaattattttcatacatgttatattgtcacatatgcagccaagtgcatgtaaactatggtggtttattatgtttctttagcatcggcatggatttagcaccaaaattcaaaatgtctgtagcaagataattttgaaattttgcggtatagattatgaaaaacaactgatctcataggtttgatgctacattattaattgctctttctcagtttaatttgtgttcccaaaaatgagtagcatcactctagaaagaatagaatgtttttttaatacactgataagtgattaatgatactttttgtcggtaattctttttgttctttctcattccatttatcg

SEQ ID NO: 45225 - DNA, 1154 bp, Oryza sativa
tccccctctccgcctgcgacaggatctcaccactgtccatcccggctcagggggtgtgaatgctctgtgcagtgtcgtatacctaggaggggagctccttctttcttccatctcataggcgcggcggtaggcatcgcgtcgaggcgacggcatagtaaatgtagacttcaattttgcccgcggcggtggttgggcgggaggcgagcttgcgttgactctggcgggggagaggacgacctcagcaaacgagcgtgggcgagttggagttgcaaaggcaagggtgacgctggtcggtgaccaggtggagcgagctggagtcgcggagacgtgggtgacactatccggcgaccatggagggcggcgggggtggtggcgtggcctgccagaacttactaggggagggggagcccatgctgcggctcaggggaggggcggactgcggccaagagacggcggaaatgggcgcccaaacctgcgaccggcggagaagcgtgggcaccgtcggttggagcaccggcggcggcggtggtgaagcgcgctgcggcatttcaaaaaaatatgtgaagtggtggtaattcttcatagggcctaactagattatcctagctactagtgcgtattaggagctagaattaattcgtgcctagctgggttcactgtattttacacatgggtgtttcttgcaaatttgatgcacccccgctgattcgtccacatttgtacctggagaggcgttgtgtggggcccacatcctagaacgcagacgggtccgtgatgtgtggggtgacacgtatataactcgagtcagtcaagctattgactctttctgattttgttttccttcttctttttcatgttattattgctgtgaactactactagtgagcatgaggtttcaacttcctacttctagtatttactactactaggggtgtattatgtttacatgtataagactagttctagtttgaccgtatgatagtactccttcgtttctaaatattaaataccgttgactttttagcacatgtttgactgttcgtcttattcaaaaattttttgtgaatatgtaaaactatatgtatacataaaagtatatttaacaataaatcaaatgataggaaaataattaataattatttattttttaataa

SEQ ID NO: 45226 - DNA, 595 bp, Oryza sativa
cctgactgcctccaccgcgccgccgccgccgccaccgtcctccaccgcgccgctgccgcctccgccctccaccgcgttggcgacgcctccgtcctccatcgcgccagcgccgcctctgtcaaattttttcattccaaacttactcctgaaaaattttggtaagaccgagaccgagactgaatttgctgatcctgagatttttttgatgaaatttggtcctgagttttcaaagaccgaactgaccgaaaaaccgaaaaccgagaccgaatttttcggtaaaaccgaatgcccacccctacctgtaagatgccacctccttccacgatcgtcgttgctgaggcgccagccaatgcggccaccctgcgcgtgcgccggccagccggctcttcgcccactgcccgccccttccctgcgtcgtcaaccgcgtcctactcctactatgccgccgggcgtgccgcggtggttggccccactgctggcctccgctcgaggccgtgaaggccgcgcttatcggtcgtggccatggccagcggtggtgagcaagctacagtgcactgtttgttccatttatttccctaaacgtgtggttgctgtt

SEQ ID NO: 45227 - DNA, 1421 bp, Oryza sativa
agtgccaaatataaacgaaaaaataattaattatacggattgcgtgtaaattgcgagacgaatcttttaaacctaattgcgccatgatttgataatatggtgctacagtaaacatttgctaatgatagtttaattaggcttaataaattcgtctcgcggtttacatgcgaattctataattatttttgttattagactacgtttaatactccaaatgtgtgtccatatatctgatgtgacttgccaaaattttacacccctagaactaaacacagcctaaagcattgtcacgaggaaagctaacaaggcgcatacaaaatcatctcaaagcacctacagctcatcatatatcaggcatcagcttgaacgaattttcctcagatgaaggcaatagaaatcaactacatatcagaacaaacgctacatccaacatacactagaaaattagcacgccaagtggcgcgctcattatagctcgtgtctactttctaattagtttccaaaattcaggtctataaaaggttggcaaatgaaagattcaatggtgttattaacttatgcaacaagtttagctaaattagcttccatggcacttctgctaaaaaaaacccttgaagaacgatcatcgaaaactggatagaactatagataaatatattttcatgaattcactaagataaaaaaaaagcctgatactaccatagttgttccggtctagcttctagctatggcacaatgaataaacacaacaatgtagttacacggaaaacaaaaataaagtttagaaccacagtctttcacacattttaaatgccagaggtcatgatttcgagcaccttgtaggcggtagcaatttccatcttcaatatcttacatatccctagaaatgtcaggaggtgaacacaaattagttggacctagactgactgatagaaggagatcaagagcaagagacataagttaagccagattgtcctggtgggctagtggcacaacagcaaaagcttgaaacaacattccttagtttttaaggaaaattgttgtttctcaattgttagttcttattatgggtgcattcaaatgataatggaacaacccgttgatagacccatcaaagtgataacatccacccaacagaacaaataggatgagggagcgatattcagaaaaaaatatctcctcagaaaatattatattctttatatatttgtcagataattgcaaaaatgcatattcagatacagagaatgtggaaagaaatatacagagaatgtggaaagaaatataacaagctcatgatgtattaacttaagaatgtggtcattatgaacagttgcaatcgatcgcaacttcagaatttctcaagtaatactcaggacattcccttgaatagaacacttgcaattagggcactaaccaat

SEQ ID NO: 45228 - DNA, 1862 bp, Oryza sativa
ctaaatatgcccacccatacttacaggcgaggggtggctctggtgcggacgtgcggcaagggaggctccgaacggatcgacgagggacggtactgatgcagagcagcacgctggagacagcccgcgaatagtcggtgaagggacgactatttctttgcaaggcttcaccatatctaccgttggttcctaatccaatggatgtgtgtgcaaattaaaccctggaatcggcagccacgtggcgcactaatcacccgagatggtgcgtggaattcggtataagagattgagctcaagctctgtctctacttcctccttcacgatccttgcagaggctagccggagcaccgcatccgcttcattcactgagctcgcatttatcccctccaccgagctttgcacccctaagcttaaccacctcgtcaagtttgagagcggcggtcagccaagcagagaaggcggtgctagagctcgacagagcagtgacactcttggcatagaggagggcggcgaagagcgctggagtcgagaggatggtcactagcgtagctcacgccatcctccaccacactgatagttcgacgcccaccgaagtcattgccaccaccgctatcggctcgaatcgagtatgagcccaagcggcagtggtgcgtccatcgggtttccttggaggttcagagaggatactgatggcaacgtctttaaaagaagtccacactcggcatcagtaatcaatgcatagattgaatagggagggaaatggagaagagaagggagagagaaagcaagatggtggtcaatggcaagtggactctgtaattttttttttaggatttttcttattggatagccacatcaacatcatgcaggtgaaatccgccttggtttggcctaagcagggtaaggtaaatggtattaaaaagctaaggaggtgtcgatacacgattttaaagttgaaaggtgaactttaaacaaaatgaagaattcaggagatcaaattaatggactaatccctgaacactaattccatcgagggattaacatcctagtccaaagttcttctctggacttggactagtgcctggcttgctagctgccctgcctgagctcgtgagcacatagcaaagagaaatgtcacatatatggcacgtcatcagtatcggacaatgctggccacttgtcatagtgcttttcattgagactttaagaagtttctactccctccgtcaaaaaaaaaacaaatccgagttttcgtgttcaacgtttgactgttcgtcttatttaaaaaaattataaaaaaaattaaaaagataagtcacacataaattattaatcatgttttatcatctaacaataatgaaaatactaattataaaaaaatttcatataagacggacagtcaaacgttggacacggaaaccagggtttgtcttttttttttttggacggagggagtatgtcagtattgactagtggctattggtgacgaagaagacacaagcaaactgtaaacaacacatacagagaagaaagttgtaggcgatttttaattttcgctatgattcgatgatagtgtcatgaactcatgataaaaggcacacgatagtgtcaaaagggcaagagaaatgccacatgtcacatcatcggtactataggggtttgggccatcggtgactcggtgctgcaaaagacaaaccatttgtaatgttctctgatcatgatagcactgaatataccaaaaaaaaaaacgtggttcagctaatgcagacatgaaaaggtcacatttacgatcgatcgtgtcatcgatcactacgtacggtgcattcttaaccattggccatgcattattgtactaacttgcctag

SEQ ID NO: 45229 - DNA, 2893 bp, Oryza sativa
ctgcatatattaaaagcgcgaggtttaacgtgggcctacacgaataattgcacagtacctttcacgaatctacggtttgtttggtttcggtcaggagacggatcaggcgtcgcgaaacgtttcgttgcatccgtccgatctgaggcgaggcgagcccggcccggcccggcccaactgttcgtcggagctacccgcctgggggcccaccctcagaggcgaatatgccaaactttgatgcggacgagtccttccctgtgtccgccgtctccatcgacacaccccaaaggcccaaaggtgaccccaaatactactctacattttgaaactgtggggtaaatcactcaatgtcttcacttagggcctgtttacttggggaaaaaaaaattttaggtgtcacaccgaacatttgaccggatatcggaagggattttcgaatacgaatgagaaaactaatttcataattcgtctggaaaccacgagacgaatcttttgagcctaattaaaccatcattagcacatgtgggttactgtagcacttatggctaattatggcctaattaggctcaaaagattcatctcgcaatttacacgtaaactgtgtaattagtttttctttttattttatatttaatgctccatatatatgtccaaagattcgatgtgatatttttgagaaaagtttttgggaactaaacagggccttaatcagactatagaggtcctgtttagttccaaagtttttttttctaaacttccaactttccatcacatcaaaccattcatacacacacaacttttctatcacatcgtatcaatttcaaccaaactttcaaacttcagtgtgaactaaacacagccagaggctcttttttttccctaataggtccgctagttcaatcccaatagctatgatccttccttttaaaacatggtataaacacacgtactcacaacacgagcgcactttataaacacacagagacaaaacaggatgtgaagggagattgtgaaacgagacgaaacgatggtcgggtaggcaggcgccaggcgcgcgggagaacggttggctagttgaggagggtgtgaaataaggatgttataatttattattatattgtttttaaatatacatgtaggacgtgacgtttgactatttattttatttaagattattaaatattgaaaaaaataagtcattgctgaagtatctttgatgacaaacaacggattaatacttaaatagattttcaattagactaatgataaaatagcatgtctaaatatactagcttcattttctaaccatagttattttctatatgtccagtgtaatacttaattatcacatcaatcacgtatatgtaaatattttccttatgttatctcaaacaaagtttcctcccaaccttcatttaacgggtagcattacaaattatgatagaattatcttcaaaaatattgtaagttttatagtgggacacttttaaatataactacattatatttataatataattccaccacaactatacagtaactacaatattagttgtatataagtataaaaaatatatgtaaatttatacctaagttatatgacaacatatcctatgcacacagtccttcacgtgtacacacgtgcacaccaactaaaaaatgtcaccaaaaaatctagaaaaatcatacacatactttcaattgtattacacttagggttaaaatcttaacgtcaaattcattatattttagccataacaaaaaaacaaaaaatctgacagttttaaggttgtaattttgtcagaattttatcttttttttattctctatgtagaatgaatttgaagatatgactttgcacgtagatgtaatactattaaaagtacatgtatgaattttcctagaattttttgtgataatttttagttggtgtacatgatgtgtacacgcgaggacctgtgtgtataggatacgctcccaagttatatagcgattataatgtaacaacagtataattacgttgtagttacactacttacattttaaagctttttgcgacagtttttagcaatttttttgttaaatcctaatctcacttaaacaaccaaacaatatttatatttggaaactgagagagcagtatcaaagcttgccttgaagtcaaattttgtatcaaataatcgcccgtaattacgccgtgccgtcaatcaaatctggcgagagacgaagcgaagcgacgcacaaccaccactccaccagtgcgcgcgacttccgagacgaaccgatctgacggacggagagaacgccatcctcgatccaacggcctagatcctccctagcctcctccgttcccgtgtcactataatggcaaggcacacacctcgtgccacacacaaactgcaaccaagaactgccgccgccgccgccgccgcctgtgacctctcctctccctccggcgacgtcggcgaacactccgtcaccgatgggcagcgcccttttctccaccattgccacctcggtggaaagcctccgcgtcaccggcgccaacgccgacgtggacggcgtcgccgcggagaagaagccgccccgcaacgacaggaagaggaagaggaataagggcgcgagcgggaggacgtacgaggagacgcgcgccaggtacccgctgctcgtcgaggcggtggaggcgctcgccgctgccggcgagctcggtctgccgccgccgccgcacgtgcgggggcaccgtctcctgctggaacgcgtcagcgaggacgacgcgcggcggctcgagcgcaagctgaaggtggaagagctcgcgagggggaagttcgagcttcgccggcggcggctcaccgcgtcgttgaaggaggcgctggtcaaggccggcgggcgagcgccg

SEQ ID NO: 45230 - DNA, 865 bp, Oryza sativa
atacatataattttggtggatactacctccaccatttcaagttataaaacgttttgactttgatcaaagtcaaaatgtcttataatctgaaacggagggagtacaaagataaaaaaatacacttacacgtataaacataaactttatacgtatacatataaagggtctcatctttttgcttatgcttatgcttatcagctaaaatttgaattttcatccttaaatttggagttgattttgaggttttttttatcgaagtttattttttagcctttgtttttagatcgctaagaacacatatataaaaattctattcacaaattacttttcattttgcaaatataccgtttctcttatttcgcgatggctccgaaagtttgtacacataactacgtaagggccggactgatcgtgcattaaggatttctcattccgtgctctcacgtattatctcctttgatttctagtgtaatgaaccatccatttctacatgtcatgcatatgcttaggaaaaagctatacatatggattttatttcttacaaaatttttgctaacgctaatgttacatattgtagtaaatcaatctagatctactatgacatcgacctagttaaatcaaacgggtgagaactttgttaacctttgttaagagtttaatttgtaagattttcttttaatacatatagcgttgttcatattttcaacaacgtttgcttcctactcttaatttcttttttaattactacaatgtgacgtgtctgaagttcacatggtgtacaacgtggtcgccatcccggtcgccgccggcgcgctgttccccttcacgaggctgcagatgccgccgtggctcgccggcgcctgca

SEQ ID NO: 45231 - DNA, 2192 bp, Oryza sativa
cccttggacctcaccgccggtgacaaaatggtaagtgcaatgcatggttaattagccagccatgagctagcaaattctacgcaacaaatcacctgctgcatatatatacactccaaaaccatcaccaatatacagacgacaggccggttcaggttcaggccatatatatatatgctctctaacctgaactcgatcaatgcaagagtagcattggtagctaaaacaatacaacatctcgatcaaaatgtcattatctgaaaataaaacaaattgcaaatgcaaatgcaaatgcagcacatgttgtaatggatagctactaccactagtggcatgtactagtgctaccccggcctgcatgtacttgctacatgtgatggatggatcaaagtaggggcaataagtgcgagaggaggggttagccgtcttgacgacggcccttgtcgtcgagcccgttttcggcacgcctacacgagccctaggggtgtccatttccggcctcgcatgtgccttttaactcttgctccagtaacctgatcatattatgaattcagggtgtgcaagtcaagagaggaggagagaaattcaattcaatagctgatcctggcccatgtacatgcattgcattgcatatatatgactctgtgctagctgctgccattcgatcggtttatcttatccatcaagtgtgtttgtgtgtgtgtgtgcaagcaatattatggaaaccctgtgccatgtgaacggtttctttctctctcacctgcaaagctaagagcatgccatgatagattggtggttgaagaaggcatggaattttatccatgtgcgtgcgttcgcggttggactatccgcttggttcaaggtagcttttagcagctgcagggtttatcttttcgtttttgaaataaaaaccgcttcgtattggtttactgaaaacataaaactggtgaccttcggtaagcgatgtacgaaaaccagctaaaacggatcggttttcacaaacagacaattaatgtttttacagaagatgtatgaacggttttgcgaaaaaaaaagatcggttttgtgaactctaactttatttctaatctccaactctctccaaacaattcatatttttcattcaaattcttaaaatctgtagttataaatcctaaaaaaaaataaatcaaagttggttattactacctttgaaaaaaataaatctgtagttattgctttatgaatttgatttttatgcttcttcttctctctttctttttaaatattcagctttgatgaggtttagcaggattgcagctaactgatgtctatgcatatgacaagagcaataactctgttcttgtcaaatcaggatatatagtataggtgggtgaaatagcatgtgtgcatgtgttgcatttagaagaaggaaatgcatcgagagaaattaaagagcatgcattgcattgcatgctgcctttgtcgttgtccctagccaagttttgatgaggatcacagaggggcccaaagtgcatttaggggactgtttccaatacacgcctacaggcatatatatccacggctcacatataaccaattttttgttagtaatagaagatttgactgaaactgttaccctatcataacccaagatctctgtcctactactactactatttactaaaaaaaatagggtgcaacaaaaaattaattaattaatttattaacatgcatgtcacgttttcgcaccgctgatgaagcccaaacttaatttgcagcaaaggacatatatatatgtgtccagtgatgaagcccacaggtaaaggccttcttaatcttgagattacgccaagaacggcccatgtatcatatcgtcggctgtgttgctaagatgcttgcgtgctcactttcagcttggaaaaacgcaatgaacagttgccggggcctagcttcgtccatccaccatggaatcacctacgtgagagcagtattgcagtaggttataccacacaacgaatttctgattaaataggttacataattaacataatcgttcaattaagatgcacattctatctcgattttcattagcatgtttttcaaatcaataaacagcttttttttaaaaaaaaaacttagtagcaccctatatcacccgttggttcccttagtcgacatgtatgaatcgacctatggtgggcgggacctcatgt

SEQ ID NO: 45232 - DNA, 1718 bp, Oryza sativa
ttgatatttctgaaccttctggttgttttttatcatgctgaattcagtacattgcacctcttgtttatttagcacaacttgtatagtctgcatgtctaatatcagaatcaacgcaaacattctgttgggatgcagcaacccactaattttgttgggatagacgtgaaggaattctgggcctgtcagtccatccattgtttttctgggcctttgtcatagttcaaccattccagtgttgggctacaagtcccccagaattttttctcgccatcggcacaagttaatcatgaacctacgatgtttggcgtctcgaaagtgaaaaaaaataaattaaatgcttgagtttcacctgaatttctgagcaatctggtgcgttgcaccgtatactgtgatcgtgctctacccactaggccactatccagactatccatactccaaaggtcaaaacggccacgcacggacagatgcaggggttcttgaacaggtgaaaaaaaatagatggacataaagaaaacctgaccaatcaaaacggccacgcacggacagatgcgaggcggcaggaacgaaaatatgccattgccgaattagcactccagattcaaaggcctccttcgaaactgcaggcaatttgaaggagctttgtgcgaactgaactaccactaaggctgtgtttagttcacgctaaaattgaaagtgcttgaaatggaacgatgtgatgtaaaagttgaaagtttatgtgtgtagaaaaaattttgatgtgataaaaaagttagaagtttgaataaatattttggaactaaacacggagtaaaactctgtaaggaactttgtgggaactgaactaccatgagaactcagtaaaaatgttatgttctttttttattaagatacatattttatcttaggtttttattagcatgttttttaaatatgtttcatatgaaaattttctatataaaaattactttaaaatgaaataaatttatttttaatgtaataattaaatcttaattaatcatacgtcaattgttttttttcgtttgtccaactttattctccatccaccataatactacctccgtatcatattaagttattttttactcctacttatctcaaaataagtttatttctaagtaattaaattattgcatcagagtttgagtttatgaaagtatggaataattacattggaagtagataaagtaaaaaataataacttccggatttgataaagtaagagcattctaatgtttatattggtatgtgggggatgaataaaaaaaacaagctttagggtccctttgaatcgcaggaatggaaaaacacaggattctaacaggaatagaaatgcaaaacagaggattacaaaacacaggaaaaacacaagaatgacggtttgattgaaccgtggaaaaaacgcaagagtcggatgagagagatagactcaaagaaaagtttccaagagatcgatttgggcttttactaaatttcctccaaaatctctataggattgtccattctatagaaatttgaaaggataggattcaaagggcttcataggaaattttcatatagaattataatcttccaaaattactatgtttttcctctaaatcaaagaggtcctttaacggataagggtgtgttcgctggttgtacttggttcccaaccgaacccttcacacggaaaacagagcaatccattagcgcgtgat

SEQ ID NO: 45233 - DNA, 547 bp, Oryza sativa
ccatgatgagaatcaaaactccacaaatataattgcatacatagatttgacgcttcgtcataagaacaaagataggtccacctactaaactggataataagaatttaagacaagtcacaaataaactagtagtgcgccatagttttgaaggtggtagctgcagtgaatgaatccaaaactgtctctaacacatagaatgttgatgattttccattgttgattccaatctctgaaccaatcaacactaccgagtgataatgtgcatctagcattggaggataatatatttcgccatcattcagaaatgtaaacaaagatgtaaaggggatattaccaattaaaggaaacccattggccataaaccgagttatcaagtgaatatccctgacattaactttgaagtagcctcgaatccgcgtacatggtaaacgagattgttgttggtatttcttaacgtcacaaataaaatctacaagcacacggagaataccgatgtagcttcagtattcagtattccgagtatcgatttccacaaggaacgtgtgtg

SEQ ID NO: 45234 - DNA, 871 bp, Oryza sativa
tttactgaaatgttccaacaagcatttgttggtgttttactagtgcattagtaatgtttcatgttatcttttttatatgtttcagcaaatacattttttatgtttcaacaataattataatttgatatttcagtctaaatataaaaaatatttcactagtcgggacttaatgtttcatgtaataatgattattgttgcagtcaatactttttatatgttgtacctctttggaacaatttgtgaagtgggttgaaacatctccacaagtgatgaaacaattatttttaaatagttcaacataagtttgttttttttctaagaacacacatatatatttttattaaaatatattcatgtgagatcttgttataaagatttaattacaacgaataaagtcatctaatcaaattatagcggtgttattggatcatttccggattagtttcgcatctcccactttcagcctgtccttttttttccagtttcttttcatcttttatctacctttagtgtgtttgtaaataacttctatcctatttaatataacaccagcaaatcctggcatcggttctaaaaaaaacattcataatgctggagggcccattcaaaattttctttcctcttttgacctagtagtgatttgttagtaggggtggaaacgagccgagccagttcggcttgcagtggcttgtaacaaactaggcttggcttggctcggctcggctcagttagagaaacaagctaaaacttgagctcggctcggctcatttcctagctcgagccagcttgcaagccttcctgttgaaacacctcttcatatataatttgtaattattaaaaaaagtaagaacaaatcatcaacatgtaaaat

SEQ ID NO: 45235 - DNA, 678 bp, Oryza sativa
catagttggatttgttcaaaacattagtctagaccagatcaagagagccccagatggttcattgtaatgccatcgaatatattcaagtcatctaggctcctgtcatcgttgaacacctaacatccaatttatgcttcagaataatagaattcgaacacctgacatccaatttatgcttcaaaacaatagaattctcttggtcaccgtttctgcaagcacaaccttagagcagaatgattcagcaatttcactttaaaaaaataaaaaaaaaagtcctcgagctatttaaagtgtaatataagctcaatagtgtacagcgatcgcaggcttcagatttaacacgctatggacttttttgtattccacgttgaatttctaatcctacttgcgttatacttgaaaaatacgggaaataaaatttaagaattgctaaaagttgtttgacaacacaaagaaaaagttaggccctaattagcacatctatatcttgtatgacataacttaaaagtacatctatatcttgcaaacgatacatagtttgtcctttaaatagtcagtgtaccctaagcaagcaaatattccactaatttcctcacttgtcgcatagcacaatactcagtgtacccaaatctaaattggattcgacaataatcatatgtgtattccttagattacaaa

SEQ ID NO: 45236 - DNA, 1900 bp, Oryza sativa
gtcgtttagtttgaaactttttaaattttggtcatgtttttgtgagagattttctagaacttccaaattctaataaggtagatatggtaagaatgtgtttattttgctatcctaccaaaattggtaatataaaaaaatagcagggttaaaaatgataatgaagtgaacttaagctgttgtttgcactgatgaagtgatgagcattatacccctccttttattttattttttttgaggacgacccctttttttctgtcatcataaaattgacgaagatactgataatttcacatatctgctgctaatcttgatggacatcggtgccataaataaccatcttaattatccaaaaactgccatttgttcttccacctttgaccacataaaacaggagcaggcattcccacatgcaacagccgcacggctgcctgaagactgatatgattagtgcctgatcgaatgcacacaaatctttttcatcagctaccatagcattagcgtggtcctgatctatgctactaactttttaatgtgttcttgaacacagtagtacagcacagacaagaagaaaataaacctcctaggttgctgaattccagtcatctcaaaatataataacttttagctattaatttgaacacatagttgtctagattcataactaaaaatgcttatattttgggatggagggagtaacaaaaactgcaataccactcgttacaatctgaaatccccattcttgtcaagccttaatttcaattttttttcccttcaacacatacacagcttctggcattattcttccctgcctcttcacaacctgatcgagcacttactgctgctaccggagtagtacaagtttggtaacgagagaagaaattcgagctgttgctggtgttcgtcgctgctcacacagcatctctgcctttccggttagcccagtacaaacagtggtacgtactgtgccttttggtttcttgttttatgtggcccgaattcttttttaccctcgcagcaatttcaaagctcctttttacaattttttcacagtttcttggccggtagcgaacgcttctagcttttttttcatctcaatggcgcagtacactctgtaccatctgctatctcctacccaaaaatataaaaaccttgaatcagatgaaacgttttctagtgcaatatatttgaataaagatatattatactagaaaacatcgagtccatccaaatacattgtactatagaaatgtagcatccggttttaagtttttatatttttgagatggagagagtagtactacggcagtgtttagttcctcccaattcccaacttttcatcacatcacatcacatcgaaaactttcctacgcacataaactactaactttttctccaaactactattttctcccacttttcaacttttacaccatctaaacacagcctacgtaggagtacgttgtgttgcttcaaattttacagctgtatcccatttcatatttcttggcatgctagtgaacttctctagggagcatatttggttcattggttgttgagtagtagtactaccactataatttggattgctagctactccctccgttttaaaatatttgacaccgttgactttttagcacatgtttgaccgttcgtcttattaaaaaaatttgtgaaatatgtaaaactatatgtgtacatgaaagtatatttaacgataaatcaaatgatatgaaaagaataaataattacttaaatttttttgaataagacgaatggtcaaacacgtactaaaaagtcaacggtgtcaaacattttaaaatagagggaatacattatttatagaatttcttgccaagttttgtggagcttgtagtggatgattgtgttagctacactaaaa

SEQ ID NO: 45237 - DNA, 677 bp, Oryza sativa
tcgttcacgagtttgtgtggaagacaagggattatacaggttcgggccgctgggaagcgtaacaccctactcctgtgtgtgggattatggttaggtcttacaagagatcttgagctcctagggaaacctagctgttattcctctagagctcaagcaatcgagagtcgtcccttttctcgatgggcgaggttctccttttatagttcaaggggataccacatgcaccgtctatacctacccctcccatgggagggggacccaccctgtctggatcagaccgccattcatgccttcaaccaaaagcaaggtggtcgtgcgtccttgggtggggcccagcaccgtcccccgcctgacacgggggacatccctgtcattcccctttaaatgtatggagactttggtggctcaccacgcgcggagggcgctcctggcagtgcatcgataggacggggcatacctgcccccactccgcctgacacagggtgggacgtggggacgctaccgcccgtccaatcacccgtgaccggtcataaaccggtcacgcccgattgacatgggtctatcgggcggcgccgcacgtccacccacaccgcattaaatgcagtgaggaacggttggagtgccgcgcattaaaggccctaagaggcgccctctgcctcgcccgctctccccgccac

SEQ ID NO: 45238 - DNA, 681 bp, Oryza sativa
aaaactaaggggagaattggagacggcacaaagctcactgcttgccagtatcctcgcgctcggagacaacaacagatgatgatgatgtcaacatgaggtcttattggcttgtttggctgtgtcaatagcaagggctcatcgtttgttttgtttctatgttatttttgtaaagctggaaaccccagcattttgcatctgtgaaggatggctacaacaaagactatggggagtaaatggagacagcacaatttgatcagctaggcttaggcaaaaatagaagatttggcgtcctgatcttaaagctgcttcctctatggacttgttttctttgctttatctctggcttgtttggctgtgccagcagcattagtcctccttttattttgaactgtgttgcttcttgtaaagctggaaaccctagcattctgtactctctgttatgctttatgaaaagctgggcgtctgccttttctctaaaaagaaaaggagcatatgctaccaagctggtgaggcggcaaaccgaattgtcttgtgcaccatgaataatcgacaaaaaaatattgatcaataacctgagctcctcattgcctaagacccaataacgtacatagttagctccatcactgctacggctaatgagaactgatcgagccaacttttttttatgagtaaagtgtattt

SEQ ID NO: 45239 - DNA, 1159 bp, Oryza sativa
taaagagctaatgttgttgtgagaatagtcccctatgtaacaccccttaacacttgcacaaaactaaaccttcttctttgttaatgaaaggagactgtccttctaccctcttattcaaaagaaaaaaaaaacagactttttcaaaagtaacagttcttggtacaaagagcggacttttcttccctaaaaacttttaggccccgtttagttcacgagacgaaaagtttcaaagagtcagatcggatatacaaacacacattcaaagtattaaacgtagactaataacagaacaatttacagattccgtctgtaaactgcgagatgaatttattaagcctaattaatccgtcattagcaaatctttactgtagcaccacattatcaaatcatggagcaattaggcttaaaatatttgtctcgtaatttacacacaatctgtgtaattagttttttttctatacttaatactctatacatatgtcaaacattagatgtgacagggtgaaattttttttatttacgaactaaacaggtctttacatagtttgaacacgggtagggctgtatttagttcacaccgagattggaatttttgttgaaattggaacgatgtgatgaaaaagttggaagtttatgtgtgtatgaaagttttgatataatataaaagttggaagtttaaaaaaatattttgaaactaaccacggcgtaggtcgaggtcgatatggatcgtatcaatcgatcatggcggcaggcacgagctaaggtacggtggcccatgcaaggcaaccactggcaacaggcaagcaaagcacggccgccgctagctccagctccatccaactccaagcagcctaggggcaacattttctccaacgcgacacacaacacacaagtggcgagctcgatcgtcggctgtccatgccggtcaaaggacatgcacaagctgccattggtggatgcatggcccgggaccgacaggcgacagctacatgcgtgcaagtaccatggccatttgcagattaattcaatgcccaaaccctctctcgctaccatcgtttcacactatttccaatgatcatttatccagttaattgtccttgatcgcaacaaaatatagttcctccctccaggttgtaatacccgttgtttcggataaaga

SEQ ID NO: 45240 - DNA, 3421 bp, Oryza sativa
cctaataggtgcatctattcgatgcaccatattctttatcttttcgccctttacagtcttcgtcttcgctactcggtaggccttggcatgaaaagtttgaagcactcggattattatctttgggaaggctacgatggttgactgcaaaggtctcgggggctactgtggagattatggatatcccatatctacaaggcgacaatatttgggctgaatataggataccgaatatagatagaatatcttacttgtatctcgggtttgtttcttaacttgtacatcaaggaaacaccttgagacttagtcggtcacgactgtatttgatctgtatctatgtattccgttagggatatagattatcttttgtaacccggactccttcccatatataaggagggtctgggcgcctctaggggcggatgttgattttctctaaatcatacaatcaataatacactcggcggattcatccccggacaggagtagggtattacttcttttataagaaggcctgaacctgtataaatcctttgtctccaaacccatacacttttccagcttgatagccaccccctatcttgactgtcaacatcaagtttgactgtcaacactaactttttctttaaacaaacatctaattttgactgccaaacccatacacttttattattgccgaaatctagtttcgacaccggccatccatccatcatccagatccatggcgcctgcgcctgcgcacaccagcagacaacagtcactcaccagatcgacgagacggctgtcccccggtgaggttggcaacgccggtgcgtgtctcccgcccatgtggcagcctgcctcgctgcctctcctctcctcgcagctcagctcgatcgcgcgccggtggcggtggcgggggccgcgcttcacatggccgccgatgccgatgccgatgccgatgccgatggatcgtggacggatgcggcgcggcgctgtgtgtcgcctgaaaagcggagcctttttttagaggaaaggattggtggaaagtttcagtgatgagatgatagctagctacagtgtgagtgtgtggtggcgacacgacggacgacggtcgtccagacactcgagtgtggccgactggccggtgagggtgacgagtactctctctgccttgttggcagaatggcagtcctcttcttttgccagtctctcctctctcatctcacatcgccgagttcaggcttcagaggttcgctgcggccaaagtggccgtggccggatgggcaattcgggtggatgacgaccccgcagttatcttatgcattagcccttgtttagttactaactttttctttaaactttcaactttttttatcatattaaaacttttctacacacatatcgttttaatttcaaacaaacatctaattttggcgtgaactaaacacacccttagtttggttgaatgttgggatggatcaggctgaatctattttttatcgaaattgctatacgtccgacctataagtccgacccatccatccgactagtgtatgtataagcatatatgctatttgtttgggcccacatggtagtaaacaagttcagtgattggttgtatgactcggtcggacacaaatcgtatggctcagtcgtacgtatagcaagatttatttttaatagcgtttgattcgagaataactggaataggatgatcctgagaggaaatatttcccttcagatggtctggtccctaaaaaattgacggacgaatccaagaaatggaaatgagtctaacccatcccacctcatccccaaaccaaatatagaggacatgtttaatgagttactacttctattctaaaatataacaggttttagagtggtagtaggtgaaattaaatgagaaatgactgtgattggttgaaaaagcaagatatgtggagaatttgatggtcgaagattatgattggttgagaactcaataaaagtgaagaaatcgttatattttgaaacgaattttaaatgctgctaattttgtcccggaatattattttttggacacgattattaagaaaatatatagaattaaatggaatgagattgtgattggttgagaaatggaggtagttgaaaaaattgaatggtagaggggttatggttggttggaaagagaatctatgtttttggaaaaaaattaaagcccataagttattatattttaggacggaggagtagaagttgtagtatattttaggctctcatcggatggcctaatcagccaaagaaaaagccaaattttaaattttcaaacttaatttggagattgattttgagatattttcagcgtagtttcttttttatattggcttttaagtcaccaagaacacatatataaaagttttacctacaaatttatttttattccctaataagccgttttggcttgttagggaaaaagccaaccgatgaagaccttagaatggagggagtacctatcttcacttcttatatctcatttatattactttcataattttaaatttatcttatattaacataataataaacacaaagtaataaagaactcactaaatgtaagtagtttagatgtaattaaaatgctaagtaagcacaaagtatataaagatacgttggtatcttatactaacaaggtagctcgcgatctaactcgttaagcttactagttaaaacttaaaagcctaatttggctcgaacttactatatcgctacgactttacctttaaaccaatccgagctgattcgagtcatgagctttgagctctccttttcccactccttctatctcgaaagacctcatcttttccaatcttgtgttgttttgagtgaagtggcagccattattatcttcatcctaaattataaaaacctatataacaaaatgagatgtatatttgtactatgaatcggcttagattcacagtaatagaatatgttgctttcattcctttatttttatattttaggactgcgtacgcatggatctctaatctatgtgagctgtagtatgtaaaggtgtcacatgccactatgtagtctcatctcatgctacttgtggcatcgtctcatcctacttgcctaacgagataattctgttttggcctttccggtgcgaagatacaacaatgacagtcgtacatgagcactgcaaaatttagcttatgaaaaattttaaactgtttttacaaaagtaactttagataactaaattttacactaaaattttaatgccacaagataattccgtcccaaaatataaaaacttagaaccggatgtcccatccaggatgtcccatccagttctaaattattatattttaggacggatggagcagtaaatattaacttttatattttgggatggatgctaatattttagcttatatgtttcggcacatct

SEQ ID NO: 45241 - DNA, 1091 bp, Oryza sativa
ccgctacagcagcagcactgcacaaccactgtgggcctgtttagttaaaaaaaacttttcccaaaaacatcgcatcaaatctttagacacatatatggagcattaaatatagataaaaggaaaaactaattgtatagtttgcatataaatcgcgagacaaatcttttgagcctaattaggccatgattagccacaagtgctacaataacccacatgtgctaatgacggattaattaggctcaaaaaattcgtttcgcggttttcaggcgagttatgaaattagtttttcattcgtgtccgaaaacctcttccaacatcctaccaaacgtctgatatgatacccaaaactttttatttcaccaactaaacagccacagtaattgagctgccgaacacaccctaagctgtaacactgcacgtcacaatccatctcgatggtaagagtcggtggttccgtacgcaatacagccagtcaacaactttgactaggcacaacgccctgtcactgacaccgtgggccccacaaactgtcctaacatgcgggagcgacgtcctcctcttggacctcttccatgagaccatctgacggcccaggaacaactccaaagaggtcggccgggccgggccccacttggcatgttcccccacttcaggccacggtggggcccatcgtacggacgataagggggcacgcgtcacatcctggatcgtcgcacaggtgcagcgcccgcgcctcacatggcggccacacggtgtccactgctgccacacatgggattgtttcgtaggcatgcaagccggacgggcatgtaggttttttttagcccgcttatctcatttttaatttattttttcttttaaattttatattattgtgtgagaaataaactagcaagcgagtttttatacaggtagtgagactacccacttgcatctctattgtttcatgaaatggatttcaaaaacaccaaccacactgaaattcttatgggtgaatagctaatttagtccctccagtttcagctaaggctcaatttggttcttcacgtttcattttgtccacataggtccttcaaatatttgttttgact

SEQ ID NO: 45242 - DNA, 2187 bp, Oryza sativa
aaatgtaacccccatcataaatttcataaacccatcgcaaaatgcacccaaatcatatcgaaattcaaaatgcaatcgaagcaaaaaaaaaaaatcaaacaaattcagagcgaccgcgcgaggagagaaggagacgagcggtttcgccgcgggaatccgcgtgccggtggccaggttccggagcacgtgttccgcgcggctaatcacggagtagtatgttacgactttaatcgggtgattagcgccttactaatcctatcttactataaagttatcccccaccaactccttaaacttaacatgcatgcaaagatgccacatcatcatccactaatccattaattaacaagatgccacatcatcatctactaacaatcatcacatttaaacatcatacaaacatgctatatctttatagtttttataatttaagagcttttcaatataaacatgttaaattatcatccaatataattcacataatgtttcaatgtatatttttattatgttttatgatatatcctatatatttatatagttcatcctcacttaattagtgcttaaatgattaatctatggtccaaattatctttctccttttttcctctcattaaggcatatcacatcaattgtttttagcctttagatgattaatctacggtccaaactatctccctacttttcttattctataaagtcataccaccttacttttacgtttgaatcatcattctacatactatttaaatttaaattatcataaaccacattaatttatttaatctgatattattagctatcttacacgttatttttttattgttatcatactaaattcccgcagcaatgcgcgggatttcacctagtcacctaataatcaaagatccccgtgggggcccacctgctgatcgataacggtcgctgtgacggtgggcccggggtggcctgggtcgtgattgggtgaggccgtccgtcggaggggtaggtgtgtgtaggtaggcttggctctgagtgtggggcccatccgacgtggcgtggtgtgtaagccaagacgacacgcatgcacaaatccggttcgtcgaggttgacccatcgcgttagacacatacaagcgggggcggctaacaccccccatcctttctttctcctcatcttcttctcttcctactacaccataaatttttaaaaaataaaaaacataagcttgaaaaaaattatatatagaaatactatatataaaaaaattaaatttaaatttaaatttaaaacaggtatgtaaacttttgacttataaactttgggtctataaactaatatttgaatttaaattcaaattttaatcgggtatataaacttttgacataaactttgggtctataaactttagatgtacaaaatactatatataaaaaatatttgaattcaaattcaaatttgaattggatataattcaaattcaaatttgaattgggtatgtaaacttttgacttataaattttgggtctataaattttaggtgtataaactttagatgtatagaaatattatatataaaaaatatttgaattcaaattcaaatttgaatcagatgtataaactttaggtctctaaactttagatgtgtaaacttaaggtgtacaaactttaggtgcgtaaatttactaaaataagaaagtaatgtggtgccaaaaaatgaaaccatatggaggaaaggggagcgcccaggggcgatcgatcgccccttagcatttccgcatacaagctggtgtgtgttagagcaaggctaataatacaatcgatatgttgtttataagtttttttttagccttctctatagggtccacttgtctctcttatagaatttttttggttcttgtgtccaagccggttgtaagtttacagtccgcttcttttctctctctcatctcttctatcatttgcctcggcatttagctggtttatagcctactattattatacttgctcttagtactgtatgctttttttttcgtttctataattttcaatttcaactttcgatgcaatgaatgatgatgaatcttggtgatgatgatgatgatgaacgagctgaagttaggcaaagattcaggtactaggagtagtaataacaaaacaaagttcgcatttgattggttttaacttccgtgtttgagatcgacactgctt

SEQ ID NO: 45243 - DNA, 1320 bp, Oryza sativa
attgaaaatcgctgcaacttgcagccgttttgaactaccataggcgtatctgctaccaaaaaatctctttcaaacacactatttatattttgggatggagtaagtaagattagaagttctacgtacagtggtctggacacttggttaagtgagaaaccatgtgcataaatgtgaacacgctgagtatttcctcgaacgatcgacatttgaacattttagttaactgaacgagctaatctaactttgtatatatacccaatttggtaagcgtatattaatcgatgtttggcttgcggtgcaagtaaaaaatgggcgccctgatcgactactgtgcatgccgtacgttgaatcactctacggtcttgatcagaaaattaactaagagctagacataacattgtagttaccactaattcatcaggtccattagtgcttgacttgtagtgttggccatgcttacgagctaggagacgtgctcgtggaagcaatcacgcaaatgaaggtgaaagtgtaacatataatgtgcaacctttacaagatcgtgctttaatttgtcacagcttcagcttaaaacctaagctaattttgaagctcttgttaaagcttcatgaaaagaaagccaggcaacacagagtgacaaaaagggtccttaacactctaatcatctacacgtggacttatatataagcgattttgatttgttttcactataaatttatagtatgttattttaatcttggctttcaaattacgaataatacagattcaaaagttttgtctggttcattattttttctacgacttatcaacaaatcgatcggtcgaaagtaaattagaaacaggaagattcaacttttaaactcaagtgacatcagcaagcatgctccaagtctggtgaccatgctatagcaaaccatttttcatagatcattttaagcacatgataaatttcaaaaatagaaactgagcacatgataaacaatctttgtgccacccaattttatgatggtttttctcaacagttgcagtccgaagaggcgtactccattgtactacgatccaatagtggtcgtcgaatatatgcttgatataaccaaaacaggcatcccccataacttgattcgactgagggaattgctaaagatactgattttatatcatttttgttagcatttttttaaagtggtaaacgtcctactttgtacgggaactttttatataaaagttcttttaaatatcttataaagtcatttctaaatttaaaataatttaaacccaattaattagtaatatgagctaataatattctcgttttacgtg

SEQ ID NO: 45244 - DNA, 678 bp, Oryza sativa
tggagtatatgtttgttcagaaaatggcagagatatgtgtaaaacgacatttcatatgaatgcacactaaacgagggtcactttctcgtaaacaaactaatctagtatagatgttgaatctcgatatctctctattcatattgatagtatagtgttaggctgttagcatatgttatattcagtattagattgagtatttttagtagggctaacgccgaaaatcaaacaaaccatttgatgaacattttttttaattcacagttgttgttctacctaaaaatatgtttaaaatgaaacttaattgaaagcttctttgagttacagtgtgctgtacaggttggagtcgcatgcatggctaaacgggagaagttgaccgagagggcaaaccgaggtgtagagccgtgagcagctcagcatcgatctatggtcgatccagtaggatcggtcgatcaaaatcgaaatggatctcatgagatagctttctgaccgaagccgacacttctctagtccccagaaaataacacctttcgcccactcacacgacctatggtctggaatgattattgtttctattatgagaaaactttttgtgaattctgacttgaattaataaatagtaactctattgtatttagggttttttttagtagtttagcaaagctactaaaagttttcttt

SEQ ID NO: 45245 - DNA, 538 bp, Oryza sativa
aatttgatgaagtgttttattcacccattcattttacaacaagccacataaaaatttaaattttagaattgactcagagctttttctctatattttgtagccttgatttttggataactaattagaagttaaaaaaagtgtcgaagttaaaagtcttaccgtcattttttttgttgcttcattacttttttaggtttataacccatagctcaaccaataaataatttgttgcataacacaaatgttgtagtagtaggctggaatctccaaggcatggtactagtttcaattaaaccaacactagcttaaactatttcgattttaaatagtaatctgaagtcaaacgataatttagaataattctcttgtttctatacgggacccttagagcagtataatagtagactataagccggctaaatgctgaggtggaggagagaagagaggagagagaagaagcgtgctataaaattatagccagcttggacacaagaaccaagaaactctgtgagagagttaagtgggccctgtattaatt

SEQ ID NO: 45246 - DNA, 641 bp, Oryza sativa
ccaaattaatcaagcttgcatacacatgtacgaatattgttcatgtaatgcaactatgcaagtagatacgtacgccgtatggttcagcagaaatataatcggctgacaagtctgtctgtgcactctgcactgagagcaacagggagcggatgtggccgtgcgtgcgtgcgtgcgtgtggtcaccgttgcagtcaagttgacgaagttcttcacgggttgcccggtcgggggagcccctgcctgtgccgcccgggaccatcgatccatccatccatccatccatccatccatgcgtcgcgcggcgccctgtacgcctgtacgcccgcgccgcacgtacgtacgtacgcacgccatcttccgtggtccaccacaccgcccccgcggtttggttggataaccccaacacaactgcatgcggcctcgtgccaaaaacggcttctcccacaggaaaaaacggtagaaattttcctctcctcccggatcgcgacgcgcatgcagccgcgatggggggagatggcgcgcgcgtgctacaccggtgcgggggttggtgattggggaccacggtggttttcacgtacgagcgccgctagctagctgtggaagtcgatcgggataggggaggggtcgcgccgtcgccgtgt

SEQ ID NO: 45247 - DNA, 646 bp, Oryza sativa
caatattggcattaattgacaaaagttcgccgtgcgaatcaagaagtatgtttttgccacaaacgcaccaaatacactccaatatgtccaaaaatcatgttttggtgctttttgaactttttcattccggtcaaaaacatcgcacccgtgtggggcaatattggcattaatggacaaaagttcgccgcgcgaatcaagaagtgtgtttttgccacgaacgcacgcaatacactccaatatgtccaaaaatcatgttttggtgctttttgagctttttcattccggtcaaaaacatcgcacccgtgtgggccaatatatgccaatattggcattaattgacaaaacttcgccgcgcgaatcaagaagtgtgtttttgccacgaacgcacaaaatacactccaatatgtccaaaaatcatgttttggtgctttttgagctgtttcattccggtcaaaaacatcgcacccgtgtgggccaatatatgccaatattggcattaattgacaaaacttcgccgcgcgaatcaagaagtgtgtttttgccacgaacgcacccaatacactccaatatgtccaaaaatcatgttttggtgctttttgaaccttttctttccggtcaaaaacatcgcacccgtgtggggcaatat

SEQ ID NO: 45248 - DNA, 1054 bp, Oryza sativa
tgccctttttgcttacgtttttttttcgctgggaggttttgcttacttaatttaagtgcctgctagtttctttttgctagtccagctagccactgcatacttaaattttatatctgccactgtcagctccaattatttgtcgttgtttttcaaacaacagtctgcatgcatttcggcatcaatagaggaccatcactgtgtagctcgatcattgtagctcatgaaattgatgtctcttccgtaaaggcgtcttcacttttttctcttaccatgcatatcatgcatcaaggctaaaaaggaattcaaccttttccattttgctttgcttagtactacagtaccatgtagggctcctcgcatgcatgacaagaaatgcagcaagattgtggtgttgagtttgaatactcaatgggagcagtatatagccgatcttgatgaatttatcatcacggaatgtgtctatgtttttcttttttgaaataatcaatgttaagtgcattcagatttttcacatttttaaattagtccatgctagttttggatatatatatatatatatatatatatatatatatatatatattgatacggtattgtatcgtacgtctgtaacatgttggcatggccccacgtattatcagcctcacaatgagtgatagtatatcatataatagaaatcaataatactacaatgagtgatacaggctcacaaataagtagtactaagaaagttttttttttgttaaaaacaaaattgaattttcatttcacgtttatggatgcaatgtatttgggcaagacaaagattagcagccttggagagttgggaaaatgttccaagaatattctctttttttttccaaaatacaaagcagcataaaatgttcaataaattttaagtggatgaaaaatagtggcaaatgtgataaactgataatacatataattccatactttttttaagaaattccatacttttcatacatactagtccgtcctttccctcttatagattactagtactacctagtactactctctctctctctcttcg

SEQ ID NO: 45249 - DNA, 978 bp, Oryza sativa
ggtcactgagacccttctactgaagtatgaaccccatgtaaattaaaatgcagatatatatgtacaaacacaggtgcaatgaaaaaaggaagttgaattcctgccggtttatagtcaaatgaactccaacattaggcaaccgaccagatcgtatgtctgacagagagtaaacacatgaagcaacagtgcatgtatccctgttcttgaatcatccgtgcaaccccaagccccagctaggattctttggcctgcatagatgggatgtgttgcgtacatggaagcaatgtagcatgtcccaaccctccatctagaatggtgtctatagcattaactacattgccatgtaaaacttttagcttatgtggcactatattaattaagtgagagagtgaagagaggaagaaactgggtctcatgcaagacacagcttcaacacgagaacctatacactagacactatcaagttttgtattgggagagaataatgtcttcataatagatgaagaataaatatgattggtagagaagagagatgatgtatttattaatggcccactttaagaaaccatgggttgaagtgtagtttctatcgtgatgtcttattaagatggcttcatacacactacttatggatactataggttgggactgccctcatggtttctttgacatatatgcatcgatcaagtcatcaagaacaagaacaaaggcgtgttctcacaggctcgcagccggccgatgaaattcagatcagagaattcaatgctatgattcacgtacggttgcaaataacaacgtgatcgattttgcaagataaaagaaaaacaacagcgtgattttacaagtatgatcggtgtggtcagattatgagattatgactactatatgcatgttaacactgttaatttatcagcacgtgaaaaagtttacccttcccctcatttcaccccagaaagcacatacaattactttgtctaa

SEQ ID NO: 45250 - DNA, 996 bp, Oryza sativa
cccgtacagatcacttagtttagtagtaattccttttgcatcatttacgcaaatccatttgatgagatcctcttggtttgtggttgcacgggtcaggagtcggttctcagcggagtaattttactccatgaagctttttccgtgttgcatttggggattttttttctcccccgactccggttggttgcaatccttttcatttttacaaagtgcaaaacactgaaataggtttttgattgcttgattatttgttcttttatgagaaggggaaaaagaagggtgagtgcactgtgccgaatctgcttccctttaggcctttaggttggatgctccagtgatgactgaattcacatcatatatcgttccaattcctgaatgcagctcctatgggatgttgcacgtttgtggagatgaagagacatctgaggagttcagttccgttgttttttattgctcaatgtttgaacctttcgttttcagttttcttcgtttgtattttgttttatcctaaaagaactattccataaaccgtcggctgaacgactgcggttgcacgattcatatcacataaccacgagtatgttggtcctaaggtttcacaaaaccacaatgttaaccaatctatcttagtactattacaaaaataaaaaaataattaacttagattactacagcatttatacaatgaaattaaagaaactaatatatttcagatataagtttataactcatgtgcatgatacatcaaacaaaaaatagttaatggtgtggttttatgaaattataaagccataatacctgtggttacgtgtaacgcaccaaaacccctatggttttgtgcaacttggaccataatacctagggttttgtgaaatttattccttttttcctactccggtggtttgcattcctttgcttcctttcggtatgctccaatgatgactgaattgacatcatatatcgttccaattcgtgaatgcagcatcctataagatg

SEQ ID NO: 45251 - DNA, 710 bp, Oryza sativa
aaatattttctatatatagtatttctatacatctaatgtttatacacccaaagtttataagtcaaaagtttacatacccgattcaaatttgaatttaaattcaaatatccgattcaaatttgaatttgaattcaaatatttttaatatatagtatttctatacatctaaagtttatacacctaaagtttatatacccaaagtttgtaagtcaaaagtttacatacccgattcaaatttaaatttgaattcaaattttttatatatagtatttctttacataaatttttctaacttttatttttttaaaaaaatattgtggcttactgtagtagggaagagaaggggaggagagggacgtacttataggggagcgggtgcgggtgatcgcgcgcattatcagtccctgtgggcggcgagagggaggcgttcgcgggcaacgctagcaacagcaaggatgtcgttggagaccaggaacgggaggagcagtacatcgacgagcttgttggttatctcatacgctacacctgatcagcaaacaaaaaataattataacgaaaacgtatagtttaatatacttaacgatttaaaaactagcaattttaaaaaaataaattactactttctaggttctaaaatgttgctatctaagacggaatgtgacctattattggacaacgagtctgtacagatgctttgcccaatttcatcg

SEQ ID NO: 45252 - DNA, 1057 bp, Oryza sativa
tcttgtgtgcatagtatagtgtcgtcgagacacagcatgcatgcatgcggactagaacacggtcggaatcagtagcatctcttcgaaaataacgcttgatcggtcggtaactgactatatttatcatttaaactagtcgtcgttgatgttaatacaatagaagattttttttaaagaaacaaactcgtataaatagataaaaacagtacgttcggaaacggtaccctttacagaaagggagctcggtcgatcgggaatttcaccccctacgcgcgcgcgggtgcccgcagcccagccgatccgatctgtggtgcgcgcatgcgttgtctggctccacgccctgaccgcccgtcacgtggacgagtgcgcgcgcgcgtgccgcacgcgcacggcgagctcgcgagctcgtcgatcacctcacctcctccggccgcgcgggcgcggcgcgcgtactgttcaccgctcgcctcgacgcagcaaaagtccacgcgcgcgcgcacgccaccacgcgctcgatcgctcgcgaggacgcgacgagcggaacacggctttcgctgcaccgatcgatcgatcgatcgcacgcattcatggcgcgcgcgatggatggatggatcggtcgcaatattggtcaaaactgcaaacggcagggctcatgtacacgcgcctaactcctgccggcgatcgatcgatgtgcgtagcgtagctacagggaatttgaaaaacaagcttgatccatcgatcgatctctgaattcaaaccctgcaaagagaatcgaatcggacactgctatgctgagctagctacctagttaggctgctttctattgaagagcaaacagtacgtcgtatacatacactcctgctgctgatcgatctcgttgcatttgattctcactgtgccactactgcatcattggatggtacattggtacactatgctcttcaagtcttcgtggccgcgcgtgaccgggtcggtctgtctgtctgtctgtctgtctgtcgacctgatggagaactagctagtctgcaatatagtagcaacaccaatgctttgctta

SEQ ID NO: 45253 - DNA, 987 bp, Oryza sativa
aagaaatttatatgcaatcaagttaatcttatgatatgaataacccattggaaattgttgctttggacgagtaaaaagggaaaataccaatgcaaggaaggtatttggactagctaaaaagaggaagatgttcactccctaactaacaatgcaaactgtagagagaaatcccaacaataatatgggagagctacatattagtatatactatattgtttacatatattcttctatgaaaagtttgttgcaaatgctccttagtgggctcccctaactgaattttatgtgctatttggtccaataccagtgattgtttctgttttttttttcttcttttataaattggtcttttttcgatcatatgtgcagtgatacatactttgaagttttcctttcttttttaggagaacaaaagtagtacggtatgaccgatgttgtcttatttttctttccattttccaaagtgataaaatggacataaagactagagattccccacttgcaaaaaaaattaaaaagaataattcagattctccacatctttgcacgctcataaactataaaaattagttagtcatcacttggtctagaatacggagcttagtctttggcgcacatgcaaccaacgtgatcccatgtttaatttcctttattttttcccatcttttcatttcccttttactttacgttttttaaactaaaccatttgtttgatggttgagcatgcaattccagcatccaattgacaaatcccatcacctaattatgcagctgctaaaacagtagaattactattatatatttgccataataatgatgcaacgacgtatcttagaagcaagattaccagcacggcaaaacactatagtactaccttcaaaaaaaaaagaattaaaagggccttacattacacacgtatccatcaaaacatgtaagtagaggttagcttccaaatcaattaatttctctgtatgtacccaaaatata

SEQ ID NO: 45254 - DNA, 775 bp, Oryza sativa
cttcttttgtttggataaagtatgacatttagccatgacttttagaagaactttctgtgatattatcaaatgatgccctcatcacagtgttccggttctccttttagggttaggacacctttgtcactggttctagcagtattgacgctgacaccttcaactctgaaaatcccaatgccatcctcagtggatgaatggcatgagcgtgccatgctggagcaaccaacattggtgccagttgctgcaacactggtcagcaggattctggaatctggaccatgtactatgttgctctgccatctaggacaaagcctagacatctgatccgaaattcgtgcattcaatcatgtgcttttgctagtttgtaaccatcggagcgtatagctgggtttggagcaaaaaaggcaaactggaataatataattgcaaacaaagtaagacctctgaaggttccctttgtttctgtcacctgctttgggctgaactagggaactgtcataaccttagaagcctacatacaaaaagcaggcttttgaacctacgagagggtcttatttggagcttagctaatgcttcaaatacccttcagaccaagtcctcgaggttttactgagctgattttcatggctactaatttactatgggatttatatactttaccaagtggcatgtttttactcttaacatcaagctgctaagattcacacaacatgcacacttctattttaatagataagagttattgataacatcttcgcttttgtttttagtacca

SEQ ID NO: 45255 - DNA, 637 bp, Oryza sativa
ccatgccattataattgggcaaagtttgagatataccatcggtatctcaatgacatgtagtatccacatgagtcaatgacatgtggatcaggatgtcatatcttaaattttacaaaattataatggcatagttccaattttcccaacaaagaatctatggatgctacgacactgacagttggggcccaatctctgctcacacatcgtcccctctccccatcccaaaccgcagctctgtcttccccaaacgacgcggaccgtataaaactccgccgcgacgccgagcacgcgcgccggctctagaagcttctagaaggcgcagctgcagcgctggctaatggcgttcgcgacctccacgctcccattcgcgccatccaacccctcgccgtcctcccgctccgccgcagcggctttctctccccgcggcggggtccacttcgccgccgctaggagcggcctcccgctcgcgtgcgccgcgccgaggcaccgagggaggcctcctccgaggaggcgccgcggagggtgcctggtggtgtgggcgtccgccgactactacgccacgctcggcgtgccgcgctccgcgagcaacaaggacatcaaggccgcctaccggaagcttgcgcgccaagtgctcgac

SEQ ID NO: 45256 - DNA, 2751 bp, Oryza sativa
ctgcagcccttcttccctgcgcctctgtgcagcgtttgcgtttctgttttttttttcttttttgattgctgtcatgtgattgtgatcctgtgggctgctagtatgtgaaattcagagcttcaggttgccgcccactgtcagactgacagtcagaaacgttgcaccgttgggcgttgacgtgcatttggaatgaaaacggccgggaaataccattttcgtaactatatttttctccgtcatcgaaaatgtaaagctggaaacaaaaaccgtatcatataactacacgaacaaaaaaaacatgctggtatcaactgggaacaggtaattgttaatgtataacatatttaattcaatgttacactatataaattattagtacaaactatgtatatatgtctattttatgtccttaaattagatatttagttagaagttaatacatcactaaactatgagctaaatagagacatgttaaaaaattataagaatatttagaaatacggttcccactagaataccataacgataacgatcagtacaacatgaaaaccatttatttccatagtttttactatcttagttaaacttttttttaaacgaaccgtagcgagatctcatactaatcaggttgaaaatcagaaacgagggtcgaccggttcggcctgggagacgcgttggcgctaggcatgcatgagatgcggcagccaggatttgtcagccgcccagccggccggcgcgcgcgatgttgccgtcggcgcggaaggcggcgcgcggccgggcatgtggcctcgcctcgcctctcccggggaggtggttgtgcgcctgtgcgtgggccgtgggcgtggctgttctgcgcgccgtcaagcacgtggcgcgcgcgcgatccatcaacaaaccagctgcttctctgctctgcttgacagtgttcctagctgtagcgcagcctgctgtggaatcctccgttttgacccgtttcttgccttgctgatgcaggacacatgcaagccaagcgtgtacattggcatgaaaaatacagatgccccccgtttgaatctgattaaaatacaaaattatatggattttgataacacgttttccaaattaataaataattgaaattcatttatcgttttacatgatgctcgtacttaatttcaatcttcgacgggtgcaaacagggccgatatagactactcaaaacacaaaaactcatgcagacatggaaaagagctactacagctcaccgtttgctctttaacttgtatgttgttgttaaaatttgaattttaaaagttagttttatagttttattttttatgacttgctttaaatcgttaacataaaaatgttactgtaaattatttgttcataaaaatcgttacagcttatgaccagctacagaagaaacgatgagtttaactcggaaccaaagattttattttaaaaagggagaaacaccccgagccaaaatttcagagatatgccaagtgtcttcgcccattcggcggcagcccgcgttacaataatcctcgagtacacaaccattattaaaatcgagcacatgctcctagcacgagatattcgttgccatccatgacttgacataaacaactaatcaaccgcttttcatttgcacatattaatccggctttttttttctccaactagtaatcaactgcaatgtgctcctcctgctatatcttaagctgctccttaagctactcgtaagtactaagtacgaaccactaatggcttggaggagaagggagagggaagctccgtatctggcgtgtcccccgcacatggcgggtctcatggacacctttgtcccgtcccactcgccgctgtcggagttcttccactcctcgattcctcatgcgccgcaccagcttcgattcgatctcttctccctccagccacacagatattccaagctgctgctgctgctatttcgcgtttgatttgattaaacaatggcttaattgatactactattattaatcattcaccttcttgagaaaattatatgcattcattctatcagactatttatagaatcaatttataatataacactctattaatttgttgccttaacaattcacatgttggagagaatattcagagaaagtagctcgtgggaagctagtttatgcttatagctgccgttcgatctttggagcatgagaccactggttatctgaagattctgaagatacaagatatatcttctacatcctcgcgctcaccactcatcggcattgataaatacgatgatgaaaagtgattttttataggctccctgaatactttactcgagttgatattccacatttccatggatcattatatctctgcgacctgatcatgcgaatgtgtgatgatatgccagctgaaaatgtcaatggtgaacaacttaaaacacggcagaatcaaaggattcttcgggaataggttgatgcttgataacattcaaagtccaagctgaagcatgtgatatatacttgacaaagcacctgggatcctgccggcatcttgcttgctataagttcaatttttctttctctcacttgtttcctttcaaggaagcggaggagaaaggtggtactctttttagctgtgattcactacaagaaaggtgatgttgtatttacgttccaatattgacaagtgaaaagtgatgtatgatccactctattacaacgataaattaaatgctattattagggactatctactctacattcctcc

SEQ ID NO: 45257 - DNA, 739 bp, Oryza sativa
cctggtattcactcttcagaattaagtttaacaattagattgtgtaatcataattgccatgtatcaacaattcaatattagttggaagttggttttactgtgatttggaaatcccatgaattgaataggcctgaagttattggccgtgtttagtttcccccctattcctaactttccatcacatcatatctcatcaaaaacttttctacacacataaacttttaattttttttacaaactcccaactttcttcaaacttctaacttttttcaagaattaaatacacccatcataaggtaggaagcgagaacaaaataaatactgtagtaagtatacgtgttatgctcacttttgtagcagtacctttttttcccttttggcacttgaaagcaaccttttcaatactaaaaagatatgcattacaaatcttcttcgattcgaattcagtacaaattttattcaactcgaaatccagcgggagcaggagcaatgatcatccttaaagttgggagaattgccgcacaccaactgacgtgtggggcctccaaaccgcaagtacacctatgctggcaatgctgcccttgcccctctcccgccaacgaatccctccactccccaaaagcaaaaacgcgcgcgaaaaatttcaactgccgcgcttctcccaccgcatcctctctccccttgagtatttacttttcaaaatacataaagaaaggaagggaagccgagtgatcacatc

SEQ ID NO: 45258 - DNA, 684 bp, Oryza sativa
cttttcttctgaacagaaaccacttgcaatgcgtatccggatgtcatacaaagtgaatggtgaggacagactggaacaaggccaagtgagcaattttcctgccggactatagtactgctcggtcagtgccattttgttgttacattattgtcgtgatagtcctctccatttgcgtaccttgttctacgtggttctttctgttttctgtctcccttggaggggttggttgatcaaaaatagttattttctcattcattcttcctatatattgtatagtagtagaaaggtacaatgtgaaatattcagattcatcaccaagataccaatgtactcatcagttcacgcctggtgtgctgtgtgcatcagtgactgaggaaaattaatgaaagaaaaatgaccagcctccctgcccgaataggaaaatttcttggacgccgttttgaatcttactcatgctgcagtacgtgacgaaattctacggcttgtgttcgtgtccgaaacagccttacgattatattgtcgtcgtggtagaaggaaacacacccacgatacgttacgtgcatcagtggcaatggttgtcgacgacggcgagcaacgagcgtgcgccgccgccgccggcgacggcgatggcggcggagacgaccatctcagcgggctacccgacgatgtcctgctcgacatact

SEQ ID NO: 45259 - DNA, 1799 bp, Oryza sativa
tcgcggatttctttgcgcgcagcgctaacctcagaataaaattacagctttggtttccttctgatctggatgttgacaacattaacaaggttagatgaaagtacataccaaattgttcaaagctctggctcaggtggtgtttggatccaaggacttaactttagtctctttatttatacactaatttagggtattaattatatactacttacaaaactaattatatactacttacaaaactaattacataaatgaaagctaatttgcgaggcaaattttttaaacctaattaatccataattagagaatgtttactgtagcatcacataggctaatcatggattaattaggctcaatagattcgtctcgcgaattagtccaagattatggattggttttattaatagtctacgtttaatatttataattagtgtccaaacatccgatgtgatagcgacttaaaagttttagtcccatctaaacagggtctcactgtggctgtaaacttatcagatcctaagtttcccatttgtctgtgctgtgcatgacagtcttgaaccaactctgagaacctcatggaggtgaactagaccctccttgttctgtactgacattagctaatgcctaatgcagaagatgtgctaagaaatcattgataaattcagaaagttgacatgcttttctgaacagctttgcacaggatgatttgcgtgtattgtcaagacatcgacagatatacaatattacttgaagtaattgacctgctgtacatacagaggaagtattgtggtatgcagataagcctgataaacatttcgggtatgcgatcttcagcgcttcttgggtatccaaaagcaactgaattgatttgaaaaggcaaatgtaaatcgatctggccatgaaacttgcgcaaaaaaagtttgatacaatttgaattctagtttggcatgtacctgatccaacgcaatgtatgaccttcggcatagcagatctagagcatctatcagatggaggatcttgttaatgatgcttgctgacaacagggactggtttggtaatggatcactagcaggattgcagtttccaccaccctcaacaatagttgtcagtaatgccaggccttcatgtctgttgaaaacgcctgaagcctcctgcaaattctggttatgaggtgcaaattgtcatgctttaggccgattttgttggtgtggccgaattttgtgtgtgataagcaagggggccgccaagaggattcagcaatgcttctcctcaaggcatgatgatcctcagagaaagaggatggccccatcggtacaaggacaatctacaatgatatatgcagagaaagggagaagggatcaaagcatctgatggaaaatggctaagatttaatgaatcagaaacagaaagatggaaatggaagaggtttataattagcatagtagtttcttgaggcagccagtgttggctaaaattaagtatccaagctaaaaagcagctaatccatgaggacatgtggttatatgtttgtgtggagggtaacccacggtaaataccaatgctttttcccaagaagtggatatggtcacacagacacatttttgtcttaagttgttcataccatgggttctgaaatctgaataatgaacagcaattccatcaagaactgacaaaaactggttatcaaaggatcttctcttatgcagcactgaatctaagaacaatcttgacctagcctggcttgggtgagtacaaaaacagagatggagcaccagttcctggttcattcgagaagaaga

SEQ ID NO: 45260 - DNA, 661 bp, Oryza sativa
atggactctagtctcctcttctaatatttcttatttttaattccgaatttcagctatttttaaattgtatttctatatggactctgtattttctttttctccgattaatgtgagaatttctaggccatgagagcgaacgtggaggctcctttttctattccttaaattatatatttaattctgaatttctattttttcctaattgtatttctatatggattatatagtctacttctaatattccttatttttaattccgaatttcagttatttcctaattgtatttctatatggagtctatactctacttctaatatttcttatttttaattccgaatttcaggtattttctaattgtatttctatatggactctagtctcctcttctaatattccttattttttaattccgaatttcagctatttgtaaattgtatttctatatggactctagtcccctcttctaatattccttatttttaattccgaatttcagctatttgtaaattgtatttctatatggactctgttttttctttttctccgattaatgtgagaatttctaggccatgagagcgaacgtggaggctcctttttctattcctttaattatataatagataatactttaccactatttaccgataaatattagcacact

SEQ ID NO: 45261 - DNA, 739 bp, Oryza sativa
tttccttgctaatagaatagcacttcatatggtcatttttcacttgttgtatctatttatgttgaagatgatctatcctgatgagatgatgttaaagcaccgcctgacttcagctagtgagagcacaattgtgccaggttagagaacataaactatttccaataaccaatagtagtttcagattgcatttttggtgaacatttttttacattgactgaccttccctttgcttcttcaataggaaccgatgagaagtcggttaggcagaacacatacatgatgaatgctgatcgttttgatagatatgcactcagcaaagaccagttgcagcacattatgccgaaaaacacagaaagtgtacttgatatgccacacttgcaaaggtaaaagcttcttttgccacttatttatagtataatgaaagtaggctccattttccttatagataggattatttctttatagtacaccataatactttcctgtgatcataagcatattttaaggaaactggatttggatggcctaaagattagcgtgcgcctattttatcttgttttttcattaacatgtttagtaataaatgaatgtcccatagcagcaaggtttcttggtctgactatcttattctgagaaatagagaaaggaccctaaaattcaagctgtaggtagattaaacagcaagaactaacataattttgcaaattagactatgcaactgcaattattagactatgca

SEQ ID NO: 45262 - DNA, 679 bp, Oryza sativa
ttctagtttcaaatgattcttggaatgcctgtgcaccattttgccgtttgtcatactagtagctcattattagtagtacgagaaaggttcagttgaagagttgggtgaatgcgctctctctctctacaccatagagccgttcatgttctgtaacctctagcaattctgagttttgacaaatgctgtgcaaatctatgtcctacttttgaaggatccagtattgtatgtttgttgcttaaaattttacatgggttttggcaaaaaaaaaatgcacggtttgatttgacgaaatggtgtacaaattccagcacatctcgttggtagtggtaaggactagagacgcatatgcgttcgctcggttctggataacgtgcacagaacgcgagctctcggtggttggttgagctgcgcgggagagcggcggtcgatggcgattgcctgcgcgctctcggtggccgccccgtccctaaccggcaagaccaactcaaacccgccgccacgccgcagcttccagcagcagtggcgcgagcgccgccgccgtggcgtggccgctcgcttctccggtaaatccgccgacgtcgacgcggaggcggactcggggcgaatcgaggtcagcgatactgatacatagatagactgctcgcacacgctctccaccattcctcaccttttctcagtt

SEQ ID NO: 45263 - DNA, 612 bp, Oryza sativa
agtttgcatacttcaaaagaataagttggggaaaataacatgcgccttactgcagttgatattatagtaaatcaggttaactcaaatatatttcactatatgttttatacacttttagctaaatttctacaaaccttagttccatttataaagcattgtagttaactaatgaaaaatcaggtaagaaaattacttttcaggacttgcaggtgggctccttggtatatctagaagatgcctcagaaaagtttttagcatgtcctggaaagatggtcttcttgaaggtttgaactgcaaacagtcaccaatcatcttccagagctccccaggaagtcctacaccgactacccttgaatattgaggcggtggcttcctctcttttacaacagacttacaaatttcctctgcacttagcccagcccatctgcatttcaattagcatctaaccacaccattcgaggagcattaagaaacacaaatgaaataatcaggctacttacggaacagcaccagtacacatttccacaagtgtacatccaaaactccatgcatctgactctggtaatattccatttgcactatcccaaaacagattcattgacttcttcaatg

SEQ ID NO: 45264 - DNA, 2372 bp, Oryza sativa
ccattcaccaaacattgataggtgggcccctatgaccaacaatgtgtgaagaacctattccttgcatgcttgcatggattgagtaggggtgcatggcaagccaccgccacacgctacttgtatcgagccctactcgggctacccgaggccacgatggattgagctaggtatcgtggtgagttctcaccatatcccgttcatggtggaccccgccaaggcatacccaagggcagcggggtgggcaatgagaggagatcctggcaagacttaccatatttgatcccgatacgaacaatatatttcctttagtaaagaaaaacaatatctttcctcgagctttgatcatcaggtgttccctggtgaagatatatggggagaaccaggacaagcgaggagggttggaagtgagagaaaagagactttatcatattttgtgtggttcttaggaaatccagaagagaggaagcataactattttgagtaatcaatagacttgtaagatcctcataacagataggggtaatcctacaaataataagaatagggtattgtacctccgagcttgtatacatcctaatgaactcatcggttctttcgtttctatattgtttacacgtgactagcctccccagccaaattcacataagggggttttgtcggatttttgctatctaatcatcaatatagttgagtactctctagaaacaataagtatgactgaagtggaatggaattattaattctaaaggtgaaatggaaaattttgctttgggatccgtgtagtgacaagtatttgcaaataacttttgtggtaagcaattataagtaaatgagaacagaagtagtataaacctaaataagcagtagacaatttaaatttcagaacttaattttatagccggtttatagtattttgttgtttttgctgttcaaccttatttgtagatcgctacagtaaacctagtataaaacttcattgttacagttacatgttttcgtctcatatggtgtattttggcatgctttcttatcgaacatgcatgtgcatggactagttttaaaatgacctagtagcccaagctagattatgggctctaatatgcatataaaagtttaaggatagtcggtatagtttactcatccgaatataagatacggtaaagctaagccacaaacaagatatttttatttttattgtactagaaaaatatctgtgcgttacaataggtggagacaattttcacgattgatggtagcgcccacacacttaggctgtgttcggcaccggatgttcccaactcctcttcctcgtgttccgtgcgcacgctttttaaactgctaaatgatgcattttttttgcaaaaagtttatatacagaagttgcttaaaaaatcatattgatccatttttgaaaaaaggctactaatacttaattaatcacgcgctaatagaccgctccgttttacgtgcgtgcgagatgggttcccaacccatagaaccgaacacaaccttagtagtacgttttttttacattttttttctcaagtttgaaaatactatacctggctttactcctatacttacaataactacggtccccatcggttggtctagtcttattataagccataacggcttattagagcaggtacaatagcagactataagctagctataaacatattttaaaaatataaaagaagagagataagggaagcgggctacagatctgtagccagctgcaacacggactccaagacgtaatatgtgtatgacaggtgggactaagtattaatagtgtagtaagcagctattgtatgaattgtctattacattggctatagaagatttggagctagtagttagctatactattaagcttgctcttaacgattaagaaataatatgcgagtaaaagttttatatattgttcttaccgattgaaaagccaaagttgaaaaaaactatgttaaaatagaatcaaaatcaaattcaaaatcaagttttaaaatttaaattttggctttagcttataagccgtagggcaaaggatgaggccatacattggaaaaaataattatcaaaacaacatcttgcctatttgaccattatacctatctaaccaacaaagagaatcatatcactccgtggaccaaacgatcggtaaaaaaaaaagttagcatatcactgaaactacatatagcgtgtacgggcacgttgcggggaagcacatctaggacaagcaagctccaaaccggtctatccgtcagctcagccctttcttgatcggtgtggcaagttagctcgccaaaaaaaagaaaataaaaagagaacataacaaagttgcttttaggtattcattcacactaacc

SEQ ID NO: 45265 - DNA, 985 bp, Oryza sativa
cagaaatgcggcagaatggcggtcgcctaacgttggagcagatcctcaggtgtggcattgcatctaaacatggatactaagttttatttgcgtggttatatttgctgcagtcatgtatggttatagttgctgctatcaaactatcgatcgccgaaaatgataaccctaaaaatacagttgagctggggcgctatacgacagtttgtccgctaactgtatgtgttcaaatgcatggggtttcaatggtggttcgctaagctgcatgtctagctagaaggatcataaaaggtggaaaatgttgtagtttgagtactgacgtggaaagcggtttttgcgattagtagtgccaaatttgatctcaatgagtttgtagtatttgtacgtgttcggcaatgtttgggtgattgtcggcagctttgttattccatctgtcctgcatcttttgttgtgttgtgacatagtgcttaggtctattattaacaattatcacacttagtgcttggaggaatgaaagatcactctttgtactacgattaaaattcaagccaggctgctcaggaagtcagtgtccagtgaataacatagttttgttttgcaattggtttgttgatttaacacacatcaatcattctacatgtggagcttgagttctctttaatttgtgaacaaaatgatcacttgtatgtgctatgaatttgtactatacaatgtgcaatcgtttattcccaaaattataattcctagaatattgtgaggttcgtgacggcgacgaatgaaatgccaacactttctggttcatatctgtaatatttggcaccctggacatttctccataaaagatataactcatatggctgttagaatggagggattggagcaaagatggttgttcactgctgcattaattctgttcctctcaactcaaactttagtttccaaagatctgttgaatacttctgtgcagtggaatagtgtgggccactca

SEQ ID NO: 45266 - DNA, 1629 bp, Oryza sativa
ttagttgcttttcctttttctcagtgaaacttctttagatcttaatcaagtttatagaaaaaaaaatagcgacatttacaatatcaaaatagtttcattaaatattacattgaatatattattgataatgtgtttgttttatggtgaaattgctatttcttttatatacctagtcaaattttaaatggtttgattaaaaaaaaatcaaagtaccttataatatgaaaaggggttcccctagtgcacatgtaattttatccatacttaaaacatattgttttaaacatatttttttcaatcaaattagatactcaaacttaaactgtatcattttatatattaagattgaatgtgctcatctttacccaaagtaacctcgtactcttataatatttctgggttttataactatactactggcatcggtgtgcattaggtaggtgtcatcaagatgagatgagatggacaatatgacttaattgacatgaagagaatttatgttcaaatcataattgacatgaggagaagtaatacaaaatgtaaatattactatgagatatttgggtaagaatcgaacaacaaacctcatccatatgatcagataactgcatgtatacaacagtcagtattaggtgcattaacactattactccctcaattccaacagtcactatgtttattattattataacacatctctctcgactaaattaattgttattattttaaatctttcatgctcaagatctctgattctattgggtatatgcattatattttttgattgatccacataagaagaaagtgataataattgtttccaaatgaatataatttgttccaatcttatggattaagggtgtaccttataatttgtaacagatggaatatgatatgatagttagttctctccccgtccttatatttttttatatggtctttagtggcatacagggtggatctagcatgagggcgacggggtctcgagcctccactactgacgtgagaactatagaaacccccacgaatcctccactaaaattttttactataaatagatggggagaggctatagcttcgtttagtttattcagtccctcatgttatttctttatccatcacgtgtggtctactttgaccattaatatatttcatattatgtgcccaatggatatgtaattagcataactcgaaagtacttcaaaatataaaacgagtgttataacgtgcataatatttagtataatttggttagtatgattattagtcaaaaggtaccaagtttaattttccttaaaacgataatttgggacggagggagtatcattatactctttatattatataaatataaataaataacatcactattgctttctaaataagctacgatgagagcataaaaacgctttcgacagtatcaattcctaccaaaaatgaaccgcaaaaaaattccataaaaaagagagccattccttatcggaatcagaacccccactacaggattcgcgctccgcacgggcgggcagcagcaggcaggctcgctcgagaccgatcgacacgataacgacacacggccacagtgcaccaccgcccggccgcacccgatccctcccctcctcggactcc

SEQ ID NO: 45267 - DNA, 1200 bp, Oryza sativa
ctagtccaactgataggtcagagcaagatgctgcacttgatatgctatgggctgatttagacttcactttagagtcagagaacattgggacttattatgatgatgaggtacttttgctgcatgaatttatctgacattgctgacgtcctattattttccttaatggggttgatttgattatggaacatggcaaccctatctatattacatgattgttgcacttatctttgcagagaaaataagctgggtatagacataggttcttgttaatcattcatcaccattgctgcccaatttgttacattctattttaccactatttgtggtaccaatatttgggaacagcagtcttaacttggcgcagccaattctaagtagtgtatgtatgcgtattttgtgccactaccatattgcactctttaacaatgaacatatatttatttgtttggagaataaatattcctttatgttatctctgtataacagcagaacaccttttgatggttgacaacaggagattctggtcaattttaactatattatattatgtaattctccaaaattttccagtgtgacaaatttgatgctttcatttttttggtgtcatctagtcaaggctaccatgttgaaatgattagcttctgttgttttgtagggccaagaggacagtctgctagatcatgcacttgctcctattacaccttgttctagagggaagcatgaatttattattgatgagcaaataggaatcagatgcaaatactgctccttggtaaatctggaaatcagatttattttaccattgctggtgagtttagtatctctcaaaacttctggcttgcttcccacaacataagttgatcaattccattatttatcttgttcttccattccaggcctccaattttgcagagaaacctgcatggcgaaacagctcttgtttgaagactgcgttgatgtgtcctgatctttatgaacaaacagggactggtgatggacaatctcaagatttccatataaatggaactgtgtgggatctcattcctggcgtcattactgatatgtatcagcatcaacgtgaggcatttgagtttatgtggacaaatctagtgggtgatattaggcttaatgaaataaagcatggggctaagcctgatgttgttggaggatgtgtgatctgtcatgccccagggacaggaa

SEQ ID NO: 45268 - DNA, 2586 bp, Oryza sativa
ttaatctgcacaagatttccgagaatgcctttgatcgacggttcgacgcacaacacaaagtcagacgttcaactgatggctctagctctgcatgtgcacaagtccttttctctctcctaatatattagcgtacaatctttttgcgtgtccgagaaaaagagtcattttctctttccgcatctccttgcatgcaactagcatctattaggctccatgtagcacgaggtttttgttgtaagcgttaaatgatttttcctcgaaatttttttatctgatttgtgatccggagaagataggtgctggtgcaccgcttgtcggagagaggccaaaggagatagaagaaaaaaaaggaaaaggaaaaaaataaaactgtgtcatgtgatcgttgccacgtaagttagaccacggtcaaacaaagctttggattgggatgatgcaataaaccaagtttaggtaactcgatgcatgctttgcaagtttgtggatctaggtaaaaaaaacatgcttataagtttaagaatcgctggtgcaatttactcgtgtatttatttggtgtactgttcttctatgagcctactcaaagtaagagaactttgacttagcacaaaactaaaatagttaaataccttacattttcaagcagagggagtagattgttgtatctttttccatcgcatcttttaagaatttttccacctcccttatacaaaaatgcatatggataccctgctggctgcagcagctaatctttcaggcttacctaatgcaagataaccagtaaatggatggtttgtgtagtgaccacttcaaattcttaagcataccagcataatgcccgtgacactgcaacggatttgttttttaaaaaactatttattatatattattttaaagcctctaaaatatgttattcctattgtccaatatatcatagagcgatgagaaattccacaataagaatatttcgatatttttcttttgtctgggtcttgtttgtatggaaagtaaatctgtaaaatcttctctcacttttcgcaggtctcttttaaaatagtatagatattctgttgaattatgagatgtttttggtaaaagtatgtgccaatgcaaaaggccggtgtgtcacttgacaacagacaacactacattcattaagggcgtttacattgtgtcgaggtggcattcagcattttggcctcattgttcccccaacaaatattatgtgccacgtttgcttctggcacacatatctgaagttcgtgtatccaactttggtcacttgttcttcagtctaatcctgaatgagtgcatggggcgagagcatcgtgagcgcactctggaggtcatggcccggttcctccactgcacagcctgcacatgtgtatttttgcctttttccttgggtcacggcatggggattgggcacagtgtgaatggcttaaggccttgcacagtgcaaggacatggcgtgtggattcgtctacgtggaggaaaaagtaggtggggccatagctttggtttgttgttcgcttctcgctagagtaatgagtgctttctttgcacaagcctggtgcaaggcccacttggtgaggagcagccgaggaaagtgggagagagaatgcgaaagtagcggtggttgggttggggtggttggctcggggatgttggggtggttggctcggggatcccgtgaaagtagtttgcactgtgagagaagtggattctgtgtatttatcctacatggcatctaagataactcaaatgaggggcttgcactgctactggcatagagttcagctagcattcctttggcgaatgtaaaatggagaaattaccaggagtaactactttgcaagagctacacctttttgagcttataaaaataatttatggttgaggatagaaggttggttgaggagtataatacgcagaaatttgaactggatgtgattgatgggataaatagtacttgagagagtgacaagtattatgaaatacattttgaatggtagaaagacaactaatttaggacggagatgtattaagtaagagaaagtagtacatctttagcttcaaaagatatcctgggcacaataaacaaattagtactatatccatcccgttttaagtgtagttgtgggtttccgtatccaacaatgttgatcgtccgtcttatttaaaaatttatgaaaaaacattaaaaaattagtcacgcataaattactatttatgttttatcatctaataataataaaaatactaatcataaaaaaattttaaataagacggacgatcaaaccttgtgcataatcagttccaaattgtactagggcgttctctataatttttatcgtttctgatactgacggtgtggagtagtactggtatgttttctgtatctttttagtcatggttgtatctgttgattactactctgtcaaaaaaaaaaaaaaagataactcttagctattgaattatttttggacggaggggtacttgtttttgaatgactaacaatccttgcttgtcttgcgagaagagaaatccattatatttattctctccatccctaaatataagggattt

SEQ ID NO: 45269 - DNA, 2456 bp, Oryza sativa
acattgcagatgcaatccacaccgaggatggatggatcggttgatctgatacgtattgactccgctgcttgtcggtgaaacgcggcgtgcacacacgtggttcttcggtcgggatggccaataagggcctatttagtcccctgaataaaatttttcacgctatcacattaaatatttggacacacgtatagaatattaaatatagataaaataaccaattacacattttgtcacgaaattgcgagagaccaattacacagttcgtcctgaaattgtgagacggatcttttaaacctaattgcgccatgatttgacaaatgataatgtggtgctacaataaatatttactaatgatggattaattaggcttaataaatttgtatcgtagtttcctgacggaatatgtaatttattttattattagattacatttaatactttaaatatatgttcgtatatccgatataacattttgccaactaaacaggccctaaatatagccttttttctgcttttgtgtacttccagtactttcttcctagctacctctagaaataagtacttccccgataaactaatttcacatgatttttttatgccatgagtcttcactgatcaattgaaacttctatatgtttttgttataggaataattttaaatattacattttagtaccaatgctaccaaaatttgataaagtttaaaacattagcttccatttcttacctaatagaatttggcattatcaaatttgtagtactgttgatttggataacaaattaaaatagccttaaaatattcagcccgaggaaaggacaaaaacataaggactcctcatcgatagtattataatatcaatattataagtaaaagtgatcttaacaattaatttatgaattttactaatatcgtattgtactataatagttaagatagtagtataaatatatataatctattagattataaaatatgaacgaataagcaaaacatcagcagttccacattatttgtatatatacaccgaattcgacaaatatatacgatgcgagaggcacctaatctgattgaatgcgtggtacattgaacgcagggatttggtgctggagcttttcagggcaccatccaaacacaaggatattgcgggagattgtgattctgttattattgctggtcatgaacagttgaaaaatgtgaatatatagcggcagaaagctgcgagcaacttcctaaagtcttttctctaatcatgcatgcgtcctcttggtcagctcatgttctctacataggcctagtttaggcctgtttagttcccaaaaatttttcccaaaaacatcacatcgaatctttggacatatgcatgaagcattaaatatagataaatgaaaaaactaattgcacagttagggaggaaatcgcgagacgaatattttgagtctaattagtccatgattagccataagtgctacagtaaccacatgtgctaatggcggattaattagactcaaaagatttgtctcgcggtttccaggcgagttatgaaattagttttttcatttgtgtccgaaaacccttccgacatccgatcaaacatccaatgtgacatccaaaaattttcttttcgcgaactaaaccagttcccaactttttctttaaactcctaaccttttcatcacatcaaaacttttctacatacacaaactttcaacttttccgacacatcgttccaatttcaatcaaacttccaattttagcgtgaactaaacacacccatatataagcagagcaacaagtgtgagaatgctactggtagcagtgtacgtaatgtggtcgggctgtacgttttttgtaggcacaattaagacggtgacgctgcaatgctgtgatgagtgtagacatggtggactaattgtcggatcttgtacgaactggtgccccagactttgtgttaaacgaaaaattacagacgataaatatttccgttacgatatttggttggtcttttgacactaggtaagttggagctgtacgcatgtaccaaacaagccctacatatgctatatggatgccaaattcctatagtgaattgagtgtgtagctatgttactcagtgttttataaaaatgtaatactacctctctactaaaaattaataagtttatatttaggctacttttgtactaaataagatcatttatatcctagtacgtacccttaccgtaaatcgatgagttttatttcttcaatatttcttacctattccctccttcccataataaatttatttttggctcatctcatttgttgcaaaataactactctagattcatccacatgacttggttttttatgggtcagaggaagtacatttttgagtaatcaccgcgttgaggttgtgaaagtataaaataattgtattgaaagtataaaataattgtattttaacttttaagta

SEQ ID NO: 45270 - DNA, 775 bp, Oryza sativa
agagtttagtagtcgccgtgtgttatgggtaaaagcatttaacttgatacaatgaactagttgtccagttgatatatgaacttttaaatttttattttgaagatgggttgtattttttcttttaaagattggcttcaaagttcaaatctaggaaggcctttgtactgaagtttcaaaggcctgttttgatcattataaatttttattattattatcaaagaccactgcagtacaatttaggtgccatgacggaataatttttgcattaatgtaggcctacctcacttaaactctgaatcttagttgcatgactgattgatcagtgatcatcttagcatcacaaagattgagtgaaaaaaatgttttagaattatttcagttttcagcaaagctcataatctatatagtgaagattactactagataccaacagtatccaatgtcttgttttgctgtaatatttgatcaaaatttccaaacaactacttactatagtttcttctagacatatgctacctatgacaagaatgacctatgctaccctttccttttttagcaccaatctaatggttcttaaaagcaattcgcaactgtaacatttattgatatttctttttcggcatcctagggatcgaaacactggtatctgggatgaagtatcaatatccgtaactggggtgagtttttccacccctgcattcttttatgagtatttttatacttactttatttgcatgaattccttgattgttgattatatgagtttttttgttgt

SEQ ID NO: 45271 - DNA, 1810 bp, Oryza sativa
ttcctgcagccctacctagcttcataaaatcttggatccgcagttgtgccaaacaaacacttgagaaatcttaagatactgaggctgtaagacggccgtgatgacaggggaagaacgttaataatcacaatctggatcagctgaccactgtcttgtgcagtagggtagaaatgatggaaacagctgtgacatgacacctctaaacttgctttgttacccgtaattagcagtattattgatttataatcctataatttctttttaatcatctgcagagatgttcatcttaggggccgtttggaacagttcggagacagtaattttacaggaaacagttcaattctcgtaggatttatgaaaaaaaaaatctgcatttcaaaaggaccttaactggtcattagtgcctttttcgaaatttatctctctccactcagcaaacaatgatattttgaatgttgtactgtgttttggcgaatagacgctcaatctcacaggatcctaatgcaaacaggacaatgacatatgcattgtgtttcaacaaacaatctacaaagtccaaactagatatgcagtagcaaggttttcttttttataaaaatgtgcaatggtattgagaaagctatcgatgttattggtgtggtggtgaagttgtgcattagtgtggtggtgaagtcgcatgactatacttacaaaggatcaaatctttgtgctcataggtattacgcatatgtaggtgcaattttaatagatttttagtgattatagggatcggttgctagtctatgtttctttaagcatgtgaagcacactcattggcatatgagtgcgcatcttccattaaattttatatattaagaatatacagacatgtactccctccaacttaaataacttcatttttcaccatcttatttgtttcaaaatattttttttcaaacaattattgcattagagtttgtaaaaattggggacaaaagcattgaggttagataaagtggaggtggacatttataaaatgagtatttctttttttttgtattggtaaggtgtaggatgggtgaaaaatgaagttatttttgggaccttttaagcggtgtgtgcatgtgtgtcttctatttaatcaatataaaaatatgtaatggttctgtctgcattaggattattttatatatagggtagctgttaacacattgatctaatggttaatgcttggaggcaaggtagattttttaaaagcttatttctttcatcggggtaacatctgcattctgaaatcgacgaagtaggtgacgttcagtacgtaggccttgtatggtttgggaaaatttttgggtttgtagtcacattggatattcggtacacatttaaaatattaaacgtagtctaataataaaacaaattataaattctgtcaggatacaagacgaatttattaagcctaattaatctgttattagcaaatgtttactgtagcgcaacatcaaatttcttgattaaggctgtgtatggttccctttaaactttcaactttttcgtcacatcaaatgtttagacacatgcatggagcattaaatgtggacgaaaaaaaatcaattgcacagtttgcatgtaaattgtgagacgaatcttttgaacctaattacaccatgatttgacaatatggtgctatagtaaacatttgctaatgacggattaattaggcttaatagattcgtcttgcagtttacaggtaaaatttataatttgttttgttattagtctacgttgtccgtatacgataaagaaaatttggacggggaactatacacgc

SEQ ID NO: 45272 - DNA, 698 bp, Oryza sativa
attatggcgacacatgttacactatgaattttttagcaacttgatcctctctgcaattcgtgtaggagcagcgttaaactggctagctaactaaagctactcaaaaagactcaattcttgggttccagtgtccaacgtttgactgtccgtcttatatgaaatttttttatgattagtatttttcattattgttagataataaaacatgaataatactttatgcatgacttatctttttaaatttttttataattttttaaataagatagacggtcaattgttagacacggaaacccacaaattgagtttttttttgggacggggggagtagctaggtaggcagttatttatatatttatataattttacacggtagttacaacacacttacacatcagttacgtatgtaaactcgacttacacatcacttacatatgtaattagtatgtaattttgggatttacatatgtaattttaggacttacatatgtaattttgggagttacattgtaaatataataaaattacatatgtaattttgggacttacaatggaaatatatgccaactattttttggtgaaaaatatagcgccataaatatagctactccctcttaaaaaaataagcttaggaaatagcttaaaataagtggtttaaacaatagtataatagaagaaagttttcttaaaaaaagttt

SEQ ID NO: 45273 - DNA, 901 bp, Oryza sativa
gttcttatgttcattagctttagcgacacggaaaatgttgaaaatacttgagttggggatatggggaatgcatgcatgcaggcagcaggttgtgtaccggcaaagtgccaaaccattaaagtttgcaccattaattgggggcaacacagctcacaacctaaccatatgccacgagccggtgtaagcgggattgggagccttcagtcatgaacgagccatatttttttttcttttcttacaaacaaagaaaaccacttggagatagggttaattagtcgtcaaacgtatgtacgacttgtagagctagctggaaacatttgatagttttagttgataccctaatgttatggaatgtagcagcatgtgcataggagtatataatactgtcacattgctacgacggttgttgtatgtactaattattaacaagccatgtgaaaaatacactaaactaattgacatcgacgcttatttgtattaatttcttgagaatctattgggtgatctttaataaattttaccgcgtttagacaagtctgcaggaaaatgtgtgttattacgcgcgtcgacttcacttgattggttttgaacccctgcagcttaggcaagtctacagcttgagattggagcaagaaacggtcagttcattaaataattatcaccgctaattggtcccatggcatgtcaatttcgcggctaatcccatcgtgaacaatcgttcaattcgtcaattagagtacgtcactgcatacctgaactgaaagaaagttgggcatgtgaacagtcaagtcgtcatagggaagaaaaatactgaaagtaccacgcgagacaaattcaaaggatactatggttgtattttgctatgtgatcgaattatcaacacactgcacggacgatcgat

SEQ ID NO: 45274 - DNA, 2087 bp, Oryza sativa
  unsure (1)..(2087): unsure at all n locations
ttcctgcatttcaaaatattgatatttaaaatttatctagaacatagatacttatccacctttttttatctcaacccactgtaaccacaatttcatatgattttttcacctatctccacatatctgctaatcatagttacgactcatttaatttcactcatttcttaaatctcgtaaagaactcagaaatatttatattttactgtctatgccttaaaattttacaacttctagagtttaaattttgctaaaaaaattaaaaacttactacttataaaatatgacttttatcactaaactaccatatactcctacaatcctttggctttattatggtcctaataagtcagggcggcataancttactccaacttcgagaaagacaantcaagttccttttagagcacatccaagagatgtacaaatctcctctctgaatctctttttagataatcattaaatttaaggattaaatatattcttccttttaatatatatatatatatatagcctatatttaacactaaaataaacatatgggcctccctccatatttttgtcatctggctcagcgatcacccatctaggaccccctccacccttgtcactttttcagacgacaatctcgagatgggaattttgagcaataatgatttccaacttgtgaagagcaaaaataaaggaaaagaaatacctttttttttaggaagagtctgtttggccgaactttagctctatcttcacctctcttatagttagatctcagtcaaacagtctgacttagctttacctaaaaaaggagtggagctgactggatgttttcacgaaatgaactagagaggggaatgtgagttatggttgtttcacaactctactccgaatctaactcttggagttaaatttagaagttagagctgtgctaaataggttcgaagaggaaaactattgaagcagttttttcaactaataatatctttaaaatatcaggattgaaaatggaataaggacattgttgatgatgctcttatccttctccttaatgcttatgcgaaaggctaatatttactcccaccgtttcaaaataattgtcgttttaggattcaaattctttcaacaaaagcttatcactttagagtaacttttgtcacatcagtcaactcctatttaaaattttctccattctacccataactattctcttactcccaacctcataagagatactatagttatttttgcttaaccttagttttttttttctaaataatctagaatgacaactatcatgggacggagagagtactttaaaaatatattttaaaagtgtgaaccgcctcattttaagtgcacttgtggctttcaatggcaatgtttgattgtccatctatttaaaaattttttatgatcagtatttttattattattagatgaaaagatatgaataatattttatggtgatttattttttaaaatatctcttataaattttttaaataagatggacagttaaatgttggacacgaatgccttaaaatgggaatgtgtagatcgcgagcacgtgatttcctcaaagaatttccaatgcaatatctctattgccaacaaacatcattcgtttagaattattccaagggaaattcaaccccaattttcctcgagttatcttgcacagtttctgcattttcagtggctgtctcctgcctgtcttccctaccctacaggctacacgaccgacactgcggatttcggacgcagcggaaaagacagtgatttatcgtcagattccgtggtaaaccgcgccatcttgccgttcacgtccccactcaactcgcacaccctctcctctactactcctacacctgtcagctgcacggagcacgcagcagccacgctgtccgagccaaagacaagccgcggccgccacgtgctgctcgcgcctcggtatccgcgacggtaaaacacggaaatggacaaaataaacgtcctgtctccaagtgggcctccctctcgcgcctttacttttccctggtcacttttgacactttctgcatcacaatgtgtgcgctgcactgtactggagtacttct

SEQ ID NO: 45275 - DNA, 1083 bp, Oryza sativa
aactgcggaatggtcccgtcaatggcgtctgctcttcccacccatattgaccaaactgatcagtgatcactcgatggctttacccaaacgaggaccaacaaacggggtgcagcagctagctactactcgctctttcatttggccagccagccagccagcaagctccacgctagccacgcctttgcgtgcgtgcccggctagctcagctagctagcctccggcgacgaccaacaaccatcgtgaacctaaagctaccaccaacttgcacgacgatggctgggtccatggcacttgatccaactgctctccagggctttctctgctccattgcactgtacatcacattgtaccgcctgaccaggctagatctgggcgtgacagcttgatcaaagttgcttcacatcgcagcctctccggccatggaaactgatctggtggtagctaggctggttactggtatactttagtggtttggtgtactacgatcgtagtctttgtacacaattcctaaagaccttcctgctcccctcaaatgtttctgtccaattcttgaaggctgggacttgtaacgaaccttaaagttcaggaggagcataaaaaaaatctgataaatatacctaagtacattgttttttttctttttatgtcaactctagtttctttctaggatggtagtaattcactcagcacactacaaaccaaccaaatgtgttttactgtctcgactagtttgtactatttcattttcagtatgcaccaatggccgaccaatcatgtgcctaagaatagcactagcatgaatctcgcgagcaatgaagattcggcaaccagctgaatatcaacgtggaaaagactaatgggacttacctcatactagtactttgataccttcatggttatcaatgcatatcaggctaacactaattaagcaagcgaaagggaaacattgagatccaaacagaaaacctacggatataaactgtgcaatccattatctaaaaaaaaaactgtgcaatcatttttataccctaaaatgtgtccaccaaactgtaccgactcaaacccaccgacaccctggccata

SEQ ID NO: 45276 - DNA, 976 bp, Oryza sativa
tatgggcatgtatatttaacacaatcaaaagctctctctacaacgtgaaattacattgcagtggccaatgggtaactaaaagttctctctacaatagtggacagtgggacgattattgtgattttcattgtcatagcggatagcggacatatttcaatagtgcgaaaaaaatactagtcaaaatataagtaaattgtttgtgtatattaatttatgtgagatcaatttagttttgaaattataatttgtagctaatttagtcagaaggtatcatttatacaacttattagtcgtataaccaagcctaaaaagttaaataaaaacattttataacatgtaaaatagctcttgccacaatagcagccgctagcccactattttaacactcataatgtttccgtcactattttagcaacaacatcatcctaatagtaagaacatcccactgatggtttattgctattgtggctgcaatagtggtcattatcactgctacttagtactcccgcgtgggacttaattgccgccactaccaggcactatttttatctccatttacacatatcatagtttaaacatacaaatttaaatcacctagcgcttacaaaacattacatgttatgaacactcccaagaggacacaacggggacatggataaagtggacttaatgtttgatgtgcttcagttcttgggaactcaaaatatgctatatattgagataaattaaaggggaaaatacattatattttgggacggaggaaataccatagtaatatatagtacggattgagatcctctaacgtgaaatcagagtaacatgatcactaacatgcaaactccatcacccatgggctcatatataagtgataaagggatatgtaatgttagtgggtcccctttcatagtacttttttgttagataagaggaatgccacgttgcacaaatgtttcgtagcaatcaaacacaaatgtca

SEQ ID NO: 45277 - DNA, 4201 bp, Oryza sativa
caaccataggcattgcaacatcactcacggcctcatcaggataattaagctccatgcttccaccatcttcttatagctcttaatccacttgaagaatgtacaacaatttggcacctacaaaattgcatacagaccaatttcaaaccaaaaacaaaaacaaatcaaatgcacaaaataaatcaaagactcacaaattgttcgttatcctcgcatttgaagaaaacgcgtccccctgcctccaagatctgcactccactactgcacttccacaacgagggcaacgaacaagggtgaggccactgggacctataggataccgagttgccccaataagaccaggtaatgaggagctaccttcttcacttgccactccaaatcttcgctgcatggctctagggttaggatttcctcccagctgggaacggcgggcttcggccatacgggcggaggcggaaaggaaacctccacagcacagcgacaacgatggctcgagaagaactcgctggcgccgacgacggtgcttcagcacagcggcggcctccatcggcgaggactgcgacgcggtgaggacgggaggatgaatgggctgcaccgcaccatttcaactcggttaaaccgaccgcaagggcatttcagtcagctcatctgggaaaaaatgtcaaaatccaatgaaatggtgaatatgacactgcagcgggctggcaatgcttggggatggttttttagcgaatcgattcggcggagtggcattccagcgaaaccacttattgggaatagcagaatgtccaaaacctcctcaggtggtgttcttttttcctgaatatgaggatgaagatgaagattaagtttttttacgtaaaacgaggtggtattaacgtatgattgattgagttttaattattaaaaacttaaaaaatagattaatatgatattttagagcaatttttatatagaaagtttttgcacaaaacacaccatttaatattttgaaaaacgtgccataaaaatcttaatcttcatccaacttttgttgtagaaaagaactgggcctcagtgcgtttgacccctttggcatggcatcgccgtcgtctcccagaggcctcgtccttcctctcttatccaatggcatgtacacgctcgtttgtgacttgtgaggtccccgtagatggacgacgactgtttggagacgtcgttcgagggcgtacgttggtggccctccacgtattgtttacgtggttagggcgttcaattcgtggggcagaagacagcaacatcaccattgattcaaattaacttgtttgacagaaacgtctttggttcagcttaatttgcccgcggcttcaagcaatactacataagaaatgggagtactgcacatttgggaattggagtactagttactacctttgtacctgatcactcatgttttaatcactatttcctgggccttcttatctgtgcttctgtagggcaccatgagaaaattaccgcaatagtttgagaagtacttcctccgttccataaaaaatcaacctaataccagatgtgacacatcatagtactacaaatctgaacatacatatgtccagatttatcgtcctagtatatgtcacatctagttatagattcgttttttatgagacggagggaatagtaaataaatctgatcatcaattaagggtctgtttagttcacgaaaagtcacatcggatatttgaccagatgtcggaatgggttttcggacacgaatgaaacaactaatttcataactcgcctggaaaccacgagacgaatcttttgagcctaattaatcctcaaaagattcgtcttgtgatttccctcctaactatgcaattagtttttttaatttatatttaatgttatatacatatgtccaaagattcgatgtgatgttttagggaaaaaattttgggaactaaaccaggcctaatgtgagaccaaatcaatgactgagcacgccaaaaaaaactaggtgggtcaaacccacaaggcatatattgaagtcacatgtatacatgaacgtgaagacgagcctgagctgacacttaaacttgaaaatggctctaaaaatctacaccaattcttaatccattaaaaaaaagataaatataaacacattactgtagggcagattcttaatccattaccaaaaatgataaaaaatggtaaacacattactgcttctagctcctgatttgttctcttgttgaatctgctaaattgcaacctaccgatggtaatgggtaatttctagtgactaacgactttcagttaaataagcgcattatctcttcttaccgttctatttctaattggaatagtgttgcggcaatcgggtgacacacctcgaccttttccgattataaaagttgcatgtcgtaaacttggatatataactttttatcaactatcgatggagattcataaataaactttaataaatgtgtactccttatcttatattggttatttcttatttttggttggtgttttcaatttttattttaactacactctttttagagtgctagattataataattggctgtaactcttctgagcaaaggccgggatgttctattattaaaaaaaaaagaagcctcaggcgctagctgcaacttctgaactggcgccaccgccgcgcactgcccgcggccggcaatcccgctgcctttgtgcctcatgtcctctctcgtccttcatggggcgtcggccgccgaggctacgggtaagtactccctttgtcccaaaataaatgtggttttacactgttaatgtctaatgtttggtcgttcgttttatttaaaaaaatttatgattagtatttttattgttattagataataaaacatgaataatactctatgtgtgactatctttttaaaaaaaattatattttttttaaataagacggacggtcgtggatatggatatccacggctaagcttatttggacggaggcagtaggcaagtagcgatgcgtgacacagcagcgaaggacggcgctactgaagttcgtgaagctaggggaccaggggtgactgaggtgacgctaggagaggaggtcgccaggttggggctaggtatcgaacagatcgggaacaaggccagggagcagatcgagcatatgtagcccaacttgcagactgtggcctgcgggggtagggggtgtccgggccgccggtagctgggccaagcgcactactttaccgtatggggccatccgcctctggaccaaattgtagggccattttagattgaagctaaaatgtgaccttaccaatttatttgtattttgaatagtgatagtgtatttttgattgaatccaaattattggtaatacccattaacaatttaacactaatctagaactttcttctctatatcatcaatatttggctttacattggtagcaatttaaatatgtaccatgcatctctaccctaccaaagaattggtagtgccaaaacatgccaaaattttgacacaaccaaagatttggtagggtaaagaaccaaacagccccataatgatttatattaaaacatgagttcaattcatgggcagaagttacctcgtaactagttgataccctgcgctttccagcgggacatgtcgataaatgcatgttatacattaaacaaatgatagatttatatatttaaataatataaaaatgacgtggagataatgatttgacattgcttacatattgagctctaaaaatacaataaaattgtaaatgatatgtcatatttgcatgatatttaaaatacactagatgataattgctagtgagtaataatgcggcacttttgcatgtgatttaaaatactttagataataattgctagtgggtgatgatgtgacacacttgcatactgtgttttaaaagttagtgtgtatcaactttacagtaagataggattagaggcctggtgcttaatgcaaaattaatcccaacatttggtaaatgctaataaccaaatatattttcttaattatataactgatgcattttttcaataataggaaacacagaaaaaaaatcatcaattgtcattgtcgaggcaaactttcaaaaccccaattagagtttagaaaaaaaaacatagaaaaatagatgagatggaggagtggattcattggtaggaggaaaactgtgagggggaggaaatg

SEQ ID NO: 45278 - DNA, 1626 bp, Oryza sativa
cagtatttgctgttgattggtagttagatttgtagtactaagatatgtcttatcttgtaataaattaacttattttgggacggatgggggacagatggagtagctacaattttcgcacactgttaggattattaagaaggtaaatttgctgatatgaaagagaggagaaaggagagaagcattgatattaaagttaacaatgacttaacatcaactcttaaaatttataaaaggaacctttgttgtaggaggataaaaaaggaaagagtaataaaaaaaattgttctgtagtccgtacattaattgttagagcctttatcgtctcaactattatctctgaatagtctttaaacgtactaattaaaagcctatactagaatatctacctttgaacatatccttataactcatcatactattactacaattaaattttggataacccagaattttgggagccctgtagttaaccctgaactcccatatacacgggcctgatgaaacctcactgttgattcaaacttctatgaaaaaaacatcttcgacagcttgcccacttcaaacataacataggaaatgggagtattgtacattcacaaattattactttgtaccatgatcactcctgctttaatcactattctccatacatacgattgaaaatggttcggaaaatttctggatgattgaaaacggttcagaaagtttccggattccgaactgttttcgtaaacgggaaacattggacggaaattttcaaaaccgaaaacaaatttggaattcttttcttgaaaacaaaaagggatgcagtaatagcactatctgtcagaaagcgaaataggtcaaaaactttcttggagaatatctgaaaaactaatttaaaactttttttgaagaatgtttaccgtctcaaagatgaaaatttgaacttgacaaagtgtttatgaaccgtgatattatccttatgatacaaagtggaaagtggtactattagctgctaaaattttaaatttttatctattgttttagaaagaaattggaaactcggtttccaataaatattcatcattgttttcacattcaataatattctattctgttttgatattcgaggttttctattcatattttttaataaaaaaatgtaaacgaaaatgatagatatggttcccgtcttttttgagtcgttttcattcctacttgtatgttcatatcaaataaataccacacagtcttttcttgtcaaaaaagaagtcacaccaacttgccaaaatgtgtgttagctaaggtgtggcgatcattaaaagacgcgcaagaatatgttgaccacatattaagtcaaggtgacaagaaaaatagagagtatcacgtgtggagtccgctgcaaaaatgtggcatgatatatacacttgtgacagcgaaacaaacaacagttttaaaagttttaaaaggtttgacagtgtttggcaaagtactcactcaaataaacaccctctttaattaggagggcaattttactaattttgaatcttgagacgttaagatatatagatacaacctcatattttatcaatttttaacattggaaatgttaaatattgataaaactaaaactgttactacaag

SEQ ID NO: 45279 - DNA, 725 bp, Oryza sativa
ttcctgcagccctgatgaccgagttctccatgcaacacaagatggcacaatcggtagcttcgctggtactaatggcttccttctcaaggcattccctgtgtcattgaccactttgacttcctcgtcagagtcaagaatttcaatataggagctcccttcattaaaactgagagatccttttccctttgactccatctcatccttgatagcctcctcatcctcatgaggcctcacttcactaacattaacattgtggctcaccaaatcttgtgtttccaccttagaaaagtcatgcatttgtacagatttgtcaccttcatccgcatcacccccaaaattatcaccgtcgtcatcagcatcattatcattatcatcatcaaattccatctcatcctcagcttcccagtccactacatttgtatccaaatcagcaaattccatctcatcctcggcttcccagtccactccatttgtatccaaatcagcgccattgctgtaagcacgaatgacatctccgacaagcttttcctccaacatttcatcgtcgtaatcatcctcatcggaagccaactcttcattcactggatccaccactgataactccgtgttcccacgatcctctgtgccctccccagcgatgatctcaccgccatcacgattcgaattggcgacactggcttccacattaccgcagtgctcctcaattcgatccccaccagcgacgc

SEQ ID NO: 45280 - DNA, 611 bp, Oryza sativa
gcatggaataccatacataaccaatattgtacgatattatatggattcgagtacatgccacattctatataatagataaataaagtaatatggattcaagtacaagccacatgtcacgccatttagtcaggtccatttactatcacaagttcacatgcatatactgcacacattatttattacagcagttataaagttagcaaaagtgtccatttcacatggcaacttgtcctctagcgtatggacttttcatatgagatgcctcgaaacccatgtcctatggaccgtcatttctattttgtttgtgccatcacttccgacgcccgagtaacattaatgcttgtctaaacatggttgatgttgggaggtaacaagccgattaacgctaatatatttcagatttaaaaacaactctataaggttcaatgaattttgaattttgatcctcgcgttgaacacccaacatgtaatgtttttaatcaattgcaaattgaagctaccacacgtgtatatgagcatctttactgtttttcgaagaaaaaaaaaagagaatgaaacaattcttgtacacccggttcactacacggcagaaatgctgagccttcacagaa

SEQ ID NO: 45281 - DNA, 2256 bp, Oryza sativa
gtgcctcttccctcctccccgggtcgggatttggcctctctagcaagggaggtcgtccccctgtacagtgactcttagtgacaggaaggggtagggagcaatggcgttagcggagacaatgatggcgcagtcggacatatccgtgcatggacagcgagcggtgatggagttcgctgattcggcatggccgtgcccagatctacatccctacccgtttccgaaccccccacgataaatctggccagagttagcgcgacatagacagcggcagcggccggctcgtagagacaacgacaacagcgggagggcgacgcaggtgacatcggcgcaggtgacaacagttggagattggcgtcaagaggtcaatgcaggcgacggcaaggaggccgccctggctgacatcgtcggaggtcaacgcggcgatgataagaagggcgacgacgacagtgtgccacaaaggtatgcggaggctggttggcgggggtcatcggtacagcagtgtccacgcattgagataggatagtcggtggtggagcaatagctgcgaattgactagggagagcggcaggtgtaaacctagcccggccatgccgggcaagcaatgacaacgcttctggtgtcgttctccctcctagggccgtttttgagtcgttcctggtgaaaaccatgtcttggttctccttgaggtctcaagggaaggtggcgtcagtgctcattgtcactcttcttcctggagatgtcgtctaggaggcctccttaccaaaacttctctctgacagcttgtgtgtactctctctatatgtttgtcctcttactacgacaccctaaattctgcaagttgatcatattggcgggccttgtgggggagagcggatccatttttctctttcaccctcttccccttcaatcccgaagatgtgaatagagtttgagtttggtgttcggctgttagggtttggtttagtgcggttcagcggtagtttcgttgttggtctagcggcatctggtccaatgctagcgttgttgtgtacttgtgtgtaggcaatattggtgcacggtggtgttttttttttcgttcctggctactgcctttccagggttttagccttgtgttttttcctactccattcaatgaaacaacacgagtgtctggtgcagttcattaaaaaaaatactggaaaccaacttactacttaatatgtcccaaaatatagatattattttaacatagcaccttattttgaataaagttgtttctctatcgatctttatctctcaacctctgttcgtcctctgagtcttcctctaaagtgtcatatttatcctctgtaacaattatccatttagtttattcaccaactttttttctcaaccaatcataaattttcttcaattatttctatctattttctaaatattcgtaccaatctaaaaaatacttatattttgaaattcgcttcttcgttgttttcaccacttttgaaaatttgaaaatatttatcactacacggttacctaggtatcaatttccattttactcttaatttgtggagctaaagtaatgttcagttaacgtatgcatttagaattgcatacctcaacaacatagggctgggtcattttacttagaaaaaggttaattgtattgtattggaactcgaactctccgtggttgccacttgccacatcagtttgttcagggtgatttggactttttttccacaaaatcagtataggatttaaaatagatttactagacagatccatagctcaagcactaattgccacagcctagaacaggccgaagagggccgatagaagggaaaagtacaccgaaggtccctcgacttgtcatcgagttacaaaatcatcccctaaccgcaaaaccagatatctgatgtcccttaatttacaaaaccgtttactttaggtgcatcggtggttttgaccctggttttgtcctacgtggcggctgagtcagcgtgggacccacatgggccccacatatcagcatgccacgtcaatggccgctcctcccttcctcctctctgtctctctctccctctctcacttctcctctcgggcaggctagccagcgggtggggatgaggtcgccgacaacggacgtgaggacgagggggtcggcggcgacaggggcgaccgagtcgacggcggtggcggtgacgttgaggaggttggagatgaagacggcggaagcgtatagcagtggggaggagcaaaacgatggccctcgcc

SEQ ID NO: 45282 - DNA, 659 bp, Oryza sativa
aaaagggaaccacgttgtccgccgcccccactctcgcgcgtgaaacatgtcgagtcgtgtgggggagggcgcacgagactagttacgaattagcattcacataggagaaaagtagaggttatcgtaccccggcagtataagcccgataaccatttagttatcaccacgaatagtaggaaaattggacggaatttattaaataaataaatatcgcttaaatgtattttgaatttggtagagctattaggctaccttaccgttaccgcacccaactactacggtcggtaactggcggtcggtaagagaagctctccttgctgttcccatctttccaatgccacccaccgtgctatgtttaaaaaccgtgaattaattatttctccgttcagctgaaatcgaatcattccatataaaattcttgtattctaaactggcgcttgcccatgctgtgcgttcgtaaattgtgttttttcggaaagagaagtggctcacttagtgaaacaggacttagacttacgtagctgggcgtttaagcctccttgagctgtgttttttatcttttgtaatcaaggatctgtctgtattctgtttttcttcttaatcaaattccggcagagctcctgccgtcgtcttcctcaaaaaaaaaatgtgttttttct

SEQ ID NO: 45283 - DNA, 635 bp, Oryza sativa
aatctgtgcaatgaatatgttcatttaaggatcagtgctatcctgccttcctatcttcattgccaggagaggagtatatatttttgttgcaacagcaaatctgaagggtccaaccggagcctggaggataccaagtggtgtcaacctatggaacctgttacctgtttagtacctagggtgtgtttagttacgccaaaattgaaagtttggttgaaattggaacgatgtgacggaaaagttggaagtttgtgtgtatagaaaaatttttgatgtgatggaaaagttggaaatttgaagaaaaattttgtaactaaactcggccatagtaagcaaaataatcactatcctatgagaaaaatatctgactgtcagaaagttgtaaaagcaaggtgctagatggaagattcaagattctcttgtactgtttgtactgctcatcgtatggcaccatcaggttgtaatacatcacatcacactgtcagattattactactatttgttttatatatatctaccataacttgtgatgttattacgtgcaggattaattgggacatgacaggttttgttgttatcagaggctcacctgtgcagtttagttgatgaggatgcttcaaatgatataaggttatctt

SEQ ID NO: 45284 - DNA, 588 bp, Oryza sativa
catctcgtgtttctaattatatagtttttaaaagtcacaccagttgctaccccttatgtcatctccttctttatttgcttgcttgatctaccactatttctttttattcttcttgaaacctttaaaaattggattttatagtttttagagtttagtgtcatgttgggtttcatttttataatttctagatgtcttgtcaaacgttgtcattatactcctctacggcccgtctaatgtctcttctctttattgtcattgagattttaaaaatcgaacataattattgtctgggttcaattttactttcaagaagtctcgccaaaatgtctatggctttgccattgtactcctctatagctcgcccgcagcattccttctttattgtcattgagattttaaaatcgaacatgattattagtgttttttttttactttttagaagtttcgaacctttaaaaattggacttgtagttccattttttatattttttagaagtcccatcaaacgatgccactatgcccctctatagcccgtccgccgtctattctttattgtcattatgattctaaaaatcgaacataaatatc

SEQ ID NO: 45285 - DNA, 645 bp, Oryza sativa
ctgcagccccgccgaaggtggtgacgttgggctggtacccgccgttgccgaacgcgatcatgtacagcgcgatgtagaagatccccagctccgcgccggagtgcggctcgcagggcacgtgctccgtgccgcacccgaccggcctgatcaggtacagccgcgacgacagggacagcagcgcgaggcctgcaggcaaaacaccgtgacgcgaacgagtcagccgcgtgatccacatctcctgggcgtacgcgcaacgcgaccgcgatgtgccttgggccgatcgaccgaccggtcggcgccaccacgtactactctatgcctctactatatggaccatccactttcgacaccagcatacgtgcagatacaatccacccagtacagagtacaggccgaattaactccactctggacagattctcccgcaccaatcgctgttactttgtacgtacgttcctacgcatctatagaccatcatttcccgtgaaatgggcaatcagaacggaaaaaactggtcactgatgattgcccgaccaacagatcagaccgaagtagctagaaacatgagatcaatcgatcgcaccgagaaaggcgcgtggttttcagatagaactgcggagagagagggatgtgccgtgtggtggt

SEQ ID NO: 45286 - DNA, 757 bp, Oryza sativa
tgcagcccgccgcgtgctgttgccttcacgagctcaccaagtttcctagattgtagagaagaaagtgatgagagagctggagagggaagtggtacaaagtgaatcattttgcaaacttatctaaatcaaagtgaaaatattttcttctccctagtccaagttgcaaccttggtaaacataagtggccactgtgcaattaactgtaaattatatggtgtataaataccgacgtgtctagacctcagcgacacactggagcgtatggtttaacgagacaattcttcgcttttggttgaaccataaaccaaatcacctacaccagatcatgacaaggaaaaaagggccgtaagcaaggctgagaatcgagaggtctgggaagtccacggcttgggtttataggcttcagagaggaagaacctgaaaagtaggccgaatggccaagcaacaatttgtgggatgctagctagtggagtggcagcatttgttcaataacagtagagcatctccctggattaattaagataaggaatccctttaagatgactcgtgtagataggccaaacccaaaatacacttttcaaagattagccgataaaaacgaacatgtatgtctcgctctcaacggggtgcatgtgtgctcagccgccgcaccaccgcaaccaaatccaagcatggtcccgtgccaaatctatctcaactagtactactactatacatctgcatctactactattctactctactcgcaagtctcaca

SEQ ID NO: 45287 - DNA, 740 bp, Oryza sativa
tgatcgatgaagatccttcttgtgcggattagtggtgtgggtttggacagggaatcgcgggcgaaagccttgccgagccgtttggccggctgacgacggcgacgccgtttggcatcgttcccctccttggaggcgtcattttagattacccctctccttttctaaccatattctccgggtgaaaaccttgcttccttccgaacgagcggtggcggcgatccacgtcgcgtcctccttgggggcaccgctttggagaaacctcttcgtgcaaggattgtcaatggtctatgcattggcttcgaacttcagtcctaggctttgacgaggccttctagctccactttttgttttgcttttcttagtttgtgtcctctcttttcctgtttggtgtgttcaacttgtcttgaactacactctcttctggagtggaattttgtaataattggctgtagctctttttgagcaaaggccgagatattatattccattatctaaaaagctacgccgaataagaaacccaccagaagttttgataggggtcgacgccaaagcagataatccaaagaagccagccccatccataccaccggcaaggatagcaagagtaacaccactaactgcaaaagaaactgaggggcatcccgattagggcctccacgcatgggaggttgagaccatctcagcaaaacttgaaaccttcagccgtgtaattgatcttcactggaggtcaagaagaagac

SEQ ID NO: 45288 - DNA, 705 bp, Oryza sativa
caacaaacattctagatatatacaggcaacaaagcgtcaaagcaaacggcttttgatctatgtactcgggcctcgtttcagaaatgcaggaagccatagctagctgaaaccatttctttctctcttctgttttttatccttgttctcgttgtgacagatggtaacctgacggctacattgcacgggacacccgccagcgccaatatttagttttgtcgttcgtgcagcacgtaggctgataaacctgtaaccgggattactctgggctaaaatatatagtgatatgatcaaaggacatgaagtagagcattagctgatcttttggagtaccactttaatctgaagtaaatttgtgcccatttcacggtagtacatcatctttctcaaagttacttgtactacaatgatgtgctttgtctacgaggcaaaaataagataaactaccaacgattaaaatgtaatgaagggaacaatatggtgccgtttgagtttgatgaagataaagattaagtaaaaatatgctaaacaaaaaaatcatcagcacctaattaataaagttttatttattataaacaataaaaatatatttaaattaatattttagaacggccattatataaaatatttttgaaaagagtatcgtctagcaggtaaaaaaagtggtaataaaaattgagatgtactccaatttgtatgttattaatc

SEQ ID NO: 45289 - DNA, 1186 bp, Oryza sativa
gctcaatctttcccctcttcagtaagagaagctttggagaagatgtcttaggtggagtcctggcttataccccagttgagcgcctgtgaagatggagccgtaggcccgctagtccgctgctgtttatttttgattgtcaggccttaagtgcctttgtaataatgtaaatattatcgatataataaagatgtgtcttttatatcatgtttgtgtggtataccccggcttttcctgggacggggattaatacactagcgttcgggaaaaggcaattttcccggtcgcgacaagctggtatcagagccatctcgactgtaggataagccaagtggataaaacccaaggacatattttataaataaaaaaattatttgcgaaagttcctttttctccttcccctaatgctatttgcaaaaggtttactcttttctttcttcggatttcaactaagtactagatggtcagctttgcgaagaagaagatgtcgtcagttgtttgccgaagctccggaagactgcaggatccgctagcgaagcaaaggaagcagtgaagccagctgtgaagcaggagtgaagatcttggagaacccgtcgtagaacctaagccaccctatagggtagtgttgttagtcgtgtgttccttgcttgtgtgtgtagcgcgtggtttgcatcagtgggttgtgatgtaaccatgctaggttgtttgcttaatcaacttgcagaataagcctaacatacatcataacagcaaaagacttagatctgttaaggtcctatccttagttctaatctgtctctcccctttgttttccctctctccctctccaaacctttgcaacagatggctgacaatgagaaaggcaataaggtcagaagtcaggacattggtacctcaagctcccgagtgaatgaagcaccagacaccagttgtgtggcagtggtccaacacctgattaaccagaacaaattgcttatagagatactacagcagcatcggatgccaattttgaacccgagtcagatgcaacctcaagtacagttggaggcagtccaagcactcacaccacaagtcagcgcaccgccaacatcccagaaggcccctcatgccatgccacatgttgacccaaaagaagcaagtatcatctgttttatgtgtgatgagcaagggcactacgcaaggaactgtc

SEQ ID NO: 45290 - DNA, 688 bp, Oryza sativa
cctctccatgtcctcaaacgtactgaaactcacttcttccagatccacgcttacgcttccacactcatcaccactaatgagctcgtgagcaagctatgtccctcctaatgctattaacctataatgaacgaaggatggacctaggcctgctcatcgtcgaccataaaccgtagagatggccgcctccaatcgacgcaagcgcagagctgctctagcttggggactatgtggtgtaggagcaaattgacgagatgcgagcagtgcgacggagggcggtactccataggctctatgttactgtctgtttgagctttcacaccaacccaacaagctcaagaagacagagagcaaggaagagagggaaagatagggaagaagcaaattgcccaaagtaaaacttatatgtaatctttttgggttcaaatttaaagtgttgggctgctcggctgttcctacttcctagtcttttactcttaccacattggtaaaaagaagtggccctatatgccatttactcttaaaagaattggtgtaagtacaggataaggcgacctcgtctaaacccccacgctcccatggccgccgccgccgcgtaccccaccggcgccactctccccccgcgccgggcacctacgccctctctccggccgtcgccgacgctctcgtggttcgcctacatcgcccacct

SEQ ID NO: 45291 - DNA, 589 bp, Oryza sativa
aggctgccaccagtgctgcgccagatgcaattgcaacatgcatttttctatgttcatctttccctatggcagtcatgatagtgttgtttgcattggtagactcagattggcaataaccaaccattcgtgcaactgctgtagctagtcttgcaactgagagagctgcatgcatctgagctgtttggagtcttatgtcctctctcttccttccacatcccctctgtaccatgtttgctaatttacttttcaagaattctgccacgccccccacagtcatctacacatgaaaaacttggtttaatgttgtagagtattccattttcttacgcaggttttgtgcctagtcttgattttctgatatgttgtgtgaggaaccttttcactggagagcagagtcttgaaattaaatcatgcagtagggaaagaatttccagttagatcaattctgtattcatataatctacatgtaagcactgtatttgttttaccctgattccatccatggtttgtttgatctcttgattgacattgtgtacgctgttctcctcatgtttcccttgggcatccttgccctgatcgaatgcaccat

SEQ ID NO: 45292 - DNA, 898 bp, Oryza sativa
atattcaatgttaaattttatgaaactagtttggtattttagatgttcctaattgtttttataatcttagtcaaacttgactaggaaaaaaggagttttttttggaaataatattattttaatggaaaatcgcaaaattataggtcagttagacgaaatcgcaagtttagcaccctgtcgaacggaggcagttcgaaagggtacctgtcgaactgccccagttcgaaagggtacctgtcgaactgccccagttcgaaagggtacctgtcgaactgccccagttcgacaggtaataaaataacttaaaaaagaggaaaaacactgtagcacactgtagcgcacactgtagcggcactgtagcgacactgcctatcgaacttccgctgttcgatacgtccatgccacgcgccctatcgaactccccctgttcgatacgtccctatcgggcactgtagcaagtacttttttattttttttcttggacaactagcatgccccagttcgacagtaccctgtcgaactgccccagttcgacagtaccctgtcgaactgccccagttcgacagtaccctgtcgaactgccccagttcgacaggggtacctatcgaactgccccagttcgacagggcgctaaacttgcgatttcgtctagccgacctataattttgcgattttccattaaaataatattattttcaaaaaaaattcggaaaaaagtgaaaggaggtaacaatgcccatcctgccaactatatctaagataaaaacgatttagtactgcgagacaccggtatctcaaggttttttttgctggactgaagcaaatctctaatatgaaaccgaaggagtactggctgctggctccagtgaatataagttggaacattatattggaataa

SEQ ID NO: 45293 - DNA, 698 bp, Oryza sativa
ttgctatggtttattgccgagtcaggtgcagcaggaggagcattggtgcattgtttctgctatgggttctgattaacacgaggccttacgggtacggcgtttgctccagtgaccacaatacgattggaatgtctgcttcgtgtaaattggcggtaatgtggaggtcgattttgccttggttggggacagtttttggaataatgcccttcttcactgcagttgtaacaaacaataactttcttacactcgggttcttcatcttgtacttgatttctcagctgctgtattggaacttccaaaggtacaacgcagatactggcccctgtcttgtcagctggtggctggggctgaaattgagcattgacaccttgtggtagtgcattcattggaattggagctgttgcaacgcgggctataggactgcttcgggatgcatggatgacaattcgttgaggagcaagcttctgattgcagggagttgcgtggactgacgtgccggcagctatgtttctcggttttgggcacttgtcggcgaaatgacccattccttgacaattgaagcaacagatgtcttcccggactcggcattttcttttctcatttcgattcctctgtcctggcactggagttaggctgaaacggtgatcttggcggggatttgtgttgccttgatgcttctctccgttggaactggcggg

SEQ ID NO: 45294 - DNA, 832 bp, Oryza sativa
gcagtttctatgctcctattcctatattcctgtagaatgcgtatatgtgggcttgtacgatttattatcttgtgcttcatctgtatgaatgcatgcaaaaatcgagctaagctagtgttctgtgttggtcggcactgttgctatgttctttcctacgtgactgaaatctagcaattcccggttccgattcatattttgcttatctatatgcttatttgtacgacttattagcaattaaaaaaattgtagataaaaattttaaatacgggttcttagtaattcaaaagtaaatgctataaaataaaattccgtgaaaaaaccacaaaatctataagttataaaaatggtcgatttacagttataaaaatttccacgagcagaaagaagacaggcctcccgcaggtcttttttggtccaaatgcaaataaaggcccattagcggcaggagctttagggccggccccattactagccctaggccgagcttagtttctggttgcaaaccgtacggaatcccctttcctccctctcttgccacgaacccttcgccgtcgccggcgatcccaccgactcccggccgcctctgcttccccggcgatgtctcttcttagcactgcgccgtcaacgcgcgttgcccggtctatgcgtcgccttcagttctccctgcgtccttgtgagacccgagccgcaaatccaggccccaagcgagatgccatgccgagccgcaggattgacagaactcggggagatctcctgatccggtggttgttcagttcgctgccccctccttgcattgataaaggtagcccgtttcctctgcttttgattattt

SEQ ID NO: 45295 - DNA, 666 bp, Oryza sativa
tggatggattttcctgtgccgctcggctgcttgctgccgatggcttctgctgcgcctgcgctgctcctctgacacgcgcacggcaggaaggacgacgtcgactcggagttgatggcgactccgctttggattggatttcgccgaacagaatttcgacggaacaacgaatacgacgacgcgtaccgccgattagatcgatttcttcgatcggaaaaaatcgccggtggccgggactgcagtagatcgatctccaatgctctgataccacttgttatgaaaatagatgcacaacggagacacgaattttacgtggaaatcccttgcggaaaaaaaccacgggcgccgaccggcaatgatcactatagaggagatgattacaaacgtaggggaatcacattgggaacgtcacccattcccgtacggcttacaagagtatatataagggataatagaaagacacctaataggactcttattaggaaactaatccgaatatattgtgggcccaaaattcggatcacatatttaacagaagccaccccttgccgaggagcagcgtgacctcggtgtcagcaacgacgatgaggtagtagtcgccgcctcgccggtgggctcaggggacgacgaatccaacgcgtacgtggcctcggcggtgttctagtggac

SEQ ID NO: 45296 - DNA, 809 bp, Oryza sativa
ccattctagaagctacggtcatactcgttcgtttgacataagtatttggtggcaattatatcgaccgggacagtactagccacccagaaatcaaccaaatcttacgtattgtcccaatctaagttcattaaattttatgcatattctaactaagcatggttaagcaaaagctagcatataactggttcgctatatgttcagattatgcattcaaaatcatgtatggctagtgtatagaatataatatagaatgtagggtatttatgctcaaagggaaggaataataacttgccttgctccaacgcaaataaatccgagataggcaacctgattatccgatcctcgaaataccacaggttaccatccaaaataaaatagactctactaagaaagatgaagaaccaatttcaataaaatccataaaatagtaagaaagagataaacggttatgtgggctaaggtttagggtatagtctatctcttttatagggtatatggattactgtgttgatattttatgcggaggttctagagggttggaggctagaggggattaagcaactactcttgcttatatttcatgtgtgggtttgattagtaggaggatgggaagtatactggatgattgaactagttgaacagatatatagcaagtatcggctgatggtaggttttggtaggatcatacctagggtttagtatttttgggtagcatatcggctagactctatattttatgtgtaggttctggtagacagaaagtaggtggctaagagtatggtggatagatagtattgtagagggtatgt

SEQ ID NO: 45297 - DNA, 1688 bp, Oryza sativa
ccccgtgcgtgcagtgtgaccgtgccagtacatgcagccgttgcaccaacttccactgttactactagctaaggagtagtagagagtactgtagtaaaggttttctgcgagaattcgttgacaaattaaatccatcatcaacttctacatgaagcacgcactgtacatagcggtggaactagtggagtgcatgtacgagagacatcatgggcaactaatctcgcgcgctaaaacattttgtatagatcggttggttgttaatgcgagtgacacatgtgattgctcaaccagacatgcaaattaaatccactgttccaatcacaaatcatcaatacagaacacagtgaaatccgccgacacgctccgctcgatccgagctcgatatggtcgatcaacaacacatctgcgttgcattcatccatgtttgcatcgtcttcttcttttttgttttttgaaagattattcatgcatccatgcttgctcgttcccggaatcatggcatcgtcgtgcatgtgagccagttaatcaacctgctggtgtgacgaagctcgaatccacatttgctcctgaagggcaaagtatagtgatagacgtacgtgaggcttgcttgctcgtatatgctataataaatttattattaatggtcagcgtggtacctgtaattattgtcagctgcacgatactcctacccccaacgccaacgacctctctatgcatgtgcaaggggaatttgcgagtgagtttactaatccaaagtcaaattcctcatgtctccaaatcatcattccttaattaacaacgcaatccgatcatttcgtgtataatgagacgaaaaaaaaaattcccgtattagattaaggccttatctagttggggaaaaattttagatttggttgtcacatcggatatacggacacacatttaaagtattaaacgtaatctaataacaaaacaaattacagattccgccagaaaaccgcgagacgaatttattaagcctaattaatccatcattagcaaatgtttactgtagcaccacattgtcaaatcatggcacaattatgtttaaaagattcattttgcaatttatacacaaactatttagttgatttttttccacatttaatactccatgcgtgtgtcaaacattcgatgtgatgggtaaaaagtttatgttatgggaactaaacaagacctaaattcccccgaaattcttgtgttacgaaaggaggctctgaactccgattcatgcaccatccaaagctgtggctaatcaaccgttcaacaaattaaatccaacagttcttaaaaaaaatccgacatgagacattttaagtggagtgtagttttggagtttttttttctcccattggatacaccataaagtgtagtggatcaaggggccgacatggttgatgcgtgtctgatgaagttcataaattctcggagatgagatattgaaggcgcgtacagcatgcgtacaggaagcccattacgctggccacggtacctttgctctctctgacaacgatccacgccgttttatctagttggtaagaatacccaatgcatggattaaaatgaaagcaactttcaatgatctgtataaatttccatggacactatggccttggcatgcatgcgtgtagaaacagaggtacatacacgtacatgtatatatgtaccaa

SEQ ID NO: 45298 - DNA, 1358 bp, Oryza sativa
cgaccggttcggtgacgccggcccccggcaaggcactggcggagacggaggggtcgccggcaagactgagagagtaatcgatccgcgtcgcatcttagtcctcgtccatctccggccggtggagcgggcggtggagcgttcggtggagccagagccaccacagcaaccggcagaagaactcgtggcggtgggacccggaggcggcggtgatgtcggcgtcgcgtggggtggacgacgacaagccgggcttcgtcacgctgtaccgttggatcgtaggcgtatagaactagccccctgtaattacaggacctcacgaggttttttttgtcaatttccttccacattttttttactaggactattttgtaaagagaaaaaaaattccagccccagatgagcttaacgtctctgaactctgaaccttccatcgatttggacaacatagtagccattctctcttcccattctcctcctgtcatagcaacaatcctcgcaaattttggcggtattcaagctcagattgtaaccactggagactggtcattcgttcgttttctggagaggcaattttctggagggggaaaccgggcgaatcgcacacggcaggatgccacgccgtgctgtttgctcctttttccttgtggtttatagctgatctggtcgcggctactctgaagcctggtggtgcgcctgcagcctgtgcagatgtgtggattctgaatcacttgtgttgggtggaatggatccatggccgtggcttagtgccctagtgcgtcgtaggcttgcagtcaaaaacgtgtccaatcccctgcgaactgaggacacaccacttcaggtttgttcgttgtggtgatcctttcttgtgcccagttgaagagtgtaacaaaaaaaaagtttaggacattactgagagaatggattagtgatcctagttggatctagtatgtagacagttttagtttttttttccctttgtttgttgctaccgtagcatgctcctggcttgtctctgtcatggagtcgaggatcttgctaagttgggtagcctgcccggtggtccttgttatcattggatatggttggtgggctggaggcttggtgcaatggtgccaaattgccaatccctcctagtagcatatactgaattcagatttttttctttcccggggaatatgaattcaggttttatcatgtatactccctcacttcctaaatacaactattttttggtacgcggatttcagtgcacgggaatcaaaacattttcaaccaaacaagtgacgagaatcaagcgatttaaaattcgaaattcgatcaacaaaatgactgaaaagaaatcttccctcctatctttaatc

SEQ ID NO: 45299 - DNA, 2045 bp, Oryza sativa
tgccttctctatggatttaggcctccatactggtggtggtcgcaactcattgaaccttttatcccttttctcttcggcctttttctcccttaattcttgggcccgaagacgttgcaaccttctcttttgtgtagccgtcaaatccttaggcatccacctaggattcggctctgttccaggaggtaaataatgtcctttattaaccttgtttgaagacgatgaagcccttacatcgccttttgcaactctcccgtcaaaccggcgctggaaaccggtcagaccggcagcagaccgccggtcagaccggccagatgcgccggttagatcgacgttagacacacggtcagaccggcctgaggcgtcggtcagaccgtcgtcagatcggcggtcagaccggccagatggcccggtcggaccggcaacatggccgcggtcagaccggccagaaagcctggtcagaccggccgactgcaaggagctagaaccggcttcggactttttacttggggactttccaactccatcttcggaaggtataggcacatcatgggatcctatcttgatggtaatcacctccgaagtcctctcttctatcttgacgcgctttccttccctcttctcttcattaacccgatttttaccataaaatcggcttttgtttggtgaagataaacgctcatgaattggcctccgtggtcctccccatccttggttgaatctcattggcggcatatgattgtacattggcggcgttgccccccctggcataaagtaaggataaggataacccggcggcggcattggataaggaccccatgacatgtcttgtggatgaaaatatggaggtgaacatgaccgtcttggcgaatgaccaaatcgctccctaggaggtgatcttggtcttttccctttgttgtgatccctctcaccaccttgcctctcatacttttccaaaagcatatcaaaagtcactttggtctttctaggggccttagaagtcgaagcttcacccttattctccttccaaacgccaatctcctgcttctttggcaccatcatcttaggccttggctcaccaatgaccactttctttcccttggtagattcggcttgctccggccgaatcaacaccttcttattattgaaattaattgtattcaccggaaaaggatcatgatcaaacttcatcttggagccatcggtgaatttcaatcgtccctcatctatggccgattgaacctgtcgtcgaaacacattgcaatcattagtagagtgagaatgagaattatgccatttacaatatgctcgacgcttcttgagaaggtatgacatggcctttaggtaatctaatttgcttctcttgcaaaagataatcaaaatcttatcacacttagccacatcaaaactatatttaacctcactttgccgatctttacgaagagtcggcattaagttagaacaaacaaaaggtttatttttgttagtccatgaccattcggcaacataaatatcatgatcaccctcctcctcactatcactagcatcagagtaatcaactgcattaacattaggatttttgtctaatggtctagcaaattttttattatctttaacctggctttcttgagccagagccctttacataagttgactaacatcaagaaattgttggccatctagtttttctctaagaggagcaactaaaccattaaaagcaagaccggccaaatctctatcagttatattcaaagtataacatcggtttctaacatctctaaaactcttaatataatcaacaacagattcattatacttttgcttaaccgatgttaaatcacataacctaagctcatcttctccagtatagaaataatcatgaaatcgcccctctaattgagaccaagtatgaataaaattcgcccgaaagaagtaaaccatgtaaaagcattaccggataaacataaagaaaacaagcccaatttaaaagtttcactattagcctcaccacattgcgctaaaaattgacctacatgttcccatgtggt

SEQ ID NO: 45300 - DNA, 705 bp, Oryza sativa
tgaccggctcagggcccggtctgaccggcgtcatgttgcgcggtcggaccggcctgagggccggtctgaccggtgggataatacccggtctgaccggccatctggccggtcggaccaacggctgtgtcgctgtctgaccggccatcaggcccggtcggaccggccgtgaacgccgctccgtcggttttagaccctattggatctatgggagattgactaacagtggtataggctttatcttttaatgtgtaatcatccataagagaacctagcctattccttaaaaacccatcaaccttttccttaaacattacatctaatctatctttaaaattaaccatagatgaatctattgtagatgcaatttgttggttgatagattgcgatacctcgtcattacttaccatgtcgggagcgagtttgggacgtggcccgggcttgatgatcacgccttgacgagtcctagtagttgctctcatcaacgcctcccgtgtgagctcgttgatgtgctcttccatggctttacgatcctctccttcaaagtcatccaatgtgaccggtatcacatgagatggctccacctccgtcttagatgatggcttcgtcatggcgaagtcgaagtcgagttgacgatgaacggatcttgtccccagcggagtcaccaaaaatcgtgttggcaacttttttgacaagttgacaagcacg

SEQ ID NO: 45301 - DNA, 602 bp, Oryza sativa
caactactaccaatacaggatctgctagctaggtgctcgcttcttgcgttgattatgggaactgggagcctgggagatccttgagcttcacgtcaggtagagggcacggcccggaggagatgctccttggcgatgacagtagcgctcgtcgtagcctccgcaaattggggacattccccggtgcagttcaccaaagcatcaactatgcttgctccaatgcttcacgatacgcagtgcatggcagaatgtgtaggtcgagcagagcgcgtacggcaccagcagaaatcgagctcgagcagcaatatatggacggcaacgtactagtggaggcatgcgttcttgaacattttgtgtgtgtatatccttctcatctccttcctccgttgagcctgctctcatctctgcttcctcgtcgaccacaagtagctggccgtgattagggaggagaggagaggaagaacactatttgatattgatgtgtgggccactggttaaaaatgcaaagttcagtaataaaacccggtcaaaagtgaaaagatctgctgatagctggtccaatttacaacttgggtaataaaacctgccctaaagtgcaattcact

SEQ ID NO: 45302 - DNA, 745 bp, Oryza sativa
atacgaggacttgtcgtgccatcctgccaaatcgacgtccgccgcgggctcgcgccgcgcgcgggacggacgggacatcgcctcgcgcccgttcgccgcgttgcgcttgcgctttgctcgtgaaacgcccgtgcggcagggtgggggcgcgcaggtgcaaagcggcccgtgggcggtgggctctctcgcatcggcaaaaaacgggtggcggctacgtcccttgtcccaggtggcccaactgaacggggagctagttttggacgagaaattgttcgagaggcttgggctcgcgataagatgggccgagacaccagtgctgcaagccggccacagccaggggccaatagcccactactgcggggaccgctaatgcgcgggtccacacccctctcccctatacgtctctctcctcccccttcctcctccccttatccaaattcatttgcacttaataaataccagcttctgccatagtggaacggaggcgcgtcgccatatatatacctcttgtaagccgccgtgcggcgttgtaacctcaccccagatatagtgaagatattttgctggctagcgtccgtggtttttctctccctactttgggagggttttccacgttaaaatctcgtgtcttctgtgattaatctattattctttatcttttgtttgcctatcatttcctaacaccttcttctcttccctactatagtacaccacaaaattattaataaaaaacaagggctgcagg

SEQ ID NO: 45303 - DNA, 692 bp, Oryza sativa
ggggtggagaaggagagaagggatttggcatgtggggtccgcatagtaactcggcctgctagagtaggtcaacgagtcacgtcaacaaaaaaacaccctcaaaaccactaagggagtcatcttgcattggttttaatagttatgggtcaagatatctgatatagtagttaagagatacaaattagatcggaccttcaatcatcaaacccaactaatgaaggaaacggtccatttcgcatccctaatttgagtttgcatcactcaactataaaattaggtaagagtatcctctaacttttaaaatcactgcaaatcgagtccctcgactaatttgaaagtggtttttgacctatgtaacctctacttggcacgttggcatagtcttaatctaacatggcacttgtggtaatcacgaaactagaaaaaaatttaaaaaattttaaaaataaggagacccaatgtgagtcgtagttgtgccataatttttctaatgaaagatgtaggactcatatgtttcacatggaaaaaaaatataagagtaaatttcacaaagctataaatactttgattaaattatcataaaactacatatttaaagtgatgtatcacaaaactacagatctaacaataaatttatgacaaacctactggtttaaggctaagtataaaaaagatatagatttgctgatgaa

SEQ ID NO: 45304 - DNA, 696 bp, Oryza sativa
tttgtaccaccaaccttgccatttgtgcagaaaaatcaagtctactttgtctcagatccctggggtttagggtggatctatatgcaggttaattacataagttacggttcttgagaagctgagatgccttgagacacactacagccttgttctttctcctaccaatcccgtggagaccggccgtccaaagtaagcaatgactagtagcagccatcaaatcacagctatttgtctcaagcacaagaacaaacaagaatagattaattgtgacttggtctagtttaatccatcaatgccatggggcaatggaaccgggaggagttcaggaatattgtagctgcaggttcttctcctatataggtacttaaaaatatatacatgggctaggagacttggtgtttctttaatttcttctcatgttgcttgcaaagtgtcctagggattgaggatagaggtgatacgaaacaccttcatttgttgcatgatcgagagtagccaattgttttataggagctattaacggtaaaaaattgttgctatcgatggcagcaaaactagccgctcgctggtagtagtaataaatagtcagagataatgagatatactccatggagacaggctttgaaaaaagcaagcagagatcatgcaccctgcctgcctgttggcctaaaatatcaatggaaaaaacacaaattt

SEQ ID NO: 45305 - DNA, 726 bp, Oryza sativa
gtaatccgatcgaaagcagaaagaggaaatttgagttctttataagttttttttcttctgagttctgacaactggaaagtaaaaaatattagcagcaagtgacacaggtgatcgacgttacgcaaggtttggggccaaaaggagccgacgtttcgtttcgctttgccttttccttctcgttttttcttttgtgccgtggacaccaagcttgatcgaggcttgtacgagaatgctgtttgatgctgcaaccaagagattaacttgtagactgtcagagtgtatcgtgttaagtcttactgaatactgagaattatttgtcgttgttattctacctgcgtggctgtatgagtagtttcttagtttttgggccgtcctggtcaaggcccattaatattttcgacatctaataagtttgtgaaagaatcataccaacaacatcagagtggcgcagcggaagcgtggtgggcccataacccacaggtcccaggatcgaaacctggctctgataatttagttgagctgtttttctttaaactttctcggttttctttctgctttttggtttttatcttgcatctactgttttaatctttctcggtttttgttttgcatctactgttttaaactttatcctttttggttttgcttccgtttttgtttaaactttttcggtttttatttttgcatctatttggtttttattttgcatctactgttttaaactat

SEQ ID NO: 45306 - DNA, 653 bp, Oryza sativa
tttgtttaactttatatactccaatcttccagctctttggtaggattcatccttttgtttttgctcatggtaccatcaacataccaaagtacaggagttgctgctaataaacaacatcaaaccagtagctagtactcctacttcactaagcaaatatattatttgggagatgtggctcactcttgttaagatcacccgttacactttctgttaattaaaatagaaggttggacttttcaattgctgtgctaatatttttctctctgtttgaattagccctggatcatatagtagtattatccagtggagccggtagaaaaatatataattttttgaatgttactcctgctaatctaacgtgagctttgcatcatcactggaattgtagcggcagtgcaggcagagttttgattcgccttcggctccttgttttcaacgtatttcgccttttctatcggactctactccctccatcaaaaaaaaataaaaaaataaaaagataagtcacgtataaagtattaatcaaaacctgcgttttcgtatacaacgtttaaccgtatgtcttatttaaaaaaaattataaaaaaaattaaaaagataagtcacgcataaagtattaattatgttttatcatctaacaacaatgaaaatac

SEQ ID NO: 45307 - DNA, 937 bp, Oryza sativa
ctggctgctgctgctgctccccttttgctctgctttgcggcgaaggatggacatgtacttgcccctgtgggctgtggcctgctgctggtcaagtgcctcgtcgccaacgcgcaacaaacttcaggtcccgagcgagcgtgattacgcaattgattgaatgacggatcaagcgtttgttgggagccagggaaaaatcgtaggacgtcacgcaactctcttttaatttgggacattgtctacaccgtggctcgatcgatcgttgctctcctggagaatgaaaaacacgttttgctcttctgtttttgtttttgtacttccaggacaacatgaaaccgcctactcagaatgatttttttcttgcgacctggtaattgagatcctaagcatggcagcatcgtgggctaattttgcgtgctcaattgctcatggaaccgtgaaagctagcctggttgcatgcacggcaaggctactgatccagcactgtgtgaggccgattgaagcttccgtggagtagaagaatcttctggcgtttgatgtacggagtacttcatctccagggacaggtacggtgatggtcgccattccaccaacctcgaggataaatgcgtctggttacagttgttaagttgatgatgtacgtatgaacgcaatagatgagcaaagtatttcaagcacatgcgtcgctaattgatgcgttcacaacaaaacaagcccttaaatggagaactgtattaggaccatccatgataagtaccacaaatggagttgcacttaaccttcttgctgacgcgccagcgcatggcgatgacccaagcacgatctacgaaactggctgttgagagtatttatgtcatagattctccattttcggtggcagcggtccagttggtttctccgtttctgcaaactatgtagtcttgtactgcaaaatggacgg

SEQ ID NO: 45308 - DNA, 1132 bp, Oryza sativa
ctgcaccccgttgagggatctccggtgaacttattcctctggctgactggctcaatgggccgaatgtgatcgctcgtgcaaaagcaacgaagaagattcgacccgtatatggcccactctacctcagcagtcatcatgggaccacctatacatttgtcgacaaattttcttctaaaaatttgacagatgtaattacagtacaatcgtagtgtaattacactgtaatttgtatgtaattacactgtaacttgcatgtaagtttcacgtaattttaaattattagatctattataaagatttgttttggtgaggaagaaaaaaaaatcacagtacacacatatctgaaaaaaaattgttcccacaacctttattttaccaaaataatatgttatggagagatttttgaaagttacatacaagttatattataagttatattatagttatagtgtaattacatataagttatagtgttaaatttttaagagaaaatttgtcgacaaatatatagcaaaattggtcatcataggttgcccgtttgggcgtccgtcaccgtcgtggccgtcccgttccgagttttgttcacaaattagacgcgagaaaaaaaatcaaggagatgcggtgaagctgttggttggcgagctaactcctggtggcgttacagtatggcggcgtctttggctgattcttgtcccattgctttcgcctgctcaatttcaattctcctaatatttttatgagccggccagagctatcagcagatcgagcgtcgtcgccctcttatgattggatttcatcaccaagtaagtcattgtgataaccatccaatctggatgtttgacatacacatagacactgataacatatatttgaacctgcattcgactgtatacacttgaatcaaacccaataatggcacagtatcaacttgccaagcgtgccaaaaatcacaaccacaatatcgacttgactactccacaggacaaggaaaattgggggtgacataaaatttattctcttgcttgatacatccttacatcagagtaatcaagacaatatgtatagttatataccaaatggtgcaaaaatggaatttctttgatgaggttcctaataactacagtaccttact

SEQ ID NO: 45309 - DNA, 959 bp, Oryza sativa
gatcagcaccgtgaagcgtgaagcaccaaagctcaaaagtagaatgaaattttaaaatataccctaatcgattttcttcaaagaccatacatttattcgaaccgctttgagccggatgaagtggccatacgaataagccataaatatgctaccgaaggtctattttgttaacaactagtgtaactagtgtttttttttctttttacaaaaataacaagaaatggtgcaccgagtgggttggaggagctagtcctagctatcagaccatccaacaacatgtgaacatgaggaaagtggagtgtaccatggaccactcagaacatattggatattttttattgtagaattaaccggattcataactttagacaggctaaaatactaatttgataggtgacaattattttcatcttttaagttatattttatcattatcaattattgatatgggactaaacctaacatgaagaatcaaagccaacggacaataaaagagcctagatgagaggggctattggcgaacagctcgagcttggctggtcagagctcgcaagcttcagagcaggctcgagcgaatcaaagcatgtaacgaccaagctcgagtagctaacgagcctcaaacgtcttttttccaactttgcagccaagattcgttctgggtggaccaatgattttcaggtagagtgaggatcagcccaactgatgtatagttggcactccaaatttgaccacagaaagcacgcaaaaaaagggaaaaaaaagctaaacgatatttgagaatttcgcaaaacttattttgttcgtaaacgctccaaaattctgattatttgccatcgattatggcacacgttgttatattatttcctgctattttggacacagaaacattatcaaatgacctcagtaccactcggttcatctatagctcagagtatggatggcgtcatgaccctgaggcc

SEQ ID NO: 45310 - DNA, 998 bp, Oryza sativa
gacggcggcgcgcacacacgtcggctgccagggagttgggcggcggggaaggaggaacacggcacagcatcgacgcgacttggcggcgacggtagggcagcggcgacggtttcttagagaaggagaaaacggcggaggaggagggtaaggcacagcagcggcggaggacgaacacggcacggtgcaagttggcggctcggctgggtattgggccggcttgggccgaaggagaaaaagaatttcggcccaatttaggtagaattggtttctcaattttgaaagggatttgaatagaagattttgaaaggaaaatatatttggagataatttgaatagggaaggttgaaaggaaattatatttggatctaatttccaaaacagatattttctaatttgagtgcaatatttttggaagtggaatatggtggaatttaatgcactcaaatgagaggggaattaacaatataattcctcaatgtatatatatgtttggaggagaatggttggaggtaaaataaataggatttgaatcctaaatttgatagtagaagtatttgaagaattatttgtggctaatagggaaagttgagtgaagaatataaattgctattttcttagcacaagagcaattattcacaatatttacaataatactattcttgtgccgaagaggaaatcaagccacaggaattaaattggtggctagatcaaaaggaggaatttggacatttggatcgagaatcaaaggatgggtttaagaacaaagaatgggctaacaattaattataataaaattggaattactttgttttaggttctaggacagtatgggaatgtttctttgaccataattcataaaaaaatagaaagagttttcaaactaaatttgaataaaagaatcttagtctaaagaaggtttttaaattaaaaccaaatcaagaaacaccttaatttaaccaactatatttttaaatgaaaaacacaaaagaagttaaata

SEQ ID NO: 45311 - DNA, 962 bp, Oryza sativa
taaaaagccgccggttggaactttacgccttccatggggatgttcgcggtttactatcctcgacgtcggaccgttggttgtaaagcccgacaaaaaccaaacctaaggtcgaagtgctgctcctagcaccccacgccttgatgcgtatagcggtcggagcttcactattccctcgacctccacagcacgccgcacagttagctctcgggctcttttgatcttagccgctccgccgccactcacggttgtcggagtaacacttccgccccaccaaacctacaccaacctcatattcctctagccgatatactgtcggtcgacaccggctagagaagacactaaatctagtcattatgctgccaactctagcaacgactagcaaacaaccaaaccctagccgataccttgctagtcaaatcccagttgtcatccaaattccatactgtcacgccccgaactagtaccgaccggaactagcccgcgacgctccaaattaacctgttaattgataccagtcccaggaaacagtgctggtatcacaggaagacagattatcacagcaacagaggtctctttattatagagtagaggtacagtcatgttgggccgcggacagatcccgagctcacaactgcattacaaaagggaagcggaagccaggacttggaccaaacaacacaggcgcgacttgggaactaggccgaaaccctaaaactcatcgtagccggcttgctcctggaagaactcctcatcagcaggatccgcttcatcttcttcagcaactgggggggattatttatatagagcaagggtgagtacgggagtactcagcaagccatgggaaataagtgtttaatgcaggctacaaagaaagggctgctgtttttgcaattgattttatttgaactcttttctgaaaacaactaagtgagtgcttctcaaacgacacggatgagacagtg

SEQ ID NO: 45312 - DNA, 708 bp, Oryza sativa
cgaagttaaacaaaagccgatagcgtattgtagaatatgactaaatgataaatcataaacatgtgacaaacttagtggcatatccactctttaatttatgtgttggctttaacttaggccctgattgattcagcttagcattattataatctggattattataagtagattgaaacaaacaagtaaattattttgatagattattataatctataagccagattattataatctaataatctcctttggaggagctttttccagattattaagtgactaaagactcattacccttacatgcatgtaataatctatagaaacaaacaactcacagcttattttatgtcagcttattataatccagtttagagtaatctgatttaataatttagattacaataatcttaagctaaaacaaacatggccttaaacgaaactcttcacatgggccacttccattgggccaagatattctgtagacactggtgcaggcttccgggctcaaactttgaaatgtcatagaagttccttctgcagatttcagtgtacagggtgaatttctccgtaattggctaactagtcactagggaagactttttctgtaaggatcactacagatgacttaagaaataagtccaatttaactacctcaattgtagggccaatctgatttatatccctcaaacccaatattgcatatgttgaccc

SEQ ID NO: 45313 - DNA, 710 bp, Oryza sativa
catggagtgtctacaggacaataccatttacagaatcaccatatgatatttctgtatcattttcacatctatttccttacgatagctattcagcctattctaatactagtatatgctctgcatagaaaatgtgaaatgaaaaacattcgggatatggtccactaaacagcataggaccatgaacaacattttttttctttatgggcacgagaacaagtgatcaacagttgacactgcacaatcatgactaatctgaaggggcgagttggcaagttgcttcagaccacgttttgttgaggagtgaaccagataatttttaggtcatacactgtacgacctatccaaaaggttttttgtggagcttgtgcacccacgatactgaaagtcttcagatcatgcactattttctatagtccccacacactcaaatcaaaagccccatttttattctagtagcatgttttgtcaaaagcaatcatggtatttaatcgttgaaaattgattcgaggtaacaaacttggacagttcactgccccagtttaattgtagctctgtttatctaccccaattcgatcattttctgaattctgataatcgaaaaaggctatcaggaagaggcagggaacacacctaaccttaaaatttggccacgatattactggattctgtttctctcgccccgggacatttaagaccaaggaaggggtgca

SEQ ID NO: 45314 - DNA, 2282 bp, Oryza sativa
tttgctgtcagttgatcactgatgctatactgcataatgcatggtcaatgactgccccgggctaatgaacaatcatggacatgatcaggtcgctcaagaacaatgtggacaaagccacagggccaacgtcaagtacacctcccagtttgacaaacaagtgagggtaccatatcgtaggactgtagtaggctactcctatggctagtaagtagggtgcagcagcgcggcgggcatgatgctgcccccagtggccgtgacgccgcagccctcatttggctgtcagcgtccttggtcccaccggtcagcgtcccgtagggtagggttggctctagggggcggcttctgttccgacaaggtcgggccggttcggaggtcgcgtggggcccaccctgctggggcagtggattgtgcgctttggcacgcgcgcgctggatccgacggctgtccaccagaatccgacacgcccgggcctgcgccaccggtgcccacgaggacgatccgacggccacgatagcacgatgcgatgcgggctcaggcttttcagagagagtctgacctgtcgctcgtagcagcggtgcctggatttggctcttctgccaggacgcatcatatcctggcgtgcacgtttgattgcaccagaccagatcatccatccatggcagaggacaactggaatattcgtttaatttttactcatacaatggccagtctagatcctacaccaaaatttttcaccctatcacatcgaacgtttcaacatctgcatgaagtttaaatataggcttaaaaacaattaattgcatagattgcgactaatttgcgagacgaatcttttaatcctagttgctacatgatttgacaatgtgttgctacagtaaacatttgctaatgattgattaattaggcttaataaattcgtctcgcggtttactgacgaattatgtaattagtttttttattagtggccgaacacaccatgcgacaccctatataatacccgatgtgacacactaaaactctacacccttggatctaaacacccccattaatgttgtactttttttggtcctaatataaggccccgtttagatcccactacaaaatttttcaccctgtcacatcgaatgtttaaacacttgcatggagtattaaatataggctaaaaaataactaattgtacagattgcgactaacttgcgagacaaatcttttaagcctaattgctccatgaattaataatttggtgctacagtaaacatgtgctaatgatggattaattaggcttaataaattcgccttgcggtttactgacggattctgtaattagtttttttattagtgtccaaacacccaatataatatccgatgtgacacgccaaaactttatacccctgcatccgatgtaacatgccaaaactttacacccctacatctaaacaccccctaagtgcaacttggtgtatttgtgacatatcctaaaactagtcctagaaatatcacatatatactagattacatttatattgggattgagggagtaactaagatcaaacgattttgtacctggaccgaaggtaagctatttcgatattctgcatcgtttgctactccctccatttcaaaatgaagggcttgtttgactggcgggtaacgtacttcactcataaaatcagcagcgtgtagccatagcctagatgttgaacaggcatgtagttattattgttatgaatttggtagccaaaaatagctatattttactatagagagagtaatagtactatctctgtctcataatataagggattttgggtggatgtgacacattttaatataatgaatctagacagatgtgttgcatccactaagacggagggagtattaaactctaagggcgttcacaatgtacacacatggcgtgtggcaaagtctatccacctaagcacaatgcgtgtgtggagaagaaaagtaggtgggacccacgtgaaaaccaggttcgcgtggcttgttttggctccgaacctcagcgaaatttgtcagagaaaaaacatgccacacacagagcaggagagagagagagagggaagaagctcgccggagaagccacttccgcgccgaagaagctcaccggagagggagatgagtaggggcgccgacgccaccgccgtcgtccgcagtaccgcggccgtgagatccaccgcactgctcgacgccgtttccgtcttctgacgtgccactcgaaggccgctcaacgccgccgctatcttccgccgcgccgagctcca

SEQ ID NO: 45315 - DNA, 2744 bp, Oryza sativa
acacacacacattttgcttatagtctgctaattgttttctaacgggtgcaggttttgtaagctacgatctcctgcttccgcacaggcagccattggtgtgatgaacggtttccaattaggcagtaaaaaactcaaagtacaactcagagagacaactccaagcacagtaaacccttttgacgaaaactatgatgaccacgcgatcaggttcctggtacatatttgtcagataattgatcgttgaattgtttgctctggccgcagcattgggagcttcgtgtatcttctttgttcaattcacattcttgaacactgttacgtcgtgtaatttactgcagcctagtggtagaatttgtttcatcagacccttgtacatcagaagtcagattcattcaattgtggacattttctcctgacagtgattccggtttctcattgacacgattccggactcacccaaaactattatctgaaccattattgacttatcatgtctaaatccccccatggaaatctgatgcttttggaaaatgcttgtcagtgattcatattaagtggagtagtaataatttgtcagtactaacgtggagtatcatttgacaagattcagaatatgaaatttggtggggcgagagtttgatgtctgagcagcagatgcagatcagaaattcagaacaggataaaagcaatggaccccctgcactccatcgtgcaacaactccagatggccatgccatgggccccaacacagggtattctttctagcttgtcccaacaacaattttgtcctttctcatgtgcaaccagcagcgacaggactacgctgcaattgcttgtgcttaccctgaattaaccggtaagaggcgccacagccgcgaaacggccaattgttttgcagtaactcatctgaacttttgaaaaagagtttctcctttctggctcgccgctaccaacatcaaaatggatcgtgctgtgtatgtttgccagctttggctatgattgtgacagtgtacttaattgcgtgtgcacaacgggttatctgagtaggacgcgttagctgagtagctgtacggttatcatgcacggctcattaggcacatctgcattctgcaccaaactcactgattagtctctactcagtttgggcatgtgaaacagtgaaagagtttgaataactccgtagtgcatcatcaggaattcaatctcaagctatctgcttgaattaaacatcactccttctgttccgtagtattacattatgggtttgtcctagatcaaccttcctcagatttaaccaaatgtcctaaatcaaccttcctcaaatttaaccaaatatatatatatatatatatatatatatataaagcaacattttcaacacaaatatactatcaaaatattcaattatgaatttgatgttacagatgttagtactatatatttttataaacttgaataaactaaaaaaaattagcttagtgtaaacctaaaacgacttggctgtgttcggaaccttgtgttcccaacacaagctggccgcacggaaaacggcacggtccattagcacatgattaattagatatttgctattttttttaaaaaaagaattaatatgattttttaagcaactttcgtatagaaactttttaaaaaacacaccgtttaacagtttgaaaagcgtgcgcgcgaaaaacaagaaaaaagtgttgggaacttgtacttccaaacaacatgagacgacggaaggagtaccctggtacgagaaaacagtctggtgattggtgagtaccacaaacttgtaataatgcttaccgatcccttggtagcacggcacgaagccccccttgtccaggctggccatggtctgcgacgtacggcgtagcctgcacaaacgtctatatgtagttgccgccaaagaggtcaacatactccctccgtcccaaaaaaaaaaccaatcctgtgtttgaatttaggattaggtttttttagactagggagtaggggatttgggggctctttgccattgacgccgtcaccgacgccgtgtggccatcccgccgccaaacgatcttcttgcaaatcactctcctcctagcagcgggtctgcacaagaaatggcggcgaaggtggggaggtcatctcctctctggcgaagtttggaaggggaaatggaagagatccgatggcctagattgctctggtagtgacatagttgtatggtttgatcgcgtgtgactttcccatttgatagggtctaaactcctaaatttaatttcaaaatttaatttcaaaagttgggtttgaattgtagttatggagttactaaaacccaattctacctctctaatttattttattagagcactttagtcagctcacttcattttttatttttatattgaagttgaaattgttttgattggactttagctccagaaaatgtggacttcagctccggacttcattttttttattgaagctgtgtcaaactggcggtagaagtcctctgtgttcgcatgagctcgatgtgaattgtgaactattccctccacacgaaaaaccgagcgtttcattagcgcataattaattaagtattagttttttttttcaaaaatggattaatttgattttttaagcaactttcatatagaaacttttttaagtagtacaccatttagcagtttaaaaaacgtgcgcgtgaaaaacgagggaaatgtgttgggaacgaggggttgcaacacagc

SEQ ID NO: 45316 - DNA, 772 bp, Oryza sativa
tgaaatcacgaaatttcacgcgaaggattgtaaattctgatactgatacaaaccgacaactgattcctcagtcctcactaacgacaggtgttcgagcacaagtgccctaaggccattcacagtacacctaggtatcattctccctcatgcagccagcttaaagattcccctccacttagacatagttcggagcctcgccaagaatcgtcagaattacagcttttgggcccacaagagaagaggtgaagaagggggagggaggggagaagcaccgatgccgtcgtcctccccgatctgcgccagccgaagctcgctggccgcgcagccccccgatccatgcctgccaccaagggaggaggccggacggggagctccgcccgcagcatgggtcgcgtcgccgcctccagccccgacgaggagagatggaggcgtagagctcggtgccgccgccgctccgccgacgctatcgaacaatgacatcgccgccttcggcctcgacgaggagaggtggaggcgtggagctcggcgtgccgccgcttcgcttcgttcgcccgggagagagaatggtggggaaagtgtgagaggagagagagggagagataaaactgagtggagagagataggtgggacccactccaagcaacatgcattgtgaagtatgtagctaatatggttctttagcccaattggaagcccaggcgtagcattttccaggacgcactgtgagcagggttcctcttactgcgtggtaacctcgagacatgccgtggtt

SEQ ID NO: 45317 - DNA, 1668 bp, Oryza sativa
ctgtctaaagactttgcagtcattggtggagtgggaaccagaattgtgccacttacaatactttcttttccctagttcctcagccgatgggattatgtggccagcaggaagttgtatttgcttctcccgaagtagcaagtcaaaaatttatcagctttagtaatatcatttaagcaacaccccatcttctgtcgatatataaccttgaaaacatcttcatcggaatcggctgcgtcacctctatcagctgtatcggctgtcctctgtccgatccatctcagccgatgcagactccagccgatgcattcgcagtcgatgcacactctgttcttcgaatcgatctctttatcgaatccgcctcgatcccaatgtcaaacctggttcacaatttaccaaatttgatcgtcaacaggtggcgctctccccttgcacagatccaacaacagctaccatatctcgtcacgacggcggcgacctcagcaatgacagtgggcgggagcaacgtgcaccgccgttgggagcgggcgaatctcgagagtggcgatgggcgggcggccggcgtgctagggtttgggattgtgcaaccagcagcggcggagctgggttttctttttgagaattttatttatatattttgtgattttttttgtttttgcatgtggttggcttaaatgcccgcatgcgaaaatcagattttcgcatgtagattttttagacctttgagctcatgtgggccattcacacgcatgcaaagatcgatttgggccatatgaaaaatgaaatttgtagtaggtgtctcttcttcaaattcagataaagatatttgttaaacaaaagtctgaaatgtgtgcactgaccaagtgaccatagagaataaaatgctcaattcagtaataaatatgggatacgtttattctaattcctaaataaaagataccagtctccaaaattttcagcatgcatgtatcaaatctacatgacgaaagagctaaatcaacccccattatttgtatatgacttaaatagttatagaataaattgaaaaaaatagtaacatagattgtgttgatattagtctatacataaacatgtatgactaaatttgatctacaactagagaaataaaaataataaaatcagacagtgaatagtactcatatagataaaatttgttatttttgtttctacatatgtctatcgaatttagacttgcatattcgtatagtgtcttatattattatagtccatcttatcaaattttacaaacatacatgactaaatttgttctacaattagagaaacaaaaataacaaaatcagacagtattcactacccatatagcgcaaataaaatttgttttttttcttcatatatctatcgaatttagactcatatgtttatatagtgtcttatattattatagtccatcatattaaatttataattttttatataactgtttaaattacatgcataaacctaggtttagaaaatactttccacagcacagttagaatctgaaatgttctggcaatgtatcttctgaaatgtaagaagctaacaactgcactaatttgaatacacaagcccagatcaagcgaactaatcaaatcaatattgcaattctgcacaatgctaataaaaagaaagcgagctgaagatgcacag

SEQ ID NO: 45318 - DNA, 726 bp, Oryza sativa
tgcattttgcttgcacgcgctcagtccggatcgcggcgtgcccttcttttcccaaaaaccgctactaaaattaggccgctttccccccttctctccctgcttgtgttcacagcaatagcagctcgggttggcttgggacacttaaaatattggagcagagcagcagcagcagtagtaggcaccactatgaattgcaagttgccttgtcccctgtttgcactctcacgaaaccgttagttctgtgcacatctttccgggcatgccccaccttgtgtggacaacagtatgttgtatgcaatgtgtgtgtggggtaggccaaagttggtggtacttgcaaacaaaaagtcgctttaatctcgcaccagttgcttgaccactacaggaaccgagatgcgttgccattttgcctattctgatgatgccatgatctggggtatatttctgatgtgttgttttggatttgtgatcgtgcaggccgagtacttccgtcaccttctcaagcccgtgacgtaggttgaccagtacataatcctcctcccttcttcacccgacgagagagctagctgcgcagcttctctcacaaggaaaaaaacagaggagacaaacagagtttggaagttaagagcagaagaagatgcagggagaccacgggtactacggcgggagggactcgccgccgcaggggtacggctacggcggcggctacggctacggaggggctgcagg

SEQ ID NO: 45319 - DNA, 730 bp, Oryza sativa
ccgttgctggtaaatccttcgccgctccggttcttccaatctgcccgcgatcttcttttcacgcccttttctgttgcgtgtaactaatcgtgagtccgaattccccgttctggctacgaatgctcacaccaatctagatagttgtggattttttttttcgccgggtcggcggcgaaggaagatagttgcggatttcgttgatgtcatgtggaatactggaatactagcctaattcgctcatcactacattctattgctgttaccaaaaaaacatttactttcacagcttcacaaagcgaatagtagtattgaatgtgcctatatggtgtagttcacctttactgtgtgcaagttgcttatgagggataagatgttaggactgtcaattctgctacactgataatttttaaacttgtttttttttgttcaattgttgagaaaacaatcaggacaatcgtgtttcaactgctgagtttcttagatttttaatcttattcaatcctgtcgttgtatataggctctgtaatctgtatgcaccgccattgatctgaatacatactgctttctatgaccttatcatcttcctttgaatagctttggattttccatcttcctgtatgatgctattttatcacttattgccatatatgttgttagaattgctaagtaaatcatgtaaagttggagctgatccttttcaagtatatatgttttttttctatttgcaccc

SEQ ID NO: 45320 - DNA, 964 bp, Oryza sativa
tggtggccggcggcgtgccggaggccttggcggccttgcgggcggcgcggtggctgggcggcgcggcggagggccgggcggcctcgcggcgggcggcgcgccagcggccggcgctgcagcggcagcggcaacgacaacgggcttttttttcttctttttagaatttgtgtgtgatgtgaatgtgatgtatctgtgatgaattttataaaatttgtgatgtatctatgatgtatcgatttgaggagttgaggatttgaggatttggggataatttatttgggattttgggatggggatggggtgaaatcaatatattaaaaacaatgaagaaaagaaaataataatggagcaaccggatctagctagcctagctctatctttagtccctaccaaccgggactaaaaaggctctatcgggacttaaaaattgatttttactcccggttttttcacccgggactaaagatcagtcccggattggtagtcccggttttcaaaccgggactaaggggggttacaaaccgagagtaaagcccctttctccatcggtaaattttttgtcaactaaacatgccctaagaatgaaaaaaaaaatttggtggagacaggatgcaaattaacaggctctcattcatccccaccctatatagctgtcacgtggacaaccgagcgatcgaacgtctcagctgggcaaggctccaggcgcagggcaaatagaatggaggagccgagtcacccgtcatctcccaagcctgtcggctcacgggctcagagcctcagattgcatcggcatatttactttgcaaatccgccgacgtcgtctatctcgtcgatcagctcttttgcccgttgtccgcgcgctcaccagcgatggctagggcgaacaccgttggtccactcctccttgacattggacgtaacccactgctgcaggtcgatccataccattgtcatttcgctttcg

SEQ ID NO: 45321 - DNA, 1622 bp, Oryza sativa
  unsure (1)..(1622): unsure at all n locations
ttatatagtttttaaaagtcactgcaatttctaccccttacttctgccatctccttctttatttgcttgctagatctaccactttctattcattctccttgtaacctttaaaaattggatcttatagtttttagagtctattgtcttgttaggtttctttttataatttctagaagtcacatcaaacgctgccattatactattctacggttcgtccaatgtcttttttctgtttattatcattgggattttaaaattcgaatataataatcattcgggttcatttttttttactttttagaagtcccgccaaaccgttaacggctttgccactaaactcctctatggcttatctgctgcctctcttctttattgtcattgagattttaaaatcgaacatgattgtcattgggtttttttttactttttagaagttccgaacctttaaaaattggaccttgtagtttttagagtttattgtcttgttgggtttcattttttataatttttagaagtcctgttaaacgatgccactatactcctctacagctcacccgccgcctactctttattatcattgggattctcaaaatcgaacataactaccgttggaattcattttttattttctagaagtcctaccaaccatcggtggctctgcaactatactcctatacacctagtccgctgcttctcctttttattgtcattgagattttaaaaatcgaatatgattatcaatgtggtntattttttttactttctagaaatcctagcaaccgccttgtccgtttgcttcacgacctatatgttgtccctccttttaatcgtcagtaggattctatttggtgttttatcaacaagtatatgtcgtttcaacgaccaccactctactcctttataggcatgttacttaatttatcttgtcatatgttttaggtggtatttctttcaatagtccttattttctatcaccaattagttatcaataaattgtattcctaatggaaatctttttattccttttctaatttcagaatttatttttttttcaaattttaactaatattgtatagtgttcttttaatatttttatttttcaattccagttgtttcaaaattgtattcctactcaactctcttttactttttttaatttttatattattttattttttattctgaattttaattaatctcgtatcgggttcttatatggattcttctttcaatattgcttatttttaatttagaatttctattaattttaaattgtattcctactttaactcttattttctttttgctaattttagattttatttttatttttcttccaaatattaactaatatcgtattgggtttttatattgactattctctcaatattcattatttttaattccgaatttcagctatttttgattttgtatttctacttggaatctccttttctttttctctgattaatgtgggaatttctctgattaaaaatcgaacatacctatcgttggaatttattttttattttctagaagtcccgccaaccatcggtggctctgcaactatactcctatacacccagctcactgcttctcctttttattgtcattgagatttt

SEQ ID NO: 45322 - DNA, 1098 bp, Oryza sativa
ggcatgatggctgcgatgatgatggcgtccatcggcgatcgagaggacgccgctcccgacacctgcacgcctcgggagccactctgcaccttggacctggtctacggtggacgccgcaacccatacatattaccgccacaatcatcatcatgccctccattactcctcctagtactacttcattatctctccatactgattcatctgcaaactggagtagtagcatttgcaatcctgcatattgcaccgctacacgaacaaaaagtttcactagccccctctgcattgtgggccccacttcttagcacacaatcacacatgcaattaaattttaaaatatactgttcattttttctttctcgtaaatatgcgggatgcaattttattgatacagatataccatcaatatcacagtcccgcgccacgaatgggagagactatactcggtgtcgtgtggcgcgttctggcatgcccaataagagagcccaaatagtcgttattcatccaatttcagaccggtcttcacataaaagcgttggttttccccaggtcattgggggccaagaattaaccaaattggccgtaaaatggggttaaccaattacatcaggatatttatgagaaaaagaaaaatgaccatatattaatatttcaaatttaattcctcgcacgtgactgtcggtcggtgacatatatataggcacgcaactaatagaagttagttttcgtgctccatccatgtgtatgcagtatggagtatggactatggtctatgagtatataagtatgcatgcattcatacgcaacgtgttagtgcttaattgcatgcgggtgctaattaatcttgtttgcataaggtgactgtcctgtctagtgtgccgctgatctttccatggaatctgctgctgctactacgaatagtactccattttacaaaaggtgcaggggatcgagggcgtgcaactacaaatgtgaggccgcactagcgtataattgtggatgaatgcatgcgggcatgtgttttggcccacctgcctgcccatgtgggcgcatggtgtacccgctgtcttttctacattgtgggtgtactcaagttcg

SEQ ID NO: 45323 - DNA, 743 bp, Oryza sativa
tgtactgctacttcaggagtagtagttcaattagtttttggtcaatatttgtagggtcaagatgccaccgatccatcatgcatatcaaggagttgacgatggccttttaaatgaatataagagcgagtactgtactgtacactgttgattagcacccacagtttggattttaagtcagggaaccctggtaaggatctggctgtatgtctatctgcagtagtacacaattacgcatcacacgagatcaatggtaagggaaaattgcccgtttggatcgatccaagacaatccggctcggttctggagtcttaggttataaacattgggctggattatgccctgatgaaaccatctcatacccatggtccgagcaagcactaatcaagggcacgtacggttgtctgacattgaacgattataagagatagattatatagagtaggactttataaatatggagaaacatcctatatgacgactttctcccgttatatagtgcagcaagggtaagtggctaagaaacccgatttttacaaattctcaccgactagtttctcggaatcttgagtttcccaaacggagcctaaaataagcttttctggcctagcaggatgtttgctttggggcaacaaaagtacaaaacatgaaggcgactacaaagtgagcgcaaaaatcgagcgatgtttcactgcaactagaaaaaaaatgtttcactactaaatagaaaatttgtcagcctacaa

SEQ ID NO: 45324 - DNA, 1160 bp, Oryza sativa
ggggagtccggcgtagcatccaccgccagtccgccgccggcgctaggcgtagctgcggcaatgcgaatatgcgaccgcatcgttggtttcaggcttcagaaggttcgattgattgcgcggttcagaaacttcagaactcagaagcataggcctcgacggcccaaaagttcgagcccattcaacaagggtttgggcccatttgggctacggcaatttcagcccagctgggagctgtttcaaagcccagcagaaggattaatttcggtcagtttcaggttaagcccattttgattcaaaggaaattcagggtgtgtttagttcttcgggggtaaagtttttaagtatatggacacacatttgaagtattaaacgtagactaatagtaaaacaaattatagattccaccagctgtaaactacgagacgaatttattaagcctaattaatcactcattagcaaatatttattgtagcatcacattgtcaaatcatgacgcaattaggtttaaaagattcgtctcgcaatttcctggtgaactgtaattgattttttttcaacatttaatacttcaagcatgcatccaaatatttgatatgacagagcgaaaaattttatttaggaactaataggcccttagatgctgagacgagagaggcagcccgcgaataggacaagtggggaatccgatcctttgacgacggcacggccgggccaatcgagtcggccagcgaaatgctcggctccgctctccagcgtgcgtgtttcgatcgatccgagccgcacccacccaccacttgcctgcatgcatgtgttgttgctgcagcagcagctgcagagctctcgatagatggacggatcatgagcttgcctagctgttctttctaaggaaaggtgatcatgagcttggctatgccaaagtgctccaggcattgtttgtaccctagcagctatgcctacagcaggaatagctaccgtacgcacagctctgtattattgttcgtatcgtgcacgggcacaccgtaacattggctcctccgagtaagcgaatatctgtatatctgatgtccattagggcaaaagcaatgcgtcacggtacttgttcagcctggggtgccacgttggatgtaatttgtaccaagcaacttaacccacagtgcaag

SEQ ID NO: 45325 - DNA, 740 bp, Oryza sativa
tgaatgattcggggcactgctgaaacccaaagctctccttggattatgcctcctgatctttaacaaagtgatcactgtttagtagtattgtcggatttagcaggcacttaaaaaatgaaccagaattgtaatcttatccatttattgtatatacttcgttgcaattaacgacttacccagatccctagctaatgagcattatatgcggctccttcaggttaacttcagcagaatgcaatattactatgattaattgccccaggtccgaacgagtcaaatcaaatcatcctctgttgtgtgctttggtagcaataatgagccaaattgcaactttctgctttgcgagggaagaagcctgcagatacagtgacacacattctgctatgcccagactccagaatccagccatccaggccattaccttttcagaaagaaagcagatgtctttactcttttaataactgtactattactcctaactgcagcgccatatagggcaggctcactcatctgatcggtaatcacacagctggtagatattgtactctagtcacacaaaaaaacgaatctaaaattagatataacacactctattaataaatctggagagagctgtatccaaattcatagtactaaaatgtatcacatccaatactagattgggtttttttatgagatgaaggaagtactggaaagtgtcaatcttagatgagaacctcgaccatcctagctaagcatgt

SEQ ID NO: 45326 - DNA, 503 bp, Oryza sativa
caattattgacattacttagcattgcttgtatagacgattatacactccatgcttattattattatgcaacccctatgctacatccgtagtccagaggggttacataatgtctataaaagtggagacacaagatatgagggtgtggcatcctttctcattcttccattgcattctcaagtgtacaaaacctctcctccaaccctccatttatagggcaatgccttgcccactttccatattagtgatgggcccaattagtaggtaaccgggccgggccttcatgggctggcggtatcctaaaactcccccttaggctctcactgcgtgatgcctatgtctcatcaaaactccacaaaaacccagcgggaaaaatttggagaaagagtacatagcatacgcttgcaatgtcgcatgaattgcctcactaaaaaccttataagaaactactgggaaaacttatctaagggaaaaagtgtacaacccacccaattcatcgtttatt

SEQ ID NO: 45327 - DNA, 1049 bp, Oryza sativa
gtcaaactcttataaatcacaaaagtatttacgaagtgatttgatagttttaattctttatgcaaactgcattcactagtgcggtgtaacatgcattagacccggactatcatatttcctgacatttcctatctaggggttcattctctccccctaaatgactggaaataattcttatttgtcaaggaattcaggcttcataactatctctgtaaaaggtttccgactttcggagagagccttttgcaatgcattatgatagtggaaaatgcacataaaccaaacaaatgcaatagcactagttgcaggatggatgttcatgccgatggtctaaatttgctttcagagtccgctacttttaggactacatgtccttttctactgcgggtaatacaacaaggatatagcaaatattgcaattcatatcttatagttagtccgcttatgcggatatttggtacttcgtgctaccaattcaccaatcatcaaatgcaatgctagcattgtcctcgtggacttctaaggatgatttagtgagttctattggggttcacgtgatctttctggatcagtcttggcaaatacacggtgtctatgagacactagatgtttgctacttcggaagcgcatatgtccatacagtaccaaatgggagccgcagatattcctcgcaatccagttcagggatgctagaactatatgtggtttatgcactaatctcctgtcgctgcatactggcacacaaatattcatgatttgggaaaatcatgcatacatgtgctatgaccatacgagttgtaatatttattcttataattctaagactgaaaatggctaaaaatccattgctaaaatggtgtagcccaaatcatcacacttttagaaagttcaacgaggttgacggacaatagatgcttctataaagtgcatcatttgttccataggtaatatgaccgtggcactttctcggctgacaaattcagtttgttgctgctagcaacggtcatactgtttcctgtactatggctctggaaatatctctttctctt

SEQ ID NO: 45328 - DNA, 969 bp, Oryza sativa
cattttgtagccaccataattagctagaacgatcggggggccttggtagatatgtttatgatattatgaaaactatctgttcttaacttcttactatattttttaatacatgttttttttgttgccaaagttaagtgaaaatcccacagttttttgttgcctcaatgagataaatgtaatacatagagatgtatctgtgtactgcaaaaggtatcagtgcgaatttctttgcattaatttttattgaaaattgactagtatttccgacattcactaggagcggtgatgtgcacccaagcaatcctaggatttggacccagccacccaagtggatggagttattaaatagcttcaccaccaggccattggggtgtatttctttgcattagtttatgtcaaagtaaatatatctcagagaactgtatgctgtgacattgccaatggggagtggcattgatatgtatccttgaggaaaagaggaagagaatttagataaattcataaatatcaaatagtgactgctttctgaatacatgcttagttattctgtatgcaagtttccatcacgagtacagctagtcaaagcctcatcgaagcttgtactgcatgtgttatcaactctattatacctatgttgagattaaactgtcttttatgtttgcatgagagattctgttaggagtccatggaactgatcttcatgctgacttgtataattaactacaagctgcgttgcacctaacactttgtttgctagttgttaagtgctggatgttttctaacagttgaggtactctcctcaaggaccacggaaaagctcaagttataactgaaatatgtatatccattatgttctgatttttgaacaaactggtagctattgatgagaaacttgtaattatgaactttactgtttcgtagagcgcatggtagctcttttgcaattctgatcacaaatcatgggctgca

SEQ ID NO: 45329 - DNA, 742 bp, Oryza sativa
  unsure (1)..(742): unsure at all n locations
ttaaaaaaaatcttttgccactttgcctacgtgagttgctatatgaggtagccagtgtggaccagtgatatgcaatgtctgttttgcccctcgccttcgtttctctccttggagatgaaactcccaatttaaccagccgtctctcctctccgaatccgttcgcttggcggatcaactcgttggatgcaaatccaattccgatcaggagtaggcattcactctcgtttcctgccgatataactgagcgctagattggccatcgaccacatcaccaacaactctcgccgcctcacactcgcagatctgacagttgatttggggaaaaaaaattcaaaaaataaggagaaaatcttttcgccgccgacgaggaggagagggatgtcgcggccgaggacgacgagatgcccaaagcggcctgcgccccagctggccgtggctccgtgcgccgccaccggcaagcgccgccgcctcgcgccccccgagtcgccgtgggcgtcgttgaaccccgacctcctgcggctggtcgcggagcgggcgctcgccagcgacctcctcgactacgtccgcctccgcgccgtctgcgccgcctggcgctccgncacccgctgcccgcgcgggcgcgggatcaccgacccgcgcttccacccgcgccgctggatgatgttccccgagggccacggcctccaccccggccacgccaagctccgcgggttcgtccgcttcttcaacctctccaccggcg

SEQ ID NO: 45330 - DNA, 593 bp, Oryza sativa
tactatgaatgtgagatataagccaagtaatctgtgtagctctacgactacagagttgagagtcagtccattttctgagcatccaaggcctgaaaccttgaaccacagtttagtgatcaaataatatgtggctaactagctatgtgctcagtagacagaggtatattacattaagaaaaacaacttagctttatatcatgttaatccaaggaaaattacattcttagcaaagtataacaagcatgatgcaacaaaacaaacataacttcaaacaatcaattctgacctatcaaagcaagaacaaagcccaggaatataataactacttcgaagaaattaaaatgcagcttcacagagagccatacctgcggggcatcgtcggggctgtgctcgtgccgagatcggcgaggcgacggcgagagctttcatcacagcggccatcctgctgccgtttggtggctcttggaggaggtggtggtggatgagcgccaaggaggaaggaaggagaggaggggtgaaatgcagagggaggtcggggtttgagtggtgcagagggggaggggagtgcagagagcgattgggtggtggcgtgt

SEQ ID NO: 45331 - DNA, 649 bp, Oryza sativa
agcagcaacaacaaaacacacagactcgacttcacatgctcatgctgacatagaagccactccttattgacaacttagaatttaactactaaaatatacgaacacgagtagctgcagcagcagcaatgcatgacagacttagagcacatgtttaggctgacatagaagccactccttattgataacttagaatttaactactaataaatatgatggtcttccgatggaggaaatcataatgcatcatttattctccccatgaaacggacagaacttgacttctgcagtggtatcatgcttcatgacatggcgacaatcactatgtctcaggtcttctcttcacccctataaagacaggaaagatagaagattagatccaacgtcacagggtacatggaaatatatgatgtttacaggttgattgcaatatgtcatggaccttaagtgttccccgatgatcttgtggacgtcttggcctcctcttgtcccgatgcgttcggggccagcacaggctcctcccggaccggaatcactgaagtttcaattgattgctattcgtagtcttcatcgtactcctcatcagacaagtcttcgtaagcattgatctcaacctgatagcggagaatcccccctatcccaccaaagcccc

SEQ ID NO: 45332 - DNA, 656 bp, Oryza sativa
acattgggcatgccctaaattattatagcacttcccacatctatattgatatattcatattaatgttaatgaatctagataatggcttacattgtcggagggagtatgttcatatgcactatagctgtgtataatgttaaatcaaattcagttggacttggatcgtaattttcttattccaaatctctttggattagcgagaatcctgcttcaaaatccctgctctcctcatccgaatggattaggcagatatcaacaagactactccgtacatcagcattcagcactatggtcgtaaaacatcagcaggttgtgacatgcggaattgcagacgaattctcagtccttccgcgtacagagatcgcaatctcgcattcgcattggctgttgtaagttgtaacctgtactaagcctgtaacattggcaacggaaaggagatcaacacggaaacaaatcgctgtcaggggagacccgtgtatcagctcgtctgatcgtgggctcggacgcattcattccaggatttgtcgcgagtgccaaccaccaaactatttcccggacaacttcagagagagagtccaggtgatctgtacgtgcttgtccctgaagggatgaaccgtgaacgaacgagatgttccaaggtatactgatagtctagt

SEQ ID NO: 45333 - DNA, 1389 bp, Oryza sativa
gccaatttgtttgtgaaagctctcttcccacaagtgcactccgtctctttgctttagggaagaccctaccacagtccaccatgagcaaagttattccatgcgacggcatgctccacctacatgtcgcttgcatgagcaaagttattctatttgcccaccaaatagattttaaaatttttagtgcgttttccttaatgaaatttggtcgaccgaacctttcggccgacccggcaaaaaattttttagtgcgcacactttgcattgacacctgatgtgctgagtaggcagtttcagtgcttgctatatcgtctaaaggcaaaatgcactgattctgataaagcattaagatttgcaagtatcagcattttgatgaaaggaattcatagtttagtccatggcatagtgcgcttggtaggtggtgcgtggtggccttcctggagaggatacatatttaatattttacagaaaaggttaaagcgatggagtccaaattaattggaagataaaattaaaatgatttgcaatagccaaacaatggtgaaacctgggtaatctgtcaacaagaagaaatgactatggagacttatccaacaacttgccttagatgcgcaagctaccagacagctagcacatgcgcaagctctctctctctctctcccacaggaatgtatgctgcctgtttgtttgtgaaagctctctacccacaagtgcacttcgtctctttgttttgtggaggaccctaccacagtccacaactgcatgtccatgagagtttttccttgcgattggcatgctccaccaatatgtcgcttgctttacccgtttgcccgccaaatagatttttagtggcacaatttgcatctctttgtttcttgacctgtagcctttttgcatcgacacctgatgtgcagtgcagtgtagacaattcagtgcttgctatatcgtctaaaggcaaaacacatcgattctgagaaagcattacgatttgcaagcatcatccctttgaagaaagaagtattgttgagaccatggcttggcacgcttggtggatggtgggtggcggccttcctggcactgagagtaagagaaaacagtaaaaatcaattcgaagatgaatgaaaaacggaagtgaaaccgggataaagatgggggaagagactagtccagcgacaacttagcattcaatctgcatcttttagtctttacaagacatcaatttgggaaggatctaacaggcctacagtacgtgtgaagatgcaggatcaccacacacgatccagaattattattccagatggacaacggcttgttggaatgtggtgaggaagagccagcagcaaaggccgcggaatcacttccaacttttgggttgcaactgcaaggagggga

SEQ ID NO: 45334 - DNA, 1695 bp, Oryza sativa
ttggggttggcactagcgggagcctgcctttttggcgagaagtgatcgagcaagcatcgatcccatcccgccgtctctcgcccccttttgttctagctagctagtgctcgaatcccacacgggaaaaggggggtttagcaatgtcaacttgatgcatgcttggtaaaagttgtcctaatgatgctcattaactattagttgttcctgctaattaactccatggatctggtcttaaagcacggggatgagtagcgtgtcatttgcttgttgatgttcagatcagaggatgggtttacgagtagtaagcagctttttagggattaattcccttggccaatgattggacaagaggctatatgtttcttggcgtactagtaggctttctgcatgctttgagtgccacgatcttgacccaagctttcacgtaacagttgacaatttctacatcgccatcaggccgtatcggtcgggctacagtacaccaaccaatattttagctttggttacctcagcgagtcaggagcctcgttcattcgttctttaaagatgtgactcctggcctttttttttaagttccaaactttttttaaaacttttaactttttcatcacaatattttaattttaaccaaacttttaattttagcgcgaactaaacacatcatctattgaggaaactccacccaaacagtagcgatttacgacacaatctttttttctttttctttttttttttttttgctgtggatgaatgagagaaaggggggagggagagatgaactctatttgtcagaccgctcagctcaatatatgagcaaaaagtactcgcagagtagcgacatgaagggagtatatatttgtattttgatctagcacaatagccagcatatttgggttagatttacttcaaagcttaggcctcctttgatttgttggaaaacattttgaaacttggaggatttcaatactatagaaaaaaaattcgtacaaaggtctttggaaaaaagattgaatcaaatggataatcctacaacgattttggaggaacatttctttttaaatctatatctctcattcgattcctgcggcttaatcaaaggaccattcctatgtttagcgaattcctatgttttacaattctttattttgtacttacgttcatgtcaaaatcttatgcttcttctatttctatttctttgttttctcaatcttgcgtttgaaatgaacccttataattgcatataaatttgttcttttgtcatctttgaatggtacattagattatttggtttatcttagtcgttacccctcctagtttaataaactctgtttaatatttgtcttccatatctatatatacgattataaatttgtagtgctgtgacactaagtgcaaccaagtgctattattgtctacattggccagctcgccaccttgctccaattatacaaacctccttttcctaagttgtcattgtatgaacttatggttgcataatcttgtatctctcttttctaagttgtcattgtctaaacttatggttgcatacttgtatagtatttagtacattgttactagccatatatgggcatgtgtactacatattttaaataatttatatatatatcagcgtggtatttattaattcatttagaattattaagtcatggatatattataattcagattacaact

SEQ ID NO: 45335 - DNA, 4257 bp, Oryza sativa
ttaataaattcattttgtgtgtgtgtgtgtaggatttcaatggtagatttgatcgatggatgaaaacaatatgatggtgctttttttttattaacacaggaatttttagtttttctgattgagaatttctatttgacatatggacgcatatgcatatattaggataaatcggggtttcaataattgggaaaaagaaaaagaaaacaccgattggcgatatcgtggtccactagccatttcctgcgccgagcaggttgtcttcggaaaagacgaccgatgtatatgccatccatttgttccatttcttccacaggagcacaggacgcacgcatgctagttagcgttcggcgccagccacgacgacaccaaaatggcaccagctagcatcgtgcagcgctatgtgcgttcgcatctattctacgccgacctaacaaaattaaaagtcacttctttcactagctacaaacacacgtactcgtgcgagtgatccaggaaagctctccgcactgctctgcactcgtgaaaggaaattttgttggcgcgagagagctccccgcatttcaaccggtcgaccatccatctatctatcagcgccccgcgtgcgcacgcgacgcgatcgagctaccgagatttccaccggccggccgctactatagcatcgatcgatccaaccatcgcatcctcggtgcgcgccgctcgtgcgtgcatgcctccatccacaccggccactatatttgcagtgcagtgcagatggatagcgcgcgcgcgtgcacgatgggtgggtgcttccgccactattagttgcgccgttgcacgcacgagtagtactacggccgattaatggaggcgtacatcgatccctgccgacgtccacgcgggatggctccatcgatcgtggcatgtcaactcgatcgtctcgaaataaattaatgtttgcgtccttgtttggattcgattccgctggcactgcctcgatcattttctctgtttgtgagttgtgacctgcacacgcactgcatgcttgcagatggttggaaggatcacgtagagctagctagggtggtccagatcgggacttgagatgagatcaccgtgcactgcacacgcgcacgcacgggtgcacggccaaatccatcctgctactagctagcagccacatccatgcatgatccatgtctagaaccttcgattgtgtcttcactccgttttttctctgctctcatgcacagcccactcgcgcacagcacagtgcacccgcagcactcggcgaattgaatggcacacggtgcgcggtgcgcgcgagagacagagcacgcgcacgcaccgatcgagtacgagcgtagctagttctcggttgattccaccgtacgtacgccggccggccggcaaatgcacgatgtagtgcggcacgagacggattaagactatctgattgtgaagttaattagaagaatcgtggtttccatcgttcacaggccaatatatatatcagtgactaagttaagagaaagttcacgtcagagtgtgcgctttctaataacgagatgtgcatgcgtatgttgtcgtaccgtcttgtagctatccgtgccggtggatacgtagtacgtagtgcgacacagcggggcgcccacccaggcgtacgtagtgcatgcggccgtagtagcacctgcacgcaggcgcgggcgcgcgcgtggtgatggagcggcccgatcgatcgatccagccggccgggggacgtcgtacgtacgccagtgcgcgcaccgcacgcgggcacgcggcccgtcgcacgtacgtctctcgatcccttccggccgtccgccacgaaccgcgcgcaaggcccgtcacgtctccgcactgtacgtgcgccaccatcgatatcatcggtttaacagggtgctgggtattgtgttgattggccagccacacattctctataccggccgtacgtgccctggttttggcacacaatatcgccctttcacttgccagattgggataaaaacctctggattatactgtgaccaattaattaccttgtgagcgtgaaagagcacgagtcgcgtatagctggccatattggttctgcgccaacgaatatggaggatgggggatggcaacaagcacgaaagtaaacttagggtgtgtttgtggagaaggtgattaaggggactgggaagatacgtaaaacgaggtaagctattagctcataattaattgagtattaactattttaaatttaaaaaatggattaatatgattttttaaagcaactttaatatagaaaatttttttaaaaaacgcaccgtttagtagtttagaaaacgtacgcacggaaaacgaaacaaacaaactcactctctcaccctttcaaacgctgccttagcgccaatggcagctagcagtccaccaaaagcttttatatatatatgggattaatcggatcaccaaaaccatatatacgtagtgacggtacgggtgagcatagatttctcctgtgtcaccgatggtcggcacgaagaaaatggcgcacgatcacaactggacataaggaagaaattcaagtggctgggttgcaatgcaccaattgtggcactaggagtatgtggtggttctttttcccgattatatgggaatactatacgcatacacagaccattacataatactctctattttcttaatatacacgacgtaattgaattttagaaatatttaatcatttgtcttgtttaaaaaatacataaatattatttttttgttagacttattttagcactattttaatcatgacttatattttttatatatgtataaatttttaataagacacaagataataagtatatccaaaagttaatgacgttctatattaaaaaagaagtattccatcaaccaacaatttctttagggcatatacaaatatagagtaatattagctctttatactaatcaatgtcattagagactatcctcctacaatagtagtattgtaggagactataaggtttctaaatcattaatgcactaaataactttttattatacttctttccttttctctacgctcatgcaacaaattttttgttaataaatgctaaaaatcaactttaagccgttctcatgcgtagcaacgatatttctcattccttctctctctttattccacatcactaaatttacttgcatgataatgaagagagcccgttattagacaccattgtacatgcccttttatacgtgtgattaaatgtactccaacaccattaaaatggagaggtaagaaactcagcacttgtacatatcaaacaaaatctcatgcacgcaaagatttttcatacatccatccaaacatctcatctcaccacattcaggatcaaccaatcaagtcaaccaaatagccttcttgcatctactcagccatgctaaaatcatcctggatgacacgtagagtaagggccaggttcaaatggttcaggcaacaaaacagaccctaaccctcttagcttccactcaaccaggctcaaaccatcctggatgacatgcacgagtcagaatgaagcggtgcaggcaatcaaataggccaatagagagcagctgatgggatgggcgctttaagaattgtgttgtcatgaattggaggggcctagcgtgatggataatagacatgatctcataggaccatttttccccaattttcgtatatacatgtaaccatttagagcacattagaaagtacatgcgtttcgatgcattgccaggaaaaaagaacgggtatacatatctaaactttcattcaagtatcacaaggtaagcaattaaccatagtcctaaaactttcatttcaaccacattttggtatggaaacacgctatatctgcacatactttcttaaggcaatgcacgtatttgtttctcaagaccaaagctacaagtctataacactacaataacaagagtaacaaacacactttctcctcgggtcagtgttacgtcaatgaaataaacagaactccaatgtccaagcttaatctgaaacatgttacttcatcgacatgttaacttaatctgttctttaattattttacaaaggtagggggaaactggttttatcatttaaatgaaccaagcaattctcctgtttctgttacctgcctgaatatattaaagttcctgtagaagtatgcacaaattattttgactttttccaaatagaactcatgccaaagtatagccaccctttgacaggaagggctgcag

SEQ ID NO: 45336 - DNA, 1309 bp, Oryza sativa
gtaggacatttttgttctttgtcatttgtccatgatatgtcaggacaacaatgcacagctggtctttctactgatccttgatttggtaccaccagctttgcatagcatagcatatctcatccttatcttcaaacttttctttgattagtttaaccttagctcatgcagttatcttgtaaacttctccgagagagcaaaggaagctagtaattattaagaacaaatactatttgttaaaatactgtaaattgcaaaagaaaaaccatttccttgacaagtatgctggtccaacggcatcctctgatagtctgattaggagcttccaattttttattagacggtttccagaaacaacagtcgatgttctttggtagtagatgcattgttcagagaccacgtgagcttctcttaccatgaattaaactacaagatcacatgcctgcagtttgatcatgtcttaaaaagttactaatttcttggcagagtggcaacgccagaagctttacggtaatcatgaggtgatcatcaacctaaagaaacaggaaagagagaatatagaatttcgatgaatggcgttccagttgcatactgcactttctggtgattattatgttctcttttagatattttttccttgttctttattaattcataaagccacactttttcaggttatgcgcagttctggaaagagaaggaataaataattccctagcctgtacaccgaatggtttaatcagcatcaaatactcctaacatgaacaccaaaacaatcataaataccattattactgcttgaagcagagtcaccgccactgtgactggcttgtgggcccatcaaaccaagaacaatggctcgtgtatcaactatcaactgttgatgcagaattgcagaacatgaacatgaaacaagaacagggaattggaactgaagtttcagtgagtgagaagtgataggaacagactattatcctctctgattttattacagcaatgaaccaagtaatcccctcataacaacaattacaaaacagaaagaaaaaaaaactatagcatgtagccgcccccatccagaaacaattacgtaaacttgacagaaaaatttacaggagatcgaaagctaaaaaaatttagtgaaatgaagcaacaatttcttcacaatttttgctgccaagaatacaaagccaaccgaccaaccaacggccaactttttttcctgcacgactgaacccgaaagctgcaactgcagctgcagctgctgtcgcttgcaccactcgcccactacaccaaccacatggccactagcccc

SEQ ID NO: 45337 - DNA, 961 bp, Oryza sativa
tagtgtatgtaagactttttaatgggctcaaagtttgggccaatgctacggaaaaggaatgaccgtaagagcaagtttaatagtatagccaactactagatccaattcatctatagccaatctaatagctcattcatacaatagttacatactacactattaatatctggtcccacctgtcatacacacactgcgtcttagagtccgtgctatagctggctacaaatctgtagtccgctgccattctctctctttatttatcttcttaaaatatatttacagctggtttatagcctgctactgtacttgctctaatttggcccaagataggtccaaaatggctcgatcgcttattcggcagcccaggaagcagcgagcgtgcaaagtggtgatgcaactgtgtttctttgttgtgagagttaactgtaggctgaattaaactattcgctgtggagttaaaaagtagccttcctcttattgtctgcgtttgtattgtgcttttttgaaaaaaaaaatctgcattagaaggtaacagatatcatatatcatatataatataagtagataaagattgaagatgtttccgtggtccgttatctgttagagtcgatttaatgtatatatacctactagaatattttttttagtcgccgctttcctctcacattttttttcaaacagttttttaatggtccgtccagtttttttttgccattttcttcctccccttttttttctcgcatgcagtaagggcttctagttttcggtttttctttcctcaccgtgtttttccttcgctaggccgaaccctacctctatcaccacgtcgaatttgtctatccatgtgtttcctcctccaatggattacaaaaatcgattccccactcatcgctcatcatttttcctatgattttctccttcaattcggcttggcctgatttaatcaccatttaactgtcgc

SEQ ID NO: 45338 - DNA, 613 bp, Oryza sativa
ttaaaagtggcaagggagttaaatgtcccgttgttgccaacatccctaacttagttccttatatttttcttcccaagtactattgacatgtgggtcagccgtcatcgtaaataatgtataatatagttggctttaagtgaacaaggcggttcaaagtaacacttggttaattaagcgagagagaagggaaatcttaggccgtacattttagatctttaaaaacttattttacaaacaaactaaaaaaatttattccaacaatagatcatttttatagcaccaacatcattggcgtcgtggtccaacatgacaacgccaatgacattggcgcaatcccccggcttccccatggatgctaagtcacttatatggagggggactttgccaatatcgttggacattagtaccgatgacctatttgttaatacttttattacaaataggttcttttatcagtgtcactgacacttacatcgatgacctatttataaatatattttttatcacaaataagtattttttttttacaaataggtcatcagcgctaatgatattggcgtggcttaggctctctttgggacaattctggatccaagatttcttagagctgggt

SEQ ID NO: 45339 - DNA, 608 bp, Oryza sativa
acttattaaacaccacagaaacagagacgttaacgagagtagaactactctagcagagtagggaaaattgagggggaaaaaaaatcaaggagctgagatagagaggcaatacatgcgatgatcgagcacctggcaaaccttggtcagcgtgtggtagtacgcgatggcgccacttctcatcaccgcgtcggcggcgctcgtctcgctgctactcctcctgctcccttggaaaccaatgcacattctcagtcagtcaccgccggccgatcgacggatcgagtagctttagcttgctctcacctgtaaattgaaacacgatcgatcgttttagctattcattgcactaatggcgcgcgtcaaatgtctaacaagagctgcatgcagccatgggtgatgggaagaaaagagcgctactcacacgatgacgcggaagaagacgaccaaccggacgaggaagcgcacccacggcatggcctgtgtctcgattatcagtggagattgagatggacgggaagagttggctgtgcggggtgagaagcccaagcgagaggagctaaggtttggtttgttgcaacggcgaattggcgaggaggcaggcacagggttta

SEQ ID NO: 45340 - DNA, 1583 bp, Oryza sativa
  unsure (1)..(1583): unsure at all n locations
gggcggagctatgtgtatcaagggggcgttaaaagtgaccagagaacccatccacttcggcaattacctgccacactaactcacatgtttcgagttgggcaaggctctcactatcatgcaagaagcccagaacttgaactattcatccacaatgacacgtaaatgagtaaccatgttaatgacatcatcattcttcttcacacaagagcttggtgtctacccacagaaatagtcatgccaagaagaggctgcagggataaatacttgcaacaagcgttcgcaaatttgcgaggaaacatacgaatacgagtaactagaggaatataataaggatttatgtacaataatacgctttgttgcatagtacctaatttatcaagactcgcggacacttcacacggttttatcctgaaaaaagacgatacctgcaagatagaagccacggccaccagttgggagttgagttatcaggcatggcttgatgttcattccattggaaatgataacgctacaatctgacgagaaagagcgtacctttcaaattctagcttctgggtgacaataccattaagcacaagctctgattcaaacacctcaaaacctgcaacggtgcaacatcaaccagcggtttacgacaaatggagtaagccccagaactttattaggtacagggagcgtagcacacaccgttcttaatgaatggcacgcatattttgtagtcttgttcacaagagattacaaaagctcccattaaacttctattcttcatcttggacattgcgtttctctccaacacctggcaaaccaacaaatgtaatcgttgtgcaagcaatttaagaaatggaaattatgtatccaagtatgggatcctaacatattggcatgtaatgaagtagtgttcttaacagagaaaatgcaattaaaaacgaaccacaaatcatttgataactttcatcacacctnttagctatatcttgaaccaaatccagtaatattggcaacaacaaaattgaattaaacacatgtcactagaaatctccattgtaaaaaacacaggtcactagaaaatgttccagattgatggtaatccacgttgatcctactcgtatttgttgttgcatcacaaacacaatgcctccagatttttgtgcactttacataacaatgtgaagaattgaagtcctttatgtgcattaacttctaagcagctggaaagttcatactgttgcagaaacaagtaccatctaaaatctggagatagttgagatgacaacacagaataaatgaatgcaacaaagggtagattaccaaagacaaggaaagtgctccaaaagaaaattcagattgatttgaacagaggtatataacaagcgtataccttgccatgagcagtcactactaaacttttcaaagctccttgctaggtttagcatttggtgtgattagcactctactccctggaaattcaataaatttttaggtaacataaacatttcatattttggcatactgaagttaaagtatctcttggcatcaagataatataattgccaaaaattgctagtatttgttctcattttgat

SEQ ID NO: 45341 - DNA, 728 bp, Oryza sativa
gaatttttctcccgtgtgaagcgttccctagtagccaaacatagcctaaaatattgaaataatcaatcactcgcacaatgccgcttacagttgcaaaatcacaggcataagaaatactccctccattttttaatatttaacacttcttttttaccaatttactgcaggggaatatttaacacgacttttaatcacatgtatgaccattcttattaaaaaaattatgcaaatatataaacatataagataggtttaaaatatttttaatgataaaccaacttataacaaaataaataatatttacataatttttttaataagacaattaatcaaatatatatttaaaaatcaacagcgtcaaatatcaaaaatcggagggagtaaaaatacttaatgaatccaacaatataattttttataacaaaaaccatgttattcgattaatcattagtcgagggttaaaattagacggtctttcgggtgtgaaagaaagaatacaagttacattacacaatcttaaattaattacactactccctaataactaaagaacaagccatcatctgcatcgccctacagcataaatgtactcattggattagcgaagtaccgccttccacacttggagggttctctattgtggccttgcctcaaaatattctgcagcgtggtcggagcagtaggcacaggttcatcaaacacccgaacataaaggtgtttatcaattg

SEQ ID NO: 45342 - DNA, 646 bp, Oryza sativa
ttgctgatttcaataaacaacaacaataatataaaaataataaaggcaaataaatatacagctgtgatggatctcaaataaatatacttaggttctaaaagctcaaatatgaacaaagaaatttcctcaacagaaaaaatgtatttactagagaaaagaaaacaacactcaaccaactttatgtgcccatatattattgtcttcatgacagggagttttgcctattttcattagggattacaccaagaaggataatgtcattgcaagaattttatatctatctcatttaagttcgggacgaaataaattagttaatgccattgtagctcaaacaaaaacaaagaaatgcttgtgatgctagaaatgcagctcaaacaaaaaaaaagttatgatgctagaaatgagccaaatacaacacagaatcagcgcaggactaaaactggctaacatctcatgataagctgcaccggatagtcataggcttgcatttgcttgcccataagatataagatagagagattactgatagctcagatgtatagactctatcaaaggtcatatttctacaattctactacataaagagtgttttttccctcttttgagtctctactccatcatttggaagcacactatacatatcaca

SEQ ID NO: 45343 - DNA, 769 bp, Oryza sativa
atacagttgtctaatggaagctccatgacttgatcagtttccaggcctttcttgccaagtttgtagtttgagattgtaccttttggcttaaactcatctggattaaatctcttcagaagacgtaagcagtgaacaatctggaaaagggaatgatttatacagcttgtaggtgcatgaagtatgcaacagcataaaatggttgcagctcacaaagggtactgcatagtaattaacacctttcatgcctaacagattgtattatcgcttttcattgcagtttcaaaataaaatattgcataggttgttgcagtggtaaaaaagatcacattattgaatgcaactgatacaatcatagagatttgttgacatagttttatcttgaatagcagtttttttcccttcagtatgagttattaattgtcaattcatagttttatatctcagggaagtctctagtccagcttttattgtctttcaaataagaccgttttatttggattcagggtctcagttctgtcaccttgtgcactccgtttcagattagtatagtggaaaacataactgtggatgcagctttgttggacaaaagaaaaggttccatcgccatctgaacaagggaatggatcatgctggtgtgtaattaaaattatgaaggaccgatttttaaagcatgaacttttttaaaagatacagagtcaatttcttgaatttcgttaacaagaagcaaatatgttaggaaaggtaaaacgataaatgtgggctgcaggaa

SEQ ID NO: 45344 - DNA, 720 bp, Oryza sativa
aaaatagtaaaaataatatttgtgatacagaacctctattgaatagacttgctatagtgcttactatagatgagtagcaagcgagtgcagctatcagttggctctcttatcgaccttgctctaaaaagaccgtaataatgatgggattctcccttcaaacactgacatccttctcaggatcttagatccagcaactgagattcatcccatgatccaccccatctctcttgagtgccccatgtctcaccaccgtgaaaagacatgcgtaaatccttgtgttcctcttctgctcccacaaaacagcagagtgctaccagctgctctcccttcccaacctgtcgtcgagatctcccctacattggctctccctccaccgcaccctaccatcggcttctccctgccatcggcccctcaacccgccaacagcttcgctcgtgccccctacccaatcaaaccctaaccatcgcccccaccacgtgccgtgttgcctcgcggaacctctcctaccaaatcaccatcaatccatgtgcctgtctcatcaccgacttgtgcttggaatcttggctttgtcatgtctactatatcgacggtgagaccatggaactcatggcctctatcacacctgtgactagacctagcaacccgtcgagaacagggagatggactgtgttgtcctccgcccagggttcagccttgtcgagaaggtagtcgcaaccgcag

SEQ ID NO: 45345 - DNA, 1391 bp, Oryza sativa
ttattcctttttgtttccactcatcttctaaaaatttgggtgtgtaagacatcagttatggtatgtttaacccaatataaaggattagatatggtcttgtattctacaagaattaatatgtggcctctgaatgtggtgtccagatatcattttacaaaatctagtaggtatgttttctatttagatgttgcctaggtctgaataaaagtgatacgcgcacggtgaagatcatattgtagcggctgccgaagcaacaagtgctcgagtggacggtttcagaggggatagcgacaatgctcacaatcaccctatggccgaaagcagggctcttcctggccagtgagaggctcttaataacgtgcgaataacttgactggattaatcttgcttgccgaagaatacaatcgagtgccccctttataactcaaagggggattaactacttctctagataaatgactccctagatttaatggataatccttcctaacaacttaacaaactaaaaccatcgacctaggagtaaaacctatgcacacttaatttgtgagcaacaatacttgctaccaccatagctgacgcaataggagtacgtgtcggccatggcatcccagaagaacatcgtgaaactttgcaagcgatgagactatgagagagaggatgaccaagctgtagaggctgaccagttcatcgtcgtcatcggggtagagcatgaagatccactggttctctcgaggcctacgaggatgggcagctgagaaagtcttttctaaacctaggtgcaggcacacctaggtttagaaaagtttagatcactccaagattcatgcctacaagtaattagcccaaaagtatatcaacgaatatcgaatgtattgtctatttctagacgatcacctagaatacaatgagacctacctgtagccatatgtattgtccacctcaagctccctctttttcacttttccacctgtagcgacccctctctttttcactttccccttctgcctttacccaattcgcccccattttggcacagcgcatccgctctatggtccacggagacgacagagtaagaggtggtgacgtgttgtagtcccgcaatggagatgctcaagtatatgacactttgacatggaatattgagttatttcctttaattccagcatgcataataatgcttggtggctttgcattttaattttcatgtcttatgtcttctgtactggtatgacgactgcatctcattgttgcggcccaacaacgccgtcaagctggcgcagatcgacgtggatctgacatccagcatggtggcatggttcggcgacatgagaatcataaagcggaccatctccggggagctatcacttttaacgctggggctgcaggaa

SEQ ID NO: 45346 - DNA, 565 bp, Oryza sativa
tgagtggtgataaaagattttaccactggacccacatatcataaacacatgaggccccacatatcatagatagtgagtagcaaataattaattgctacatcttaaaaaggtaaaaggttaaatatcccaggaggctaggggatccatttttaaaataagttttattgaggtatatttgaaaaatatgtttcaaatgataaaaattgaaaaacacataaatctggagtactggagtatttcccccgtcccctatgcgtcattgaaaatctcccgtcccgttccgctccagcgcttgcgccgatctccatctcgcgactcgcgagcagagcagggttggtaggggcgcccatctccatccggcgagcagagcagagcggaggaggtgcgccatcgtcccgctgcatcctggtgagcatccacatctctttctgatccatcgctctccccaaccggaagtacttttgtctcgaatttgcttgtgtcaaccttaataaagtaacagtctgtttgttcaacccaaatgttggatcagcccccgacacgcatcctctctcaaccctctctg

SEQ ID NO: 45347 - DNA, 606 bp, Oryza sativa
aacacgagtgtcccatcattctacagttaattcaatagtcagaatgccacctggtcatttttatttcctctatgtgacccaagtaaggccctagttggcaaaaaaaattgttttagggtgtcacatcggatatatggacacacatttgaagtattaaacattgtctaataacaaaacaaattatagattccggcagaaaattgcgagatgaatttattaagcctaattaatccgtcattagcaaatatttactgtagcaccatattatcgaatcatgacgcaattaggcttaaaagatccgtctcgcaatttacacgtgtctgtgtaattggtttttttttcttacatttaaacatttgatgtgacagcgtgaaaatttttattttgggaactaaaaatggcctaagtaaacagcctgcattccctcttcttcagcttaaatattgaaggaaatgccacacagaacatgctaattgacattgcatattatcctcatttcagctgaaatgaactcatattatgtaccgtgagacttatcacagtgatatctagagaatagttatgtggcattgcaaagcacccaatgaccgtagctcatctgatatt

SEQ ID NO: 45348 - DNA, 1547 bp, Oryza sativa
caccacccacctgcctcatcgccggatccagctaaggggagcacggaatgggtgcttcgcctcggcagcctaagcttctggattatgtttcgttttagcactgctaataccagcttgctttccatttgaaattcagaaaaaaaaattgaaataatatctgaggaaggaggggaataatcaacaggaacatgaaaatcataagttattaatcagctgccagaagtgaatcatcacagaacagaggcatcagacatgcaggcaagaaacaggaacagataaaggtcacaaccacaggctgatgcttgattcctcggtacggagcacaagtgcacaaccttcatgggtacccgaaatcaagtcccatctaaaaaaacttaataacaacttaaaaactataccaacttcttactgtgagcacgtcgtcgatttcagacaatctcaaattttcatcacactgccattcatgtcttaaattagacaattaaaaccagacacttaagagacattgtgaatagaaagctccaaatgaaatttcaggtccaagtgcacaaaatgcaattcctgcagaatttcagatgtacactgacatgccaaatttcagttccatcctagttttaattcaaaaggaacatcacttgtccttgacaaaaggttcaaaacaaatgcaaagactgcaggtatgccatggccatcttactttcagcacaacctgaacttcaaaagtatgtttccttttagcactccaaatgtcaactagctccacatttcaaattcgtaataacatttgaaagaatctctgagataatactggaaaagaatcagtaggaatgtagcaatcataagttattaatcaacgactcaactgtcacaagtatattcactacaacatcagctgtcagaagtaggaaaacctgtccgttgcatcattcagtcattaaacaaatgcagagatcaggatttctctttgtagaatgttaaaatgattagcatcacagcagagggccagagccattcatgtcccaagttagacttatgattcacattatgaattgaaatctcaaaacttcaatgaagtactcaaaaatgccattcctgatagtgcacatgtacacagacatgccaaatatcaattacaaccatctgaattaaaaatgaccatctcttgtatctgacaaactgttaaaaaaagtaagaaaccacatccatccctgttaagcacaccataactgctgaactatgtttcattttagcactgcaaatctgcaattataccaatcaggttcacatttgaaattcgtaagaacatttgaaagaacctataagaaaagaggaaaacaccaacatgaccgtagcagcccaaatttattaatcaactgcatgaggtgaattaggagaattgtagcctgcatcattcagtcattaggcaaatgcagagatgaaactttctcacagtagaatgttaaaacttccccgcaaaaaaagtagaatgttaaaacgattagaagcccaccagaggcatcaggcatcatagcaatggaaaaaatagc

SEQ ID NO: 45349 - DNA, 1442 bp, Oryza sativa
gtcatcatgcgaaatatcgccggcggcgacccaacccttcaaggtgggcgccgcagaagcgcgcgccgcgggcgttgtccggcaggcagggcccctggtgggtgcgctcgcaggcgacgcagaagaaggaggtcgcgttggtggacggcatgaacaaccacggttgcataggcggcagatgccgcatggcgatggtgcgccaccttgtgcagacaccggagaacatggagtggtcagggaggcaaaggaggtggtggaggatgccggcgacgcactcttcggggagctccgcccacgccatgtttgcgtcggccatgggagggggaggaggaggaggaggatgagtttctggaaacttttggatgggattgggaatggtgggaagaagaagagggcaagtgggaagattcgttgaggaggagattgctgcggttttataggcttctcgtctgaagccacgcggctgctaatccttttcttcttgcttgccaagttttcctattgttctgcatttccattgttctacagtgatctccagacattactctgctatagtatctgcttgttctgcattaatgtcagtttattgtagaagattatctttgtttatactgcagtgctttccttattcaaagtaaaaaaattcttctgttctgttctttcacaaaatttacatagtttcaacagctataaggctctacccaaccctcactcccggcacacaaaatgaagcagcgttttagtgcgtgattaattaagttttagctatttttttttaaaaaataaattaatatgatttttaagcaacttttgtatagaaactttttttaaaaaacgcaccgtttagcagtttgaaaagcgtgcgcgcggaaaacgagaaagaggagttgggatactaccgaatggagcctaagatgggttgttgccccacattcctactgatttggaagattaagaacaggaaatgtcccttcaatctatggttaatttcaataggcagacatcactgtcaccatttttcatttcctacttatttcaatttcagctgagattaatgaactcacatagtcacatactcctattgtaagtaaaaacttgccacagtattatccagagaatgccagccaattaataatacatacattgctccgtgaataatacgcaattttaggtttattttacactagacaaaccgacaacaatcttcatcttgaccaaacagactattaaaaagacctaagatgttttattcttcattagtaaaatacccatactaacgctatggttatattaaatttcactaatgctaattagatgaaagggttactcataaattgcatcatataaacatgccacacagcactgtccaaggaccaaaatgtcataatggtaagcaaatgcctcattcaagattaaaatgccataacgccacacaccggaat

SEQ ID NO: 45350 - DNA, 667 bp, Oryza sativa
aaaataactattttatacccctcccctcccttaccaaggcccaaacctacctcccacctccaccgagccgccccatgccccagctgtgtcgcaccccatgccaatcccgtccgctgcaccacaccaacctcctcccatgctccgcgctggcgccgcgttgctccacgccaacaggccgagccgagccgtgcgccgctttgcaccgggtaagggtgcaggtggggcgggttgcgggcacccgcaacctgtccgcagcatccgcaagatgtattgtggcaacccaccaacccacatcatgtccgctgggctatttgcggccagaccacaacccgcaaacaaaccgcaaacacaaattgctgctaaacagcatacagaagatcattgaatacatgaacccattttgttttcttaaaaagaaaacagcaagcctagttttgttatgacatatatgggctttatgcccattttgttctctcaaaagagcacaggaagacaacatggcttactgcccgattacagtaccagtacattaaaaaggccatcaagaagagcacaccatcataaaaaagagagaaaaaaaagctcaatcaactaagtcaattggggcttaacaaatgagcctagacaatgtcaaatctacatgcacatgcaagcaccgcaactcgcg

SEQ ID NO: 45351 - DNA, 748 bp, Oryza sativa
atttagacaggttcaggccctcttaatgagaggtaatactctactcctgtttggagatttgaatccaccgggtgtagtatagatctgatgattttatgtgtccatgcccgtagaaggcatcctgcccaccttatataagatgagggcaggattataagatagaaacattaaccaacgcggtatcggtttcctaaatctattttataatattaccaaaccaggactttaggccgttccataatatacaaggaaacgtaatatccaaatcatgatctattacatattccatatatataagttatcccctataactagtcggataaacatgctgtgtgggtatggggtacccataatttccacagtagcccttgagaccttcacagtcgaaaagataatcttttctcgaactagattactccaaagccgagtgcttcaatcatcttcgccatggtctcccgagtacttttaccaaatctgaagactgtggagagctgaaaaataacctaatgtaaacttaggtgcatcgatgcacctaataggtttagcccccgactatgtggttagttgagcaaactaaacatatagtcatggagtaaataatccaaccaactgagtagcttttgataattatagtcaaccaagtgattgatcttaatatatagcatatgcggtgtgaatccccgaataacacgatccaagtgatataccgactgctttgtaaaatatcaagcgtccaacctgggcgcag

SEQ ID NO: 45352 - DNA, 1293 bp, Oryza sativa
tgcacccttgtgtgcgggccggttgatagggtcgccacccctgcccgttccccctccccactctactccttcgttaccttgcactcctgccaccattgtagctgccttgatcccccggtcatcaccatgccacacggtcgtcataactgccattatgcacaatgagggcgaccgcagtggaagcgtgacagacggccctatgtcctgctatgatacaatgttgaatgctagaggaagaggaatactgctaatattggacacgttgtatattaagcctcaggaaccaatatatagaggagtaaatgtagaggagataagaacgaatctagagataataaaggagtccatacaaataaatcatatcttaatatgactctaactaccacactgcataattaatttttcttgatgaggccctatttaggttgcaagtggaccataattgctcccacttgcaaatatcactcctttgggtcggttcaagggccgcatgtgaaaatgctttttcgtatgcgacctcttaagagactcgcctgagaaaatagaattatttttccagatggacctcttaagcggtcacatgcaaaaatcagattttcgcaggcaaatcctttaagatgccctttacgaaaatcactagaaactaaatataaaaaccaaatcctctccaccatctatctcgaggggtggaaattttccagttgaggccgaggtgggggaaatttctcacccgcaggtgagcggggtcgggggcggggatgggagttgacgtaagtgacccacagggcctcgatggtatgagttacatgtcaaaagatcgcacattctaaggtccatttggcccgtaggggaaggactacataagaaaaaccctttcttttcccaaataaagccgccactctctcctctctgactcgcgcatcacttcctcctagcgcgccgcccctagccaacctgcctcttcacgtgccatccctagttgcacaatcccgagttggtacaacctcttccgcgtcacctctggacatcgccgccttgtcatagcgcgtcgcccccaatcattgtcacctcctcacagtccatcgcccttggccagcgtcgcctcctcgtagcgtgctacccctagccaacgccgctaagagtaaccccctagggtttctcccggtgccctttatatagaactagggttatggtatcccttataatccagatacctactacctatttacatggaatatgattgattgccttatcctctatctcttactcaatttacaagtgtgctgcatgggc

SEQ ID NO: 45353 - DNA, 857 bp, Oryza sativa
ggcgcattgataggatgaaccctcctccttggttatgctatcttgagagcggtaggtagtgttacgaaacttcaaggccttatatcatcctttgataagatcgactgtttgctatttaatatgcctttttcattcactggtctcgctacacatgcctgcatgctccatggcttctattatcgaaaaactgttgaatgtgaatgagtatgtttttttgcatccaagagtgttgtgggactgacatttggcttaattctgtgcaacacttgtgatctgcccactcgcgcgtcgtagaattttgtaacagctcaaattaggtatatgtactactatgtaaaaaaaaaaactaatcctaactacatatgtgtacatgctagcatagcatgtgctcaggtaaatagctatttgatttttttataggaagttcaagcatttgttcaagtaaatagctatttgatttttttataggaagttcaagcatttgttcaagtaaatagctatttgattttttataaggagaggtttcacggatgtgttcaagtaaaaatagttagaattggattggactatttatggagaggtttcacgcatgtgttcaactaaaaataaatagttagaattggattggattattaatgagacggtgagatttcaagtggtaaaaataattagaattggattggattatttatgagacagcgaggtttcaagtgtgtgttaaggtaaatagttggaattgaattttttatgagggagaggttagggctgtagcgatatgaagaaaccatcagtactgcacagagaactcaattcgcagcaagtcatcgaactcacaaacgggccgtcccgtcctgtat

SEQ ID NO: 45354 - DNA, 725 bp, Oryza sativa
caatgactacaagcactggaaattggaaaacgcctgagacacgataaagttatttcctcacaaaaagcttgcgctgtaacaattcgtcaggtcccattccaatagcctgctgaagccgagcgtgcgtttgtccagatcgaacaccatcagatgttctccaactgcatcccgccgagcaccaccgccggctcgccgtccaccggcatgccttccggccccatctccacgaccccaacgcacgtctcgcgtaccaggtagttgccgttcagtatcgtccagttacccgtggctccggcgtccagctccagggtgatcgccggcgcgtcgaagcccgtccgcttcatcatagggaatgacaacatggtgtcgcctgcgccgccgtaacaaagctcgaactgcttctgcctggccaccctcgccattctgctttccgttcctctgccgtgtgtggcgaagtaatcagctagagatcaaacattggttatggcgtaagtttgtctcgtgtcggatgctgtacctggtcacgactgtgtcgaacgccttgccgaaggcgcggaacacgtcggtgcgcatgatcgcgtacggcgtcgtggtgctgagcacgacgccgccgcggcccgtgcgggcgttgaggtcgagcgcgccggcgggcagggacaccgggacgtcgcgggcccgcgccacgacacggagatgcgttttacggggaggtagtaaccgccgtt

SEQ ID NO: 45355 - DNA, 1227 bp, Oryza sativa
gggggaattttgattgtttggcgagaatttgctggattacgctttgagctactggaggaccccttgagagagattttgtatcagattgctgttagtttgtatcaatgctgctgctatgtttcttcgaattcgctcattgtctattaggaaagccgaaagggaccagagtatattgatgcattcattgtgcattgtattttacacagtagggattcagagcctccatggaggcggcgcataaaccattgagtaccattgataaggattttagggtcacaagctaactgctgtttgttttatcagatggctgctgctaggtttcatttagtttgctcactgtcaattaatacagcgaaagggatcagagtatactgatgcactcatgtgcattgtattttacacagcaggatcgctactgtagggagcagggagtctccatggcggcattgcataaccattcttgtgttctttatttattgtttagggttagactaatgttttctgaacactgattcctatgtagatggcttcacagcatgtgatcatacatgatgcaaacaatcagtagtaaatcacgtggttgggtctgtcactgcagcagtgttttgacatgtgatgatcatgatattatgccactcacgcaatatgatttccctgttgcccttgaccatatgctaagcattacaattctttagtactttgctgcagtttattgtcttttatttttgtgatctattttgtttgtatgtgtgagcgtgtgcctatctgtgtatccatgacttattgtatcgtgctgatttatgtttgtactggagatgttttctactacatggaagcatttatattgtcttctacgatgattgttgtactttagtagttctgctgtacataataaatatttgacaatgttattcctaaaggaggttaaataacctttatgtagccatgtaccagcagtccaacactcagtgcttctggtttatggagcttggatacatcgcatccattgtagatatttagttggatttaatgtgtcagttgatgttatcaactttaatggcaagggaaaaaaagatccccctcttggcaaggacatctatctatgaattatttctttcttgctttggatgtggttctatatatataaatgtcggttcagtctacctggtttggagttaggaatagctttggtaacattttgctttgattgtaaagttctgacacctc

SEQ ID NO: 45356 - DNA, 632 bp, Oryza sativa
taggctggagtacgatgcagccacatgcgttgtgtatgctgccgaccccacgcatgtaggacaggatcagccatgcactagcctgtgctgacctgcttgaattaaccaggagaatcatcttaaacttgctctgggctggactgcatgtgcggtggtcaccatgcctacgtggttctgcacgcagaacgctcaccaaactactagacggcgtactgttcacaacaagtcactatagaaaaattcaacgcacaaatcatattaagctatgcgtaaaggcatgactaatactcaattaatcatatactcatcagtcactgcgtttgcttgacaacgagagaggtgccaaccctgctcagtaacacagccggctcaccagacaccaccaatctggctctgaacgatcctgagagtcaagcccacagttaagctaactgactcctttaattgctataattaacgccacctgacactgacaggacatttaggcagctgctgaccgtactcataaattatacttcctttatccacgaacacaaatatatttcacgtgcaaatttatactcctttacaaaagtgggggaccccacctaccatgatagattttgtaaataacccttggaacctattaatac

SEQ ID NO: 45357 - DNA, 746 bp, Oryza sativa
  unsure (1)..(746): unsure at all n locations
aattttttcatggttatatgaagactaggtaaaaaaaactagggtgcctagaactactcttaaaaatcaaattaaaattcgcccccaaaaggagagggaaacttagaaggtattgtcatgaagaaaatattctttccattctactagtctgaatgtaggatcttaattggcattatagcatatgactgaataaaaaaaactgacgtatgtatgcattggttacaaaacaggagctctgaatttaaaataattaatatgaacgttacatccttggcataagaaaaaactcgtccattcgcattaacaaagaacatagtaccacatggttttaattagcatctccctctggaaataagttcattaacttgatggtacaccctgtgattctgcctgttcaacccaacacaactctactccttctgaaacacagtcaaattaacttcgaaaacctgaaacaatctatgttaatttgctatactgatcttcccctttgatatattccacaggagaagcttcgtgttgcactcttcgttcagaaagctgcacttcagttcatcgatggtacgtacagataaccgtcctcaaaaaaacaaaacaaaaaaaaaaaacgtttgctttcaattttgctcgaaatttatcactccgatttgattttgtaacaatggcgatgctncgatcctcctcagccgtcgcaagacggagcacccgttgccgagctcgcccggcaatgcggcttctccgtcagc

SEQ ID NO: 45358 - DNA, 769 bp, Oryza sativa
cctgcagccctgtctagagcgtgtagtctatatgaccagatgaaacaaaataatccatgcatactaagctggatgataaactgtgtattggatgctgggctgactaaggctaatatcttcagtgattacaaacctacactatgctatggtaatattgggcatgacctaaaccaaggcataaccaaaatactgggaatacaagttcatttggattgcaaccatactgtttgcccttttatttagtaaaatcgctagggtgggatctggatcaatgaaatatattggcagtataataaccatgctagtgcttttctgattgtttgatcttcatagagcgcatttattctgaaaactaatcaaataatcacaccatgcagtaaagaacaaaggatattgtaaaagtgtgagaaatgattcgatttatccaaaattttggcgaagattccactacacacatctgatccaatatttacaggaaggacaagggcaatacctatcggtgggcatgctaaaatttggtatgcatccaagcagtagccaaaaacatggggggtatcaccaacactttggcacgcctggcttaggcatttcgtaaagttcaacaatttacatcaggctcttgttacaaacaatcctaacatgataaaaaaaatgagcaacctcactctaatgttcttccttaaatgcatacggttgttttggaaatgtccttacaaattctaaagtgaatcgataacaggatgtgtgttttggaggttaccaagttata

SEQ ID NO: 45359 - DNA, 508 bp, Oryza sativa
cctgcggccctggttgctgaaatttttgaatgtcaaaggcccaaaaacaatattacagagaaaatgtttcacagctgcattaagaattagtacactgtaatacttgaaataggaagcacctttgttgcacactcttgcaatactgggaagtttacaggagtaatgccagcatacttgagttccttcatagcctcttcaccagtccaactgaggatacaaaaacaaaatgttagaaacttagaatcgattgaatgtaacagaaatgtttattttcatgcttcattgcaaacatgtagcaaatttctgcaaatcatgaagataaaggtaaacagaattttttttaactcagtatttaagtttattgaaaacatttgaatgatttttggagataatatatttacgattatgcatgcccaatagcaatccaatattgtctaagccaggttgcataaacaagtaatgccttattgaggtattcgttttttttcacaagtatatagtaaaaata

SEQ ID NO: 45360 - DNA, 838 bp, Oryza sativa
ttctgtattttcattgtgtttgtggctactgatctttcgccattaagaattaatttcgattttacgatgctttccaggtttgcattgcaagcaagtactgtaccccggttgagctgctttgaagttcagacatggcatcctcgcctcgcttgctcagctgtcaatttgcacttaaattattgcataatggttgcacaaagcacatgttatcagtctgtcggtgcatctgatctgaaagctatgtttagtcgcaagaggaaaaaatactaatctgacagcacaagatgaaccaagaagttggcggagtttaggcgttgattattgttcacaatctcatgtggagaatcatgtctgattgatgcaaacaatcaactaaagtgaaagattattcagacaagtgtactcacctatagacattatcgtggcaattccattcccaatattccaagcatttgagcacaatgccctcttcttccttgatcccagctgatgacaagaacaagattgctgcccttctctcctgtgatacttggttgaatttgttcttgttccgggtgagagatgggccatgtggcccatgtcattgctaaacatgaccggcaaactcatggaacccatattggtgcagttcatctttgctatattctttgatacgaaatctcgcactgtctcgtgcggttcatttcaaagaaaaaaattgttgtgggtgtccttttcatttccttttaagtatcaatattggcatttcttgtcacaaatgccattcttttgtcaatgttgacaagactgggaaatgcaatctttagcatgcttatacacaaacacagaggcaagagca

SEQ ID NO: 45361 - DNA, 689 bp, Oryza sativa
agtgtccacccatcaagtatcatgtgaccctctctctctctctctctctgctgagaacaaggcgaatgacatgattacatgaacacgcgcccttcgcatacgtcaaagtgcctgtcattgaagtaaccaacatactaagcttgccaactgcgctagtgtgtactttgacttgcctatgtgccactaaaacgtttccataataattcaagattcatctgctactccagatcttttgagttttgacaatacattttgtacttcttatttgttattagattttgcgatattaccaattactaggaagacaacaaaaaaaaagcaacgtaggagagatgagcaacaaattgacttccatcatgcaaaagtagtccgtagatatttttctttggacaatggtaattacatctcaagttaccgcccctctatatttgttagggtaaaagtattcattgagttctgaatattttctcttgattgctccgattcatcacttctgtatgcaaagtaggcggggcgacttggggctggaagtgcagaactactcccattctccagaatgaacacagtagatgacataagtggcctgtcatttgggttgtcttgaacacacaatagtgctacatggatgcaaagcaaaacctcatcaagtaagcaactaccaataattgatgagtccgccaaatccttgg

SEQ ID NO: 45362 - DNA, 586 bp, Oryza sativa
ctactacctggaccctgcatggataactcgcaccctgctcgtgcacaaacacaaaacagtcagagaggtcacacaggagaattactgagttaatggagacaccgtgtcgcggactggagggaggacttacgctgccctcgtgcttgtcagccacctaggacttggacttgccaaaatctactgaagtaaccgggcctcccgcctgtatcgacaaacgcacaacagatcaaacccaatgtgtaatgacagacgcaggtgcaaacctgcagagagggggatcacgtgctcgttgttgtcagcgtaaacgagcttggtgtactcatccaatgagctcctcagccttggatactaacagagcatacacctgtatcgttcaccacacctccatgtacgagctacacacaacacaaggtggactgatacactaacagagcattcactacaaacgacggagacaacaaatcagcacatatgatgaaaccactgttccaaatacacgcctaaacatagcgggtgagtacatatggccaccaaattttactataatttgactcggcggtgaacattctgacttaacattaaccaa

SEQ ID NO: 45363 - DNA, 1011 bp, Oryza sativa
ggcacaaagctgctttgagcttatatttattgacttaggatggattctgaaatgtgaacttctgattgacattccagggctactgctaagtgccaactgcaagtggtggcttctgatcttgcttgtggaactagttttccttcaaaacctttgtgaatataataatttacgcttcttggttggtgtcattgtttgcattactatgtaatgtaaactaatttatttgggccacacctaccttttatatagttctctgcatacaatattattaaatatcaatcttgtttcagcatttgcagaaatgtttgaaataacaatttgatttctttttcagatacacatttgatgaaatttggaaatatgaaccagtttttcttctgagaattttgcaaaatcagaatgattttggctattaattctccactttgacttttcactaaagctgtgcactgccacttgtatctccatgaccaacctattgcatgatgaatatgcattatgcagccatattgtatttttttgaacgaaaggcagccatattgtatttggtctgaatatatctatctatctatctatcaactagttatatatgcatggatctcgtgaggaaactctcccttgagatacaactaacgaagatgcctttattttcagtgtcttatatatgcatatactaagacaatcatatccaggacagacgctagagttggagtggatcaatgcagattaagctggcatctggtacaacaggtatacttttgttcagttttcattgatgtatataggcacaaaacaactatgcaatggcatagcttcactcttttctcacaaaaaaggaagaagaagaagaaaaaggctccacttaagaagcaagatattgcacttgaagctcaagaagaaaacgcacaaatttagaaataaaagaaagagagacatcaaaatgctggctgttcctatatatatgatcataactataatcctccttatgaactaaactccaggaaggactcc

SEQ ID NO: 45364 - DNA, 1313 bp, Oryza sativa
atgccgccggatctggggtcgagctcggattcagccgcacagcactgccatcacgaccggcgatgacgaggggacgccatgtgggtgccttctcatctccttggagctcctccccttcttgaccgcctggtcgtggggagctcctttgcgagacagtgaaggcggtggcaaggttgccccaggttgttatcgatagtgatgggcggtggcgggcactctctttggaggtgacggcatgggaggaaggctagctggtcgccgaagtgcagcggtggtttggtcgtgctcgttccaacgtgtagctgtgggggtcgcgctggcagcaggttaggtcgcttggagtccagccgacggaggggtgtcgttgctgtagaggccacgtgttgacattgcctgggagtcggtgaggtagcggcaagaggggcattggcaggtgctaggcgaaagccggcccaattcttgggcggcaacggcgacgtctttgggcgttgcaaccctcttgagggcgttgttgaggtgcctccctccccctcttcaaggatcctctaggtgaaaacctcatcctttcgggatgggcgatggcggcgttttgaatgtcgtgaccttcttgaaggcatcgttttggaggtggtcgtgtgttcctctcggtgtggtggtgtgtaggcacgtggcagggtatgttttctcttgtccggttcccctgtcccctgctgcttttgcctttggttgtaaatgtctgttttactcctcttaatgtaaaaatacgcttctagcgtattcctgaaaaaaaatacgaggcacacgtgtaaatcagaactttgaacctgaagtaggaaggttctactgtaaaaattgtaacaagttaacctacgctcacctcgtggtctattattttaaaaccaagaaagaaacgactaaaaggatgtctttaagagtttagacaacgagaccctgttagaacagggacaagaagtcaaaacaaaattgaattggtccttcgtgaacgaaaacatgaagtttttttttttgagaattgaaaacatgaagtttgagaggaaattatcacaattgagtcctgaaaacaaattccccgttcagcagccaatgtcaaatgccagctcgtatggacatcttcagcgatcaagtaccgccgtaggcggcgccacacaaatgcacgcaagggaattaactaattaattaagctactccgtattacgcaccgtagcaacaacgaaattaagttgaaaaacaggtcactactatcctccatatatatatattttagataatattacattaatgtactatcccct

SEQ ID NO: 45365 - DNA, 1217 bp, Oryza sativa
ttcctgcagccccatctctatgattgcctctagggcatatcaccaacactcagcaagtcatgagaaacgtgagcatgaggacttcgaagggaggctgggtttacttcgcaaccatttctttttaaaagaacattttgcgaaccactaagtgccctcaatcatggggtcagaaagaagtttttgcttagatactgttggcaaattgctttacaacaactcaaacggacgaagcaaattttagttggttaacattattctgccatcaagcagcttctaactccgttctcaactatcagtttcttttcactttcaaaccatcgggtagcccatctcatcactcatctctttggctccaagagttgtccataatctctagcacacactgcttccactagggaagcctaatctataatgccaatcgacaccccgatctacacaagatcattttcagaccacgtaatggtcctctattactcatcatgactgattctagtaatggttcccaatcccacaaacacttttcacaaagtataggcaaacaaatctatgcaaagaggaatcacctcacatttgcccatgaccatggtcacggccgttcgaatagtttgataatcctctgcagagggtgcatgctttacccacgagacgtgatcttactccctcactagccaagcggggaaggttcgtgacaaggtctttctgaagccaaccagggatacctcatgcaacatagaagggttctctctgaacttgagaatcaggcaaatctcagccttcatctacctaggcattggggatgtctccaatcagtcgtgctttagattcctgtgagctaccaggtgatacttgcgaggtattaggcgatacacttgatatcagtttttgataatgatgtgtatcggatgattactatgagatattaggtatacttgcgaggtaccaagcaatacttgtagaaagagcatctatgcccctagtgggttttggttaattgatgacaaacgattaagggattaatgcacttattgaatgtataagcaagggatttgtccgatgaagaaccaatgaagatgatgaagaaaaatatgcaatacaacgaggtttcattgtcatccaattctacaagtgacggaaaatggcaagaggtggtgaagggttggcaagacttgctacgcgatggaccatgcatgggagaagatcaagcaaatgtttggcgc

SEQ ID NO: 45366 - DNA, 728 bp, Oryza sativa
catagacttgctcatacacactcttctggaaagcagtatgaaaacggggatccggggtgtcccgaggcctcaaaaactgatcgtggtgcctcaagatggtatattgggatggattcctcatgtttacaacaaactggatggagggatcaatattcatctcatcacttccttcatcctcatcctctccacttccactgtcatcatctccactttccccctcgctagccccctcaacattggcctcaacctcttcatcactttgagcatactcatctccgcttgactcctcactcacgggatcaggagtgggcgcacgacgaccatgacgggtgcggggaggcatagctgaaaaacaaggagcaaaggatggataagcaacaattttagaaaccacatagtgaagtgggaggaagggcgagtgctgcctatcaggggcggtcagactgagagccacggccggtcagaccgccggccctcggccgatcagaccgcgtgccctcggccggtcagaccgacggccaatggctggttagaccgcctttggtcagaccaccactgacaagagcacacccaaatccttccacaatccacataaatgattctaaaaattgctaggacagtgttgcacacgattggaactagaacatcaaggtgtgtgtcacgaccggaaataacccaacgggcgttccttacgtgcgtgcattattccttgtcccaggaggcaaggt

SEQ ID NO: 45367 - DNA, 2003 bp, Oryza sativa
tatgtactggtttttatcatgaaccgttacttataggcatcatatatgtgttggttcttaataaaaactatacttataggcatcatatatgtgttgattcttaataaaaactagtacttatgagctcatagatgttggttacaactaaaatcggcaccaataatgacacaatattttctatctaacattttcatataaagttggatgaagataaactttatatcaaatttgtagttgacgagacatataactttgtaggtgatgaattttttatttaatgtttttctgatgtccgaaaatgtgttataatgtttcagatctatttacataagtgaatatttaaaatttctaaatgatctcggatggagacaaaacatatatgaacgttgtaggtatagatgacgtctacaattttgtagtcgctaaaattttcagttgagcattataaatttggataacaataatcacaaaacaatagcatggtaagaatctttagaagcatgtctatgaatatgggttgcaaaaatcatgtgatatgtgggaagcgaagtgtgacgttatagggaagtaataaaaataccaaatattttttcatgtttttttagcacctataaaaataaaaaagggtgcacctctatgggtttttctgcagtagtgagtatagactaagtttagatctatttgtttagtaatttacatcttcatgatctatcttatcaatttaatatttctttttttttgtcagtacaagtctaacgcacacacaacacaatcgtgcaaacgctcacatatctaccaggaggactcgttttgtgaaaattttaaaaattttatatagctatctagattgcatgtatgcaactaggtgtgtgtatatgcactttggtgaaaagaatacattctgcaagcaccaaatcctatagacacagctagcatatgaatcatacgattcaacagagctgatcgacaaaaaattgaagaacggggaacgccgtcctgacgcaaaggatgccgtggcagcatcagatttccacggcaagtttttcccttcccgcggcaggcagtcaaaacaacggcgggtggacaagtcaatgtttttgacacgactaacaccataaaactttaaaacatactagttgagagttttttttaacattatgattgagagttgacgaaagaaaaaaaaattaaaacatactcacaaaataagataattaatattaattattttaaacttaaaaattaaaaatacaactttttgtaatttcttttgtaaaaaaatattgtatagtattttggtaagcgtatgcttttgaaagagaaggtaatttttctctctgtgtattgtcgctgaacgtaacctaagatagcattaaacaagtactcatatgggacaaaactttaacgaagtaaaactgaataaaaggacgcaaagtgcaaaaactaaaaagaatttttcaagctgttttcttgaatttagatatatatgaaaaataactaatctttaattaagaactcaccgggcatacactagttggtcatcctcatgctcttgttaatgtcatctttaatttgaccaaaacacttgcttgctaaaagaggattcctagcatcccaaaataaatttagtgagattcctagcatcccaaaacaaatttagtgaggagtaaaaatgacaaaaataaccctcatcaatagtagtaaaggtagtaatggtgataagtaggtaaatgatatttaagagataaaacttctcattttatatgctagaggaggtaggtaaagtggtagaagttgattttttttttggataaatttaaactctataagttgagttttttgggacggatagagtaatccatatcgttatcaaccatgacggataagattaaccaaagcacgagggtcgttgttgaagctgagtacacatttgaccaaattttttaatgtttagtggcacgtacatatatacctacagatatacatctctttggcatgcacac

SEQ ID NO: 45368 - DNA, 751 bp, Oryza sativa
tatatatatatatatatatatatagacacacacacacatacatacatatatatgtgtatatatatatagacacacaccagattattgatattaattagtatctccaaggctgcatatagaggaatcagaaaagtctatcctaaatttggtacagatcttccctaaagaaaaattgtacatatctgctggacccaaacggaggtattcatttggtcctccggctgtatatatgtatcctgaacatagttctcttatcagaattattacttgtttgttatgtaggagggtaacttatttggatgtagttggtcaaatacctgcggagctacagaatctcacccatctagtggacctgtacggtatcgaagacttctcttcttaatttatcttgctacctgtcacattcggaaattcactagtaatttccgaactaagttgtgcatataatacactcatctactaattagctgagatactaaaattgacaattgaatatacagatccaatattataattacgttagatattacttataaatgaaaagaaaacaacaggtaacaaacaatctaacattagcttcagctccactctcacagacagttcaactgaggtataagccacatgtcttctccttcgaaaactttcttcaactgagatttgatgattattgcaaggtgagtaaatagaatactccgtaagccacatagaaaaaatgcaggtgcatggggatacaaaggaaggtatagtaggg

SEQ ID NO: 45369 - DNA, 2743 bp, Oryza sativa
aatgacattcgaaattaaatgcacatttaaaataaaagaagaatttaaatattttatcaacatgctcaaagggattgtttgggacatgtgtgacatgccttacaataatcaattaaacaatatataaaaaggatggaaactacaagctaacatgcaaaacgagaaaaaagactaataaaaaccaaataaacaatacataaaaagtaaacaaacatttagagctttattttagatgaattatgaactgcctcatttcgacttcatatgaattagtaatgaattttacaagatttaattcaactaaagcctatttaaaaggattaaatagatttattacataatttataattattttaaagaagaaaaagataaattatgatgtcatcagcaatcagtccaccgtagagtaggtccacagagattgaccacatgttcactgagatggacaaccgagattgatcttgaccaagagttaaccaagagttaaccaagatctgacggctcaaaccgattcaatctagggtttagatggaaccacgtggcaacatgttgacgtgaaatttgtcgcacacgaaggcctgagagatccacatagctcgtcgtatcaatcgggtgtagggcgtggcggttagtttgatcgtacaattaagaagatagatagatggattgtataagatcaaagagccgatcagccaataggctgatgtgatgtagcaaggctagccgatgtatataaggttttcatcaatcgtcaataaaccattcctaatcaaagataatcttgatagatcagacctaattaatcgagacggtatgatattgaagttgataaagagatatttaactattgattatacaagtttgagtataagacgatacaacacttagaagtagtaacaagataactaattggctagaactctaataaaatgttgcataaaaacttatcggcttagtagaatataattacatattagcacaatctaataaatcaaacctaaacgagacagtataagattgaagatgataaaaaatgggataattgcttatttgaccctgttttgaagcctaacttctaatctgactatgtttttcttagtttgcttatttgacttttttaaattgaacactccgtctgaccctctttccactacatcattagggtttcttctagaaaaagaaaaaaaatctatttactatttaaactgaccaaaataccatcaaggcacttcaaccctatccatcccaccttgtctctctcatctcttacaagcggcacatggagaaatggatctgcggtggcggcggtgcgtcgagggagtggctagcagcaccgccgatgcgtggaggtagggagcagcagcgtcggcagcgcatggggaagcggcggctgccgcacggatagggaggtcggcgcaaacgccattgcgcgacggagcggccgcggcatcacgcgatgcgtgtaggtatctcggaattcccgtgtcgcatcagcggccgaccgcggcagaagtggaggaggatggagcgtttcgttgacgacctactcaggtctctcaagaagaacgccacggtgggtgcgccgacgaccatggtgaacgtgttcggattattatcgagatattgatctggctactacttggataaccttgatgagatattgattatcagagcacttgattaatttgctgcgcctagacgtttctctacaagtgaagggggcatgcaagagtataagaattccctcgcgagttcattcgatgggccgtttaattcgcttgtggaggcatcggtttgtccgcagcggcgctgtcgcggggagcagtggcgtgcaaagggtggtcggcggcggcacccagcatcaacctccagctactgtgtattaaatttgtcaaattgattctgatttgttaaaagatccatttgtatgaatgtttggatacaagagggccaaataagcaagggcaaaagggactatttgcctcttatttaacagtgttaacccgccttaacggaacagggtcagacggttcatttgattttgatgaacagggtcaaataagcaaactgaaaattgtagggtcaaattagtagttatgcttttaaacatggtcaaataagcaattgcccctaaaaaacctatttatccgataaatctacacagacgtgatggatataacaaatctatctaaaacaatagtataattagagaaatatcaactaaatcagaatatcggacctaaccaagaaagtcctaactaagtcgatgcaactctaaacggcaatgcagttaaagatagaatcaatatatcggatatgtaatgcttgcgtcaacccaaaaagaatacctgacttaatcgagaaagttcttgccacggcgatacatgaaaagttgatagaaattacttcctcattggagatcaaaaccaatgcagcccaactcaaagtaagaacttgctagaacaaaaggttgcaatgcgccgaaagtaattgtattaatatgtggagaaagtttacaaagaccctgtggtacatatttatctcctcaggttgatgcaagtcctaatcagacaagacataggtttgctaaacataaaaggaaaaaatacaagtcttaatcagacattagataaaacttcctaaagattaaaggaaagttactaaatcaacagatagaattaatatgccatgccatggtcttcaccatcctttttgaattcggtatcttctggatagacttcca

SEQ ID NO: 45370 - DNA, 1453 bp, Oryza sativa
ctgcgctgagcgcggagagagagacatgggctcaattcgacccagaactttggaggggtttctaatttattttatatttaaataaccattgaattgatgtttgtattgttaaaattagtaattgagctctgaaaaatccgaaaaaattctagagagtgtaaactaatcatggagaatataataaaaattaaatccagcaatgttttatttaggaaactttatttcccactttaattcattttcttaattaatgtacactttaatataaattctagaagtattttattaaataatttataaattcctgaaacaaaatcagggtgtggcactactaaagagtcttgtactaataatttatagatcaagggtttgcacaaaatataaattcaatcccatggttctttctgtgaacaccaacaaatgcttgtcaggtattcatcattatttttgtgttggctaattgttctagtttatttttgtgatcttttcaggaacttattccgtaattacttgactggtcccattccgtcgttcatcggaaaatttacttcaatgcaatacttgtatgagttacatgtttgttctagatcatgttccatctattggtcgttgtttttttttaattattgctaatcatctcaaggtcattatctttcaatccactatctggactacttccaaaggaactaggaaacctcaccaatcttctttcattgtaagaaatcttttctcacatgtggattaatcttccactgctccctctgctacaaaccactcatcctttcagctttaactgtcaattcctagcagttttcacgcgcgtgcgcgcacatatatatagagagagagttgaacttatgactacgaatctgagcatagcttatgtgtaaattgttagctagaagttgtatttttttttacggagggagtacgaactataaattatgaaattatttctcatgttgaatctaaatgttaaactatataaatatgtaaaaatggatggttagaaatataatgtttgacttacaacaaaagtagaatgacagataatatgaaatgagtggagtatatatttggactgcacgaactaatataataatacatgaaatagcaatcgcataagttctacttcccccgtcccataataagtgcagttgtgggttttagtgctcaacatttgaccgtccgttttatttgaaatatttttataaatagtattctaattgttattagatgataaaatatgaatagtagtttatgcatgacttatttttttaaaaacaatcataattttttcaaataagacgaacggtcaaacgtttgatacagaaacacttatggttgcacttataatgggacggagggagtgataaaaaagatcaaaactactactaaataggatgtaataggcatgtcagtgtaactcctgctcatgtggtgcttcatatga

SEQ ID NO: 45371 - DNA, 972 bp, Oryza sativa
atccgtgttcctttcttatgttatttaattactttgtctaagtaggatatatttccatctttgctggttcattgtttagtatttatactaagtgctttagtactaggactccggatagagaaggaatttcctgcgcagtattagagtagtaattaataacttagacgtggtgtctagtttagagattacctttgtttgttgtgtatcccacggatttgtcagaggtaggcggcaggtggtgacagccctgaatcctgtcctagtaattctccacgtttggatacatcaaagagctatagccggaaccacgttggcaggccagcaggggtaggtgcccgaagcaacagataggaaattacctttgcttagcgtagataattaaaacccatagaaagtcctctctagcctggtctacctatcatcagttgttgtccttgaatagtcttagccttaggtagattacgcatgttccctgagttagatatccttttggggtcacccgaaggtgaagtgctacagtggtattccgtgcgcttgtggatttatctgtggtcgtaataaataccaacaagctcaaggctagatatgtgccatcctctaatagctaatcattcactcgaacctatgatagattatataatttgtgatagactcctcaatcacctttggcatggccatgcactccataatctataacattgaggggcccagagatatctctccataggagggcaaatcacactatgattattcatatcccactacatgtttcatagcatacccgaaaactacttttataactacccaattatggggtagcgtttagcagtccctaagtaagctactacatatgttgggaaccatgataatctcatgtctaagaattcaacaccaacactaaatgaaatcactgatgacacaacacatatggctcttgcagtgtctcgagttgggtctatccaacaacaagtt

SEQ ID NO: 45372 - DNA, 855 bp, Oryza sativa
ctgcattatgttgttgaagttggtaaattgagcatcggcagattgttgccattcttgcgtttgtgctatgtgttccgtgaggttgtactggatctcccccgtctgcacatcaaaggtatccattctcgtagtgatttcacccaagtcccaacaagaggaacacgagcacaattcacttagagatggaggcacaccacttgatctgggaggttggtcgtccccccattgtatgtcatgaggcgcacgccatcggtcctcactggcacttgcccagcttgagactccgatgctgtagcgtggagcttgggtccatccgggtgcatccccagttggttcccaacctgtctcacgggtgttgaggatgatgagctttcccgttcatttcttgccatgttgcgcatctccctgtatgctccacctgcacgagattcttctatggtttgcaggggaatggttagttcacggcagttgtacaaatgataccccgcatttggcaacgggatttcatttgtacaaccggagaaaaagtatatcaaagatccatctactccatgtttcagaatatgaccttgcactagataagtctcatcaatacacggacgagaagctaagataaaagcaatttggtcgctaatgatccctagcccttttgctatccgagtaatcagagaagtgcagtcaacaagagcagagaactttatattctctaaccattgtcttatcatacatttcataggagcaatgttgttttttctaaccatggcaaacatgataatcaattcatcccccctaatggatctatgatcacctctagaaaacaaggtcatagcaatccatttatgcatgagcctaagt

SEQ ID NO: 45373 - DNA, 2424 bp, Oryza sativa
aaggttctccaaaaatattcttcaaagatcttctgttcatgcatgctactgtgaagtgactgctagctagctcatgtcttttcactacaacctttgaaattttcctttgtccaaacataaagcgtgcaattgctgcataaaatgactaacagacaatcatatcaaggcagcgagcactatcaatcccctccaacccaaatgaagattttcaggcaagaaattacttaatccctccatcctaaatataaaaacttttttcacctgctcctcaatatcaacctaccacaattatttcctattttatttcacctactcgctgtcattccttagaatttcttatattttgggtagcaaaaaagatgtccattatctaaaaaaatgcaaaaaagatgtcacattacagtggtaatgtaccagtaaacatattgttcgaggaccaaagaaattggagtaatggtagtactgaagtacagacatcaatcctactatcttcctggcaagaaagaaatgaaaccttaggattctcgagaacgctatttggctgcccaatgtgaagctgggcacaggatttcacatgattgggcagcaacagtgagactggttttaacccaatggacaaacgagggcaacaaggcagcaacgcacacacagagactacactacacaactgtaggcttttacccattcccattctgaccaaagccaccagcttttcttcactcctcttgtagtctcccaatacaaatgcaggcccagtagttgtaccattgctgccacgccattggacgccatttctactgcgacagtggctgcatggacacgtgtcatccgtacaagagaggcttctttttctttctctttttttttttttggtgaggatacatgagaggtttctgatccccatgtttaagcagtgcaacaaaacgtatatatgtgcttctaatttcgtttttcaaggaggattgattagtcgcgaagcaaaaaagaaaaagtcaatatgttttattaattgatttcaaatacttcatgcagaccacagtttttcagttttttcttcaacataactagacaacagtggccatgtgtgtaattttttttatgcctgcatgacatgttttcacataacattgaaactgatattttggtacacaaattttagttttctttatttgatgaaaaaacaaataagcttatcctgccacttttttatttacatgcatacgacacataactagaactaatagtcataacaaaatcatttgtaaaaaaagactagctaatatttttatataatcacattattcagtatgtatagcttatgaggaaagggagacatgcaaaaaatatggaacaatcatctttgtgtaaattctttcagtaaatcaaacgcatgcatatgtactcccctatatactttactgtatttttttcatctttactgctgtttctttgttggatcccttctttgtgtttggttcctgttcaaaagtacagtggtgctgtcaggcatcacctgccctcgtgaagttgctcgggactaaaatttgcaccacacagccacacacactcatgagagagagagagagagatgcacatggggatgaagccctaaccctagcagctcattggttggaaacaggagatgatgcaaaagaaactggaacacaagagagagagagagtgttatatcatcagctgcttgtttatccctctacccttatcacctgatcaaacatacatacactaacacttggcacattcatgtacaaactaactactagtacatcaatgccatggccaaccatacacactctccttgctatctagagatctgcttctacacaagcaaagctacacaaaagggaaagatgatgaatggagccccaggatgctctatattttttgtgcaaatatgtgtgtgatcatacacatcatgaggtgtgagagagatcttaaagctcacctctctctctctcttcatctatctctacagctagctctgccacacagacatacaagcacacagcttgccacagtggagagagaaaggaaaaaacataaatacagcaagaaaagagcaggaccaccaagccaaagaagaacatctctctctctctctcatctcacacacacaagagagagagagagagagagagagaaagaaaggaagcagcagcatactacacacagcaagcactgtcctagatctatctcaaacatctagctcacctcaccagaagcacaaaggaaagcagcaaaagaagctagctagcacacacacacaagcaagcaagagagaaactgttgcgattttctttctttccccccagaaacaccaaataacacgagacagttaataacagaagtaacaaaagatgcatctcccatttgaccctcccctctctttgcccccatgaaagctat

SEQ ID NO: 45374 - DNA, 862 bp, Oryza sativa
agcttttaagttgtctcacaagcttcctgtctttgccgctcatgaactgtgttgctatggttcttgactctttgagcccctcaagtatgggagtatttcttcttttgggcttaggagccacgtggttaaatagacatacttgtgattagtcaagtttgatcaagttatacatttgttgtgttttcgtagtatcgagtgtcgcaatgcagttttgatcccatacatgcaccagtgttcattgaaagcatggcgtgggttttatatgcaactaaagcgtgactgatttttattgttaaaggttggcaaatctagacattcttatcatattaaccaatcaatcatacagtgtgagcttattgtggataattttgctattctctaccgttctctccaagatgatagtcgctaatatcagcaagaaaattattatatatagccctcatctagaaatttggcgaacaatatgccaatgacacaaatcccttcttgcatgttatctaggggtcctacttttacaaactttaaattcgacatttctttatctataatcgaagcctatttacggaaaaccttaactttatttgcttaacttgttattagaggagagaaatgtgaccaagaggaatcaaggtattgacatttacctccatttcaaaaatatccatccttcaaggtcctcaaatgcaaaaggacatagagagaagccattaatcagaaacaaccctgcaaaaagttacaaacaaaaccacgaaattagaaacaggtccctcccctcaaagacctagagagaagccattaagcagaaacacccctgaaaaaaattacaaacaaaaccgagaaattacaaacaggtccctcccct

SEQ ID NO: 45375 - DNA, 981 bp, Oryza sativa
ataaaacttacactgtaacttttgtaagttacactgtaatttttgaatttttgcatgtaaattttaaattttgtattggatttggtctttttcttgaggatatggtaatttagtgtccattatggtgtttcttaattgctttttgctttttattatatctatcggattttaatccaaagattaaaaatctgtgtgatacgatcataaaaatctttcgaaagatgtataggtactccctatttcgaaagatgtataggtactctctatgagtaatcgattttgctatatctcactcgaaagatttttcttatctctcactcgattttcttactcaaatttacagtgcattttcttgtaagttacagtgtaatttatgaaacttacactgtaacttttgtaagttacactgtaatttttgaatcttcgcatgtaaattttaaattttgtattggatttggtctttttattgaggatatggtaatttagtgtccattatggtgtttcttaattgctttttgctttttattatatctatcggattttaatctaaagattaaaaatctgtgtgatacgattataaaaatctttcgaaagatgtataggtactcccatgagtaatatggtcaattgtcccccccatttacatggcccatgtttaacaatctacaaaaaccgatgtgaaatcacaattaaaacatgcagaatcccccgcaatataaagtcattcccaacccaatgactaggatggtatccatattattaaataagctgccacctagaataaaaaatgatgtggcaagtgaataaatgaggaaagagaaggaaaccatgtcttgcatgagacatgatttctacacaacacccaagacatcatgtgagataagtaacattaaatttaagtatgaaatattgatgtttgcattgaaagagtagtgtctagtactaaatttttttggtgatgtggagtttatggaaaccatg

SEQ ID NO: 45376 - DNA, 14209 bp, Oryza sativa
atgataggaaaagaattattaagtgtcaaaattttttgaataagacgaacggtcaaacatgtactaaaaagtcaacggcgtcaaacatttcgaaacggagggattatatatttttcttttcacgtctacagtgtggaccatgtgcttacagagagagataacagtacggtgttaatccacactgttgcgaaaattcctaattactactctgtaaaaaaaatcaaatcaaatcctaactacgaagctgaacacgtatttgtctagatttgtagctgggattaggtttctttgggacggaggggtacttcatatccaaattcgtactagtaagacatgttttatctaatcaaaatctttatattttgggattgatggagtattgtattttgcaaatgttttaagcattatatttaggaagttactttttatagctatagtggtgattctgttattggcctaccacccctactgtataaattagtccatgatattatctaatattatgtaataatttaatatttatttaaatcaagtgaataacatatattcaaaatatggacattttactcatagcaaagcatgaacattttactactactctaggtaaaaataacattttactactacattcatatcagaatataatattttttaggtttatttgaacacggttattaagaaaagtagaaagaattaaatgagagtaggttgcgatttaataagaagtgaaggtagatggaaaattgaatggtagagggttgtgattagttgagaaaagaatgttggtcaaaaaattattatattttaggacaaattatgaaggctaaaaatatattttggaccggagggaatagtgatatagaaataaacaagcaaccattagtttttttaaaattctcaatagggtaccccatgactgcttttaagaatatctaactactccctaaacagagttcacagtaaaatgctaccaagatgcctttagccctaaatcatttttgacagaataacacataataactctttccttcaacactcaatcgctaagggttcttcatgcttctaacctaaagcttttttttagacatatttctaggtggcttttattggtagtagaatcttttatttttcatcgataaaccgtatttatttatactaccacctattgatacactttagtaaaatttaaaccagagttcaatcagttctaactaaattttaaaatgtgcaataccaaatgtatggatggactcatcggtgactccttgatatgttaacaaagagaacggctttagggatatactgtatttccatattatgtttagcatgtaaaccatgcaatgacatgttcgcatctatttttcttactagttggagcaaagctaccactaccaagagaattgaacataacttttccatgtggtgattgatgttgtcgttcattatcatattcatcgcctatgatgaaaacttcgtcaaggtttccatcatttgtttcctcccttagcatagtggtggatctgccatgagggcggcgagggttcgagccctcactattgacaagagactataggagcctcaccgagctctctaaaaatttctactatacatatatgaaaaagaggttcgagttttgtttagtttattcaacctctactattttttttcctggatccaccctagttagcatcacacctaatctttctttttttgttatcattcacaaactagagctcctatgcaaccacaaatataagcgcaattgcacaaaccacctcgcttagtttgaggaaggtaaaatgaacggttttaatcaaatgccacatggtttatgtattttacaggttttcttttttcttttttgtttcatggcttccaaaatccaaatgtttggtgcagtaaaccgatgttacccttttatggaaaaatgttgcaaggatgaatcatatgaaggcacaaacagtacatcctatgttcatcaatctgactgtcattgcattgcacagacaaaagattgcagcagtactcgatcgatcgatagctgcagaggaagtagaaccgtacgcagagaagagctgatcggttattattagttgggttcatttccggccagattattattgctcctgcactgttactgctccctggcaccgacagtgcacacacgtacagtacagccgcaatgcaaacctttacgttttcacaaccaaaccaatcgatgaatcgacgcatgtttcagctcagtttcagaaatccgccgaccgaccgagcgttgcttccgtataaatgggaatattttcgattttaggcataaacaaaattatcttttcttttagtttgtttttcagtatcatactgctgccagcactaaacagttacattagtaaacgtaatcaatttaagaattgtttccgaagaaatgcctaccattttcaaccgaatttatcatgcaaacgtcactactgcacagttcaattgcacactgctgcggttacggctggtcgtaacagtttgaattttgaatgccataagctgtactagtgctgtttaccgcttgctattgctagtctcgcagctacaagacgtgtattaatttggtgtgtttatgtactaatgtggtgtgcactagagtttgtactggccaattaaattggtcggagctatagctagccgcaaagccgttgctgttgctgtctgcctgcccctttgcccgttacggggatccgatgttaccgactgctcggctcagtaacctacagtgcacatgtgtttcttaccgccgactatccaagggcatgcttcatttgtcctagtatataagggattttaaataaatatatatgacatgtatattccagtattacgaatctggacatactttctgtccagattaatcaccggtcgttattgttgtttactgagcgatggtcgaaatcaatcattggcaaagtaaaagatttctagaggtgactttttcctgttctttttctttgtgggaggtcaagcgagacttcggtgctctctaattgctgtacgatttaattaattaattaattaacagtgtggcatctgatccttgtttcccataacaacgaaacgaggcagcagaaaagaaagaaaaaatttaaaaaaagaagaaataaagctgccacacgccgtctacacgagcgagtgagtgagaacagcagtgctgatcgacatgatgcaaacgaaatttgttcaaagcgggagaagatgtgttcggaatatctcatgtcagcaagcacccacagcgacagaaacgattgccatacaaagcaaactcaaaaaacaaccaaaaggttaggcaaagatgccacatccggatccccttgggattattgttaggggggagcaaagccactatctaggttagatcgcgtcaatctgtaccgtggatcgagatcggatggttgaattacaccgatggtcgaattcctattttatatctataactagattgccaattgatcactgttcgattgctagattacaccctttaacacataccagatatgtatataatctctatcgacggtcaattcatgtaacaactcatattgcaccttttacacctttaagataccaacagtaagtcagagaattaatgagttaccaatggggtaagaattaatcttgtgtttgttgtgtgcctaatagttaataatcaatatgtttgacttgggaacatcagtgctgaggtatatgcccacatttgcacatcggtttaacttttgattaaattagttgatgcatgaatccccactactgatgcaatggctcgcacggttttatagagagtaaatggcatccttattattgatgtcaagtcaagggtttatttatcaatttttgcagttctgtggcgtggtcccaaaaattctatcaccacagctaccgcataatatattttttatatattatctctacaatatcattttcttatccatcagtacgagccttgtgtagttgtgttactaaagattaactgcaaaagatataaaatcatttttatacttaaaacatgtataaaagcaaataaacataagggatacttaatgagtagtagtttattaatatctattcaagtgaaggaaataaaaggcatacccaggtttgaaaatttctctagttcactaatagggtctcttacattcatagaaaaaacatagaaattttaaagtattttaattttataggatattttcctatgaaggccatgaaacaaaggaatgaatcatattctatcctttgaaattttgaaattcttatagaatggacaattcaatagagattttgaagcaaacttagcaagagctctaatctttttgaaaattttctttggttcatctttatcatccgattccaatttttatcccgcggttcagtcaaatggttattgttgtgttttttttattttgcaatgccttattttgtacttacatttctgttagaataatgtgttttttctaattctccgttttttctatgattcaaaagtgccctaagttctttttaaggaagtgaagatctggctagctaattcgaagcttccggagcttttaaacggtaatacaattttcttttaaaaaaactatttaaaatatattttttatcctcaaacggtgatcataaatcattcagccattcggaaaaataaaaaaccaccaaaccccacgcaaatcgaaattcagctatgccaaacaaaagaagagtgtttttcccaaaacaaaaacttttcatctatcatatcgaatatttgaacacatgcatggagtattaaatatggaaaaaaaaactaattacacagtttgcgtgtaaattgcgaggcgaatcttttaagcctaattgcgtcatgatttgacaatatggtactacagttcacatttgttaatgacagattaattagccttaataaattcgtctcgcagtttcctggcggaatctgtaatttgttttgttactattagattgcgtttaatacttcaaatatatgtccgtatatccgatgtggcaactaaacctaaattttttccccaactaaacaaggccttagaaaaaaaatttgaagattggattccagtaccatacgagatatcagaaggaaactggcaacggcctgtagactggatcaaacgtacgctatgaatgctggcttctagtacgataaattccggggagcagcggctttccaaggacgtctggtacattgcctgcaacgcacttaagcgtacctacgtacagcaaaaaatttaaccgagtcgatctttgcaacgtctacgacgaccttttcttcaggtactctgtgactcgaaaaggatgagatatttctcgatttctcaacggtagatgatgcgaatgatttcgagaaacagctgattgataattcagtttttttaagatttaaaaatctgggttttttaattgtggtttctagtttatttttcgaattctacaactataggtttataaaatctgagtaaaatttaagttgtttagaaagatgaagaattggtagaaacttcagctgcttagaattagctctctaaacaggtccaaaggattttgggacctcggagtctgatggtgcgagcactactacagtgtacagaaatctgtcggtggctgaaattatccggcacgtttcattgtgtatgtgcatggttaactttaattacaggtcggaaaggagatggagaagaccagccgtgtgttgattcccgtacggaatgtgaataaatccgtcctaaatttagtactgtaatcaatagcaccaacgtctaaaaacattgcatttcaggttatatatctgaatatatataatacttttaggacaaaagtaatacaagacaacacattgagcatcgcgatacatcacttcttttttctttgtgaaagatgaacaattagcaacttgcatagatcgaaacaaatgtaactcaactggctagctttcttgtgattgaatcaatccgagttcaagctgtagatttggcacgtgtacttgtttttacagctaattattcttttagtagtaggtgatgtacctgtcgatagcgagacgttcgtgatggtttcatcaatgcaatatcaggatatgctaacccaatcttccgaagatgcttgtaacggtaggagtacgcatgtgtatttataaggatgagtgtgggtgtattgtgagcgcctacttttgtactgaatttctaaaaaaaacaacataaataggatatcaaggcatataatcagtatagtgaaactcaatacaacaatgatctctgtcctattggaagttaagcagcagacaagtcagcggcagagtttacaacacccaacacaactgttgggttcttgtaaaatttagagatattttgagcgaattcacaagccacttgataaaccctttggctgttttttattaaaaaaaacaaacttaatttcaaatatatggtaaacgtgtccgaatttcactggcttttcaactgtttttcacataaaccgaggaaaccactaaggaacgatcccataattagcaacaaacatttaaaaccatggcaagaaaaagatttactatttgttatcctttcaaaatgtcaattccaatatttactattttttgaggcaaagtgagggtcagatccaagtcagccggcacgaaagtggggctccaagctgaaccgacgctgccacgcagcgcaggagccaatgcaagtgccatattgccgtgtgacaattgttaacatcagcagcagctagccctgccggctctgtcaaatccttctcctgcttggccgaattaacactgcggccctgtttaattccaaagtttttttttccaaacttccaattttctatcacatcaaatatttcatgcacacacaacttttcagtcacatcgttccaatttcaaccaaacttccaaacttcagtgtgaactaaacacagccgctgttgttttgccatatcatgatgtgacgaagaacggatggcaaattgttagcatcggccagtttgtcttggaggaattagccaaatttagtcactgtttggtaattggtacggtagaatttttgttttccctttttagtcacggagaattcattcaggtgagaattgaaatggttttatgtgagaatcctgcaaatcaaagtgaactcttgttactacgaaaattgggccatagtgtacatcctgatttatggcccataagcgatctgaggatgttatgggtcgtgaaaggaataagtctatttcgtatccctgtcttgcttcttattgaatcgtctcccttaaccgcaacttcgggtgtaatgtctcccctatctttgaaaatcagtgcaaattgactctttcggtggtttaggaaatggtttgtgctgacagtcaacctgccacgccaatacaaactttttttttcgtttatacaaactgctttccaaaccactgaaggagtacatttgcatctttttttgaagttggagaaggtgttatacccggttttgcagctaagaggatgcgatttggtcaagggtaagagactagggataaaaaaatggtcagaacagacttattccgtcctgaaatgaactgttactgaagcacataaatttgacaggaaactaggcctttcagttatctgcatcttcttcacttcctctctatctctcttcgtgctttgcttagcaagcaatttgtttcattttcctctgattttttagtaatttttgccttcctcttgaaattgagattgcaattgctgcatacctcagaaagcactagcaaagcagaatttatttttaataaaaatcattatcactacatggttctatggacgatgtgtttcaactttctacagccggtttcattctaccatgacagcttgacagtgacagtcgagtggtttcttaattcttctaataattgttcgtttattttaacgtagctgtttgtttgtttgatataaaagtcaggatcaaacaaatcatggactgataatatatttgtcccacgtttggtcggtcttgggttgatggagattggagaaagggggccgatgtctcgatgataacttaatttttgttgttatttagaaaaaaaaattgagtgaatcttagtgccgtgaggcatctgataatccctcttagattattggtaatatactaatatgccgagaggatttgggtttcgtctcgaactgaaatatggtcctccaattctccttgtgattttgttatgcagtatcagatgtatgttccaagatttttctttttttttcaaataaaccatcatccaatgccttgaaagaaaaaacaagaaaaaaggactgaaatttggcgaattattgtcgctgcgaagaactcagagagaacatgtgatggcaggcggttttcaggcagccgtgacttgtcgccgagcaaagttcagacaaaaatacgggagattcccatgtcgacgtgcagccatccagccaaagtttccttcttccgtaggcatcatatctgcactccaaatgccatttcacttctctgcctcattttctgctctttgtctgcatttatgcctgtccatttctgaagatgtccatttcagcctgaagatctatcagcttttggcattggatagtgtccactgggacagatgaacaaatgacaaagcaggggggtgtgctgagttttgtttcttgcagaagatttgtttgtttcctcttcttcctttctcctgatgatgcaattagaggtgagacaagcctgtgcaggggcataggaaaatgcttggttagatttgggaacaaaattaggtcaaatggatgagctgtttgtgatcttccatggcatggacccttgaggtgtgaaatggcttgcttgtaggtggcatgatcaggctcctgcaaatcaggcagaatggtttaatttttttttgatttgttggcatcaagtcaacatgcaatatctactccatatttatttggtgttagatggattaaaaaacagtgtaagtacagaggctattagttatatattccaccgctcatgtggatgatcaagtagtttaatctgttccatctactgaccaacgtgctattttgagctgcacttgtaaatttttcaatgcaactagacaattatccgtgccttgctaactgaccagtgtgccatgatatgaaattagcagtgtatcataaattctgtacttgaaaaattgcatatagcactaccacaaaatcgatttttcttgacatcaccttattattttctctggcgaccatacgcgaaaactgtcagcgaaaatacaacatgaggttccgagttagtaaccgccattgaaaatctatttcagccaatatagttttgctaattgacatgagctgaaaaaaaaggttattcaaataataaatatatgtatatgtacaaaagattccatggtacgttggtaaaatgcatggtactgggatcgcaacctcactaggctagattcatttataatagtagagacacaaatagattgattttaatctaccttaaagacccctcccattaatttggctccaagcctccaccactgttaccaaatgggagttacaactataactataatatattgaagtagggggtcttttttttttttttgaggggagtagggggtctttatttgtagctataactataatatgggagtttacaaatggatgtatgagtacagttatggttggaaataaatgtgtcttgggtaatatctccttaccttttcgtaaacgagataccatgtgttaactgatattttttcgtgctatttttctgaaccttcgtggtccttagtcaatgccgagcaatacaaaacttctttagtgattctcaacatacctattttattcctatatagttaactatcccctatgacttccttgctcatgggataatcaaggatgagaaggaagtggagaggtggccattgatgatgtttctatgcaatttttaggctaggaaactagtctcaatgatgtttctatccattttttttacgagcacccatccacattaatggacttgtgcctcttggattcattgggcctatcattcccctatgacttcattgcttataggagaactagagatgagaagaaagtcgagaggtggccgttggtcttaggctaggaagctagtgttgatgatgtttctatgcaattcttcacgagcacacatccgcattaatgggcttatgccgcttggattcattgggctaggggtggatatcgagccagctcgactcggctcggctcggctcgctaccttaacgagccagctcggcttggctcgttagtgctaacgagctgaaatgctaactcggctcgactcggcgagctggctcgttgagcttgtttagcttgttaactgaccagccggcgctccctatccgtgaagcagaccagcagggtgcgggaggagcggcatggtcggtgtcgtcggcatggcgctgcggctgcgggaggagcggcgtcgtcggcgtggccctgcgggcctgcggctgcgacctgcgggagaagcggccggcatcgtcggcgtggccctgcggcggcagaaggagcggccggcgtggtcggcgtggccctgcggctgcgtggccctgtgtcgtcggcgtcgttggtgttgatggtggctgcgacttgccgcctgcgagcttgcgacctgccacggtgccgcctgggattcagtgaagcggctgaaaagatagggtttagccgtaattagggaagacaggagttggccagttggggagagagtttttactgggttggtcttgggccggctgtggcctgtgggcctgtggatgtgggattcttgggctatgcgagtttaacgagcctaccaagtgactcgcgagctagctcaggatcagctcgttagcttaacgagcaaaactgctggcttggctcagctcgttaagactccgagctcgagtcgatcggagccgagcctgaaacgagccgatctgagtcgcgagcttcgagcttttttttccaaccctacattggacccatcataaggtggacgcagcttggaaacaaagatggagcggagatgctcactcgataagaacaaccaagcaacacataccatatttatgttgtaatttataaaaaatatagttcaatcaataaattaatgcaaacaagaaagtatacctttaattttaaataaagtaatattctttgcaccataattcatcatacaccatatcaagtcatcgatcaattcatcgaacctcctattatgcaaattggttctgattatattaatagccgagaaggctctttcaacatatgttgttataacaagtagaagcaatgctaagttaatagggtgatagaccaatggaaatcaatgtccttttgcatttcaaccatcttcaaggacaaactaccaagatcatgtgcacatggcagtgtcgatgtccacgtgggaatcgggatggctttggccctagcggtgccgacgccttggtggcatgaataaaagacgaaccgttcaatccaagacttaatgatcgatgggactgatcgaggagagacgagacgtcagcatttctattttctttcgtcgcttgtggccttccacctacagcgtgaatacttgatgggctggtcacttgtaggatgcttatggatagaatctggtatcaagaagcccaagggaggatataggagtttggggggaggggggggacgcaggccatagctgggcctatcgacctaccctacccatgggtggttccgtccctccatcatgtaatgttaacggatgggcttgaccatcaaacaccttgataccatttcttgtgatcccctttgttgtggttgggagacacttgttgtcgcctcttcaattgatcttatcatgctcggaggctatacctacccatagctattttttccatcctctacgtcaccactagcttctacctagatatttgttgcatccttatcctacatatctcttgatatcgtcgccaacattgactgaagacttatttgttatcagccttgtcttttgctatatgatgacataacgtttgtcgtcgaagatcaaggccgagtggagggaagtagcattaccatagacacaagtgggctagagaacctatttcaagcaagaattagttagcatcaatgactaatttctcttcaaacttaggtattttgtgtgtatgatttctaacagttttctagtttgatgttgttttattttattgaaacctttgaaagttcaatggttttgttgttgtctccctttggtagcattacatttgtgttacataagtttatttgggatagaaagatgaatttgcgggatataatgaatcgccatcaaagtcaactaaccaagaaaatcactactccctccatggataaactaatgtttgatgctcctacaaaccattttatcctacctagataccctagtagaaaacattgtttgcatgtccattttcctttttggaccacaggaaaaaaatgccacatgaatagaacaaacttaggaatatgaacaaaatataggtgcaaataatatattgcaaaagcacatgagagtgtagggtgcgggcagggaaatttcgaatggcatcacatatgttttctatacgcacaaagattgatgatttttcatatgaaaaatattcatcaatcctacatcccaaatgttgatatagtgaaagaatagtatgtcgaagaatcctttacgttttctccattccaaacgggccgactagtttgttgtttctaagcatagagctataaaagatacaactagtatccttactatgtctctctttttatgtcaccatttatggttgatgatttgttgtttccttgtcctacttcttggtatccccccacatgttgaccttaagcttttttttttgtcgacatccttataccttctatcatctttgtctcgtgtgaccgtcacactagtcatcaaatatttaagcaaagtttggagggtgtatgtaaaaaatatcatgtatttgccacatatctaacccacaataatttgctaatataatgcttgtgtcaattgtatcgtgtcttgtaaaaatatagtttgacgacttttatggttatccgccttgataacattattacttttgtgttacattaatcaaatcatgcaaataagatggggaaaaggggaggaatatttttcaccatcacatatagctaactaagaaataaatattttcctgcaaaaaaaaaggaatagccagtgatggagggatgcaatatgcatgcaaatagtaaaacaaacaaaaaccaatgcatgaacctagccatggaggatcccaagcaccaataatggaagaaaagaacgtaggaaaagaagaaaaaggagagggccaatgtagacttaaaaactccctaaccactttttgtgcaaagctgacattttcaattctgctgtccctctctccacctctgcctgcatgctaccagccccacactccaccacaacctctcttcccctttcctttgcctgcattctgcattttgacttctcctcctcctcaaactcactcatcacttctgttccttgaatttatttgtatttccatacacaccctcatcttctactactatcttctagataccattctaaaaaaaatatatgaatttctagagttttgcaggtaattaagaaaatatattgaattaaatggagaacggccatgattcgtttgacaaaaattaaacaaggaaagactatgattaaatgagatgaaggagtaggtgtttaaatactactcctatatttcagggtaaatttagataacgagaaactactatattttgaaacagcaagaaatagtaataatattaattactatgtttccattcatgttcatgcacatgttcactgttcacatttgtttatcaccttctcacataggggctgcgtttagttcacatcaaaattggaaagtttggttgaaattgaaacgatgtgacggaaaagttggaagtttatgtgtgtaggaaaattttaatatgatgaaaaagttgaaagtttgaagaattattttagaactaaacacggcgaggattacacgcatggtagtaccagatttgtagccctgagaagtgaatgaaaatccacagtttcccccaaaaaagcctcctctttttacttacctgaacttt

SEQ ID NO: 45377 - DNA, 1445 bp, Oryza sativa
acgtcgttgtcctcagctccggccaacatctgccgttcgatccaagcaattccggtggtcagacggccacacgccgtgcccgcgacggcgccattgacgtatacgtatacgtacgcggtacgcctccgcctccgtacacacgtataaatacgtaccagagctgcgcttgcgacgccacgtacaagccgatcgatacgccgtcgcatttctcctcccattaattcgacacagcagcttaatttttttttcaattctacgatatcacactatggttgtctttagttccacgttaaaattaaaagtttgaagaaattgaaatgatacgatgaaaaagttgaaagtttatgtgtgtaggaaagttcgacgtgtcgaaaaaattaaaagtttgaagaaaaaaattggaatataaacagtgcgtgcattttgtacagctagttaataatagtccttcgtcttgtactacaaggacctgcacgacaaagctgatgcttttttttttctgttcatcactctttgagaaaattaagctttttcgattcagacgtttaccagaccagtgtactatgctaagcaccaaacatatacttcctctcatcgtcatccatggtaaaatttgattcttaacgaagaataacctagctaaaaaaaaggtggagatgaacgctattgtttctgctatacacaatagacaatataacattttttctctgagtgccacgttatttggtttgttggagatgcattttttctattttaatatcccttcactccataatgtcaaacggtagttttggtaatttacttagaggaggagtaattaggttcatcaaaaaaataattctaattaaagctagtgctttatattggttaatttgatgttgtcgtaataataaagtttttttaaaacaattgtaagttattttcgtatatttttattggctccaaatttgattggtgctatcgaggatgagcatcatactatacggctgtgttctttccccaactttcctaactcacatttcagtgtttcgcgcgcacgctttttaaattgctaaacggtgcatttttttttgcaaaaaatttctatacaaaagttgttttaaaaaccatatcagcccatttttcattaaaaaattaacaaatacttaattaatcataagaaaatacatcactccgttttacatgcgcgggaggtgagttcccaacctcacatctcgaacatagccgtaatgatgctacactcttagaatcggtagttaaatttaagcctcttattttataatgggtgacgcatagttacattagaattgctggctaaaaaatctatttgataatgccaatcaacaatatgcatgggggaagttgggtttgtcacatcacttacaatttaacaaactcatggttgtgtctcatggtagaaacagcatgtaaaattctttcattat

SEQ ID NO: 45378 - DNA, 700 bp, Oryza sativa
aggttcctgaactgtgaaaagtgaaacaaaaaggaggaaagcaataaccggtcttgctgttcccacaactgtttttttgtgtctaacatgcagtttaccagtccaaacaaagcaagtttcagacttacagcaacaagaagcaaagctttgcaagcagagttacatcagagttacttgcattacatattctgaggtaaaatggatatggagacatatgtatctgacagcacagcactgcctgccaggacaagagatcaaagagtaaagactgatggaaagagagctagctagtagtaaatcagaaaggttgtggattgcagtcagaagaaacaacaagctagagatagatagctatcagattggaattggccacaaaagctactgctaactacattcacctcacatttcttcttcccctttccctcctcctcctcttcttcctcttcttctcccccacctctctctttaatacctctcctcctcctgttgctgcttctgcctctctcacatcttctttctttccttctctggatctcttccatcttcagaagagagagcactagttagcatacccatccatgatgaacatgatggtaaattctggctttcttgcttttggataaattttgcttcctttcttaacttgagcacaagcttgtgttatatgtggtgtggaatcttggttgccatgttgtgagga

SEQ ID NO: 45379 - DNA, 700 bp, Oryza sativa
caaaaatatatatatataaatgtcatttattttgttgtgacttgttttaccatcaaagaaactataatcttaacttatacttctacatatttatactaaatttttgaaaatgatgaatggtcaaacattatgtgaaaagtcaacggcgtcatacataaaaaaaacggaggtagtatgttttatttacttatgatgcacacagaaattaaacaggaatacaacgtggcacaaaaggtaaataacaagctaaaactaccataatacatgcaggcagctataagatagaagttcagaacttcatattattaaggttaaagatattttcacaaattagcatgcaatcaaatttcatgtttctcctagtatttttttcaaatgattatttttaattatgatgattcaccgataaaaataacctcaatacaaaagcacaacaaattagagcaacatttaattaaggagacaagtatcctactttgaggcctgtttggtggttctggtgcaatacggaaacttttgtagtttttaagtatttcgcaaatttcagcaggacgcaaccatcgttgttgagcctccttcagtatctgcgcaatatctgtttatagatcacagagtcagcgacagttaaacagtgcaccatatttctcaaaaaaaaaaaatcatagacagcatcatcacataacaaaattctctttcagaa

SEQ ID NO: 45380 - DNA, 708 bp, Oryza sativa
atgtaatatatccgatatgaattttcatccataccacgaagatttgttcaaagagcataagatatcacatttttggagggttctaatttatagtacaactgaacaaagtgcaatgacactcttgcccttctcctccctgctaccgttggtcaaagctcatccaagagcaatggccagcgacatggactcaggcaagcctcccagcggcgtcgccatagatcaagcttgtcccaagcaatgtcattgtcatcggtcaggatcactccatgcaacaaaggtggcgcttgaacttattgtgggtaattgcagtgtggatcaacctcattctaggcagtaatggtgtggttcgaccacatcttggcagcggtggcaacgttcaagcctatcctagtgtctacggtgtggatcaagctcctcttgggtagcatcttcgatggcgcttgagctcatccttcaacggcggtgcggaccaaccttcgacctcgagaaacctgtctagggacttctttgttcggtgtagacaagggaagacgataagggtaattgtagaattagcaaatttttttcataaggaaaagggaaattttgtgggatagattggaagttttgatgttgctatagtaaactcttgtggtattttatggtttcggtctggtatggatggaatcttcccataggataatttgaggatttcaattttatgagaat

SEQ ID NO: 45381 - DNA, 844 bp, Oryza sativa
catattcattttaagaaatcatctcatcctacctgtccttaaactaaacatctttaaaacaagttcgctttaacccaacctattatattcctccaaccaaacacatgattataaaatctatattatattaacaaatccgagaataatcacttgccaacctcaatacatattcgtaaatcgtctagacctcatcttccgcagctagataacatgtaccatcaatcaaacttcgacgcgtgatagaaacatttcagcaatcaatcaagccaaccagcctaccgaattattggcctctcagtaaaacgcaaaaacacatatacaaactattacagaatcaaaaacaagtaaaattaagccgtggctacatgcaactcacatggtttaccaaagcagcacccaaccaattaagtgacgtccatcgatcggtccatggaaccaagtggggcccaagcggccgcttagctgtgggacggtgacaggtgggacccacgggatgaggagcatttacgcagatgggcgtcaccatcgatcgtggccgtcgctttcggttccttacaacgcccgtatgatcggttgtacggccgtggctttgtccgtttgtgctttgcgtacaccgaccgaatgagtgaatgctgacaaacgatagtgtcacacgtttgttagcggttgccgtgctcctttctcgcatcaaagaaacagtatcctgacccgtatcctactattctatactattctattatatgatactacgattctatcaagccgaaacgatgccgattctatctattatcttaattttcatcgtctctcgatccttctatttattattatatgatcctacgaa

SEQ ID NO: 45382 - DNA, 604 bp, Oryza sativa
ggctccccctcctccacagctgcgagccagtgcgccgctgttgccgccttcgccaaggaagagaggagcagcatcagcagctgacaagcagaccagagagaggaaggagagagttgtgcgactgacaagtgggccacacatcaagttttacactgcattggcatgttggcatgtcacatgggcaaaattggcaaatagttgattccaccactttagaggggggaaaaattaatggcaaatcgtatttggataattgacaatcctaatagtggcaaacagttaaatttccccatcattttaatatggtttgtcactctaatagggttaaaaataataaaataatggttgcgatgtcttgcaagaaattattagttttttaagatgtcctcaagtcgtggtatgttttcacgttatccaccaataaactatacataaactttaagtattatgagcaaaattcgtcataaattttcctttgatatgataaagagatatcgttagtgcacagagattttcaactgttcaaccattaattcattgttttttttagagctatacatcaaaggaattctttataggtgtcctaaataggaacactggtgtt

SEQ ID NO: 45383 - DNA, 502 bp, Oryza sativa
tagtaacgtcgtgtgggtaaagtgtaccccctctgcagaggttattaaactattcgaacagccgtgcccacggtcatgggcggatgtgaggtgattcctagcgtagtttttgtttgactactactttgtgaaactgctgttatggaaagggttcgatgttgggaaaatctatggctgatgggatcaaccaggcctgggtggccgtttgaaagctgttggccgggtgccaaccttgatcaattcaaagactgatacattgcacatactccgactggacgagacgcactgtctcatccgtgtcgtttgagaagcactcacttagtcgtttaaaaaaaaagagtttaactaaaatcaattgtgaaaacaagcagcctttcctttgaagcctgcattaaacacataattcccatggcttgctgagtacgaaagtactcacccttgcgctctctctctctctctatatatatatatatatagtatctctattatatacccctccctt

SEQ ID NO: 45384 - DNA, 854 bp, Oryza sativa
ttgtgcttaaagtacattgataataaagtaagtcaaaaaaaaaataattccaaaaatttttgaataagacgagtggtcaaacagtacaagcaaaaactcaaaatcccttatattatgggacagagggagtaggtagtaagcattaaatcttctcctgttaacaacaagtattgtgagagtgatgaataactactactcggtcatatggctactaatggaaacaaagaataagttatgttatttgtacaatgtcaatgagtatcagcggattgttttcttgtacgaaggagtcaccgtagctcaggattggtgagtttttatagtgtgccccgcacaaacaatatggagttcatatcctgctactaccaccaggcacgcgggcccatgttattaccgaacttggtcataaaattgggcatgcccttactccctttgttagggcaacaccaatgtataaaattgaagtgagcattagtatcaggttttgggtcagaggtagtagttgtatgcaggcagcacaatgtgtatgagatttcaaggtggggtccaccaataaaatattctccaaccctcaaccattcataagtaaagatgctttcatcctgtactctctctgtctcgattgtgtaaacaacattatttattcccttgctatcggtagtaagcatactacccggtactacttatttactggttccacaatggctattaccaggttgtagaggagcattgaatgcctattacctggtttctcaacacattgtggatgcccttatgagaaaagacgatttctagagtggagaagttgtcccagtataaacgatttctgcgcaaagaactagaaacatcgaatt

SEQ ID NO: 45385 - DNA, 537 bp, Oryza sativa
ccacgcacgccgccggcggtgcgggcacgcgccgcgcgtgatgggcggcgccatgggagatgctggctgtagccgagaagaaggtgacggctacggcgaggagcaagcaggagggggagcagctagcagcaatattgggatgcggcatggttgttgtggtggttgatgcgtgcgtacgtgtagctagcgagctagctgcttgcgttcatcgattacgcgcaggctttggtggctcttttataaggcctggtttagtttcccacaacagatttttccccgaaacataacatcgaatctttgacacatctatagagtattaaatatagatttcaaaaattaattgcatagttaggatgaaaaccacgagatgaatcttttgtgcctaattaatccatgattagctataagtgctacagtaatcccatatatgctaatcacggattaattagactcacaagattcgtctcgtggtttccaggcaagatatgaaattaattttttcattcgtgtccgagactccttccgacatctggtcaa

SEQ ID NO: 45386 - DNA, 684 bp, Oryza sativa
ggatccggtttttttagcctccccatctttagatgtgcctgtctctgaaccatcattgggaacttttagcttatacctctagataactgtgcatgaacgagtttgtttgaatgaatgcaggtactgagtctttaaactgttcatcatctgttcgtattctaacatctgttctggtgtcagcttatccagtgttattgggatgatgttttcgggggcaggatcagacggtggtttagaagtctgcttaccgtccaccatgacgaaaaatcgttacaactcgtgtcccactaggcgtgccaaaagcgtgttgatgcgaaaaaacacacactggcctgggagatctgcttaactccagtgcaggtcctaaatcttgctcttgggttcaaaggcatgccagttgatttgatcctgcaatcaacaagaaagaaagacaaggaaaccgaggttaaatccataaacaatagccgatcggctagaagccgatgacatatcgtcaatcattaagccgatgttattggcattagatcggcaatgaagaataaagtaatataaagctaaatctactccgataccactctatattaagatatcaaaacagacagaatatatcaaacagaaggcccaatatatttttgatgcaataagatcttaatataaagggcggacttagcatggcaagcaagc

SEQ ID NO: 45387 - DNA, 1460 bp, Oryza sativa
  unsure (1)..(1460): unsure at all n locations
ttaactacccctntcaaaaaaatagaatgatattcatgtactaaaatcgatcaggacaaagaatgaaatcaatgtacaacaagttgttggggaaatccgtcgtgtgttgcactgtatagctaattcttttaaagcaaaacagccattcaatagatgctgttgtaaacactcattttgatttgaaaagcacagtaaatgaaaaaaaatggatggtcgactgttgcaatgttgcaacgctcttgttatgtcttctataaattaacttcattgcatcctatatattctctgtgtgcaataccagatcaatgcaatagtcatgtgttaactttcttttcatctcttcttttttcttttgcggagagtcatgcattagctaactgtttggatgtactctactcatgcacaaggaagcgtttgttccgttgttgaacagagagagagtccgggatacacattgtgaagtcactgggctcatgcacttgcacgcttaaaaaaggtggatagaacactatttggatcaccaataaaaattataaggcgcaaacctacaagatacttatgcattgtgatagtaataccagcaaaaaagtaattcatatcaatgggatgaaaatctcatttagaatgcatgtttgaaatggtagtgttgcactgaaaaggatagcactatatatatgcactaattagggacggatgtgaagcatctacaagaaactatataggctactaaaagatcattatttatagatcttgtctttttcagccaagttaattatctgagatattgaagtccaccaaattagatcttagtgtttttatcatatctgacattgtagaaggttaacatagacagctgggcagctagccacggttataaactacttcaccatactatttgaacatttttcttcctcccaacaacgcggtatcaccatactatttgagcatttctcttcctcctagcaacgggatcatactatttgagcatttctcttcctcctagcaacgggatcagatgaattagtaccatactggttccacaatgttaggatacaatttgaaaacattaagcatggatctcacaatgttatggtacaacttgaaaaattaagcatggatacatgcgcgtacttataggtagcgattctgcgctaaaagcatctgcaatgtaggaatgtaggaattaagaggtgtactaagagaatctttccactatagcaaaggttttatacataaccatacaactgcacggtttgttaaagtgaaaccggcgaaaaccttacacagaagacacaaaaagcctgaggcaaaacaactacgaattgcagatgatggagggaagagcaagacctaaggcgaagcctttaagagagtgaaacaacgacataagccggtgtcgacgcatgcccaacagctggattgggttttcaccggggaagagtccacaaagtcaacacctc

SEQ ID NO: 45388 - DNA, 1557 bp, Oryza sativa
atggctcatgagccaaaattcaaaaggctaacgttggcaacttttacatcgagatgtcgacaggatcgatatgaatatcttttcttgaggcttaaaatccaagctacggagtcgccgtgaacttgcgggtgaaaggacgtacaggtgccgacttgatgatccatgtccggcaccatcatttaaggagagcactgtccaatagaagctgtccatatataccatcagacattcagagtttcagacggcacaagttttcattccatatcatcaggagaacttcaggtacaaactgcactttctttgtttccgttcatattttgccaggccggttactgttcatgttcctcagaaagtaacatcatgcatgatctagggcataatgatctcctgttgaacctggtaggctatgcttctatttttgatataagctaccaagtcattatattataatagacaaaaaaaatggcaaaaccaaccagaggttaatcgactggagattctgagttcctgacctgatttttcttatacctgtacaaacagattgaaaatttaattcacgtcttgtttttcctgctttgcttttagaaattcaatttcaacgaagaaaggttcaaggtgtgaccaaattgccacatatatgagaacacgtgaatggcatatttaatgaaacactcattcgttatggacaataccagagcatgtttacttattttaaagagagcggagatcatttttatgattagaaaaataaaatgtaaggatttagctgaataactcttaactagccatggagattatcgacaaaaatagatgcaacctatcatgcataataacaacctattcggcgaacaaccaccgctgttgtacttcttctccaaaccatcataccagttaaaaaatatatttaaacaaatgcatcaccatgtcattgtcctcagtcataatgcacacatgacaagaactgtttacaaaactacaacagggattatttgcacatgtcctcatattttggagggtggaattctcgatttcatgttccaggaggttaagtaggccaaaccactgtatcatgcaggcggttaagtttccaacctttaaactttcaaaagtttagattgatacatgtagatttgcttgagtactttcatagcattataacactaatgagctttataaatagtattttatataaagatcagatatcaaagttttatttgggagaccatgtcaatgtccaaaatggcgtatttctgagttgtgaccgatgggagttttttctggcacacttattattccaagtgaaacttacctgggcatggaattgaagactaattcttttttgtttttagctgccagaaaagtgcttcaaaatgtttactgccctaaaattgcttctcttgccatatctgctcctactggcatcagcttcatgtactcaaggattgcctttcagcaataacactgatctggatgccttgtaggattcaaggcaggtctaagccatcagtcagatgcactggcttcatggaacacaacaacaagctagtgtcagtgtaa

SEQ ID NO: 45389 - DNA, 1119 bp, Oryza sativa
tttctgtgcatatgttagagttgggaagtcaggcatccgaacacagccttaattatcttccaaagccagattgggtttatttatgtttaaaaaaagggtttattcataaaattgtacaaaattgtatataatttatgatcttatgtgcatatatatggtaattttttcataatatttaaacatatataatttatctcatatttttttgagaaattcatctcataatttttttttgagaaacacatgaatatcgtacattatgtaattcttaattactcgaggattagcatgtactggacgctcacagaaaaaaaaggtaaaatttcactcttacaaggtataattagataaagcatcaattgcaatgacattgacatgaacgacgacattcactgctacgtagttaaatattgattatatatatatatgttatgggtgactgatgcatatgcatgcaaacttgacgtactctcttcataagaaaaggataaattgatattacgtacattcggatctattaaattttctggcagttgtcgagaataattttcaattcgctagctagctagctagctatcatatataaatatgtatatacaatttttacatctaaaaccttacgtacgcatagaacttaattattctgtggacatttctcgattaattagggcctacttattacgtgattaattaggctcttttgcctcttgggatgagatggcttctggaccgcttcagtagccacatgccaaattttgcgatcttaacccttgaaaagtttaatagtacatcgaatgattaagatttgatatacaatttattattatctgtgcgtcattttgattatgccggtcgggattggactaggtattaactcggccggcgagatcttgcttcaaattaaagcagatactgatttgctcaccaagttttatataatagaagcatgagttataaccaactctaatttgaatattatttaaattcaatctggttggaggctgaggtccacaaattaagggtttaccacaggtaatttgaatattatttaaattcaatctggttggaggctgaggtccacaaataaggggttaccacaggttagataagtttgatcac

SEQ ID NO: 45390 - DNA, 539 bp, Oryza sativa
atttgacgcccaaaattcatcatctggtgtttctgttagagtttatggtagtgagagggatattagtataggattgacttgtgtcaaaataccattttttttatctcagatccccttccttatctcttgtactctatatataccggtcctctgaagctcaatacaatccaccaagttacgcggtatattcgtctccccatactatttcaacagtttcatgtgtcttcataaaaaaacgaattatgctccctcccgaaaagaaaaagaaaaagaattatgcattcatgttgccattttaggtgcacaaataattccctggagtgcttccggagcatatcaacatcctttctgcagtttctgagttatttctgaacaacgactaaattttgccaaattaaaaacgttccgttccgttcctgtccagaaacagcacctaatcgtttcatgaccgtcggccaattaaaatccaatccccaattggcctctaatcccaagtttgcacaatcaggccgtgcaattctacccgaagctattacaaa

SEQ ID NO: 45391 - DNA, 2199 bp, Oryza sativa
aaagtttcaatctttttaaaagttgaaatacaatcaacacctcatgaaatattttgctaccacgtataaaacaacggttctgaatatattgaaacatgaatgatgtagctatcaaaaatcattcgatagccatttagccttcccgttacaaatttgcctattcacataaatgtcattacctccttccttttttatcttcttccttctcactccccatcttcttcttgtcttgaccacgctgcccgacacgtggatgcgagcaaagagggaaagagggattgatggatggatcagtgcggcggaattggctgtagcggccttgagcaagacctgcacgtcgctgcccaatccgccgcatgccgctccatcaatggtcgtccatggagatctagcccgcccccacagccgccgctgcagccgtggcttgcattttcatagactgcaacacaataagatgggaagaaaaaaagacgaccaaataaataagatgaatggaaaacgtaacagctagtagtatcacgatttcaattttataaaatttctatggtatagttaggaatagacgaattgtaataatatttatctgaatagataaatttacaatggcatagatccaattaactttttttttctcttcttgaactcagccgcaccacagcaccttgaacggttacatctgaaaatggtttgctcggtaacttttgaaggggaataactcacgagggattgattgtcatagtttcatttttacttctcatccctcaatagttggatagtataagattattagctcatattaaatctaacatgtataatatatttactatacggttagttttattttttttcttttctctctttctcttactatgaatttaatgtaaatattttggagcatttgtatagctagctcttgcatgagagacaacacttctcacttttatttatctttctatttcacacaagtttatagttggcttatagcccactaatatacttgccctaagagatgagaattatagttaattcaagtgagaattaaattttatgtgatgatgtacggcttaggctatctcattgaaattaaaggggaattccctcccaattaccacttgtacctaaatgacgcgacaaaatctaacattatgccattgtcacaagtgggattcgtttaaatgtcattccctagaagggatttaatgaaatatcactctcaatccatagctacatgctaaaaaaatgtttgtgaccaaatttcccctacacacctcttattcctgtctccaacgccatcatcccttaagccctagctcctcgtcgctcctcattggagcaggcggcactaaacggcagatgcatgcaaggaggagtaagaagctcatcgaggacacatacgtggggaggagcggagaggagcgaggttggccacggtgcatgctgggatgaccttaattaccagttgaaggcataggctgggagaagttagaggacttcgctggccagaattagaagagaagatggagatggaggaagcaaggccagtctagtcttagtcttagataatattttagcgtgtagctatgggttgaaagtgatattttatcgaaacactcttgcatagtggtttttttttaacaaaaaccatgtattgaaaaggtgggagttcgctcttaaattccctttcttaatccctcctaaaacttctacgtccaccaaccaagacttaatagcccccgcccccataaacttctatgcccacctaacaatttcaccccttcccccaaccaaacacattcttaatgttttggagtcaacttattagaactttgaatattaataacttccaaaatatttagttcaaaggcattaattagaacaacatgtaaaagattagtgttaaaaacagtactatcgtaaaattaaatatttatttattgtatatactataatagaaaattacagtgaaagatatgtttgcgagaccgtattattgtccaaaactttaataactatgaaacggatagagtagtactaagtactaatctagtgtaaatatcaaagggcactttaaaatttttaattgaaatatcaattgatatttcatcccgaatgaacagttattatcatttacaataattgaggatagatatgttgttgtggtaaataatatcgaccaatataacccgcatgctttctaga

SEQ ID NO: 45392 - DNA, 732 bp, Oryza sativa
aaaggaactgctatcactacttcagatcagcagaagtgtgatttgttggaaggacattgctactatgtggccttccactgaattgctccgctaaattgctacaagctctgtcctaaaaagaaaaggcaatctagaaagagatgtgatataacctagtataacgaatctagacaactttatctgaattcgttgtactaagttatgttacatcctctcttacgttttctttttgggaacggggtatatatgtttcataactcatgctcccctatcataagtcttctcctaaaaatttatatgattgaaatggattacaccgtttactataccatttggagcgagtataatagcaagtttaacagtatagtcaactactaactctaaattatctatagcttattcatataatagttatctataaatatatactattaatacatgatcccacctctcatacatatagtgtcttatagtccgtgctacagctggctataaatatgtagctcacttttttttatcttatttcttatatcctccatgtgtgcttattactggcttatgtacttactctaataagtgatgtaagcagactctaaaaattaccacatcggttttgtacttaaataaaaaaagatagagaagaaaaacggattgctaatttggaccagcaatagcatgagctatatgacgttgtgtgggaggtcatttattatggtgtgtattatatgtaat

SEQ ID NO: 45393 - DNA, 668 bp, Oryza sativa
ggaacctaacggcgatggtatttttgggaaaaaaaatctattgtacgatggcatttcttgtaattcacacttgttgatggcatttattagatttggacgcttgtcaatgacatttttttattatctcttaaaccaattatcttagacaattgacattcaatacagtgcacgatgtttctcaagggaaaacaaaggtattttgcactaacttgagtcatgtgtcactgacccaaaaaatttagaaatatagcaaattggctttaaaatatcaacatttttggggtgctatctttattgagaagtaattctgaaaatatttttagatttgttgtgtgcaccaatttgatctcgtaaaatcattttttgcaaatgcttctttttgaaaaaagatttgtttgaatttgcaaccaaaaaaagtagagccatatgcaccaaattgttaaaattttagtttgaatatgatttatagaataacaaatttaggatgtattagaagtgcatttagtcaatgcaaaaacaccttggcttcgcctcaatctttagggtcagaaattaaactatcgaaaaagttgagagacatgaagtagacaatcctttataaagaccaaaccagttttaaaattaaattcagggaaaaagactaaatggtaatggaatttggagtgtaa

SEQ ID NO: 45394 - DNA, 678 bp, Oryza sativa
ttgatacactgggagtgatggtgcctgctggtgcggtacatggggataacaagtatacataaacgttattgggatgctttacagctttagcaatgtggttgaataaactttagttgtactttcgggttttgcaagatgcaatcgtgtccagtaggttccagatcattaaattatgggacatgtatcacatttgacagagaacctcttatttttgttacattttagacgggcttagatcgctttgagatttattatgcggttgcagtgccttcaccttatcctccactgacgctcctgagatatttatttttttttcactcttacgagtaaaagatttaccactagacccatatgttataaacatacaaggactcacatgtcatacattgtgagtagcaaaaagttcaaatgccccctccctctctcctctctctcctcattcatcagatcaacgtgctcgacaactcgagaagccaatcctcctgtcgcagccgataaggtccttctgaccagcctcctttgtttacctcggctcttattcggatgacctaataaaccaaagaaaaagccaaaatttaaatttttaaacttaattttgagatactttacaacgtagtttatttttcaccattagcttttaagtcataaaaacacatatataaaagttttatctacata

SEQ ID NO: 45395 - DNA, 889 bp, Oryza sativa
tttatcaaagtctaatacaactatttttcactttatatactcccaatacaattattttctactttcataaactacgatgtaatgattactttaaaaataaacttattttagaacagatagaagaaactaaagatgaacttcttacggaaaggaggaagtagctctttgataatcatgtgggattggacaggggtcagaaggtgaaggagaattattgagcttttatagagcctagttataagccgtttattgcgatggttttttatacaggttagttgaaagatttcgacacagtgggcagtttggttttatataccatagtcagatttgtttaaatatcggtttttcaaggtggacggggaagaggtttctagccgaaagtaaaaagagacggaaaagtaataagactcggttcttttcttcacttttcctactctcttattttcgcttgcacgccttttaagatgttaaacggtgtgtttttataaaaaaattatatacgaatgttgcttttaaaaaaatcatattaatccatttttttaaaaatagctaatacttaactattcatgtgtgtgttacctcctccgtttcacaatgtaagtcattctagcatttcctacattcatattgatattaatgaatctagatataacatttctcacattcatattaacatcaagtctagatttattaatattaatataaatatgagaaatgctagaatgatttacgttatgaaactgagggagtacatcattttacgtgcctaagacagtctaactaactgttgtggttgaaattgttgatatagaccgatgccttgaatggaaaggtagaatggcagttgggaattttctgtttcccccattttccttcctactccacttgt

SEQ ID NO: 45396 - DNA, 2279 bp, Oryza sativa
gtgtggagatgcttttagttaccacatcaagaaattgagtaactcattggtataggttaagctcatctaagttcatctgcataagtatttttccactctattggatgagtatagttcttattagaaccttaccaacttactttgtaatgtaatataagcagtttatctatgtcaaatatgcttgtataaagcggttcaggccattttaggatggtagcaatatatttctgatatagtagttcagtagttgttaccatcggtacagaactacaggtgcccatctcgattggttccatggagcataattcatggaacactttgattttggcgagatgtgtacaacaatcgatacattgcttttaagtgttacaacttgaagtcttgaacattcttgtgcaatcaagagatagtgttgaaatattattcctcactggaagttggctatgctgatatcccgacaggaagttgagttagctaaacacattgattactttgcttgaacctgcagagacattagacatagttgttcttattcatatgttgtactcttttcatggaattaagaaaccacaagtccttagttcttgatcatgggaataattgatattttgtattactaacaagtagtacatcccccgtttcaaattacttgttttaggtttgtcctaagtcagacattcgtatattttattatcaatttctaaaaattcatatagtttgaacgatgttcaaattggtggtcaaagatagacatgtttgacttaggacaaaactagaatgatgctgtgcatttgaaatactatgatcccaaaatatttttattggagaatgcctgtatgcatcagcactccaacatactatgcacagatcattaaacaagttagcattatccaccctattcatgcttgttttccttatttagagcaccatgtaaagctctcccagagtcatggactcatggtccttcagatatctttatccatctttatgagaacaattctttacaacatgacccttcaagcaagaaaagctcacataaagggaatttaaatatatttctcaattggtcaaggattaaagcatgaagtgcacgactgcatgttgtaaagggtacaagttagcatatttttcttgaaatggtgtggccctaagtctatagatggaaatggtgttgctgacatgctgtagtgttctcatgtgtgactgaggagcatagcgtaataaaaagagacgagatttggtggaataaatattatgaggaataaactttttctttaatgataaattcgcttaaatcattttgattgtgctggaagcctggaatgctatttctttacccggcatacatcttatatgtacatctgatatattatagcaagatatccttgtagaatcatcaattgcatttgccactctttgtaggttaatatcataatgtttgtagttacatgttgcccacaatgcatatgaatagagtgaaatgtatacctctatactactaaaaaagacaatagtggttgtggtggttctgccacatgcccaccaccactacttttgcacgttctacaaattagtccctgatattttctgttattatgcaatagtctaatatttgtttgaatcaaatgaataacatatattcaaataagcatggccattttacccatagcaaacgtggacatattttgctagtactatattactagtaattcagtttatgcacctagagtgagatttaaatgtgcactccacatcatcaggttacttctctttcagtacacaggacagcttgaggggaaaattaagtagatttagaacctttttttatgtgtttttcacattagttagttaattctgccaaccgtctagcagttctatacattttttcccctattattttgcaggttatgtgcactgagaatgtcaaggaaaagactgagttattacatgctttgatcaatggtaagaagctttcagaccttccaaaaattaaccaggtaatgatttgccattacaagcagttgatgcctgtccatgttttttttacagttaatttaatctcttgcctgttgcattctgtttatttgacagcaaaccttgataatttggggagagcaagatcgggtctttccattggaacttggcctacggcttaagaggttggtctaaataaaattgtcataatattcaagttaccaaggcaataaattctggtttggatacagacatttgggggatacatccgagctagtcattgtcaagaacgctggacatgccat

SEQ ID NO: 45397 - DNA, 818 bp, Oryza sativa
tatccatgtgcacacaagacattagttataaagttacgtactgccttactggcccttctttaattaggttactagttggcaacttggtattctatctcttggttaattaatttaaatactacatgtgtgttcagtccctgtttaatctaggaaaaaacttaaagctttgtaggtaaacacaattcatgactgtaaatttaggttgggttcttttagtggggttggaacccttctccttggcacgcaaaatgaagcggcgagttaagacataattaagtattagttaaaaattgaaaatagattaatatggtttttttaagaaacttttccatagaaaattttggtaaaaaaacacatcatttagcggttcataaaacgtatgcgtggaaaacttaggccgagtttagttccaaactttttttttcaaacttccaacttttccatcacatcaaaacttttctacacacacaaactttcaacttttctatcacatcgttccaattttaaccaaacttccaattttagtgtgaactaaacacacccttaagagtagaagttgggaaaaaggagaaaagcagtgatgtttttttttcttgcaccatgtggccatgtagcaccattttcaatcattctcattcagattgatgaatcatcaaatcattccacaaagatattaaatgctcattccgatgggtgatcattaaatcattgagctgatcagcagtgctgaatctcccacaggatgtacatgtgccttctaaccatgtgacatgttatgttaggtctcctgtcatgggctttgggctgggcgttctatg

SEQ ID NO: 45398 - DNA, 579 bp, Oryza sativa
tcggctcaattggagaaagaaattcttcaaaaatgataagaatgcccttatggtcaaaagcttttgagcttatgtgatagaatgaagatggaatatgatttatgctagtgatgtacttggagtgatggtaaatagtgatggtaaatttagagttgcataattttcaaatttttattttgacgccatgattgaagtatgcggttctagggccattctcgtctttcttaagatttatctctctaattgaaccgaaagtttcctctagcaatttaggattttttttagatttctttcggcgtgacatatttttccaatgtctatcagtaaattacacaaattttagatgtcctttagcaaaatttgccaaaagattttaatgttgtagtttggaccacaataaatcactttggaccacattttcttttaccaatgttacagtttggactaggagtaaaacttcattttcatttttgaaccggataagattgctaaagatttcagtttagaccttttccatcctctccttgtcctctctctctctctcccggactttgctatgccgcggtaagcaacagctga

SEQ ID NO: 45399 - DNA, 1260 bp, Oryza sativa
acataagatcaaattgctttatgactttgttgaatccatattacctccattaaattgaatgatactagcactaatcaatttcaaacattgatcagtacttccattcagataaaaaaaagtataaataccttgaaatatggtgtattatggaagtatttttgtgccacagatataacatcaaaatcaaatagttattgacgtaacttgtggtcaaagtgtgataagtagtcaacaacactagtttatttgagagctcccatcccatgctacacccttctttttctcccttagactgtctccaacagccctcacccaaattcgttcgtttgggtcatgcgggatgtccgggtcacgcacccaattctttcgttctccaacaacggaccaaaacgagcgctgagcgccgcccgcttccctccccaccgagcgccgtgcctccctccctccccgccgcggacccgcctcgccgcgccggtcgctccccgtcgcgggcccgactcaccgtcatcgtccgagggctcgcctcgccgcgccggcgtctaaacccgactcgcctcgtcctccgcttccgtgtccccgactcacgcgggagctcagccacaagtccggcagcgaagaccgtgcagtggccggctgatgcagcacccacacgggaaggatgaccgcgagcatgcggtggcggcgagcggcgagcctggacgaggcggtggcggggcgggcggcaccgatttgggttgaggagagagaaggacgcatttttgcgttctcactcgactccgacgcaaattgcgtctccggtttgggtactctgttggcctccgattttttcatcggatgacccatatttgggtttaggtaccattatgggtagactgttggagacagtcttagggcaacaataatggttaatatcaaagtgagtattattgtggaactgtgtggtgtcagtggaattatgtgtcagtggaattgtgtaggagtagagttttgtataccatgtttccaaaagtttgttttggggagcctggttcaacatgtgcataaaacctttgttgtgggatccatcttctatgtcgtgtttagtttatgaaattggggagaagtttggggaaagttggtagtttggaaaaagagttaggagtttatgtgaggctgtgtttagttcaacacaaagtttggattttggttgaaattggagatgacgtgactgaaaagttgtgtgtgtatgacaggttgatgtgatggaaaagggctgaagtt

SEQ ID NO: 45400 - DNA, 1030 bp, Oryza sativa
aatgtaagaaaataaaaaaaatcaattacacagtttgtatgtaaattgtgagaggaatcttttgagtctaattatgccatgattggacaatgtgatgctacagtaaacatttcctaatgacggattaattaggcttaataaatttatctcgcaatttacaagcggaatctataatttgttttgttattagtctacgtttaatacttcaaatgtgtatctgtatacttcaaagtttttacacctaaagaactaaacacaccctaaaatggcaaagtgacggcgcgctctccgtattggcatttttaacaaaaacgcgtttttgggatggtgttctagcaaaatcgcttttcaaacctgtccaaatgtctattttctcagtttgcatgtggaagagcaatgtgctgttcgctttgggccagcaaaaagagaggtagaaataaatccaggaagaggaaattgggacgcacaccaacacgaaagaacggagaatcaactccgactcggattcatttctataccgcatcttcccttacaatacctcgacagactaaccatcgccagcgtcaacaacgtcttgactaccaccaccgtctcaactctctctcagactgtccgccatggcgcagccaccggagttccaggacgtccaatcccgcgccgccggtgcggtggcattcctcggcaatgttaaggcccggttccggcggaggccggccgtgtaagtcgagctctgcgatgtgctcacggcgtacggcagagaccccgccgcccccgccgcgccggtgctccgccgcacggcggagctcctccgtggccaccctgatctcgtcgccgagatcaacgcggttatttatccccgcaacagggtcgagctcgtacccgccgccgacgacgacgatggcgatcatgcagcagcagcggcggcggcaaggacgcgtcggaggagcgacgcacagcggcgccgcccggacgatgccgccgtggcggagagctccgccgccgccgagcgacgagcgaaggtgcccaaggc

SEQ ID NO: 45401 - DNA, 3346 bp, Oryza sativa
tttttttttaatgcttcacatccatgactaatttccatgtgaaaaattctactaccctttccaacatgcattttgaacgggattttcatatcattggtatgaattcccttgccagttttactgtcacagttgatgagtatattctgcccttagaaattgtttttatcattcaaatagtggtcaatccccattctgtaatgagcaaaagcatgagtccaacagttttaaatgtgtatccaagacactcttttgtcaacaacatatcaaacacttccttagcttgtgcatgagtacagcatatgggaagggttagcaaacgcatgactctccagcaaaaatggaagttaacacatgactgctgcattgatatgaaattcaacccgttgcaaaggaagaagaatgtttacagaagacatgaatgtgatagaaatcagaaccatggggtttgatttgcttctaaaaacaaaacgagtgtttgagaggatggaagctttgttggctggttgtacatgcccttaaattgaagcacctatacaaattgtgtagcttaattgccctataatgtataatgcaaggattttgaaccacctatacaaattgtgcagcttaattgcctgttaattgatatgagtaatcattgggtttaaattatgtagttattggtttaaattcaaatttggtgcctttaataataatagtagtagtagtagtaacttgcgatattcttttttggatgagaatgatcctatggttctcaatgatgtacttctttttttttctactatccatgtcaaagccataaacttctcaaagtttattgatggttttgaatcaacatatcacatgtggtgtttttatgttgacatgaactttaattaggtaagtttcattgttgtggaggcttctacattagcaaaattcatgataaaggtatgtacagactcagaaaaccagcttcatctgaaacaactagtaaaaatatgtcttatagtgttatttgtctctgttcttgagagttgagggggttgacaaacaaccaatttcgtagtttatggtgaaaatttgccagcctggattaagacattggaaatcatttgtgttcccggcatcataccatgcattagtggttttgtgcatacataatagctaataatgaagatgtcttgtttaacgatcttataatacttaatactacaaggattacgtgaattagacccgaatagaccaagtatgatcaattacattacaaaacatagtaagatatggtagcggcatcaaagctccaaaagagtaagtcattatgtgatagaatatttgatttatttggcactactgagtacaatgacgtgatcatatcggaaaaaatatttgacactttccccaaactaaaggacatgtagattgccaatgcctaatgcagctgccaaatgcaattcgaatgtggacaactggatgtcatcatcgaggtgtaagcattccacccgttacgcggctgctgctagcgctatctcatctataagaacgatgatgccattaggccaagcaggtccaaagccgaagaggtccgaaccaccgctgtcatcagcccacatgtgaaccgtactgagctcattgtcagtcagaacgacgacacgatcaggcccaacaaggacaaggaaaagcaccatgtcaccgatccctaaagtacgcagaacaagctctataatgacaacatgtccgtgttgaaaacactacgattgaatttggtagactccaatacctcaggtaattaacttggcagaaaacatatgacccataactgacaaatgtatacattgatagcatagtttcttttttgatgcttcacatccctggctaattgtggtatatataagatactattaccatttctaacatgcactatgaattttttgaagaaaaaaatgcattatgaatgaaaatttcatatcattggtatgagttgccttttgctaactttacagtcacaattgataagtatcttctgcacttatataaataatttttgatgattcaaacactggtcaattgaccttctgtaaatgagccattgcatgagttcaacggttttaaaatatgtatccaagaccctctctggtcaaaaacagatcaaatgcttcattgtgcatgagtacaacatgcggaaagggttagaaaacgcacgactctccaccagatcaaaagaaagaagttgacacatgactattgcattgatttggaattgcatatgtagcagaggatgaaatgtcatttataaaaaacatgaatgtgatagaaacccgaaccgtccaactcggtgccgtatcgttcctatcccaatagtttggtcatcctagactgcgtcaaatcgacgatgatacattgaatcccaataggagaattatgtgaaagtcttttccccttgagggaatgtcccattgtttttgtcaataatgcacactatgcacaatcatatttcttatttttattttgacttgtgtatattatatttatacttaggccccgtttggtagagctccaaactccaactctgaactctaaactccaactccagtgagagctagccccaataggagccgaggtgagtttgaaagtgtttggctgacttgttagctccacaccaccgtgttccttgtcgcgccaacgttgctggtcaccccatgcgccgcctacctgcgccgccaccacctagcccgcgccactttcgcccgccgcctgtatccaccgctgtcaatgccgcccagcccgcgcgggatgccgcccagtccgcgcgtcgcagccaacccgcgcacctccagtcaccgctgccagcccccgcgcggccgcccaggctgcgcatcgccggttgtcgcagccagcccgtgcgtcaccaccaggccgcgtgtcacggccgccaggctacgcatcgccggtcaccgcagccaacctacgggccgccgctgcagtcgggctgccggtcgccgccctaggtcgattgggaggactgagagagagaataggagaggaggtgtgaaggggttgttcagtggcattttttgtgtaaatatattaaaaatgaaatggtagtgggtcttttggagtggagtggagctgcagaaaatagctctaccccatagtataaatttatggagcagctctatcaattctgctaaaaaaaatagagaatctgtaccatttagcacaactccagctctaggtaagttagagttgggagctagagccgtgtcaaaccgcgccttacatgcatgtttgtgaagtgatatttcgcattttgatccatcttactttgataaattttgctgtgacacgcaaaacaacgagagtatat

SEQ ID NO: 45402 - DNA, 632 bp, Oryza sativa
aaaccccaagtttacccatcgttgggatatttaaatttgaggggaggtgttccgatgcgcgtgcccaaaggcccgtgcatcgaagcaaaacagtcgacaaaggaggtttaagtgttcaataattcaaggagggtaattgcagcaattaggattggggccggaaggctatctcgcaagccgtggccgaattactcgtgttaatcctattcatgcaatatttgcggaaaagaaatacttagttttaaattatagctgcaagatgatcaaaggtgatttgccttgctcaatgtcttcattgagcttcacgaatcttcgagaaaacccgcgattaacgaaaatccagtaacctcaactatacgcaaacaatcaaaacctaaacaaaagaccaaaagaaagatcctatttaggctaatttagtagtgccattagatagatctcaattttacggaattactggaagttgaacgggggcgatcggacgaacggatcgagagatatgaattttggtggtttaattggaatttctgggtgaaggaagatatttgtggaacaaaggaaaattgatttatgaaatttatagaaataatattctcaagaatattattgacagtcacagacgtgcgagaccaagg

SEQ ID NO: 45403 - DNA, 683 bp, Oryza sativa
ccaagttaatgatttcaagaattagctccaaaatattatcccacaaccatgaggataaacagtggcgggcgcagatttagaatacagatggggcggcagagctaaccctaattaagtgatggcacaatgcacacaaaccatagtcgctggttcacggtattggcgcaacagtgcacaacacgaacatcgagaaagttaacaacaaagattggtagtcaaacaaacatatatgatttatatgtagagagataaaaaaaataagaaatgttgttagacaataagggcaaccactttcaatagttcggggagggtataaaacgagatgaaaaattatttaggggtttaagtgcttcgtcaaaatagttcaagtgagtaaaataatttttttatatatatttaccaatttaactatttactatagactgtattatgtgctaaagaaatagaaagaaaatcaaattttatgtatggccaaaatcagaaacggtcaaaatgattttagttatacatgaattttcataaatgtttttcttcctacttaaaacacttgatttatctgattattcaatagtagactgatgactaatgtcttagaaataggcctaaaatgaggtttggggacgtggggcgatacggactgtagctgagccggccgacccaccctgcctaatgggtgtgtccac

SEQ ID NO: 45404 - DNA, 671 bp, Oryza sativa
aggaatggattatgaatggtcgaagcgcatgtaggtgatagggaaggggaaggtagagacgagcacttaccaagcagctagctagcagcaagaataccctggagatcatatgcgacacgcgcgcggcagatcggatcggataatgtggtctccgttgccgcgcgcgtcgctcttgccggccggccggcagcttcgtattatggaagcccggatgcaagacgaagaagaaaggcgtcttcgtcggtcaagtcaaagcagaaaggcgtcttcgtacgctgtctggccatatgcactgaatgcatgacttttgtggcaggcatggctattttcatttttttttttgctatatccctgtctattacttcctccgactatttttgatattttatttgcactatttgaccacttatcttatttaaaatattgtgcaaatataaaaaacgaaaagttgtgcttaaattactttgaataataaattaagtaaaaaataaataataaattcaaaaaagttttgaataagatgggtagttaaactgtgcaagcaaaatgtcaaaatctcttatattagaggacggagggagtatataaggtggagatcgactccattgattgattttgttgtactagcaattttttttatatcggcaatttaaacggatgtatatgaacgg

SEQ ID NO: 45405 - DNA, 897 bp, Oryza sativa
tttatgttgaccgttcgccttattcaaaaaattttgtgaaatgtgtacatgaaagtatatttaacaataaactaaaaagtcaacggtgtcaaatattttgaaacggaggaagtactagctactcccaccgtccagaatataagtatttttagaattggacacagttattaagaaagtaggtagaagtgaatggtggagggttgtgattggttaagtagtagaggtaggtaggaaaaatgaatggtggagagttgtgattagttgggaagagaatgttggtgtagaagttgttatattttagaacaaatcttaagagctaaaaattgaaaaattattatattttgggacggagaaagtaccaatctaagttggattggtgtttctatccagagatcagtctgcagtgtttgtggtgttgatgcctccttttcacaccgctaacacaattcaagggccatctaaatattttatggtgatatggagtcaccaatcatcttaaactttgaggaatctccttggtcaagatgggtttaattagaagatcaaaattggttaatagagccaatctatctatctatcttctattatatactaaaagtccattaaacatcctataaacgctctcaagccgtcacataggattcctaaaaacgctcatatgccgccacgtggcgttctaatatattagaaacatctagcccttaattttcatttaaaccggtgggtccattattttagaccattagattagatcacactataataaatagatggacccactatttttaactattagatttatctttaaaaaaattaaaaaacatgtaatccatctcgctctttgtcacgccctgaagttcttctccctagcaaaaatccaattgataaattgttgga

SEQ ID NO: 45406 - DNA, 827 bp, Oryza sativa
tccatataactattatataagttattagtattttatttaattaaataaatacaaaggattataagttagatatatatttgaaaaataattcaaaagatgaacatttaaagatagttgatttggtgctaatttaaccgtgcatatttgtaaagtaataatatgggaaatcctattttaaagacaatattgttcttacagcgtagatatgttttttttggcttttttatcttgctacgtaactatgtctgtttggttttttttaggagaacaatacgcaagttttatatccgtatgtacgttattttttctgttaaataatttcaatgaagctgagactttttttaaaatagatctaatctaatggtttaaaatagcgggtccaccaatttaaatgaaaatcgacggttagattagaaagtgccacgtggcggtttaggagttttcgtagtagtgccacgtgacgtcttagggatgtttataggaattttaatggacttttagtatataagaagtagataataaatagatagatagtattacatgtcaacgtcatccattgcaatctattttgcattaaaacataattaaccaacataagtcatcaatgtaaaatcataagaaaataagttataattacgtatgttttttagtccgacaaataatcaaatatatactcaaaagtcaataccataaaaaatgaaggtaatataaataaatatattataggggtatctccagtgaaaaaaattaaagggggtaaatggaaaaaaattggtgaggtgtacgtgtggggagggagacgtacttacgtacgcgagagagagagg

SEQ ID NO: 45407 - DNA, 1019 bp, Oryza sativa
agtgacttatttaagcaatttgcaagatgagtgactaaactataccaacctcgcaagttgagataccaccgatgcattttactctaacaaaaaatacggtgaatttactctttataatcgaaaataccttaaatggcacagctactatgtggcattgtgtatttttgctcgaggtagcattgtattattgacatgtagctttgggaggcccgcgcgacgagctattagctcagtggtagagcgcgcccctgataattgcgtcgttgtgcctgggctgtgagggctctcaactatatggatagttcaatgtgctcatcagcgcctgacccgaagatgtggatcatctaagacacattagcatggcatacaaccccactatttcatttatttatatgtttatctgaatagtttattagcaaataaaaattatttgtaagtaaacttttataaactatgataaaaaaccaaaaagtcaaattcaaaatcaagttctaaatattaaattttggttttggcttataatcataagcataagcgaaacaatgagtcatatagtcagaaaaataacatggtcaaaaatcttatgcttgaaaattttatgtaatgcatgcaacgtctatttattttgtgtgcaaatgaaaaattaatataaggtacattatgaatatatattatcttctgatattccgttttcagttggtggacaaacctttgcaggggaaacttatccagaaaaatgtagggtatgggccgtatatggtcttaaagaaaaataccatgccgtatctcttatttttttgttctttgctgtttctatcctcttctctttggttcttcggtatgcttctatctagctataaatcctgtggcttgaaacattcatgtaccttccataattgtcctagcttggaccatatcacctttggtctgcgtgcacattaggcatagcacctctctagttggctcattcctataagagatggttatcctataagttaacttatttttttataagatta

SEQ ID NO: 45408 - DNA, 1373 bp, Oryza sativa
tgcaaccaacattactttcgaagaacacaatgtggtacatttgcaaatcaactaaggaaacaacgtaaaatactaaccgaaacaattaaatgaagcacttgcgatatttaaacaaatccattaaaaacctaacttttttttgtcggaatatataatcatgtgcggttttgttgtaaagatttaactgtaagaaattattggtacaatcgaattgtagatcagataaataatttagaagaaaaaataatttagaaaaaataataaggttattgcatgcatggggttaaaagagagaacaattagataagaaaaaaaatatgtacttataattctaatagcacgtgcaagtaagaagttacgtaacatacaagcatgaaacaaagcagtaagaaggagaccacccgattttatgattgggatcaggttcctgacccaaagcattatctggtgagttttgctttgttatattgtattttttcttgcggatggtcgttcgggtgagattgagaacactagttgttatggactccactcctactacaatattgttgagagaataatggcctatttgacatagtacaggtctcagatatatggtggattcgaagtttgtatattaaattatagtggattaaaattttaaattttatatagaaaatataaaataaatgatttatcgaaatgttatctatgtaatcatagatctatatatatatatatggatttatagacgtaggagttttaagaaatcttggactgaggcttaagaccgcttagcatttccatgttttaagtatggtttggtttgtggacataggaatttaaaggctagacagtcttaagttttcagtattcttcaactgaggcgctagggaagacaaaagagaaacaaagatcggatatggcgtgcgatgtgatgcgcgccagaaagcacgagaaaatggtaatttggccacgataaaaaaaacggttttactgaaatgctattccgaaaatgcatttcattaaaatgctaatatgaagcgtgcaccaactgctattttgccattttgaccgttttgtgtatttttgaaatcattttcgctggaatgccaggtgatgagacggaattgcgcatgctcgccatgcgtacagccttgatgctcatgctccccaacgcctccacctccatgccggtcaccaccgcgaaccgctccctcacctccgtctcctcctcatcttcctccgcggcggccttgaatcgccagtgctaggtcgtcgtcttcgaggcatgctgctaccgagcgggatgaggtaggacgccaccggggctggacaaaccttgtgcggtggcagcaatgggggcgtggcagtgaggtcggaggcgcggaggt

SEQ ID NO: 45409 - DNA, 844 bp, Oryza sativa
agtagtggtaccttctattttaaaaaataataattgataacctggatatgatttaaatcctaatgagtaacatcataaatatgtccgtatgattggtcatatcaataggccatgcatatcgatgtaaagttagcacgccacatgcatacactaagtgatagcactttccacgccctctaatcaacgcgtattcctccgcttgtgtcaaagcaaaatgcatggttccaatccctgcccatccgtcgggtgcattcggatggaagggttgggatcttcaaccactacattcggatggaagggtagtgattgatttttatggacaccactccattttgtttccatactatccataagtttaattctgccttgcacgtagaacatgataatttattagcacataattaactaaatattatctacaaaggattttaaaaatagattgacatgattttaaagttttgtaatgaattctcttaaaaaatacaacgtttaatggtacggcaaacatgctaatgaaaaagtgggagtagctacaagatactccctccgtcctattttaagtgtagccattatttttcacgtccaactttgatcgtccgtcttatttgaaaagtttttgaaaaaaatgaaaaatataagtcacgagtaaaatacgatttatgttttattatctcataacaacaaaaatactaattataatttcaaataagacagacgatcaaaattgggtatggaaactcatagttgcaattaaaatgggacggagggagtatttctgaacgcagtccttatcacacggcaacctccatatcagaatgatgactggactgtcacgcgcgcgcat

SEQ ID NO: 45410 - DNA, 714 bp, Oryza sativa
ggtatgtacctacatactttttcttctttttttttcgtgaatattgtgtacaaatttaagtacatacatgttttttctttctctgcctttttctcttgggccatcggcaggagaagtggaggatatacgtaccatatatatgggctaacggggaagaagagtgtcacgcccagaaattcacgaaccagaatttctaagctgaatgtgcattaaacccctgtccaggactagccagggtacacaaacgacaattgttgacatacagatccacgtcttacaaaaatataaaaaagattactaatgcagcggaaaagataaaagcgagctaagcctgaagacttgactcctgcagcgggcgactccattccacaggcatccttgacggctgcgacgaaaccaacctcttcgagacatcttcaactgagaaggacttcaactctggtgtgggggaaaaaagagcaagactgagtactacccactgtactcagcaagtcataccggaagaggaggtaggatgcaggatatacccaaggtaggctaaagggctcatttgcataaagctagcattaaaagcagtagttgaaagcagtaaaacagttgtagtaattaatcagtattaaccagtcactgtccaacgctacaccacgttgcaacaggcccgaccaaccacctgaactacgccagttcattaactaactaggggtgagactaatc

SEQ ID NO: 45411 - DNA, 823 bp, Oryza sativa
taattaatatcctcggtactaaaatagacagtatcgtgaagtgagcgtagctcaattggttagctttcttataatgaaccaatccatctggactcaaaattctaaatttgatatgggtgctcgtatttatgcttgtgtttgtactatatttctaaagaaaaattaagatagtgtcgtacaccacacattatttcctgcttcctcacatgcaagttattttcatgctaattactaacatggagaggcgtccattctttctttccaagaatatcccgatcatttccatctttccatgagatttgtacatattattccaatcctgtctctaccgccatctttatttctgctctggaaatccacatttttccttgtacttttcaaagggaacaattattaatctagcacctgcttgacacgtcaaggaaagagagatcgattattgtgcatatcgccataggataaaaagtgtctttaattttacacgcacaacaacaacaggtatttctttcagtaagattaatacagtgttatggatagcaacgagaaataatgtatggcaggcagatgtgttaggggcttttaactatttgccactctacttacggatgttgcttaacgatttgccactagacccacatgtcatagacacatgagggccgatgtgttaaggtagatctttttgtccacggcaagactgactgatctgaagaacgtctctctttcgaaaagaatggccatactttcttcaaccttgatatatagaaggggcaatttcattctcgcccctactttgatgtctaatattgattctgcccctgttttt

SEQ ID NO: 45412 - DNA, 681 bp, Oryza sativa
acagggtttgcaatttcggtggttgccgaaaattttgtgatttccgggtttttgatcgaaattatttgaatgtttaacatattttgactgaatttgaacaaattttgaccaaatttacaaatatttgataaaaaaccaaaaatttcggagagatttgtgtttgccagtgggagccgaaattaccgaaattttcacaccatggtttacaatcaatgtcctatgtctttgtttaagcattctagcacattgattaattagtaatgggattacttctaacactgaaaacattggatatttcaggtatgcccgctactctggtcacgcttgaccttggctacaatgcactggatgatgttatcactgcagaacacttgagtcatctaaacagattaaaacacatagatttatcttacacctccttaaagattcagattgtctcggaatggcaacctccctttcgactggagtcagcatcttttcaattttgccagatgggtccacgatttcctgcttggcttcaatcccaaaagagtattgattcacttgacatgtcaagtacaggtcttagtggtaagcttccacactggtttgctactacattttccagggcatctgaattgaacttttacaacaacagtatcactggagaattaccaaagaaaatgagaaatatgtcattgc

SEQ ID NO: 45413 - DNA, 2129 bp, Oryza sativa
cttagtggtgtattagtcccaggttgcttaggagtgggctaggatgcttggagaccctcgaaaacaaagcggcaagaagacttggagccgagttagactagtttaccttttcgctttgagtttaagaaaaaccgtactattaagaggggttccaagtgtggttctaagataacacaagtgctcttagtggtgtccaagtgttgaaatatttttaggagctatttttgaaaatggctctacccgggacagagagtcccacccggaggttctgtccggaacttcctggcgccaaggtgaggttgaaaaattttctaagtgttgcccggaagttcctagcacccaggcccggaacctcctagcaaccctccagttcaaatatgtgagtaacggctagatgacgtcacctagccgttatatatagccaactcgactccagctcattctttggccattccactttagttcttgtgttccctagcttgttctagcctctcccaatgtgattttgcttcccccacccaaatcttgtgtatttcttgagtgagagagtgattttgagggtggtggtgaggattggagaaggttttgaaggctaggatgacttgagcacttggggtatctcgttgggctgtcatttggagcttgttactcttggagggtgacctcctagacggttaggtgtcgcccgcgagtttccaacaaggttgtggattgacccgggcaagtttgtgagggcgttattccacctccgaaaggaaacggaatacacggggagtgaattccgagctgaggtttaggaggtcgtcttggtagagcaagcctcacttgtggtgttcttttggtgttcaagttggggatcttagtggtcacttgaaaccaaagagaagtacctaggggtgttggcttgaagaccggagacctcttcctaggccttttcttggtgaggcaaggggttaatcaagacccggctctttgaagctcctcaacggagacgtaggattctcagtggagaatctgaacttcgggaaacaaatcgtttgtctcctctcactctctttatctttgtgattgtgatgcttatctccttatttgcctagttgtgctatcatgtctcccattgtatgatcacttgtgatatcttgtgtattttcatgtgtattactcttgtttgagacatgttgtacctctctatggtttagacttccttgtgatttaatttacttattgtgaggtgctcgaaagagtaactcacaactccccggaagttcctaggaagaaccccggaagttccgggcaactttctttgctcagcataaaaagctgccaggaagttccgggccttttgccaggaagttccgggccctgattttaaccgctgcaatttgaagtaaattataggaacgcctattcaccccccctctaggcgacataaaggtcctttcaaggctcgccaatagctactgctgcctctccatcgcgtcccccttcgcctccgtcaccggcgaggccatggggccgcctcgaaaccctagccaccgtcgtcgaccgcggcgaagcgacctcgtcggagaccgtcggcgaccgcagcaaggtagtcggcggaggtggcgaggtcgagggaggggaagatgtcggaggacttgccggccacctcaccatctgggctctcccatatagcaccgttctggatgccatccatggaggaggacgaggaggaagacggtgagctgctcgtggtggacatggagatggccggcgaggacaagctcctcttcctcaatggcggcggcggaggacatgaagggcaattttgtctcatcatctggtggagaagcgaaaatgatttcgaaaatacataaaagggccaaaatggcaaaatggcagtgagcacgcgtttcatagtcattttagttaaacgcgttttcggaatggcattctagtgaaaccctgttttaaacgtggctaaatatccattttctcatctgcaagtggccgttatgctgaactgaacccagttttgtaccatcacgcatttgaagtattaaatatatactaatagcaaaacaaatttcgcatgtaaactgcgagacgaatttattaattaagcctaattaatccatcattagggg

SEQ ID NO: 45414 - DNA, 670 bp, Oryza sativa
gaactaaacacaccctaaacaaaattacctactcagtattaccaatacaattttgctatgcgctgtcgacaaataattgaggaagaaatctgcaaaattatctaagaattaccaatatgattttgctacacgtctattgacaaatatttttctccctttttattctcgattatgctttaagattcatgtagataaaacaggttcaaaaaaggacttaaaaaaagtaaattacatactgggacacttttttttacgaccctttcaatttgggtcacggatatatctacatttctacattttaccatataaatatagaaaagtttcaccttggctttgttcttgtacctgcagttccctctctcctctctctctctctcttctctctctatctctcttccgtcaatggtaggaagaccgaagacccacaccactagtgagtaggtcaagcagccactgctaccgctgcgccgtgctagcgccgaagctccgccaacaccaatgttagggccgtgtgcttggaatggacctctatcaatttctccaccttggtttgcactaaaccatcccctgcacttgtttgcagggttcgacatttcggactgaattttgaaaattttggttattttggaccctaccgatacaatattattttggccgaaatttttaattt

SEQ ID NO: 45415 - DNA, 2632 bp, Oryza sativa
aggggggaaaatgaatcctagggttagggtttgggtatgtttatttaggttaggattaatctggaccgtccattcgatcggacggctccagctgctcccacgtcgggccgccggcctattgggccaccgaatggaggatgcaaaatagacatcaatggagaaaggaaaaaggccaaacacatagaatagacaaaagggagggaatataaactttgctatattcagcccaaacatagaaaggaggattttgattttttttttccaattaaataattattaaattatttttgtattattcaaaattagcaattaagctctgataattccaataaaattctaaaaagcgtaactaatcatggataatttaataaaattaaatttaaccatgtaattttatttttcacacttgctttacttgtaaattgatttaattatacacctacgtacttaaaaataccaaatattttaattaattacataatgtaaatttttctttaactttttctcaattttttgttccgtacacttcccgttgcaacgcacgggcacatttgctagtggtacgaaaaattccaaaaaaaaagaataataaaatacttcaaggtttcatagtacgaaaaatacaaaaaaaaactaagaataaaaattacttcgaggtttcatagtacgaaaaatcaaaaaaaacaaaaaggtcagatccgacctgccggattcgaaccagcgacctaaggattgatctgcaacgactacagtcctccgctctaccaactgagctaaggtcggacactgcttcgtactacgagataaattttaatactttaattttcaaatttatacagaaattagctagttccttctgtcgctaaatggtgactgttattttgtttgcttactatataataaccacgataattctgtgtcccagaaaaaaatatctcttctcaaaattttttttatctaagttctgattctaattaattgctgcatggtatcacgtcaagtatggcccatcattggcccttgggctacacatgatagaaattttccgtttggacccaaattatgattgttgtctgcagcagtgtcagtggaaaactgccgtatgtacggtgtcggtagcaaaactgaggatatgtaatatatatcctacgaatctctctaggggaacaagctccctacggtttaatgtcctttccctagtataattctccctagggaacctggggatttccagtagattgttaggtctcctttgattcaaaggtaattcataggaattttatagaataccatttatataggaattttttctatatagccctttgaatcaaaggaatgaatcctacaaaatcctatgaaattcctatggaatgcctaaagacatgtaagttttagaggaaatttagcatgaggttctacctcatggaaactttcctatgagtcttcatctctcatctaattcctgcatttttcctgtggtccaatcaaacggccatccctgtgtttttcctatgctttgcaatcatttgttttacacttgcactcgtatcaaaattctacgtttttcctattcctacgttttctcaatcatgtgattcaaagtggccctaatgtgatatggtctacattttgttgtttgtgaacatcaattcaccgatatttgcgactaattgaccattcttcgtttaatcgtccgcatgatgtagttgatgatgatctaaagtagttttttaagacattgtttagtatttgtttgtgtttcttacatacattttatgttttattacttattcaatataaccaaacttgtcaatgaggtgtataaatacggcgttagaagccacatagttaatggtaagttatggatgtctattgaaaaaccaataacatattcaagttttataggcgtacacatttaaatccccaaaggagtatgtaatattataaaacatgtttgtatatttacgaacattaaattaattttcatcttcgagaatcaaaggaacaccaaaagctaacccaacgcatacgcaccacgcgaagcaaagaaccgatgcagctttctgcgctaacttagctgaattcatctgcaggtttatctcataaaaaacaagcaaaatctgcaggtaattaacaagattcaagcaaactaacccccaaccgaaacgccacgtactcacgtgcatccattcccatgtgcagccatggcacgcaagaacacacaagcccgcatttcgtcgaacacccacgccacgtaacgcacatatgcctccctacttaacccgcgtcgcgctctccgtgcatcgatcgtgtaagctagctaagcttggcgaattaaacggaggcgatgccgcgatctcatcatctcctcgcggcggcggtggcggcggtggttgtggtggtgatgggatggtcggcgcggccgtgcgaggcgtcgctgtaccagccgccgccgccggcgatggcgtaccacgacggcgcggtgctggagggcgccgtgccggtgtcggtgctctactacggcgcgttcccgccgcaccacagggccgtcgtcgccgacttcctcatgtcgctgtcgccgcgggggcgggaccaccagccgcacacgttcggcgcgccggggccggcgccg

SEQ ID NO: 45416 - DNA, 1614 bp, Oryza sativa
aatatagtgatacatacaaatgaaatggcattagagaggtttggcctgccaaagagttatatttgaatcactctctgtgtctaagacactgaacaaatctgtttttgagccaattgtggaacactattactatgtctatgccatttccccagctgtgctccactgatttttatgacctattttcatgcatggtttctgccaatttgaagcaataaaattcgttgcatgtgtttttttttccaacaggttatatagacttgtgattgaatttcacagacacttcttgactgtgcgtatatattgtagttgttgcctactctctctatcccataaaaattaacttctggctacgaaactagatgtagccagaagttggtgttttatgggatggagagggtactttcttgataagagtgcgcagtgaacagatagtcctataaattgtttggcacattaatagcagtgtcctggtggtggtttgtgattcatcttatatcatattaatgaaacaaaacatggatgggagtagtcattttctttcttagtttgctctttctatgcataactgataacatcaacgttgtggaaatattgtacataacaagtttgttatggaagtgcattagtgcaatataatttaaggacctaaaagaggttttgcacacaattgttttctctatatacacaaaatacaagtaagctcttgccatgtacattcagcttgatgtcctagtgttacttcaagagtgttagcaatgcattgcagcgacatgagttacttgagttgtgctgttcgtactctgtagcttgtgatgtttgttctgcagaacgggggattatgaatttagcaatacgcatgctttcttttcacgaggatgtgatataacatttagtttcttttggttcagaatgtgcatggtttttaatggccttacgctctcctcatatcaattttggaagtctttcaggagaaaaaatagggtgcaatttagtttgtgcacaaccactggaattgattttctgatatcttgaagataagttcttcagatggacataagctgactttagcatgagcttgattttgatagtagtcaacagtgaggatgctagaagagatacaattatgcaacatcataaacttgaaaagcatttagacaagatgatattggttggctccaaaatcgataagatagtactcctatctccatataggaatcccagtgtgccacataatatcacagtcaacacccatgtacacacacataaacatacttccccaaacatatcacagaatatatagacaaatgtatagccccaaggaattgcacagtcaagaagctgactttagacatgattatgatggttaaaggttaaaaaagaggtggatctacaagaatcctcaaaacacaattgtgttaatctgttccactacctcaatctgaggttgtagatttcattcttcacagccatcttagatcagtattatcaagattaacttgtttatgcttccatctgtacacttatactctccgctctcatttttaccatgaatttttcatctgagttcagtttcagttcgatacctaagcaatgttagtacaccaataattgtgt

SEQ ID NO: 45417 - DNA, 629 bp, Oryza sativa
actaccgaaaaatggagctcaaggtgaacaacataccatcattgtggaactaaaaaaattagcacatgctagaatgatgaaacatgtatgaacacaatcatcttctcctaaaattttattcatctcctaaaatagatgaaacattttttttcgtcgaagtttacttttcagtttttgcttttagatcgctaagaaaacgtatataaaagttttatttataaattacttttcgtttgtaaatatgccttttggggccgcaaatttgccaatcgagataagaggggagattcgtgtagaaaagaatctctttgagttttgacagtataaaacaagataattcggtggaaaataatatgaaatcacgaaataaataaacctttattaaatctgggaaattatctccaaagggaattcgttgttaccctaaactgcaaattgtagcttgcgatgataatgcgaatgtgtgctttagggaccaaaaaagaaaatccattttcttgcttgcttagtaaaagaaattgaatcatcgtattacggtttaattgctgttcttagaaccttactttatgctagggtaaaccacatcattggtctgttttcttctctttcttctcaatagatatttcagt

SEQ ID NO: 45418 - DNA, 607 bp, Oryza sativa
gaatccgttttggaataggcaccttcaagattccataaatccaaaaaaaggctggtttgatgcagcggctcgatccgatcacccctgagatcctcgattcgaagacatccaagaaaacaatcctagaattaagaacgaaatcaacatatgagattcccaatccaaagacatccaagagcacaatcatagaattaagaacaaaatcaacatccaagaacacacacagataggaggccaccgctgtcaccgtcatcgagcgcaccacccccatgcgcgcggcggcggattttgccaccccgatgcatgcggcggcagatccaattatgcccttaagcagagaggaggatgggtagttgttgctatcctagcgagtgcatgtgcaggggaagcgaaggctaaggagcgcgacccagtggtaaaggcagctcctacgtgacctagtggtgaaggcagctcctacagcctagaggcaggcccggaagagtgcaaaatcgaggagcgtgccagttagcgcccgctctatccaccacgccctcacaccatccacgcgcggtgtagggagaggtggaaggtggaagcgcgaagggcggcatcgttgggggaaggg

SEQ ID NO: 45419 - DNA, 536 bp, Oryza sativa
tacaactaccccagttgagagtctttttcatcaatgaattatttgaagaatatgctaagaaataggatgaaagagcagtacctgaatgattacttggatggttacatttcttgaacgtgaccttttttggggaatggataatatgacattatctgtcgcttccaaagcatggccaaacggattattttctttacttattttgtaatgtgccaagattcttgagaattctgcactatgaactgtttatgaactatttctagtggttttatagtacagttacaatttaacacgcattgtttttaatttacgttatatgcgaaatgattatctatttgtaaatgtgaataccgggccatgaattcctgaaaatagtacgtgtgtgcacttgtgtcggcatgagcctctccctccaggtctggaagaaaagaaactaaaaataatagtgacttttgtctttgcaggcggctgccggccatggacctattactttacctgatgctctgcacctactaaaacctgctcgtacactgcacata

SEQ ID NO: 45420 - DNA, 903 bp, Oryza sativa
tgtagttcttatgttctatgtcggcatgtggatttgcttgtgattcgtttcgaacttatcgatgtgtttatgtttcgtcgtgtaatgtcagacttcggcatgtcgtgtctttagggtctcgtgatgtaacgtcggactaaggcgcctaacgtctttaggtatgctgatgtatgtcggacttcgacacgtaatgttatgttatattattgaactctacatatatgttaagaatattttgattacatgaatccttattttctcacaacatttactaactttgcttgctttacatctattctttcctcccaggaaccaccaaggagatgtcaatacagagaatggatagacaccagaaaggttctaactccacctagccgtgttgtacagcttgaactaccagagcaatacagggttactaaagcgcggtttgagagaggagagggatcctcacgtaggggttagctattatcggacaacttggcatattgaaatttctactgtcatgcttccttgtcccattactacatcgtcgttgtgttcaactattgcactacctccctcctagttcgaatctaatataatctatgtaaccgcaatgcaaatagtcgtatcatgttcaaattttactactatttcttcatgttacataattctccttgtttaagtccatataatgtttctacgacccagactgcgataggcgcctatataaattatccgagtactaatacgtcgaataaggtacaaaataatacctcacttaacatatgaaattgcgcaacaaccaactttaatacatttttataataatattaacaagttttaccaataaatacttctttatttattattaacataacatagaaaaatcttttggccgtacttttttcatctgggtccctt

SEQ ID NO: 45421 - DNA, 780 bp, Oryza sativa
cagttgttggcaatctcaaagcactgcggtatctccggctccggtgcaggtcatatgtccaaagcaagctcacccttggggaaaaacagttccagcatctcaaggttcttctcatccacggcgaagacattaccgatatcagcttcagcaagaatcctaagttggaaaaaattgtttggagtttcagggagatgaaatccatttctggaattgagcgtcttccgagcttgcgatcatttgagcttcatggtgactgcaacccagataaggtggaaattgctctaaaagatcaccccaaccatccagatttggagcatcatggtaaccgtcaaggccagggagacgctgctggaagcttggatgctgatgctgcctcaacctgtgcctcagtctcagctcccaaccatccagatgtgaagcatcctgataaccgtcaaggccatggagatgattctgctgcctcgacctctgcctctgcctcagcatcagctcccaaacacatccagagtattacttgattgattcattaatttatcctcaaatcaagatgcatctgtggataaaatccttgtcatcttcgtcctatctcaagtgccagctcaccgagttgatgaattccttctagtgtcaatccgttggcctttcctgcatgtatgtcaaatttctttagacatataatagttgtactcttctggactcctaattttcaaccttatgtaaattgtaatgcgtgcttgtttgtatggtgtttgagagctgccctagctgctagtcatgatt

SEQ ID NO: 45422 - DNA, 1409 bp, Oryza sativa
cagaacaaaatgagattcaggagttactctctggcgctgtcattccatcctcatctgatgggaccataaaataagtaagatgttttgatggtcagtacacagttcttgatatttccaaacttaaatgcagcatggacatgtacatgaaacctccctatagatgcacttgcacaacaatatgaggtatataaatcagagaatacatggtatatcatttttttgcgcttaaccgcactaatttgtgtactgaaactagttgattgtcgtcatttgatctaattccatcttctgatagatcagttttggacacttcagttctgctttgggcattgtctagtcctatcctatcaatagatgaactctggctgtggttgtgcgtccatttcgttctttcgctgttgcattcaatagactattttgtcacattagaaaaaacagtgggctagttcacaaacaattgggttgagcatcgctttcatgatatggacatgataagcagtgtatagggacttgcatgagggatcagcaactagcgaaaaacgctactagtagcactgcatgttgagcaagttgttgcctccttgatgctatccttaatatctcgacaaccaatgctttcttaacacgattgctgaaagataggttcattagctgataaaggttatgatgatctataaagaaacaagtttagattgaccatctaaaacataactgaagatgtcagggaaaattagacatgtgcaatgccatctagcattataagaatactttctttcagcatataaaattcacagtcattcccaagcaatataatactagtgatgaaacaatgttttcctcactttttttttctcatcatcattgacttgtttgttgtgcagtgaccaacatgcaaacaactaggggagataaacaaaggaaggcagaacaactggtcctagaagaatgatttgattccaagatgcagtttgtgtcctgtgagtcgtgtaaggctgaagctttgggacaccactcggcagtcgacacgtgtacaccgcctcctgatgctattcttatctgaagagtatagtgatcaacatcacctttctgtttctggaagggtttttgtctatgggagatgaactggaggatccctttgcatagataatcaagacaacaggaagatgcttcatatgatgctacatgtatggaaatggcaggcaccggcaatatgtgaagaatatagtggctgtgtggactcagcttgagccggcatcgcaaaagctgcacaagaacacaacagtgacagtttcactcttcttttagctgatgttactgttatatgatgcctgagggacatgcatctggtgagttcttacaagaacaaatcaaggaaccaaatgacagttttggttgctatgttgattttt

SEQ ID NO: 45423 - DNA, 1295 bp, Oryza sativa
acaaaacagctaccacatctgtatctcctcttgcctttggtactcattgcctcatcaatgtaactttcacctttctcatgatcttgactgtactacttgcaactagtcgaattccctgcacaattgtgcagtagacagtatagcaaatatgaaattgcatttcttgtacatctataatcacattattcgatcaatctccatcattataatttggacttaatttgcacatttcgcaacatatacataatttgcaagagaggtttttgcaatgtctggtagtgaaaatgccaaaatgggggactatgttcttcctgtgttaatgatagttagctggtacaccgttgctttgtcgttagttaatcatgacagggatgtgcttcattaatcactacttataaagtaattagtgagtccatttcagtcgctatcaatcaagatctgagcttttggtccgcatttatacgttgagatttggttctcgccctaaagttggatgtagagtatcttgttgggagaaaatggcacatcgagattgacataaacatatcatccttttttgtcaaaagatgatgtttatacgacaagccttcagtatggaagcattgcaatgttcaacagtagtacaaactaacaaacacaaaaacagccaacgcactacgtggatctcttcctatcactattcttccctcaatttgttaatctctctgcacccaaaatcgtgtattatcactctgatcagccaacaattcaggcagattaattttctctttaaaaaaaattaggcagattaacagactgttccatgaacagcagtttgcagggatagttttaatgctcttttaaattatttttttctactgcaaacacaaatggggtggtggcgcagttggctagcgcgtaggtctcatagctaatgttgtgagtgatcctgaggtcgagagttcgagcctctctcaccccaaatttttttccttttttcactgcaaacatgaaaccttagctaaacccacatgagttcatggaaaattaaatatgaattattatttttttgtaatgctgcttttatatttgttcagagcaaacatgaaacctgaacccacatgtgttcaatgaaaattaaatactccctttgcttttaataaatgatattgttgactattagaaatatgatgaatggaatgacaaaaaccgagtgattgcgtgtatcagctgttcttcctgttcatatgatcatatcgccggcgccaggggcaatggttcaactgctgcattcctgttcaatatcatcagggagg

SEQ ID NO: 45424 - DNA, 560 bp, Oryza sativa
aattgttatgtaagatttattttatcataagttgcaaatactagttcaatccacagttgatgtcacttcagaggtactttgcattcagattactcaccatctttcggggtgtttgttgtgcaggtattctcatgtcagttctactaggattcttggtacttcagtcgtatattttggttaccactcatgaacatggagttggggtgcaatagattatggatcaaatatcgtcactgaggaatatctttggacaacaatgaatttgcagtgttttgatactgacattaaggtgtgcaacttttttctctccactgtcacatttgctacccatacaaaggtgttctagcattgtttagttttgaaacacgcaaaagacttacagtcatcccattagatagaaaaataaagggctacaagtcggccaaaaacaagaataaccatcatttcatatcccgatatccgtgtgtcatggagtcctgtcaatctcaggctaatattatgctcaacgtattcttatcgaagctgcttattcttcttgctatcactcaaattatctatga

SEQ ID NO: 45425 - DNA, 1621 bp, Oryza sativa
tttaagttagtttatcttaagacttcataatatctctccttttctgaaccagcaatattataacatttcaattttcaagtaccattgtattgttcttatctccatattgaatcatgtggttagttaattgtcctctcatttctttccatgaacagatggttcaatctttgtctgtgcactaattcaggatgctactagtaaaatcttgcctaactagtgacggaaatgtaagtgccttactgttgttaatccccttcctcacaggctcatagatttcgcaagaactccattactaaacagtcaagaacttcacatgtatgcaaataaactctaacatgcaagctcaagcactaaccatggttggctgcagccgaggcggtccaggaacatatcatgctgttcctcccgcggtggtcggcgtcgagggacagcatgacgcagcgtagccggtcatcaccgtcgtccctcggcggctgctgctctcttgtaaaactcctgcacggcgcatgaagggagctgaggcaactgcggcctgtggagggtggcggctgcacaagcacagaaatcatactaatgctcaagaaaaccaacccaaaaatcatattaatgctcccggctaatcaaggtaatagatgcttctctcttcctactaacacctaaatcccacaattacacttctttttctctaatgccatccatcacattgtttgcagggggttgatgaattagttagtgcaatgcagggactattatggagtgcaccttcttctagacagcttgtgggggacatgctacccgggtgtcctataggaggccttcggctacagcgcagggggtaggccgagttgcctaggcccatgcggttatttgtaatacatggaaagggatagcagccagggaaacctatcctgtatctgtacatgaatggtatgcaccaagattataagggataccatatcacacatgccggcaaatcccccagcattatataaggggcgctggcatgaaccctaaggggttacgcaatctttcatactcatcgggcacaaatccaatccacatacaactggactagggtattacctcgcattgagggcctgaaccagtataaatgtctgtgtcaccatctctccttgatatagaacaccctataaattatattgccgatcataaaaatcgacacatctgtgtacaacttggcaataatccatccacgcaccattcctcatatggcaataatccatccatgcaccattcctcagatgaggatcttgtatgggtggtatccttatattcctgtacataaatcatgtaagtataagcatgtaaaatggagctttactcaagtgtgcatatcaatgcctagatctagatggctagatgtgagcaccgtaaaggaactaatgcttaggtagcataagttttgcataccagctgtatgtgtgttcagagaatagctataatcattgtagaatcatgtaaattcacttatgctgtcaggtattccaaattttttgaattctaactttcaagtgaacttgcatagtctcctgcttctagctatatcagacggcagatgcactagacgaccagttcttataccttttactcttaaataatg

SEQ ID NO: 45426 - DNA, 552 bp, Oryza sativa
tcaacgagttggttagcttaccttcttttgcagctgaaagccattctctgcatgatgcaaaatattgaacctatgtttgacaatatatataacttggttggccaggttttctccatatatattttttttctaaaaaaaagtcatgtccagttcgtcttataactaatttcttttaacaaatttcgaccccatgtcaaatctctatcttttcaaaaaatgacttcatgtacttttatatttttcaaacagtttaccttctgaagcattattgtcctttttttttcaaataaacactcgatctatagggactatagctacttagatattcttgaaggatttgaactaagaaccatcaaaatgacttcattttttttttcaaataaacacttgatcacaaaatttgataagatagactataataatatatatcagacactataaaaacatgcaagtctaaattagatctatatatgaagaaacaaaaatgataattttagagtaattctatggtccttgaggaggtaccatgagggaccaaaatcttagtgtaaa

SEQ ID NO: 45427 - DNA, 3543 bp, Oryza sativa
cacatgagcctcgtcccaacacatgagacgtgtcacggcaaagctttttgataacctcgcattggcagtacccgctccatgaactttacatcctcatgcactctaggcgtacacggtttctagcagtgagaggagttctggcgcacccgggaaggaaagactcacacatgcattaagttataagtatgtttagattctcacatggcagtcctgccgatggcgacaccactgtagacacccgcctcgcggtcctaccaatggctgctccaccgtagagcccctgcctcacacatcaagaaaccattatgcatggatactgcctccgctcagctatctactccgctaggtctatacccatacgagaagtgcggttgtacggggatcgtttcatgcttaacttcatggctcggtccttaattaaccggggacggcactagccttttccggacaccacccaaatcctccgtccgctccagtcgaaaacagttgtttaatttttatttctcctttcataaatcatgtcatcaacatcatggcaatgtggcgctcatgtctccacatgccgcatctcaattaccttcccaaaggtaattgcccaagcatatagcatttgataaatatgagtatgcatgattctaaaatagcatttctaagcaattgtcataattgactagggactcatacgtaaacatggttacgaaggcataagggtaaacaataatcaaggcatggcataatcacaagtaggatgttcataattgcatgcaattttatttgtaaacaaaataatttcgcaattgggatcgacatgttcaaggaatagtgatgacttgccttgctcgtagtcctgcgggtcttgatccttgctcggatccgcaaccccctcgggctctaaaattacgtgcgaagaaatgatttgaattcaattagaattcaaataaaatccaataaactcaaataaaagtcgaacgcgaatcgatctgcctatatcgactacaaagtttgcgaaaccacgttattccaattttagtgtcattcaacctaagttatttcgtgatttagaagtacactcctgaggattcaacataattatttagctcttaataaatctaaactcctaccgcgaattgattacttatagagattaccaaaaataatctataattatattaagttttgcaattctacgactataattaatctataattaaattctaattattctaaattttctaaacctccttattctctctctaattttctatttatttttccttttctttttctctctgttttttttctcttctttctttctttcttcttttctttttcctctccttttttttctttctcttcctcccggcttctttcttcctccctctctcggcttctcctcacctctctctctctcggctcacggcctacccgggcggcgacggcgaccggacgcgaggggagggcggcggcttaccgacggcggcggcggcgacggcgccgcaaggcgtggtgtcgcccggcgcggcacacggcgcggtgcggcggtaccgagggcgtcgacgcggcggcacaaaggcggcggcgcagtggagagggtagagaggaggaggagggaatggagtggggagaataggggaggtggggtttttatagggagagagggaagagggggccggttaatggcgacgcgacagcggcgcacagagctcggaacgactgcgacgcgcggcgacgcgaccgcgcggggcgcaaggcggcgaggggacgggcgcggcgacgggacgggcgacgcgacgacggaacagggctcgaggcgacggcggcacgcgcggcgcggcagcgggatggtgacggcgacggcgcagcagcggcggctcggcgacgcgacggcggacggcgcggtgtggggcgcaaggcgcgagcgcgtggcacgaggcggcgacgggacgatggcgacggcgacggcgtgcggcaacgcgcgacaggcaagaggcgcggcgcggggcgcgaggcggccagccgcgcgcggcagaggagggggcaaggctagggaatcccatcgagcacctagagtgcaatgaatagtgtattttcctatttatccctattttagcctatttcctatataaattttattctataaatcctaatttttgcataaatgaagtgtactcaatatttgtgttattctaaccaatagatacaccctagattaatattacccatattataattttatataatttatttgaatctttaattagggctaactcttattccaacgcacttaaatttaaatttaattgatactaatatggtcgcgataatatttttatttatttctatcctcacctaatctttattttaaattgtattccaactatttatttagccaaattaattttagggtttattcctaattagttactctttattcgcgattaatgaactccgaaatcaaaatccaatgaaataggcaataaaatcggcatgatgcaatttatttaaaaagtttttgaaaatccgtatttttagagttttgattttgttggtcgaattttcagggtgttacacccaaccaacccacctgaactacagtgcattgggtcgatttattaagtgtgagactaatcacggtgaatctggtcgaccgcccataaccgcgggcacggctattcgaatagttttactctgatcagaggtgtacaactgtacccacaagacacagccccacgacatgtttccgtgcgctgacatgccaccacgacataccggaaagaggccgtgaaaggacccttcgcataaccccctctaaccaagcacaccacacctcaggtttaacccccactcctcgcaaggcagcgggcagtcccctctcgtgcctaggtgaatccggaagccgcataggccatcgcagggcccatccaaactccatcacgcccacccttgcctagatgcgtaagctagaggaaagctacactacaagcccagccgttgcccacgctggcttgtggtaagcacgataaattcttccagggtttcccacgaaccggtccttaattgccatgggcacgactagcaaaaccatgcacccacagcccaccatgtagtcgcattttagttggataattacgaccatgaagcatggccagatgtctcgagcacgcagctcattctgatactaaaaagggtctaatactgtaattatcccatcaactgagctagtggtaattaagcatggctaagcatatagttttagctaggtcacataagtaacatgagctagtcgatttattacccaaggttgacaaaggacagatatcaagtaaatatggcacaagcaaacagataggtaatacccagatcccatgtaattagcaagacatgcaattttatttgcaaacgataaaacatttgtaaattaggatcaaaattctgggaatgtgtgactgtaacgtcccgccttcccccaggccgggcccacttacatatgatagctttcataggtcgtaacatgagctagtcgatttattacccaaggttgac

SEQ ID NO: 45428 - DNA, 1181 bp, Oryza sativa
cgtggctctacagcctggcccagcccccgctcctcgcaccgcgcaaggcgcggacacaattggggggcctcggggtggcgcgtcaggcccctcggggtgctatgtcagcctctcggggtgccacgtcaggcccctcaggcccttgccctgcctggacccaaggcccttgcccagctgccatgtggcgaggggggaccaggctaggcggtcattaatgggcggtgccccaaccgtccctcgaagcatttagtgcggtcagggcggacgtgtggagccacgccactggcccgcctcaaatcgggcgtaaccggtctgtgaccggcctgtcaccggtcacatccgattgacgcgcggccatgccccacgtctcctttgtccccggtggagtggaggtagctatgtattgtcacatcaggggcatcatctggactcctctccacgagaggagggcagccaccggtctgcgctcatttaagagcgaatgacagggctgcccccccacccccccccccccgtgtcaggtggaggacggcgccgggccccaccaaagggccaaccgtggcttggcttccgggcgaaggcattcgctcgtttaagagtgaatggcagggctgtcccccgtgtcaggtggaggatggcgctgggccccaccaaagggccaaccgcggtttaacctccgggcaaaggcacgggccgcggattggccacgggagggtgcccccctcccttctccatggaagagtaggtagaggcggtgcatgtggtatccccttagactataaaaggaggaccgtgcccactaaacaaggggggatggttttcttgaatgaagccaaggcaagctctagcctcaagttggtgatgtccttggtgcagttctagagtcgatcaaagtagaataggagagacaagctctctggagctagaggaactcttgtacttccgatctatattcccacacacaggagtagggtattacgcttcgtagcggcccgaatctatatatccctttgtgcttgtgtaagctttagtggctttaaccgcggataatcgacctcccagagtgcacctcctcctccggccgaactcacaaaaggggatctcacgatctcccgctagagaggattactcctcgacagcgtcaaatattcatgatcggagggagtattatttagggcaat

SEQ ID NO: 45429 - DNA, 527 bp, Oryza sativa
ctcagaaataagaaatcaacatactactgacaggttagtttttcagcaagctctcagcaagcagagagcttctgttcttgaacatattcacttgctcattgttcaccatcctggttaccttgtacagcttcaagctgcgactcgaagtattcccaggcagcttgcccagaactgatgacctcttgagcacagacccaagaattttgacgaccatgttcttcatcctcatcatcttcattatcggactcttcatcatcatcactgtcagactgttcatctaagtcattgctcggcaacttgtcactttccacaggacctgaaaaattttggttccaattcagttgtccattgactccattcaacacatacaagccatttgaatcacagtgtaatatcataaaggaaaccagagtcaaattaatcctaggtatattgtaaggctacatatcaatcctagcctcctaagtgttgcaagggcacatatgcatcaaccatcaatgttgagtaaaatttgcatctggttcaga

SEQ ID NO: 45430 - DNA, 564 bp, Oryza sativa
ttccgcattgctttgttaatgccatgtcgatgatcaactcgaacagttcgtggaggaggacttggttttgttatctaacagactttctcgagctgtgactaatgttaggtaaaggaaaagaggtggaccaaatcattgctttgaatgtggctctacggatcactttcgttcacgatgtcctaagcttgggagagcgaggggggaagataatggtgatgagaagaccaatgacaacaagccgaagggtacattcaaagggaggaagatcaaggagaatctcaagaaggcttttgatcaagtctacaccgcgtttgagccactaagcgatgtagatggtgagagtggagatgaagataagggaaataacatctccggtgtttgcttcatggcgcgtggtgaattagattcagagtgtgaagacaatgaggtaagtgctcttgaggaagccattaatattttgagtgcaaaaaatatgaagtgtgagaagttgtatagaaaacaggagtttatcattgaatctcttaattctgaaattgctagattaaaatatcttattcctaatga

SEQ ID NO: 45431 - DNA, 516 bp, Oryza sativa
ccgccggacgaggacggcgacgaggaggggtacgtcgaggcggaccccgcaggccgcttcatccgggtacgggttgctgtcctgctcgtttctgttcgagttctatctagccttctagggttttgttgctgctgcggaagatgggtggattcgggtggtggctaattgttgttgttgttgttgccctctgcgtgtgcagtatgatgagatcgtggggtcaggggccgtcaaaacggtgtatcctttcatcaatctcatgtgctgtttctagtttagccctttttgttcttgattgaattatcacgattgaattagttgtggaatataattcgatttgttgatcacagtagaaccatgcccgatgattatttatttatcagtattagatgtgttctgaacttatgatggacacccgcgattccatgtagaatctacagacacattcagagatggaaccgaacttttcatgcttctgtaatctgtggctaaaattattgatcggtgttgaccttatta

SEQ ID NO: 45432 - DNA, 1011 bp, Oryza sativa
tgtggttgaagtttctcaagtatttgatcttcgttgaaagcatttgtgcttgttctcccttgtttccagtttaattctagcttccttaatcgggttttacttaatagttttgcttcagccgcttcttcttttgtgtgtacttttcaaggttatcaattctaagctctcttagctccatcagataacctagttgctttagctcaaaaccaacatcttttctattgacttgaaatccttttaactcttgcaaaaattgcagttttccaacattagaaatatttgagtgtattgggtatcccgggacaagaaagttgtgcaattttgcaaggttactaatgtctccaggcaaatgaaaacaattatcccatttttccagatccaaaatccttaaatgataaaatctggaaaggttaattggtaaatgaaagttattgccaatggtggtccctagcctaaggtaccgtaggtggacaagtgttgtaaattcatccaaaatggaccccaccgcaaatggcattttgggaaaataaagcacacgaagagcacttgcttccttaaacaaatcatgaaagcatccaataaagcttttatccacttctccaaatatcatcaaagtttgcacgttttcaacctttagtcttttctttagttttatcagttcactcttgaagttttcatcagttattccatcagtatcatttgcgccatctgtgatgatagataagtgacgaatggatggccggatttccactgatttcacattagaggaatgtaaactaacacactcaagagatgcaactttcaatgctagattatgtagcagatcatgaataatatagcatggatgcccatcagtttcttctcttttaaaaaatccatgactgaccaaactatctatattgcttagagctatatcttcaaatgctttattttgagattcggaatgtaaaatatctagtcctatccaaaagcgaatgagctctttgttgttgaacttgtaatcttcgggaa

SEQ ID NO: 45433 - DNA, 644 bp, Oryza sativa
cccaccagaaattttgtgcgaagaggaggcaaaggaagccaaaccatgtgcgcaatattgtaacaagttttagcttccaaattgctcttcaggtttgcttgtaacaagactcttatccttggctttcaaaatggaatgttcacctgtgctgatcttgtaccaagagatttggcctaataatactactatatatgaaagaagagcgcaacgttttagaataaaacattttaattggtgtgtgcactttctaaaagctatattcaattcctcaaatggcaaccatattcaattcctcaaaggtacacgtttgctaaagctatatgatccaatcttgtgctgataccaaacgcttggacagttgcttggaaagttgacggtgttcttggtgttagcagttccttatgtagacatgggaggcctcgaggaagacgagattgcagcgtttttcagttttgctctccctctattatttatcaacgtttttcagattagttcgtaataagttcaaaatactgagctttgatccagtaaaccaggccagttttctagttatataggcacaattcttctagagaaggataaatattatccatggagtcacagagagaggctcaatgcacatggtgattagcttgatcaggaat

SEQ ID NO: 45434 - DNA, 546 bp, Oryza sativa
tcctgcagcccgtctctgtttgcgcgtggaggaagaaccacgatgcgtgaagatctgattggggtctctatttgcaggtgggggaagaaccagcgatgcgtgaagatctgattgggggtctctgtttgcgcgtggaggaagaaccagcgatgggagaaagcgtgaagatctgatcgggggtgtctgttcctaatatcgcacgagaggaatcctcccgttgcagcattaacgacgcgatcaatgtgtattgaatcacctgcctgttacagaggcattctcgcgaattctgaaccgttgcgaaagaatctcgagagatgtcggacgcgacgcacaccacggccacggctcagctcaaggcgtgcgcgtgtgcgcgtgtggctttccgatccccacctgatccggtcaacagggagccttcaataactccctatttaaattgagattcttaacttttaattcccatggtggtattattatcttcaacatttattatgggcccttgagattttaatagaaaaatcgggcctagcccatttattataacag

SEQ ID NO: 45435 - DNA, 754 bp, Oryza sativa
accccagtatcgcgtgcctgggcttaaggcaataccctaaatttaccttcgaagtatactttattatccgcactgctcacgtggtggctatcacgccgtaattcaaaaaactacggataattcacttatacctaattaccctactttgtgtctttttctccaactatgtgtttacgtatattcgttaggatttaaatttgaggcctctaactctagtatcatatattcatacgcaatcagctagtccaacccaaaaaaacaacttaatttgacaaggagatatggacaaattccaagaggtcgatcgatcgcctgagtaaacacatgggttaaaacccaaatttgccggacaattaactagaatcaaaatcacttgaaaaccatacaaatttaagacattgactttataatcacatgtatatgctattccctccatcctaaaatataacggattttgaataaataagacacatcttatctatctagatttgtaattctaagatgtgtcttatccatcaaattccttatgttttaagacgaatgtagtattatctagctaaatatggaagcccgagtcgagtcgataagcacacaaatggatagaattcgccgaacaattaaacaaagatcacttgaaaaagcacacaaatctactaccaaaacacaacatataacagaacagaacaaaccaaaatgaattaccactagtaataataataactgataagtctattcttcataaaaaacaaattca

SEQ ID NO: 45436 - DNA, 2753 bp, Oryza sativa
  unsure (1)..(2753): unsure at all n locations
gaagcccctagctaagtatatatattgttgtttgttacaatagatttgccagggtgttgtaggtcacattggttggcattgatttagtacaagcaagcatatatatatgccatgtttgctggtgccctgcaatgtggctaagttttacttgcacattgtttggtgccttaggcaagttatctatgtttccgccatgcatgttatatacccttttcatgatgtcatggatttggttggtcaacctttttttatcacttatgtatttcctgatgtgtagttcatgtattaacagtggtgtcaatgttgaatgtgtgtgctgccaattaatcatggaaaatatttttataaaacacacagaattgcttatgttttgaaacgggttagtagtaatatagctgaatctggaggaaagataggtgtacgtacacaaattaaggagccgtccggccggagcgcacagtggaggtggacggcaacgtacgtagcgcaatgtgtcgatgtgccccctcgctcgctcgaaccaatcaaccaatctgatgaaataaactgtcattctggtaacagtaacataaccttttgcatgtacagataggaattctaagtttgcgtttatatatcgcctccggtgaaacgtgctcgatcagaaagtctacgccaaattaaaggtttagaaaaattganacgatatgacggaaaagttaaaaatttaaagaaaaaaattggaatctaaacagtgccaaggtacagtgattgaaaaaaaattaagcgactcacggttaactgcagcaaccggagtcgcagccgaagccgaagtagcagcaacaactggagccggagaaggatggcacacaatcggcagctagcgttgatcgaccaagcagcgaaatgaatagtgcagcagaacgtcgacacaagaaattgcagcaaattttatagatgcagaagaagagaagggggaaggcaacggtcggtagcagacgtgcagcgaagggcaaagtgtccgattccaacagcacacaccaccgcgcaactttcaccgtttctcgagaatttaccctttgctttgatgaaggggcggagccacgtgtaggatagcttgagcttacacatgacaaaaaagaaaacaaaaacaatgataaaacactaaactttagataaaatttaaacaaaatgaatataaaactacatgggtgatacctactcttgataccttcctgcctccaccttgttcaagtcagtaagaatttaccctgtttttgtcgaaatagtttaggatatgtcctcctcctacgtggctatatccttattctggtatttttcttttctggttccttctttcaggccctttgaatcataggaataaaaaaaatagaggaataagaaaaacgcaggattataataggaagnnaaatataaaacaaaagattgcaaaacacaggaaaaatacaggattgatcgtttgattgggttgtaggaaaaacgcaggaattggatgaaagagatagactcaaaggaattttccaatagattgaatctcgggctaaatttccttcaaaacctacatgcaataagtcattccatgaaaattgtataggatttggaaaactccaatcatttgaattaaagggcgaaataggaaaactttctataggatttcaatcctataaaatttctccccaatattttttaaaaaaaaaaatttttccccccctttttttttttgggaaattttttccaaaaaaacggccccttaaaaaaagggtttttttttttttaaaaaaaaaccctttggaanaaaattcccaggngttntttgaaaaataagtttcntttagggtgcttatttgtaaaatatattttcaaaaggacataaatataaaaaatccaaccctggttactactacagcgacttgttaccatacaccagttgtcagttggatagaaccagtccaggaacgtgtggccccctagcaggcaaataccgggcccacatctcagtcacaagaaggcaccatggcccacctaataattcccctccccaaaaatcggttgctcctttgcctaatcactcaattccagtaactttcctctcatctctcacagaaaaaacattcctctcatctccaatcagcagctatctcccttcctcatcaccagcttgctgtgatcttatcaggcctttttgttgttctgctggtcttgctcggtaattttttgctccaaatccatctcctttctcttcttttctgctgttacccgccgtatctttgctttaccttcttctttttttttcttttttttttttgcgaatccatcttgctttagtttgttgttctgttccgagtaaaaagaatacccttgatggcctagtctgaccaaaaaggagtgtgaagctcttcgaaaggaaaaggtttagacaatacgagcctcagatgctcggttgcttagtcgatccggtggtgaatcgaacaatttaattcactgatgctgttaatctttttctttaaaagaaaattcctttctgttattggtggtattttcttcaacataaacatatatctgaagattcttcagaaatgatctgaagtctgaagatttcagcgtggcgccttagctgatttattgtaactgtgatgaatatagcagcgttgactgggtacagtacaattacttgcacatcctattatgtagaaacaagaaatttgatgaatataacaaggaattcttaatgtttatggccttaaatcagctta

SEQ ID NO: 45437 - DNA, 2520 bp, Oryza sativa
  unsure (1)..(2520): unsure at all n locations
ggagcagccgccgccggggtgcttgtcggtggtgaagcggccggcgacggggtagtacacgtggagcgcgtcggcgagggcggcggcgagatgtttgacgaggtggagagtggcgggcggtggccggaagaggaggcccttctggatgtagtcggcggcgaggagggacacgtcccaggtggtgagcgggatgcgctcccgcggccgtggccgcgatggcttcaccgtgcgcgtcgacaccacgcgcaccggtggcgatggcggcggcgtcggcggcggcggcggcatcctgaggagattgcgagcgttgggtgctcttcttgttcgatcaagtagagaatttccacctctatactaactcacctctccttaattaatcttgtgtttgtgtgtatatataatctaatcttttgatgagttgctagtgaagttcatttaggctgtgtttagtttactaaagtttgaaagtttggttaaaattgatataatatgatagaaaagttgtgtgtatgaaaattttgatgtgatgaaaagttgaaagtttggaaaaaaactttggccttagacttggtactgatacacgacattttgcaagtcgtcacgtctgacatgagcatgcatgcctgctagtacgttcaagtgttcaactaatcctagagtaaaccattggcttagtgccattagcactagggagtactctaatttaaaagcaataacacaagtacacaccatagcccttcttttatacccctaaaataaatcaacttttgtatttaaagactagcaatcccgaaggccaaatcctaaggttcaaaaaaataaacgaaaggatgaagaggaaattcagtggaaggtgcatgtgctcaacccgatcatttactttatatatttactagactagatttcagatattatctttgacttacaggatggcagattaactcaaatctgatgcagaagattacagatcgatagagtccgtcaactaaaactgtgctgctgcttacgaaacaaatatcaactgcaagtgtaatagctcttcttgttgtttaactcgtactccctccgtttttaaatatttggcaccattgactttttttaaatatgcttaaccgttcgtcttatttaaaaaaattaagtaattattaattcttttcatatcatttgattcattgttaaatatacttatatgtgtatatagttttacatatttcacaaaagtttttgaataagacgaacggtcaaacatgtgctaaaaagttaacgttgtcaaatatttcgaaatggggggagtattatatactccgacagtcggcatggcaaatcatcccaaagctaaacagtccatccggtcaaggtctacatattacatatttcatgcaaaatgaggtggtaataacatatgattaattgagttttaattattacaaaattgaaagatggattaatctgatattgtagaacaattttcatatagaaaattttcgcacaaaacacatcatttaacagtttgaaaagtgtgccacgaaaatctttattttcatcttcatcaacttttgttggagaaacgaacgggactgatcagcatcatcaggctacaactacttgttcaattaactaattgtaagaattaaaatgtcggaataagcatattatttcatggaagactgtaaataaaaattgttatcagaaaaaagtgtgaaaaattgtttctggccggtaaataatctcattatcgatttctgataagaagtctataaataaattccgtaaataaataaaaaaattgtaacagatttatattctaaaagctgccaaaagtttgattttattattttactaaaaattattagaagtacatgtctaatttaattttctaaaacttttgatactatttgttaattgatatatattgtaagtttacataggatatgtaatgtgttctaagagtaaacatgagtgctccattaacttttctcactatagtctaatatttttttaatattataatggttacagttaaaatgccatttattttggaaacgagtgtaaataaaataagcaaagtgttggagcccttccgcctcctcgtccgggccgcggacgttggccctcgccgcatcgcggaatggctccccgtcgccgcccgccgcctcgccggagatctgttcttggtgaatagtacgaaagattcggagctcatcgaacaaggtacatttcttgagcttccctgcttcgggagcgccacctcgctctcgctggagctagggttccttggcctcgccgtgccgccgtcctgtgtgnnttcgcccggctttcaccaatctgtccatctgcggtgtcctcttctggcccatgcgagctcggcgacgccgtctcctcgccgtagttcccgtccctgaagaagctcaccgtgctatctgctcacaggatgaacaatttcaacatccactccaattctctcgtggagattgtgctccaggggataggattgcaacagttcaatgtggtggcaccagc

SEQ ID NO: 45438 - DNA, 1261 bp, Oryza sativa
taaagtaccatcattcagagatcgtgtcaggatcttaaaatatacttatattttaaaatggaatgagtacatataaacacataagccaaacaataggctacaacagagcaggcatgctcgaagtgccagctgtggtgaatgatgccattgccgtggaggaacaaagctccagctccggggaccgaccggagaggggtatcgacggcacggtcagaggatccttatccagtacttacatggtgctcgtttgtacccaagataatgttagagcacggaaaagaacaaaaccattaacacatgattaattaaattttaattattataaatttaaagaagtaagtttacctacttacttcgttccaatataaactgtaacttagtatatatcatatttacattagattgcacttatattagaactagaaaagtaatatttttaagcaatttatatatataaagtttttacgaaacacaccgttaagcagtttaaaaaaataccaataaaaattgaaataaaatatatatcttaatttttttagggtgcatatgcgtgcgagttgcgacggtgtacatgtgagcttggggtgtgtttagtttaaaaataagttaaagtttgaagaaagttaggagtttgaaaaaaaaaagttaaaaatttatgtgtgtagaaaagtttttattgtaatataatgtgatgaaaagttgagaacaccgggaaactgaacacggccttggtcactcgctccctccacagaaaaagtactacgcctacggcatggcctgatcatggtcaggtcagcggccaccgccggctttacgcagagcacacaggcagagctttgacctccccacgattccccaaaaccgaatattttttttcttcttcttacggttccggccggagtacgtgccactctacactacttgtactagagaagtatatacggtacacggtctaggacctccgagatctccgcaagatttttttgccacggataataagggtcccctgccaaaattttacatcctatcatattaaatgtttaaacacatacatagagtattaaatataaaaaaaataactaattatacagattgcgtgtaaattgcgagacaaatctttcctaattgctccatgatttgacaatgtggtgctacagtaaatatttgctaatgatagattaattagacctaataaattcgtctcgcagtttacatgtggaatctataatttgttttgttattagtctacgtttaatacttt

SEQ ID NO: 45439 - DNA, 1580 bp, Oryza sativa
actataattctgttccacgacgtactccctcactctatccattaatataagcatatgtttggtaattctcagcacacgttactgtgtcaccataccgtttgaaaaccgttggccgctgataaaatttggtcaagttctgttataactgtaaagttcagtttgggtttttttttttaacttgaccggaaaactaggcgatttatgttctcaagcaagctcggaaagtccggttttcataaaaacaaaccgatgttcatcggttttgtaaactttgttccgaacattaaagtcgtttttaatctcaacattaatcttcactaaaacaccaacattgattatattgcggactaaaaagagtatcacagaaaattgtcacattcaatctaacctgcatagagaagtaggagtaattcttccgtcccaaaatataagcattttataaaattttttaatggtatctaacaagctagagagataaaactaaatagggacatttattcttttacctgagaaatggggatgttcgtttattggttgagaaaagtaggtactatgtactaagaactataagttttgaacgtagcgaggagtatattttgggacggagtacatgtttatttactgatatatttaagggagtaccccataaaactcccacctttaaactaacatgcataaacaagtaaagagtagttccgtccaaaaaatacagggactagtgaagttttttttttacaagaagtacgagagtggtaaaattaaaaggggatatttattcttttacctgataaatgacctatgtttaatattgttgagagaataataagaaagtaggtagagaaattgaggtaagaaaatatacggagaagttctatatttacaccatattagtagcggtgttatggtatactcacctacccgataagagggagaccaccatctatcttatggaccatcactgttaacctaaattctactgcagtgagaatctatttgctttatgtgtattttttagtgtttatcctactatcatcattaatcagagggtgacaatttagttttcatcagtttacctaatataattagaatccgctatgatgtataggtattttgttagttgtatgataaattttgaatgcaaccaggagtactccctccatcacattttaaatatagctgtaagtttctagattcaatatttaatcgttcatcttatttaaaacttttttatggttgtatttttattataaataatattttatacatgacttatatttttattttttttcgaaagaaaatcaaataaaacgaatggtgaaacgttgaatacgaaaacccatgttgacagcagcggatccacctcccgggcaagtcgggcagccgcgcgggctccgctattaccgtcaccactattgatagctattgacacccataaaaattaatcgatcaccgaaaaatactatgggcttaatgatgatgctggctccaccactgtacgttgaatacgaaacccacaactactcttgaaatgagacggagggagggtttttttttttttgggaacagtactccttttcaag

SEQ ID NO: 45440 - DNA, 939 bp, Oryza sativa
tatgataccatgtgaagaaggcggggatcgaagatgcattgagttaaccctagagggtaatataatgtacatgagggaaagggaaaatacttgaatgcctattacacacatgtatagcactcatactctaacagagataagatggcgatgactaactaaactcaaaaattatattatgtcctatcgtgtgtcaaaatgccctaaatttaggtgattgattcggctgccaattttgtccgagatgtgcccatcaaatccaacgaataaatgagtcatcggttgcatttactcttagctcaatcgtttaccctttagcttatcagtcatagctaaaattcgaatttcatatagtttattttttcatcgggttttaagtagctaatataagactgcatatataattttttttagtcacaagttacttactcactctctttttttaatatatgatacatcatacatttaactttttaacacatgttcgactattttcatcttattgaatttttttttgcgaatgtataaaatgtaaattatgcttaaaatgcttttagtgataaaaccactcatgacaaaattaatggtaattacattaattttttgaataagataaatgatgaaacatttatcgaaaatcaactgtgttatttatttatttatttaaaagaaataaggtagtataatcaactagctatcgagactgttttgttgatggccttacgaaaagactcaagtgtaacccagaaccagagccggcgccgccgtcccgggcaccggctgcgatgcacgagctgcacgtacggcatgcgtacgtgcatgccacacgcggcggcattcctggtttctctccccctccctttcctcttgcccgtccattgcccaccaccaccaccctgctctccccccagacgcgcgccaaatcccaaaatgccccactac

SEQ ID NO: 45441 - DNA, 583 bp, Oryza sativa
cgaatggatttaaatcggacggcttagattcatcaacagatatggctatatatagaacacttcaaccctagcaagccacctctgacccactctggttctccaccgaaccgccgccaccccccttgcatcaaccaaataatatgttcctagctattgtaactttggctattgctttaactgacatgaaccatgaattgcttgtatgctaattattaattgtaacctctttactgaaatatatatttatgttggaatgtgttgtgctcttgtgtgcttgttggtggtttatattgtgatggaaataagctctgatggatatagtaaacaaattgcaaatagcatatatttttttttattaacacatgttctcatagcgggtgcttcaaacacggtaacgcaccacatgttaccaggtgtgaatgaatcacggtaacacaccaaatgttaccgtgtgtgaaggacactcggtaagccaccgttccgttaggagctccgttacacaagagtccagctatgacggcagccttaccgtgtgattcagcacactcggtatgtgttttggccttcccgtgcgcataatcgt

SEQ ID NO: 45442 - DNA, 1056 bp, Oryza sativa
gcatggcagcggcgacgtcgtcgagccgcagatgagcgtgagcacggcgagtacgacgacgacgacgacggcgaagacgaagccgttgctgcgattctcggctatggactctggcattttggccaccgcgcgagagatcgatcaatcgtggaattaattgggatatcgatctgatgatatttttcacgcggcggtgaggcacttaagtagtataacgatgatgagtgatggagcggtcaagctcatgtggagtcgtcgtccacgcttaccgttgaaagcttcagaagttcagagcacttatccttgtatttggatttttttcacataaatataattttgttattttctttttctttttgtaagtctagataaaattaacttggcaaaatttgctgtaggacactcaaaaaacttataattggctgggagacactgcaaaaacgtgatacggctgatgcacactacaaaaattgtgtaattggttataggacactggagccaatattttataatttcttggtcaaaagaggtgagaaattttttgaaatagcgagattgcccctggcgccaccttcccccacccgaaatcacaatttttttttgtagctgggagcagccgtcggtgaggtagctggcagcggcatccgtgcgccaggagcggcagatcacacaaaggcggatgcggtcggggagggacgggaggtggaggagcaagagcgcaagcaggtctgccgggagatcctgccacggcggtgatggttgctgcgccgatgccatcgtcctcctcgtcgtcggtggtgacggcggtggcatggagcacgaataggaggcagccgtgcgcgagaccggcagcagtggcgaggagtgcgagcaggaggcggccgcgcggggggcaggcggtggccacgtcgatggcgtggagcgcgaccaggaggtggccgcgcgtgaggcggctgcggcggcgctccgtgttaggggcaatttcgctattttgaaaaatttctcgcctcttttgacccagtagttataaaatattgcctctggtgtcctatagcc

SEQ ID NO: 45443 - DNA, 1212 bp, Oryza sativa
ctgaatttcagtgaagttttggagttgagtggacactgacagcatgaatctcagcataatatcagatattcacctgaatttctggcagcattgcatccccaaatgagaatgctattgtgcccagtgcattgaaggctctgaagatctttgatgcagcgcttccttgcagactgtaatcaacttccttccgatcaatccgatgccctgcattaggaaattcattctgttcattcttccacatcttcaatttccagaaatcttcagtctgaaaagtgaagatatgaccagattttaccatcataaatggtgacaccaatggctgtccctgcaaatccaatggtgctagcggtgcaggcagcattgacccaccggagtgagtggatgtcaggaagctgggagagtaacagctcgaatgcgccgaagagaatgatgaactgttgcagggtcatggcgccatcatcagtggtgtggtagtgcttgtacacagccttgaggctgctcccagctgcaatctggattgcaatgttgtttccaattgatgccacttgctggaagaacgacacataccagtaaccccagggaccttcagacaaaagcacagatttttaccatcacttgaggtaaatttgcaacaatttctgcactgctaagtatattactgttacaagtagatcatcaaaagtaaatatttatggtgaagaatctgtaatcccatttactatcgtttggcaactcttttcctgctaggctgctactcagaaatcttcttgtgacacagtacagtaagatcaaaagtacaattttgtcgtgacaaaaaaaatggtgatgagtactaaccaaagatgctctttgcaagaagcttgtagctggtgtgcttgtctccattccactgccacagtgaggcaacaaccaggctagaacaccatgtaactagtgttcctgtgaccaagctacaaacacctgtgctcaaacaacagttagctaattacaaattactcaaatcaaacagaagaaaaaatcatgcatgcatatgaactgagaaactttctgttcatggcatttcaggcaacagagcaggagaagctcaaatatcagagaatccatggagaggatgaaacaggatgagtaaagaagcaccaaccaagaggccagccaagggaggcaagagcaaacgggaggggagcataggccgccggcgtggcgatcgtcgtc

SEQ ID NO: 45444 - DNA, 924 bp, Oryza sativa
gggaccttgaggtactttttgttggactgtagcaaatctcatagtgtggataaagaaatcaaccatgtgttacatgaagtggcatttttgtgatggttattttaaactcaaggccagcatgcatttgggacaaaataggcaagcttgcaattttaaatctaaataaatgcaaagtcagctcgtgtgcgggaatacaggttgttcacgttttagtacgaatttgactagttttcttattattattgaaaaaatgttctaattattggcttttgttttttttcctggaaatacagtattggcaagtggatactaatttttaatgtgaaattagttggattcagttcgtcaagagagttatatatgacgaagaggacagataatcacttaatcagatgtgatgcaaattgtacttcaaaaatgcaatttcagtcaactctatggaacaattaaataaacataacatccccgcaaaaaaaaaaaaacaaagagaaggaaacagcgttgaaataagagaagataataaaatggaggatggatacagtgctggaaagaaaatatttggagatgttttttttcctactactttatacagtatcctactctctccatgcccatataattatcatcaacattggtcatatgtaaactttggccattcttatttttgcaacacatttgtatatatatgaaaacataagatattatccaagcatgttgcatgctaaacatgaccataccacaattttcgttcaacaaaaaaaaaacttgttaattatcaaagttgcaacgatattggtcaacagtgactagtactatctccatattttaatgtatgacgccgttgactttttatccaacgtttgaccattcgtcttatttaaaaaatttatgtaactatcatttatttcgttgtgacttgattcg

SEQ ID NO: 45445 - DNA, 714 bp, Oryza sativa
tcctgcagccccataaagaaactgtatagacctagttcccacatgcagcagtagtttctcactatttttgtcaaggagataattatattctaaaatcaggaaatattcttgagaatatcacatgtgaacttcttaatcatgaaaaggtaaaaacagctcggcttacactgcagtgaagctttacttccaagaaaaggaaacaaatgctgatcctaactcttgtaagaatgtttttctaggatattattctggacttaagcgttgcaatgtaatatataatttaatagctaatataaattggtgtcatcatttttttaaaagaatttttagctgtgcactgctacagagctcctgaaatatccaagtttagctttgagcctttaagttcactgaccataacttagtgtgcttgggtacttatattaaacttactactctcttttacaaattacaacctccctcccaaaattataagtttacagcacatttctcaaatataagagtttcatatagaccaatacacattatcaaaagacactgttcccaattatgtccaaatgagtatatacagtttacaacaagaattgtgctagattatttgtgcaaacgattaggcacaaataattgaatccctaaaggaaatataaactgcaaatgtaatgaataattgcatagataaagaattcagaataacaaaggcatgctaagaacctg

SEQ ID NO: 45446 - DNA, 3436 bp, Oryza sativa
ctttaatgccaaaaaaaaccttaccaaattttagcattaccaaaatttcagtatagttgccaaaattttggcaggattttttatatagctaccaaaatttgacagcaaactaaatgtagccacttttttagcaactttactaaaatttggtaaggttgaaaatggcatcaaagtaaacaggccctacatcttttgtgcccctatttggttggatgcaaaatttgtagattgagacaacacaaaaattcctttattgctactacaactaaagttttaaatatgcaacctcctaaatagaaattgtgcggtctaaaatcatataaacatttcctaatacatttaatttctccttttacttgaatgcagagcgtatgagttcagtttgtatttataagcaccatgtatctgcacaatatatgagatgcatacgtataagatttataatgaatatgtgtacacatggatgtatgccagtctgtatatgtatgtacgtaagtacgtacgtacgtacgtatgtatgtatgcaacctataaccaaatagtttgtgaataatttactatagtttcagttctgatttctactgtgcatgtatacctagcttcgtgacaactaatctacgtatagtttgatcgaaactaaattatcccactcctcaacagatttagtctaactaacaataaatcaatgatgcatatggatatgacttgataaataaatgacaagaaaacgatcgaaatatcatttaagatccataatagaacaacaatcaacatatttataggtcctagccagaatcgtggctcaatcaataccgctctcagccagtgtgatcaagtcatagcgtgattaatactatagctaaatacccaagatgttacaattagagatcttaagggtggaggatttaaaaaagtaataatttaatagagaagatgtcctagttaattgtatgcaaacatgcatgccttatattatggaacacctaaaaaaatagttgtgttttatattatagaatggagggagtatataacaatgatcttgttcactttgatgccattttcaaccttaccaaattttggtaaagttaccaaaaaaagtggctacatttagtttgctaccaaattttggtaactatataagaaattttatcaaaattttggcaaattttgacaactatgccaaaatttggtaaggttttttttggcatcaaagtgaacaagtctaatgttttactaatttttaagtatagagagagatcgcttacatatcaggtacaactgcaaactgcataaagcataaagcataaagtcagttgatcaggtctgtttcctacggccattttctaatgtcatataaactgattcatgcatgcacaaaagactgatcgagagaagtacggagtaggttggaaatttcggacctcggaaatttcggtcatttcagtcaccttcgatacgatattacttcgaccaaaattttttcatgaatttaggtaatatttgttcaaatttaactaaattttgctcaaaattttggaaatttcggaccaaaatttccgaaattttcaaaatttcgggatttcggccctaatacaaagtcctcaaacgacagagtgaaccactacggaccaaaaggaagtcgtacagtaaataaatcaaacggcgaagcaaagcccctcactcagaatataattactcgtcatcagaacagaaaagtaaaaaataaaaaataaacccagttaattaactacagtgaggcctcactccgattttaattattaatttactgcctgcattttcgactcgccgccgatcgagacgtccacttgatcagctactagtagcatgtagggacgccgcgagaacagccactagcagcgccgccatggccgcgccggcggcgaggaggtcgtcgtcgccgcgaggtgggctcgcggcggcgcacatttggacgtaggacgccgccgccgccctcgtgagcgcgccgcccccgccggcgcggaggaaccacggcgactgcagggcggcgagcatccgcggcacgacggtgatcgccgccgcggcgacgaccgccgcggcgcgtgacagcgccgccgccgccgtcgtggccgcggcggggaacaggagtaagtagacgacggcggcggcggcgatcacgagggcggcggaggtggtggtgctgatcacgtcgcgattcttggctagcgacgacgaagctgccattaatttgggagaagagaagcacacacacggggagagattagatcacaggaggtggaggagaattaggccggagaggaggcgattgaggaatggaagatcaaaatgtgcgatgatcgatcgatacgtttgctgcccctcggtgaggcacttaagtagcgatgacgatcaagctcaactcaacgtcagacgcatacctttcaaagttgcaactcataccaactccgtttatttaatatgtgatgtcattgagttttttataaatattttatcattcgattttatttaaaacttttatatagatataaagaatttaagttgggcttaaaaaacatttgacaataaattaagtcagaataaagcaaacgatacttacataaatttttaaaatagaataaatggttaaacgtttaaaataatcaattgtgtcatacgttaaaaacgaaagtggtactccctccgtcccgtaatataagggattttgagtttttgcttgcaacgtttgaccactcattttattcaaaattttttaaaattattatttattttatttgtgacttactttattatttatagtactttaaacacaactttttgttttttatatttgaaaaaaaatttgaataagacgagtggtcaaacgttacaaataaaaactcaaaatcgttatattatattgtaggcaggagggagtaacagctaacgaagacgctcggaaaatatgcttatcattgtattcatcaagtgtcatttatatattatatatatattctagcttcgatcgaccctttgctaattgctatcgacgactagattactcttctggtccatgcttatctttcaaagtaaacaccattaccgtcagatctaacatttttaagctgatagatgcaatgctactgctccgtgtgttaacgtggggggtccaagttcagctatattataaaattttaattcagtcacgttgttgacctgggtcaagttaacgtttagtactttagtagtgtcgttggttgcaattctatcgtgcgtagagtggtggcgggtatatacgtgccggatggatcgccgaaactgcccagcaacggccaaagcttctatccaatcctttcgattttttttctctttgagattagcatgtgttatatatgtcactcttaggagtaccatatcatggtacgtaggttaggtaacaaagaggtgatttgactactct

SEQ ID NO: 45447 - DNA, 667 bp, Oryza sativa
catggaatgttcttgcactagacaaggataatattcttgcaggtaattccgtaccgaagttacagttgtatcccatagttcctttggataagatttcatattcatgtgcctttcccaccttttccagtttcaagcagccttattacagttcctcaaatatactatgggtctgaggtttgtcagactggaaaaccaaaccaatgggagtggcaagaaattgcaactccttttccgagtccttctgataaggtataactgaaaaaatgcgttgcttgttcaacttttccccaaaaacactgacaaaaattttggcagtgtaaagtactaacagtttctgtgatgtatgtttggcagatcagtgcaatattagcagaccataagttcagtatactcaaaatcccgattagcaactcttctaacaaactcgctgatggtatgtgtacaacccaaagctcctttctttaatgaaatgacagacagctctcctgcattcgaggaaaaaaaaagcctctgactgtttttttttcctggaattggtactctttggtgccttgtgttttgaatacttctgttactgcattcttcagttgacgctatgtttttcttgagatcagctgtactgtctagtacttgtaggctgatatattctgaactgcgacaaaatcta

SEQ ID NO: 45448 - DNA, 671 bp, Oryza sativa
taatattagagcctagaggtcaaaaactattttgtatagagaaaattatcccacatagccatctgttgtttattcaagaaatattatatgtatcttcaggggaaccatatgtgatacacaaattcaattttatgtccattgttagagaatccatttgcttgaatcaaaattagagaatcatatatctgatggaaaattgtctttttaccaatatgtttgccttgcagattggtagttcctctcgtcctccaggcaccagctatagacaatatctatacctcaaggaagcctcttcatgttcccctcaatatttctttctgggtgcatgcactctatgcttgctatgcaaaacccaatgtatgtgaatgtgatccttatgctgcaaaggtgctactataaacacttcgttcttttatctatttatttaaacattctttgttggtgtcggtgcattgcctctgaattttagatcttttttagtgcaaaatgcatatgaatgtgtggcattgatattcccttggagatgaaacaaggtattcagtgtttgcaaattaacatttacgagtaggatttacctagctagcatggcctctttcatagccacttttgcatgtatgaatctttgtaaattgtggtcctataggcaaatagaaaggtaaaattacgtgatc

SEQ ID NO: 45449 - DNA, 676 bp, Oryza sativa
taaatcctaaccattcattctctctcacccatttaatcctaacattttatttatttcccaatctcaatcccacccctcatttcacattatccaaacacaccaaagttgaaattgcacctcttgtaactgcgttcggcagcaggtgaaagagaagatttctctctcgtttgtcacgtgcacacttcctgaactattaaatggtatgttttttaaaactttttaataggaaagttgctttaaaaatcatattaatctatttttgcaatttaaaatagttaatactcaattaaccatgcactaatggctcatctcgttttgcgtatattctcaatcttatcttttcctctcctctcaaacatataaaacggaaaatgcactttgaggatcagctatataccaaccctggaattgagctatctttgatagtaataggtcttaaccgtacctttctcttttttacgtgtacgcttcccaaattactaaacggtatgtattctataaaaaatttgctttaaaaaccacattaatttactttttaagtaatacttaattaattatgtgctaatatgtcaccctattttctacatgtataatataaagaagtataaagaagcatgtcagcctgtcaggtgctgtgctatgttgctgaccacattcctctcgaacagagcaagca

SEQ ID NO: 45450 - DNA, 688 bp, Oryza sativa
cgccaattttttcatagtaattttagtattatcaaaatattaaaataccaataaatcaaacaacgtatagcttatgttacgctacatctaacgcatgcattaaactagcctaacagtgtcgatgtgttctctctgctacccctctcttaaaaaaactaactctagatttaaatttggatatgtgtattcagatttaaacctaaaactagattttttttatagagggagtactttaaaagggagccctaattggtgcctgtgccgtgcctccccctagcgatgcacaccccctctagtctactacttatcctatataagtaataaaaactttgtatacacgtatataaaatttatacatatgtatacacatacacttttaacggataaaaatacgtacatatataaaaaagctatgacgtgtcctcacccttggcctctcctgcacaccacgtggcatcagccacacacgacgcacgcctttgtcatcacacgtctgagtgcatattagcaatctcgctttaaaatacgagtcgtcctccactctatcctgtgcttcttttctgaaactaatcctataaaaaaatattagtagaaaataaaaaccaaatatggcaaagcggcttcgttttccatccttaatatatactctctctgtcctaaaatataagcatttttagctatgaatttg

SEQ ID NO: 45451 - DNA, 708 bp, Oryza sativa
attcctgcagccccaaagtgttggagcccttccgcctcctcgtccgggccgcggacgttggccctcgccgcatcgcggaatggctccccgtcgccgcccgccgcctcgccggagatctgttcttggtgaatagtacgaaagattcggagctcatcgaacaaggtacatttcttgagcttccctgcttcgggagcgccacctcgctctcgctggagctagggttccttggcctcgccgtgccgccgtcctgtgtgttcgcccggctcaccaatctgccatctgcggtgtcctcttccatggcccatgcgagctcggcgacgccgtctcctcgccgtagttcccgtccctgaagaagctcaccgtgctatctgctcacaggatgaacaatttcaacatccactccaattctctcgtggagattgtgctccaggggataggattgcaacagttcaatgtggtggcaccagcacttgaattattagatgttaattaccacttttctgatggttcagctcagagtcaacccgtcgccaacatctcagcacctaagctggagattctcgggtggagtactactaatttagatcagagctctgtcaattttggcaagatgtcgtatctcaaagggctgttcatcgcatatttctatgtgtatggagaagaggatcgcaatcacgattgtctaaggctcttgcagcactttcagtt

SEQ ID NO: 45452 - DNA, 1833 bp, Oryza sativa
tatacatcctggagacaaatggcaaaactgtccagacatatcttttgatatttgcgattttcttttgagatgtttgtggtccacaatcatcatcttctgaaacattacaaaggaccactaaaataaatctttctaaatttccaccaaaattatctgagaatttagtttgagttctattgccatgagctacctaactatgatgtagtttgtgttgcagtctgaccagtcgatttctaaccgcggaaacaacagacagatatcggtatttcgagcagtaccagagaaatccaacccacgattgcagccagtgaagaacggagatgagttacagcaaatggctagctatctcgtatattgcatggtttataagttcattattatagaaaccagctcaagttccttttatttttttggcctaacatgttactgaaagaaatgcttcaggtcccggtcaaaaaaaagaaagaaatgcttcaggatgttgatagtattgccgcatgaaattttttgattaaacaacaaatttcttgagtaccttctcctgaactattgactggtttatgtacatgtgatccgtggatcaagcatccatctattttgcttccagttccagatatccagaggtatattatataatatcactgtgccgttctgaatgtaaatcgtgactgcaagttgtaacccattcattcgtggtgtggtcctacacactaagctttttgttcctgcttttgatgctactttactgctttgtgatctcctggtcgcaacagcttgcattcaaggatgtattagtaagggtatgtttgctgcagcttctttcaaaatcagaaactcattcaaacaatctagcttttgatttagattttaagaagccatagttgtagaatctaggaaataaactagaagtcacaagctaaaaaacctagttttttttattcttagaagcttagctaccaacaagcttaaataggcctaaaacaaggtgcggtttgaagttggacttattctggtgacctggtcagcaaaggtgcttagaaggtgccttgtcagctgattaaaaagtgacgcttttgttcgtgcattgatatttctccatgattttctttgtgacctgaacacgacaccttgctgcacgatgcttccaacggcagatacgtacgcacactcgttgggatgggatcgtcacctcggtgtttccgtttcattctgggtcgatctggcgtcaacatgtggcgtggcgacaacaacaacaaagtcgtcaaaacctaggagcataataacgaggaaatcgctcacggctcctccaacagccgaaccggttctagcgaaaattcctatgtttcaaattcactttaatccattggactacagctaattaggaaaaagattaatgagtgagcttttatatttatatccttactatccctaaactatcacggtcgatcgaattatacccttaaatcacaaaactagacattcttcatctataactatgcaaactggacaaataacccccccggctcaatccatggtggttttaatcctacgtgcgcggtagttttgatcctacgtggcgtgcgagaggatcaaaaccaccgcgaattgaaccgggggttatttgtccgatttatatagttgggaggtgaagaatgtctggtttgtggtttaggggtgtaattcaatcgaccactatagttcaggaggccattcatattttttcctttaatttaaaagcacacgaaaaaaactacgaaaaaataaatctctaaattaactctaaaatcacttttaaaattttaaattttgtctacggttcataagccaaaagaa

SEQ ID NO: 45453 - DNA, 2624 bp, Oryza sativa
ggcaatagtttttttttcatttacttactatttaatctctaatttattttctcccaaattaggtgggatgcgtaccatcccaaatacacaaatcaatcatatacactacagattatacatccgaaatcaaaccccaaatcaaagaaacatcccaaatatacaaatcatacacaaatcatgtacatctcagatccatacaatgagattccaaaaaaaaattatacatctcaatccatacaatgaaccacagattcttcatctcaatctacacatggatcacaaattctttgaaaaaaaaaagaaaaaaaaacgaagcaaagccgccggccggctgagccggccgccgcctcccctcctccccggctgccgccgccgccacgcggccctccgcgccggccgccgccgcgctgccctccgccggccgggccgcccaccccctcctgctgcgcacactggatcgagttgggaaggggagttgggaaggataagaagaaaaagagataaggaggaagggaagagataagattagagatggagggagagaggagtgggtgtggatgagaaaagagtggacgaaaaaagaggataagtaatagggattatatagtgtattttgatctttaatcccggttcgtaactccaaccgcgactaaagatcctggaggggcctgacaacacctgacagcatgtgaaccgggactaaagatcatcggtaacaccaacctggactaaagatcacgtagtctcgttctacttataaaccgggactaaaaaccatctttagtcccggtttttactgcatccgagactattgtggtttttggtcgaccggacaatgatggtttctccactagtgaatgaagatgagcgaatgggtataagagactgggaaatttaactatttgccactattagatttggcaattatcaaaatgcccttcttatatttgtacatacttttttccctcttaagtggtggttccttaactattcgttacttttgcccacgtggcatgccaacatggcatataggtctaaacgggctccaactcgctccatgtgctgacatggcatgacacctaaaacaaattcggagacctaaatatgtattttgggagttcaagaacctggatgatacactcgcacaagtttaaagaataccgtgtacatcactcaaaatataaattgtcgtcctcctctcccaatcgtacttccccacacaaaaatcaaactgtttcaaaaccaacctaaactataaaaagaaccattattccgacgagaagatttgatagacaagtcgttcgtattgctctaaatcacattgccacgcatggacacgttggtactaaggataaagataagggaaaatgtacgaattacccccccaaccctccgaactatcacgttcgaccgaattaccccctcgacccaacccagagcggttttgtcctacgtggcaatccggtcagcattttattttttaaaaaatggtgggacccacatgtcataccccctctttctctcttcctctatctatctctctctcagtcagtcactggcagcggcgcgcacgccggcacgcatggcatggcacggggacgagcggtgggcaccggcgcgcgggggcgagccggcggtcgaagtgcacggcggcacgcggggagggagaggtcggtgcgcacgacggccatggcggagaggcgggcaacagccggaagtgtcagcgaagggaggtagagggaatgggggtgagtggaggtggatggggaggtggaggaaatgcagggagtaggccggcagtcggcgcacacagcggcggccatggtggagaggcgggcggcggcgctcgccattgtggcgctggcggagaggcgaaggtccgcgaggaggcagccacgcgacggcctccgcctccatcgccgacctttcggtccgtctccgtctccgcgagctctgcctcagccgaccgcccgggcgagctccgcttccgccacctccgcctggtccgtccctactcggtgactccgactcggagcaggatggagaagaggaccgccgtccacgctgaccgccctcccccgtccccacgccggcatgcgcgcggcgcgccatctcgcgtcgaccagagatccgctggcgagcggcaagagaagaggcgccggtggagatccgccatgctcaccgcccgtagtggccttccggccgtcgccccctgtgcccccgccatcgccgccggccgctgcgcccccgtcacgcccgccgcacgccacacccattgctgccgtatgcaagagagaggaaaagaggaagaggagtatgacatgtggatcccacatttttttaataaataaaatgctgactggattgccacgtgtacgccacgtaggacaaaaccactctggattgagtcgagggaggtaatttgtccgatattgaaagttgaaggtgaacgatgtttggttttcgggttagggggtaatttggttgaccacgatagttcgggaggggggtaattcgtattttttccaaagataatacacctatatgtttccattagcccaatttcctagtgatcaaacccattgtacatttgtacgttaagtctattgtgtgatttaattttc

SEQ ID NO: 45454 - DNA, 1821 bp, Oryza sativa
acaagtatggatacgattcgagtagtccttatagtatccatataaaactctatttgtcatttcttatccggaactccctctatatatgaggtatgattccgtataagacttggtatatggtaggccccgccgagcttagtcgattactattgggtatgtggtatccataaatctgacaaaaagtataggagtaccatgtaagagcatacccaggagctcatctatatttgatcctccaaatacccatatggtgtatcatccaaaaaagattcctcatccatatcccttttaatccaacagattatccatattacatcattcatatcccatcatcctatattttagtaatatctttcaactaatcttacatttgtattttaagggatatattttgaatgacttaattttaacggtgttgtttatcgcgataatattttgaaatgagtaaactttaacggatatatttttaatgggtaatttttaattgatatatttaaaatgagtgaagcattttttatgtgttgaacggctacatttccaacggctagctagctcattcaaattgtccaacggctagtacatacatgtaaagtttagctctatatataccactacattgcttgctatctttttgcaccatccacattattgtgcatagttcttactcaatgagcttccttttgagacatgttttattggatgaatcatcgtcatcgacgatgaaatcattgttgcttcaagaagatctagttaaacatctatggcaatttcatggtaggaactagtgtagtatgcaacctcccatttatgtagtaggcaagtctaattatgtatgcaacctcgtttacatatgaaatccatcaattatgtatgcgacctcatttatgtatgccatccatcaattaagtatgcaatcctaatgtatgcaacctgtatgtgctcacaattaatcatagcattcttgcatagtacagcataaaggtcacaaaacattaagttccaacaataaccattacataatacatcaaagcctacacggcatacaacataaaagttcacaacccattagaaaatagtaataaatagtacatatccatacatcatgaaatcaatccatatgagcctttatgatctcctgctgcaaacgcaagtaatatgtttttcttggcccatccatagcactaagatccatattcataattctttcttctctttcatgggtttctatatctaactttcgtttttctactttcaacctctctttctctagtgaaataacttcaaccaaccggtcatttctttcctccctagattgtgcactcatctcctttttctctgaccacatgttatttaatgcaataactacaggactactctcacttgagcatgaagaagtattacctcgcgggcattttgccttttccaccttcttcccaggtggtctcactaaaggatcagaggtattaatgtcggggctgtaatgaaattcactagagtttggcttgcagatggtctcactaaaggatcgacatgagccttctgtcttttctggaacaacctatcattccactttggatgatgatgcaaaatctcccaacagtgcattaagaaaatgtcttcttctctgctgacttgtacaaagtaaaagcctgagttatctgcaataattggccaagtcgataattggaaaaacaatatttttttaaagcaaggtactagctgaatgagatgcttacataatcttgaacaaccattccactttgaggtccattaagaatctgctcataatatccacaaaacttgttaacttgctcttgaatg

SEQ ID NO: 45455 - DNA, 4432 bp, Oryza sativa
cggccgagctggcaacaggcgacggcgggcatgcagccaaggggcggcggcggacgaccggactggcgagaggcaggggggatgcacgcgacggccgcggaggcggacaggcagggaagagccatggatggtcgggaagaaggcagccggcaacgggtgggtgagaggcggaggaggcaagcgacggctgcgcgcttggcaacagcggtaggcagctgccgcgggcagggcgacggcggaagtctgcaggcgtgcgcatggcgacgacggcagacggcagtcgcgcggctccagatctggtacgcctctccctctccactctcactccaccctccctctccaccatccgctgaaaaaacaacccaaaaaggtgcatggaggactcaccttcgctggccggccacgacggcgatggagaggaggtcgcggaagtttggataggggcgggagctcgatccagatgcggttgttacgatttggcgtgaggagagagacacgctatttttggcttttctctctctctgtttagcgcatccgacacttttagcgctttggatggcacatctcctggaccttgttttttcgctcctatacgccaaaatgcggatggagtagcgggtagcgtatgtcctgggatgctctgacagggaggtacctagtgtgcttatcgcctctgcacccgctctgcctctccttcacttggtacgccgtacgtgtatggtaaaaaaaaaaaagagtactagctggcaagctgctgtttgttaatgggcctaccccaatttgcgtgagggccttaatgggctcaactggcgcgcctcggaaagttgggcctcacacaggcccatatcttacggggaaagtaaagctacggcctaaatggaataacgtctttgcgccaccgttttcttccgcagctggccaactcgagccacctcatcaggaaaaaaaaaaagaaagagagaaaaaaaaaatctcgcctccctttcaaatacgccgccgcggccgcaaagctttcgctcggagcacacgcacgcgcggcgcgacggcgcgacctcgcctcgacacgagctctcgtgatctcgtctcgccgcgtctagctcgccggcgccgccgcgcgcgcgcgtcccctcgccgccgtacgtgtagcggagcgactccctctctccctcccgcctcacctccgggaccggtcggtcggtcgatcgatcgacggggcgaggggatggcggcaccggaaggccagaacaagttcgcgggcgtccgcttcttgcccaaggacctggagctcctcgccatccttgacgccaagctccgcggaagcccgttaggccccgtggaagccatcttccacgacacgcagatcctcgacttccacccgtacaagctctacggtatccaccgcctcgatcgatcgatctccctctctctctctcttagtcgatctccttcttcttctccggcgacgggtgggtgcctggatcagatcatgcagttttggggattttgattcgggatttcgggtggatattactcgactgattttgcagagatgtatgctgaggacgagcaggaggaaggctacatctacttcttcagcacgatgcagttcagatgcaggaagattgtggagcgcgcggcgcagggcggccggtggaaggtgaacaactgcgagactctggaggttggcggcgtcgccgttggccggaagttcaccatgaatttctacgagcatatcggcggcgacaacgacctcatctggaccaactggggcatgcaagagttcgccaggatcatcggcccaaacaaggaggtattccattcggaaatccacttctgaatcttcgttcaatgatcggatacatttgatctcatttgggtgaaatttttctgatcattttggccaaaagctcgcggatcttgccttgtaccgcctatacaagaagaaaataacaagggggacaggcgaggagaagccggaagacatcgccgcggctagcgatggcgataccgagagcagcatgaacaagcgtagacgtgtagaagcgtcggcggcggccatggcgctgccaccgccaccgccatcgccaggcctgcctggaacaatgatgttcatggcggcggaccaggcgaacgtggcctcgacctcgcaggaatggcacggccagttcgccaacggcgctgcggcggcgccgagtcctagcggctgctggccctgggcgccaccgccgacaccgagcgcagtggagcctttcagcttctgggccagcgcgtcggcggcgactcctcctgccgccgcgaactaccacccgtcgccgcagccgcagccgctgccgccgcagggcggcgagtactactccagacacggcgccttctcggtggcgcccgtgcccgcgtccgcctgctcgacgccgtccccggaggcggcgaccagctgcctcttggctacgacgtcacctctgccggcggcaggtactgagggcagtgacagtcagcagcaagaacccccctgcgaattgatggaattttgaaattttggcgaattgcttatagctgattctgatctggccgacaaatttccgtcaaattcgcagtgttcaacttcgtactctttttctgaccgttggctgttacttcactagttctacatatgtgagactgcattgttttttgtactagtattaatcttggtgatctgttgttctgaaatgcttataaattttgcccttgtgccttgaagaatttgctatgtgcgtcacttgctttgatttgggatgaaatgtttgatgaacaatcatttttaattaccacatgcataggagcttcaggaagggcttgaatttgacagttgctatgtgtttagccatgatgcatgtagttttgtgatagtaccaacgcgggatattcataggatttttgtggaggttcctgttaaatcattgaattttaatttggaggctctgaagtgttcatagtccaaaatactgtcaagtaaattcaagtgatgaggtcatgactttaatttttcatagcaaataactagattaatagaccggcatgattttctctaaaacaaaatagttagattctgtttctggcaaggaaacaagatcactgaatttcgttccggtcaaaaccatgtagcttgaactcaacttggactctagagagagaaagagatactatatcatgcaagatatagtagatacaacctacaaaatccaagaatttcatatttttcatacaatgtaagtgagcgcatgattttatcaacatctcgatccatctactgatgaactgaagatatgtagtaccagctaacagggaggtgctcacgctggtcgcctttgttctacagctcgaaataaaaaaaaaaattaatatgtaccaattcttttgaaacgtgtatattttcttaaaaccggtggaaaaaatatttccaaatcttatttgctgcagctctgcctctccttcagttggtacgcgtatggtcgaaaaaaaaaagacagtactagaaacagcggtttttaatgggttgagcccaattttcctgatggacttaatgggctcaactggcgtccctcggaaagttgggcctcagataggcccatatcttgcggagaaagtaagcttctcgccgtgctcgtccacattccgccagctggccagctcgagccacctcatcaggggaaaaaaagggaaaaaaaaatctcgcctctccttccttacaaatacgccgccgcggccgcaacccgcaaagctcggagaacgcacgcacgcacgcgcgcgcgcgacacgcgacgtcgacacgagctctcgtctcgccgcgtccacaccaatcggcgccgccgtgtagcgaagactagctagctccctctcctccgcgagaccggccgatcgatcggggcatcgcgcgcggcgcgcgcgggcggggctagctgggcatggcggcaccggaggatggggaggacaagaatttcgggaagaacaagcacgggctcccgatcggcttctacttcgcgcccacggaccaggagctcctcgccatcctcgaggccaagcgcctcggccgcccgctctcccgcgcgcacgacgccttcttccacgacatccgcatcctcgacttccaccccgccgagctctacggtatccacccttctccgtctctctccttgtccccttcttcttcttctccggcgccggcgaccggcttggtggtggggatttgattcgggtggatttggaatgatttgggggcggcgcagagaagtacgccaaggacgaggagaagggctacttctacttcttcagcaagagggagttcccgacgagcagcaagaagcggccgctgcgggtggcggagggcggcacgtggaacagctccggcgccgtttacaaggtggtgaagagcagcaagtccggcggcgactacgac

SEQ ID NO: 45456 - DNA, 1208 bp, Oryza sativa
agactccgactccgatgagtcggaggaagaagagtcgttcgccggagacgacaccggaccgggtggagagtccggcagcgagagcgacacggcggaagaagcgcgcctcctcctccgctgcccggcggccaccacacccgtgctggcactgtgcaattcaagcacctacgacaacgacaacggcggcggctgcatcgcgatcgacgcgccgaagctacgctccttgcacaacctcgagtcctcgtcgccggcaaggcgagacgagagccgagcacctccgcactttccccgacctcgagcgcctcaagctagtaacggaggcgcggctgcccgctgccggcgatgaggacggcggcggcagcgatcgccaacctactcgatccgttgctgcccttctcttcgagacctcagcctcaagctcgacacgttgcctacaccatactcgatgtcatttcatgcacaattaatttcaacaagatttcgacaagtccattggtcccttcacacgccggaaatggatgccggcgacggcggtttcattatcggcacggcagcaatggtgatcgtcatgacgacatccccgcgcgttgagtgaacgatcgttcacctgctttgcacagcagtctgagaagagttagcctcaagtttcagatggattcacccgacaactttggagctcggcttgtcagattcttcgctcaaattacgctatggttctagaagaaatgtgcatcgatagtggtttgtactccctccgtttcaggttataagatgttttgacttttgtcaaagtcaaactactttaaatttgaccaagtttatagaaaaaagtagtaacatttttaacccaagacaaatttattatgaaaatatatgcaattattgatttaatgacattaatttagtattataaatattactatatttgtctataaatttagtcaaatttaaaaaaaaccaaagtcaaaatatcttataacataaaacggaggaagtaataaacagaggtctacaatgaaacaaatgtggcagcagatggctcatccaagatttctctgaaacaaaagaacttcgttgatggttcgtcattggtcttctcaagaactcatatccaggtaggagtgaccaacaagctttatggtgttaccacttgaaatggggaagagtagtatggatgatttaagtttgatctgattctgatgtggaat

SEQ ID NO: 45457 - DNA, 715 bp, Oryza sativa
attcctgcagccccacacaacatggtgcaaatgtgcaactacttgtgattcatgaacaaaaacattagaatgcagttaactcacaagaggtgtcttgatgttataatgttgaagtagctttccagaatgccttgtgtcttctgatagtatgacatcagcacatttgaggatacgcaatgccctgcagcaaggaccatccaagcttaaagctaggagcatgtttcaggaaaggagcacacgctccagttacagcctattactacatggaggtagcctcaagttcagccaaaacaactatgttttgtttttcctttttcttcttctttttttttgtgcagaacagaaagcatgccctccctgatattttcctcatggtaaaaagtaaaggggattgataaaaaataataataactgatgctaattgtgctatcaaacaattaaagtttttttttctccctgtagagattttagcagaacattgctctatttcctcttttattctaaaagaagtgctgctaatcagctgattgcctattcacaaattttgttaagagtttacaacaattgtataatcagacaagtcccaatactttcgccttttctttttaagtaaaacggcataccactgtcagttctattaccctggtatacccttatgaatcactagatattatgacatagacatcaaaattcagaagatatttcgtaggcgtca

SEQ ID NO: 45458 - DNA, 667 bp, Oryza sativa
gcagcgacgccatgggctgcggcggcggcggcggcggccggagagggaggcgaagcgtcgccgccgtttgctcccggagcgagaggggctggagaagtggggagtagatattgtggtgggcttcgctaccgttggatccgatctggacggcccatattggcccagggtttaattttctgggcctttgcctatttctcccaggtaaacctgcatttttaggatcgttttcaccgcgattttttgttttaataagaagtagaaaatggcgctggctagttaaccggtataggcatatgtaaaaaatgaataagcattcaataaagccgttatatattgtaaaatttatctaaagctctcctaatttgtaaaaccgttatatattgtaaaattttgaaatcctaattttttttcaacaaaattttatgaatattcaaatgttacttacaacttgtgttttatctgatttttgcaatgtaaaaaatcatacataataatcgataccattggacaacctatcaaatattgtcaaccacaagttagcctagccattgttattatgttttacgaattaacattgaaaatctatatgtctgttgacgcacccattcattagcccctattcttgtcactcactaaatatacacgttagtggtgcgcccaccaaatt

SEQ ID NO: 45459 - DNA, 711 bp, Oryza sativa
attcctgcagcccagaaacaacatgcagagtcttttttgacactatattctaaccaattaaatttatctaaccaattcttttgaaatgatcttataaccttaccaacaaatataccatccttatttcatctctcatttcgtgacaaaacttacctattgttattcttattttgtgcacaatcagcaaaaattccattctgttctcatcagtttgattggtactacttgaattgcttgcataataatttaacaacattgttttcttctccatcgaaaatctacgaataaatcaaaactatgaatcgcgaagctcaattcttataaatcacatcatctagatgcattactgaaacagagacgaagagtatgaacaccggcaccgggctaggactcaccgcttgctctgctagctgctgctgcttgcccctcgtcgtctgatgcccttcatggagggatggcctgatctgctagctcctcgccctcacctcctgctgctcgctcctcgtcgcccggttgccgcgtctgctcgtcactacggcgctgcgccacaacgctgcagcctgccacaactgcttgccacattagctatgtactactacaaattaatatgtgaaatgaggatgacctcggctccgttgagcgcagcggtggactgcagtggcgtcgccggatgggaagacctcagcttcgagggcaggggaagaggggggg

SEQ ID NO: 45460 - DNA, 693 bp, Oryza sativa
attcctgcagcccaattgaatttactgcctattcgtgagttggtcctcctgactctgactctggatgccactacctgctggagctatggaaatgggagtaaagctatgcacatctgatttccctgaagtttgatggtctgacgactgaaaacttgagcagtcacaatattgctgtccgataccaatcggtttaaaaggtcatgtggtagccgcggagatgacgagagattcaaatgtaaaagttaacctaatgaaaactcatcgcagaatttctttctgggattcatgtgtttcaaatgaggtttgaatctcaacagacacgcatttctcatagcacacggaattggcttgatttttctccccctcacacaccggacgatctcacaaatgcttcaccaaaagtacaagcagataagaagtacgcctccgtgcgagcaacacgtaaaagtcaaagtccatcaccccccgcgaaccccggaagcttccagaaggaacccaacaaactagcgcctccatctctcactggcagccgggccccacgagtcgtcgggcccacctgtcactcactctacgcgactactactacatcgcgcctctctctccccctcccccttcgaagcttttcctcctcctccgcgcatctcggcgccgcgccatggccgctctcagctcgcgccgccgccatggcagcct

SEQ ID NO: 45461 - DNA, 965 bp, Oryza sativa
tctttcgataatgttttgaggtgttggattggtcccgacctggttataggcctcactggctcagctcgctgttaatagtagagatctaggaaggagaatgcctctgtgtcgactgtaatttcgacatggaaaggggaattggtggaattgctgcggtatagtttgtatttttagattggatatgtgttggaaatctaaaatagcagatttttgtattttgggtggtagtccttgtaggtaatgattcttgatgcgctaccatgccactgccataccaggtctttatagttggtgttcgtgcatgtttaggtagtattaaactgccaagggagattaatctatgtgcttgtaccaatttaggattttatagcagaagcagttcagaatttgaatttaatgtgcttggattaaatagcctgtggcagatgcagtcttttacagctttttgttggttatcacaatcagtacactaaatgctggatcagaacttggctactatagttcttcttgtgatttggtgaacttgttgtttcctctcaatttggagataacatttcatctaaaatgcttggggatacttttttagcatggccaaattaaaagaggggatatatggctaagcttctatttggtaatacgcaactttggtgatttggtatctgcaacacatgtttgaaaccaatgtttttttttggctgaagtttcatcgttgggggttcatatctttttatcatgttcgctcaatgtactaatacttctccatgttttttttgtcttcatatttattggaatctggggtgcttattttttttcctaggtagttttcttttgtagtttgcgagagatgaaattcgatcaattatttcctatttacattagtattgtttgcaaaggtatgctactatttgaaattcatgtatatttctattccttatatttttacctgttttcagcttttcttacaa

SEQ ID NO: 45462 - DNA, 698 bp, Oryza sativa
ggcacgctggcaaaatcatccacctatgaacatgccatacctttgtcggagtataggatggacatggctagtgaagagagtcgaagtagtccaaaagtacaacaaacgtaaagttagctactttaaagtgaaaagatcagagtaggggtgttcaaagtgaaactacaaattcaattcactctatttattatctcaattgttccaagaaaataataaacagcatgtattgcttataaaactgtatgaagtataactgctgtactcgttctactcatgctctataacttggtacaagacattccaaaataaatccacctatgagtataccattaactttgctagagtataggataaacgtgactagtgaagagagtcgagtgaagagagtcgagataatccaaagtacaataaaccttaaaaagattagagtaaaggtgtccaaagtaaaactaaaaaataaaatatgacccaaaatataattcactctatttattatctgaactgttccaagaaaataatctctaaacaacatatattgcttataaaactgtatgaaacacaaccgttgtactcgctctaactcccaccctataacttagtactggaatggaggacacacttgtaatggggttattattggacaagacattccaaaataaatccacctcccgtataaatgcccgaacatttttcttggg

SEQ ID NO: 45463 - DNA, 733 bp, Oryza sativa
tcccaagtactaccaagtagcatcattgcgcattgcccgaaacgaaaactcgaaccaagcccaacacggtcaccaacggagaacaactcgctatagcgacgccgacgcatcaaagcatacaaacaagcaaacaaaaaaaaaatgaataaaacgaaccaaccccctttagtgccttaagaactcagagcgacacatataaccccatggattagaccaacaagccgtacacctcccagctcgatacccaagtaagtccccaaccccgccaaacccagcagaaatggggccggcgatccccgccccgcgcggcaccggagcacggccgccgccgctgctgccgcatcgcttgcatgcgcgcgagcggagaaaaggtaggagagagagagagaggaggaggaggaggagggggagagagctagggacgcggagatcaccttcgcgacgcacggcgtcggcggcggcggcggcggcggcgcaatggcgacggcgacgcggcgggggcggagcaaggagagtggggttttgtggggggaggaggaggaggaggggttttgatggccagagcgtggaacggaacggaggaatgaaacggaaaaaagaataaatgggccgtgttggaagtgggctttctagggccgaaaagaggatgtaggccttgcttggatgggccagaattctggcccatacagttcaggccttgtttggaacgggcccaatctgtctgtcatgggct

SEQ ID NO: 45464 - DNA, 635 bp, Oryza sativa
tctcgtccatctgttccaaccgccttttcttttttcaaatggtttttaattggaaaatggatttgccacatgattcacgatcagtaaacgctttcagccttttcatcttacaattgagtactccatcaatttaaaaaccatttgaaatgtcgtaggagataatataccgtcgtacagtatataccgtcgtgctccatcaattccatctccacgtgttattgtctagtatcaatacagcataatgtcgtaggcgataattaatcagagtatcatgcacataagtaaaatacaaatacatgttcctttcgttttatattataattcgttttgacttttttcttagtaaaacttttatgtttgatcaagtttatgaaaaatgtaatggtattcctaacacgaaataaatatattattaaaatatattcaatgttagattaaataaagtttcaaatgttgccaaaattttctaataaacccaatcaaaatttaaaaaattgacaaaaaaaatcaaaatgacttataatatgaaacagaggcagtacaccaaatgcccgttgtgatcctaccccgaagtagcctacaggctacagtctcagagacagggttcaccaaactgttctcaagccaaaacaggg

SEQ ID NO: 45465 - DNA, 901 bp, Oryza sativa
actatcgatgataatatcttactatcgatgtttctctcctccgttactttttttttccgaagtacatattagcctcaaccaatattcctttccttgctaaatcatttttcctatgcaaggtggcattttttccaaagaaaagaaaatcattttactcccctaaagcacttaatacttaaactatttttttcttcattttatccctaaactattagaaatggttcactcttgtattttaagctgaaactttttaagctataaatgatatcattatcaaagttctaaaatgttttcatgagtatttgcttgaaatttaaaactttcatgtttaaattagtcacagtgttttcaacctacgtaaacaatgataatttttttctaaagaatattgagaggtaaactataacgcatcttcaattctaccaaattttaatacaaaatatgacttatatagagagaagagagaaataccattaagagtaacgaaagagcctgtaacctagtggttataagagcctcagtagcaccataggtcctgggttcgactcccaatgggagtgaattttccaggatttaacggctttgtgctttcagtggtaggcgacgtaaccgtcgacagtgaggcgcctgtggtgacttcgtcaatctccaggatggatttgctggcccaatcttcgaagatgctcatagggatagggtttgcgtgcgtgtgttaagttgaaccattccaatagtttgaggtataaaatgagccaaaaaattatttaggagattaattgctcaagtgaaatagtttgggactgttttcgtttccaaataagccaagctgatcattttggtatttatggagtataattagatcgacttctctttcttccgactccctctaatcacaaataaa

SEQ ID NO: 45466 - DNA, 638 bp, Oryza sativa
ttcctgcagcccacatgtaacctgataaaacagaagcctatataaagaagattctagaaatatatccatggtaggagctaccaaggaaatgcacattcataattgatgcaaaattaatgcaagtgttttcatacactgataagtgacactaataattctggcccatctgtatgtcaaaagatggatctggattaggttctttctgctccattgctgaataccatcaggttttagctatgtttgcgttattctcagtacattaatccctcttgtcatttctttgatattcaatttctttatataatttaattataggattgcaaatgttgtccatgaatgctctgcttaaccataaatcattgacaactttggcctaaccttttcttgcagctcttctcatgtagtgctacagaccttcatggtgcttcttgttagagcagcattgaagaggtctagaaatcgatgtcggtgaaagatcatctgaaatgaggaaaaggagcatgcactgacaaaaaaaacttccattccttgtactaatcttcaagttttcattgaccaggctggccccctgttgctgtaattctgtcactgcttcagtaaattactgaaacagacaaaaacatctcctctatatcgat

SEQ ID NO: 45467 - DNA, 679 bp, Oryza sativa
ttcatttttttgagatattatagttatatgctccttctgttttgacttctttcttaatcaaacttttttaattttgattaaatttatagtaaaattaattcagtgttatagatgttgctaaatttttctacaaactttgataaacgtaaagatgtttgaaaaaaatcaaaacgacttataatatgaaacggaagaaaattatattatcataatctgggtaataatatgaaatataatgtttgtgagaattttggggttctcggagaagctactagataatccctcaaacggggccatatgtccgaccgtgcccatcagcgattaattatattgccgaatcatatcattcattcgtttctcaatcattgggattatgggcgcctaattaacgccgtcatggcaacagtgcgacgcgtgtcacagcaacagtttagaagctactacgtcgtcgcacactgattaattgagaaatttggcgttaattgtggtggagataagtcataattgacggtgatcgaaattaaatgtctctctgttcatctgacaagtactaccacggcagtaagagaaggtgttctctataaaacatgtacaactcagcaatagactagattaatagtaaaccacctcaatagtacgcctacatgggtatctatagctctctaatgcattgcatcgt

SEQ ID NO: 45468 - DNA, 1749 bp, Oryza sativa
tttgcgttcctgtagtagtgtttgaaagcgcatgcgtgaaatacaatagagtagaagtttggaagagggagtaaagaacacactattttttttttgaaacctaaggcggaactttgttccactttcatatttagaagaagagaattgacccaatttataaggaaaaccgggtccgaaaaccatataattgcacgattaattacaggaaaaccggctgaaaaccaccggtacacaactaacaactacggcggagcccaaacgcaggatgtcgccgccaagctaaacacaaaagcgactaaacagctcccatatcacataagaggtgttattgttgccgagctagccgcccaagcgacccagcagcgccgacttcacaaccacagtgacactgaagccacgaaagtcaccaaagcgaaaagcagctccggcatccaacaatggacatcagcctgaccatcgaggagccacttccttcacacggccagcaccagaactccactattgggatcaaattaaaaacgggagataaaacaaatttagcaccccctccgttccataatactacctccttgcacaaatgtatgaccttggttagctcataaaaaaaatacggagggagtattatattgcattctggcaacgtatgcgtagattacagtttatacagtggtactatctagtacatgggctctgcgaatcaaagataccgttaataagcacgtcgcacgaaaagttgaggacaatgtagctttttctctgcgaaaatggtggcagatgatcatagataggataggatatgatatgatcccaaacaaacaggcatcgatcaagcattcgcgagcgaaatggcgatgattgcgagggaattctgttatcgccgtgtcaaccgctgccatcattccatctccctcgcgccgacgcccatcatttctcacacccctctccctcccctcctgccaaacctttcgatccaacaccaacatgctgcatgccatcatcttgccgccggcacagtcgccattgcctctctccctcttttattatccccatcaccagctgtagctgtaacagcacaacaccctttcttcacatctactacgtagtatgtaatcaccatgcttattgctccctccgcttcagattatattaagctgtgtttgagagagagggaattgagaagatggggaagatacgcaaaacgaggtgaaccattagcgcatgattaattgagtattaactattttaaattttaaaaatggactaatatgattttttaaagcaactttcatatagaaattttttgcacaaaatacaccgtttagtagtttgggaagcgtgcgcgcggaaaacgagtgacaatctccccaatctcctttgaaagaacgcagcctaagtcatgttgatttcgatcaaatttaaattgttccaagtttaatcaactttgtagaaaaaaagtaatattttcaatacaggataaatatattataaaaatatattcaattatagattcaataattggtgttataaatattactatatttatctacaaacttaatcaaacttagagtaatttaactttgaccaaagtcaaaatgacttataatctgaaactaagtgagtacacatttagttgagatgtatatgccggttaagttactaacgtcttatagtatgtgttgctacatccgtccttaaatatagtaacacacgtactaagtatcaaatgtgacgtatttttgtacggttaaa

SEQ ID NO: 45469 - DNA, 750 bp, Oryza sativa
aactgcacatggagttaagtcactgacatgtgagtcccattttattatggctcatatgttaatggctcaactgcacaacagttaaattagagtatccattttcgttagaagttgtggagcagccgtggatgttgctttctctttttctctatctcgtttcgatggtaatcccccagctgtcttgttttgccttttgtaccgtacttgtactagtaatatgcccgtgctaacgcaacggtgatatttataagtgcagtcaaacaactaaaagaaaatatcatgacaaatttaaaactatcacatgcgtaaaataacatcacaagtgttgtattttttaaaatcatcaattacacataggtccatacaaaggaaacatcgctaattcatgatatatatcctggttacaaatctttctattgtcaattgaggtaaaaactaagaattcaaatcctcactccccatgaaagattctaagcttctcttatcaggaattgctaatgtgcccgatattctctcagttttctaaacatgcatgtaagcctgcaaatttgttagttgaccaagtctagctgcaagagaatcgagcccatagaaaactaaaatgcacaaaagaatctgctgaatcaaaatgcaaaattctggaaaatagtatgcagtctgagcctactgttctgtctaaaatattaggggaattatggaaaatgactttcttaaatatcgatatctatccagaggtactaacacaaaata

SEQ ID NO: 45470 - DNA, 687 bp, Oryza sativa
actaaggtaccattatcgacttatctattttaacatggctagaaaaaatgcccgtgcgttgcaacgggtaaaaaaatttttgatcgctatacacttttcagtcccaacccaccccgccgtcttcctctacttggcttgcctctctttgacctacccacaagtggagctgtagtctcaactcgtatggtcggctgccgtattcaacctccggaagatagttccatgtccatacaatgccagaacagatcatttctatcaaatccggtcaaatctttctcgatctttcaaaattggttaagggcttttgatacactcaatctcttctttctgtttttatcaaaattgaaacgaatctggaaaactcgggatagaacagtaacttttaaatggtgattaaatccaataaatcaaagtgggattgaaagggaaaatcatgtagaggaaatgacgagggagagtagtggggaatcgatttttgcaatcaattggaggagagaacatatgatgaggtagatcgacatagcggtgacgttagggtttggcctggtgatgaaaaaactgagcagataaaaaacaacccttacagcctaatgacgaaaaaattggttagataaaaaaagaatccttattacgtgcgcacactcttacacatgtaaaagaacggtatataaaaaaataaggaaaaaa

SEQ ID NO: 45471 - DNA, 1027 bp, Oryza sativa
acgaaaaaacaaaaaatcacgaaaaaagaaaaatggacaaaaaaaacatggaaaccttgcgtatttttatattaggtatagatatagatatagatttgtgacatgtgaatttgccatatcattatatatctcaggctctatttagattccaacttttttctttaaacttccaacttttctgtcacatcgaactttcctatacacaatctttcaacttttctgtcacatcgttctaatttctttgaacttccaattttaacgtggaactaaacacagcctcgattctaattactgctataaaatttctactacgggtactattgggaagtgatggggttagaaagacttttagccccgataaacgtaagttagaatatgtaatatcccattcgtttcaaattatctgtaattctatcacatctcacgataacaaataagatgtgacacttacattgctaccccatttgctttgctcactgctttggaaaaataattactccctccatcccatccactaagaccaaaattaatttaaataacttcaattgagacactatgtacacattcttccaaaatgcatacatcgattaaaacaccatgtcatttagtacatcctagtatgcatatattctctcatgctgtattaattgtattccaataaaatccgtgttcatgcggttatatgatcatcaatttgagaaattttaaatttcactatatgatgatcaatttgggaaggagggtgtaggatgtacaactccaattagttaagactagccaataagatgtgtggctgcattaatgaaaagtagggagggaaaattagcttctgaaagtgctttggaatttggaatatagaatgacaactaatttgaatcagatatcgaaattcttccttcaaccgcaacaacatgaaaaattaataaaggggtgtttagatccatgggtgtaaagttttgacgtgtcacatcggatatacgaacacacatttgaagtattaaacgtagactaataacaaaacaaatta

SEQ ID NO: 45472 - DNA, 1185 bp, Oryza sativa
ctctttcttcttacccttccctctctcactttgctgcaacactgacaaaaagcaatgcacagacgctaggagctcgtgtgcgctggcgactaatttaccgtccgctcgcaccctctttcctcccttctctcgtccatgtcatcatccaatctgacgtgtagctcatatcgccagctcaatctaccttattaaacctgctcttagtatttgcatggctattatattcgtctgggacaagttatatattgatcgagcatgcgtgcgtgcgactctgccggccgttgccaagacaaatttcacggcgtccgcggctgcatacaccgtgctactactactttcgtctagtgcatcatcatagtcactcgagctgtgtgctgtgccaatgtgcagaggacggagtatactacaattatggtttagtaccggagaaattttatgatccttcgtaaagtatccataggtatctaaagtttacttttaaaattttaataactcgagatacctagcatctctagcatctaaagataccaaattttacgatagaaaatatggtatctcgcaaaattttattaagaatggtaaaattatccttactattgcgcaaagctttggttacctctcatcgtgtgtccctagcctgttaaaatttcaaacttgatatattcaatgtttagttttggcttttcatacagtttttttattgtttttaaattgctaagagcaaatataaaagttctacatatattttttgtatggttttttttagcggacgagggaagaagctttggttaccacataattctcaaggaataaaggaatgtaatgtctgtttagatgataggagtgatatctctgtcctctacagcaaacagggctgaatataacacgctaaaattggcaaaaacaaaaaaaaagctttaagaaagaggaaaatccagatcagatcgaccaatatcaccttactaggaaaactctggcccatgcgatgtcgcccaacaattctaccgaggaacaagatctggccagttcttttcaaccgaatggaccgattatctaattttatgataatatttaagaggatacagatacattaattattacaaaattggaaagtcttatatatatatatatatatatatatatatatatatatatatatatatatatatgattttgcaataattt

SEQ ID NO: 45473 - DNA, 2316 bp, Oryza sativa
aaaagcacttctccaccagtgtactacacatgttgtgaaccatgataatctcaggtctaaggattcaacagcaacactaaatgagatcactgatgacacaatacatatggctcttgcagtgtctcatgttgggtctatccaacaacatgttcaccaacatgtgtccatattattaatttggtatctctataccatgatccatgagacatgatcatcaattaatatatatgctgatcatataaacatatttgttccacatatgatatttgatcagaatcctttagaaatagtaacaaacaacataaagagtcccatgaaagaatcacatatagattaaccaataatgagttatctatttccaggaataatgtcggataaatatgtaaacatagtatgtgatacaatcatctttatgattgcctctaggacatatcactaacataaacccgtagcaagcagcgagcggcagcctccacgcgctactccgcgagcgctgcgaagctccggccgacgcggcagtccgcctcagtgccgagccgcggctccgccgcctcctccggcaatgcgtggagcgtcgcgaggctccatcacctccgaggccacgcgcgactccgccggtcgcgtgcggctccgagtctccgacaccctccactggctgcccgcgaccccgccgagtcgacgtcgcgaccgcgtgcggtccgtcgcctccgcggccacgcgcagctccgcacctgacgcacggctcggactcctccgccggctaacgtatagcgatgccgcgtgcgcatccgccgcctccaccggccacgagcggctcgagccgcggccactttgcgcttccgccggccgtatgcggcttcgtcgcgtcagcggccccgcgcggccggcttcgccgcctccgccggccgcgtgcgccgccggtcgcgcgtggcttcgccgcctccggtcaccggcgccggcctccgttggctccgccacgccggccttcgcaccgtaggcaatgccgcacccgccttggccaaggccgcctccgcaggagggccgtgtgcggttgcctggtctcatgacggccattgctgcgccacacatcagctgcacgaagtgggctcactcgtgcgcactcggcgccagcaggccctgagcaaagggaaataggcggcaggtatgcatgcaaatgcatggttgcatgcatggtcctgttcacgtatagattagaaaagaaaacaaacaaaaaaaagaaaggagaaaaggagggcgtacatatgggtccgcggcatgaccaccctcgtgggacgtagattctaatcactcgagtggatgtccactcatttagtgtatgttaactaaatgatcatgaatttttttttaaaaaaattacaagatagattaatatataatatatcactacataaacatgtaacttaaaattcaacttttataagttgtaaaaaaagtaacaaatcaaacttttgatttgttatttttgttacaacttgtagaagttgaatttaaatttgcatgtttgtggggtgatatattgtatatgaatctatcttgtcaaattttttaaattttttttatacccatttagttgacaagcaacaaataggtggatgtccacctaggtgattaaaagtgtttccccaccctcgtgcgatccacgccgcagcatgtagccgcatgcggcttcgcagctccgcctccgaggccccatgcgcctcgccaccaccgcggacaggcgaggatccgccggccacgtgcagccccgagtggttccgcctgccgtatgcggcttcgtcaccacctctgcggcgaccgcggtttgccgcccccgcacggccccgcttgcttccgccgatcgcgccagccggctccttccgctcggtgtgcgtgcggccccgccgcctccacagcctggcgcgcagctgcgcccttctcgaatggtcgcgcatgcgaatgcatggcactgttcacgtgattctctctctctctctccatatatatatatatatatatatatatatatatatatatatatatatatatatatatatatatatagtaaattataaagagtgctccactcgcagcaaggtccagggcggcgctgccacggccccgtgcggttccgccgagctccgccggacaagcacggccttgtacggccccgccgcggggccgcgtcatgtgagacctcccccctgcggcctcgccgacgcggcggttgggccgaaggccacgcatcccgagccttccggcagacctgagcatgggcacacgccatgcacggcctggtgatggcgctgtcccagccac

SEQ ID NO: 45474 - DNA, 1251 bp, Oryza sativa
gtagttaaatttataaacgatagccgatcggctagatgccgatgacatatcatttatctttgagccgatgtcatctgtgcgtcgatcggcagtcatgaataagtaaaaaaggactaaatctactcgatcggctgtagatattaacaatatatactccttatatcgatgtctacttaaatcaagtgattgggatagatcggtcatcatgccgagacagtataaatcacttagatcgaaatatatgtcaataacaagactatatatgtttatagcatagccgatcagatagatctagcatgtatcggctaatactccgatactactctatatcaagatattaaagcaagtataatatattgagcaaaagcctaacatacttagatacggcaatatcttaacataaagggcagatttaacatatcaataaggcatatagaacaaatgaagttaaatcagatacgatcggctgaaactccgatactattctaatcggcaactagaaggcaggctagagatcgatattctaagcacgacttacagatcaaactcaactgatgcaacattaagtataaaaagaagaacaatatctagacaatcaagccactagaaatttcatagaatgatagatatcttatataatctagatcaacgtcaagatctaacctaatcggctgtcttctgcatacagatattggcggatagtagtctagatggcgatattgctagagattatgtaagatatatgataatttgatgaattaaataaacaagattagagtgtcatgaagatggaagcactaatcctaagaacgcaatccatcacgacgaattttacctcttgttgaagatcgaaatcgatgcagctcaacccgaaagcaagaactcgtcgaaacaaaactaaagcaaaaagggtggcgatgcgccgaaattatgttgaatgtgtgtgttcaaaattacatagggctcggggtctatttatacccgaggattacaagatatgcccataccggacacaaccattatctctaacaaactctaagataccacaagtctttgcggcagacttttgcccacacttatctataaggaattcacataaaatattctaattaatagatacaattgcctttccaggactctatccatgtgtggcaatcatcttgaagtacattaacttgaacccgatgtcgcgcacaagtcgtattgtcggaatcggctatatcggcttatttagctcgactcagactcagc

SEQ ID NO: 45475 - DNA, 537 bp, Oryza sativa
gacgcagccgcgcggggccatggaggtggcggagccctgcgcgaccggcggaagcgacggaaccgcgtgcgccggcgtgggaccgtccggagccacgaacgaacggtggaggcgcgtgcgccggcggggccgcgccgagctatgtgcgggcggcggagccccgcgcaaccggtggaggcgacagagtcggcggagccctacgcgaacggcggaagcgacagagccgcccgtggccgcggaggcgacggagccttgcgcggttgcgacgtcgactcagcggaggcgctcgtgggcgacggagccgcgacggccggagccccgcggcgctcgtggaggcgacgatgccggctggccgaggcggcgacagatgcacggagttcccttgccgcgccgggcgcggtgaccagcggccgaagcttggcgcgctagcggcagctccggagcgttccgagccacgcggggctagcggaggcggcggttcccgagtgtgctggcagagcaggaggcggagtaccccggcgcgcgcgttgcatggcg

SEQ ID NO: 45476 - DNA, 544 bp, Oryza sativa
ttctcctctttcccgggactctttacccattggcatggtataaccttttttgctccttacccattcggctgcagctatttcagaatcatcttcttcgtcatccgacccatacatatatggacaaacgtgattaactttctttgagcttttcctgacttccgccgacctatgctcaagcaaggttaccttctgtatcagatgcgataagctatcgaagtcttcggatgaaaatttctccctgattggaggaatcataccctggaaggccaaatcggctaactgagcatcagtcagactcaagctaaagcacttgttccgcatctctctgaacctctgaatatactcgtgcacaggctcatcatgccgctgcttgatcgctgtcaggtcggataacttcatctcatggaccccactgtagaaatagctgtggaattgcttctccaaatcggcccaactattgatcgacccatatggcaaagaggaaaaccaagtaaaagctgatccggacagagataaccggaacaacctaactctcaaggtgtct

SEQ ID NO: 45477 - DNA, 942 bp, Oryza sativa
caacaccttaccaatcacatcatatgtgactcttgtgctgtcggaatgacatctccatgtccaatcctacatatgcctcaaggtccaaaaccgttttgataaccttgtcaagtaaaccgataatctccgcatatagatgtctaacatctatcctattttatcatgataaaaagtgagactctgctatggcaaacccatcacttatgatcacaatcgtaataggtgcaattattggaagagcataaattacacttaatttttgagggaatctatcctaccatgtcatatcctgaaaaggtcacggggtacacagatctcatctatgattcgccatatgaaaaccttaacggtgtaatcaaattgtgccgaaactgagtcaatctcattgtctcgtttttctcaatgcgtgcggttccagtggacatcggactatccgatgaacacaatcatgctcggccgtggtgagtaccagacattctagtgaagtcaccaacacatatactgattgatctcatcaacccatgtgcctatcggtccatcttatgttccgatcatctaagtactcatctactacaaaatagatctcatctactacgcccgcatatcaactatatgcaatgatctaaatcataaattatacaaggcggctctgataccactgttaggatacgcgaaggctacgatagcataaatcaaaattttctaccacgtaaactaggaaccatgcaagtattagatcatagatcattaccactcgacgtgttgcgcagcggaagaaagcgctaagaaggcaaaggaaccctcgcgatgtagcgcgcgtcgatgtagaggaagttgtcgatcgcaccaggtcgaccttctccttcccgtgcattctcctcgccgtagtaccacgccgatcagcaccgcaatgcagcggcgcctctactgtacagagacgga

SEQ ID NO: 45478 - DNA, 1390 bp, Oryza sativa
ccatgtattcaataaggcagtaaatgaaatgaattgaatttgattcctctcctgttgttcttcttcttcctttgtctccttctattctgcactagattccccagtctctttccatattatattgagttctcattgtattcgatcttgtggtagtttgtgtgattcgatctctcacgaacttgggtcataacaattggtatcaaagccgttccgatccatcgtctcttggtctgagcagtagatccaagcaaggttggtgtttatccttagcgccgtgattctgttccatggtttgagcagcgagaagatgagtgaagacggtggttgtcatgctcatggagacggtcatgtatgctttgaacaacacggcaagcaccacaaagggtaacaattttggtgaagctttgaaaagttagatgtcatgcttcacaaaggaggccatgtatgctcgaattttggtgaagctttgaaaagttagatgtcaatttggaccataccctcggttgtgcatcctcttccccagccggcctccgatgtaaattaatgcttcaccagcatcctcggatatcaccagtaatgtgaatggttgcaggagaaagaaagattgaggagattcagagagaatatgatttaggggggcaacgtagatatttcacgtcatccgttcacactgggacacctaagaaaacaatattaagaatttagaggttatatctccattgacaaaaacatctaaggccaaacctaaaaatggacattttcaaaagttgtcggtttttattgcgacaactagtggaaattcccccttggctacaacatttccactgttctcttttttttcttcttctttcctctctggctcagcttgctcggcacatctgttattttaatattttttaattcccagcttgcatcagtaaccacggcagcaacaaacgaagagtagaccaggcagcaggcagcagagcacaaagcagcagcagtagaaaatagcaagcaggagcagggatgggcagagcaaaagctagcgggggtggaagccagctagagcagatcgatccatctctttacgcctcttttttatccgttctccctttatttatttttgagagtgaatcgaacattagtctagatatcttaaccatgtactttcgtatcggatcagggacagtggcggacctaagatttttttatcttgggtgtgcccacgtaaaccttagtatacaaattgagtatttcattaaggttttaatctgaagatagaacggtactagagaggtgaaaaactacttgatgaccttatctaggctatgtttagttccacgataaaattgaaaatttaaagaaattaaaacgatgtgacgaaaaaattaaaagtttatgtgtgtag

SEQ ID NO: 45479 - DNA, 1827 bp, Oryza sativa
ttccaaggcctgattaaagagggaagcaaatgcccggtttatgggagcttctcccagctgcagcttttcccaaaagctgcttctgttagaagctgcctcaaacagtccacagcttctgagaatctgtagttatagattctaaaaaatgaactaagaagccaaaagctggagaagctgggtttcagagcttttccacattctcagaagctggctaccaaacagctgcttctcagaatctaaagctcccccaaacaggcccaaagcagacttcgacagagagaaagaggctgctggatcggctgggctgaaggagagagatgggccatattaagacctgagctttggaaagtattttaattacttttccaactaaattaatcactgaaatgatatttgaattgttaaaaatacttcaaatactgaaatatgttcaagaaaaatctcgcaactacttggacacttagagtatttaacaaacttaagataagatcatttaatgactaatttaatatttaaataattcctaaaatgttctttgtattattaaaattagtaattgagctctaaaaaatccgagaaaatttcagagagtataattaaccatgtagaatttaataaaatttaatccatccatgctttatatttaggaaattttatttcccacatttaacttcacttgtttattaatgtacatttaatataaattttaataataatttattaaataatttataaatcctaatacgaaaataaggatgtgacaaagactgctagaagaaatcacaagaagaaagatagtgacttgactcctacaaatgaagggattcatcttacacgcagtgtggagattatgggtagttgggtaccacatacccacatggcacgtatatccgactggttataggtgatagcttgtacagatagaatatgtttaggaaatgactcgggaattatgttaacttgtatgtcaagaaaatatccaatagtgccagttagttacagttgtaatacatattcgttagcctagtacgtaagccatatgggctgtacattgtaatcttggctcctccccctatataaggtcgggtccaagtgtacctaggggcataacttttctcccagatcatcagatcaataatacactcggtggaataattccccggctgtataaacctttgcctcctacgtcctaacctatccacttttccagcttgattgctaccccttttagtattgccggaatcttgttttgacagttggcgcgtcaggtaggggttgcgccatgtttttcgccgactagtgcgatgggattcatttcgggcatcaccgacttcgctttccctcccgggcagacgtgctggttcggcggcccatggacctcatcagccacccgtacatgcatgcaaagaagacatcgtacgacagatcaatccatgattataaatcaagctaataatattatatagattgtgaaagaagttcttctgtatatgtgcagaatgaaggatcccttaaagcaaattgtttttgattggttgcaagctttatagttttatttaactccttcgactgtaactttgtaaatattttttgagttatataaaattacactgctcggcaaagccctggcagtatttcaggtcaaaaaagatttcatatagattgaaacgacaaaccaatcgacgtcagagattagaatcatcgatctcattgagattgccctcgagcaaaaacaatgcctttgattcctgaagttgtttccattgcacttcttgatggataattcgacgcttcccctacctgtcgcgccaactgtttaaactggaa

SEQ ID NO: 45480 - DNA, 599 bp, Oryza sativa
gttcaaacactataagcaaacttaagatccttttacattataaaacggagggagtagtacgatggttgagagaccaagagctgcacgctaactgctgccggtccattcgagaccatttacatatgatggtcttgtgtggaggagaatggccctgcaggcagaaattccggtgcttgctgacgtcgatcaacagtataccactcgtggattcatctgccgaattccctcatctccctatcccaactgccccgttctgacgttcattccagtagcgttcaattagtattagacttccctatgctcactcaggattaagactccatgtacttcttccctgtgtaaaaaaaaaatccaattccatagatgaataatctgaacatgtgttcatcttcagagttagatatttttgtgacagagggagtagaagtactacaagtactaatcaatacacgcacatttttttttagatcgacattcgaaaggagtactaaaaatatatataaataaatgaaactattcttcgatcaaaacaatatttaaggtcagcaaaaaatgacttgtaggataatataatgcaggttagtcaggtatacgtacgt

SEQ ID NO: 45481 - DNA, 575 bp, Oryza sativa
tttgctcgcttgacatctattctttcctctcaggaaccaccaaggagatgtcaatatagagaatggatagacactagaagggttctaactccacctagccatgttgtgcagcttgaactaccagagcaatacagggttactaaagcgcggtttgagagaggagagggatcctcacgtaggggttagctattatcggacaacttggcatattgaaatttctactgtcatgcttccttgtcccattactgcatcgtcgttgtgttcaactattgcactacctccctcctagttcgaatctaatatcatctatgtaaccgcaatggaaatagttgtatcatgttcaaattgtactactatttcttcatgttacataattctccttgtttaagtccatataatgtttctacgaccgagactgcgataggcctatattaattatccgagtactgatacgtcgaataaggtacaaaataatacctcacttaacatatgaaattgcgaaacaaccaacttcaatacatttttataacaatattaacaagttttaccaataaatacttctttatttattatta

SEQ ID NO: 45482 - DNA, 935 bp, Oryza sativa
actggcactactggatatttccttgacatacaagttaacataattcccgagtcatttcctaaacatattctatctatacaagctattacctataaccagtcggatatacgtgccatgtgggtatgtggtacccaactacccataatctccactctgtgtgtaagatgcatcccttcatttgtaggagtcaagtcactatctttcttcttgtgatttcttagagcagtctttgtcacatccttattttcgtattaggatttataaattatttaataaattattattaaaatttatattaaatgtacattaataaacaagtgaagttaaatgtgggaaataaaatttcctaaatataaagcatggatggattaaattttattaaattctacatggttaattatactctctgaaattttctcggattttttagagctcaattactaattttaataatacaaagaacattttaggaattatttaaatattaaattagtcattaaatgatcttatcttaagtttgttaaatactctaagtgtccaagtagttgcgagatttttcttgaacatatttcagtatttgaagtatttttaacaattcaaatatcatttcagtgattaatttagttggaaaagtaattaaaatcctttcgaaagctcaggtcttaatctggcccatctctccccttcagcccagccgatccagcagcctctttctctctgtcgaagtctgctttggggctatttgggggagctttagattctgagaagcagctgtttggtagccagcttctgagaatgtggaaaagctctgaaacccatcttctccagcttttggcttcttagttcatttttcagaatctgtaactacagattctcagaagctatggacagtttgaggcagcttctaacagaagcagcttttgggaaaagctgca

SEQ ID NO: 45483 - DNA, 667 bp, Oryza sativa
ccaaatatgtatttatcccacggtaccaatacaagaccaaaacgaccataataccgttacttgctgagatgatcaatgtttttttattccttgctagcaggttgtaatgcaattgtcacatatttgtagcttactacctccaaaatgtttactattcggtataagtgttgtatttggtgcttactacaccctcatcccaaaataagttcatgtttcacacatctcacaccaatacaaaacaaaaagaccacaatacaatagttttctcaaatgacaatgaaattcttgctaaaagaattaatgtttttttattccctactagcaggttgtagtcctattgctctatatgtgttgcttagtacctccgtatgtttactatttggtataagggatatatttattgcttattacaccccgctcgtaaaataagtttatttctcacacatcccacacatagcaaccactatctatttaatttatttatctattttttcttctcaaccaatcacaaacttcatccaattatttttgttacttctttaatatccatgcccacctaatatttgaacggagaaagtatctattttgtgacaaagacagtatccttttcaagagttcattctggaagccctatgccttatcctatataaagcagctagctagctag

SEQ ID NO: 45484 - DNA, 1332 bp, Oryza sativa
aaaacgcgtgaccgctccaaaacgcatgaccgacgatcctacaaaacggttgcgcgggacctcgacggtcccgcaggttcaaaattcgggagcgaggcagccagtgatttttaacgttgtttagcactatggacactgtgtagccctgtttgacacagttttgtaaggcggtaccgcaggttcaatgtgcggaactggccataaacaggtctaaacagtgatgtaaagtggcaaacagtacccgaaacattgtcaaacagtgccgactcagtaaataaatcgctggccagttcgctcccgcgttttgggaccatcgcggtcccgcgcgaccgttccgtgggacatcggtcccgtgttttagaactgcgggaccatcgcggtcccacgtttccgttcctcgaagcgggtatatttttgcaaatctcgtgcaggtatataaacgtaaattattgaaaaaatatgtatatttgtgtttttttcactttttcaaagtacataattagatatagaagtattaattatataatttgtcatgtgaatattgccgttgattttacagctaaaatatgccactcttactatagaagtcaagacttagttgaagttgttttgggaatctgcacgtcaatataccaaatgagaaacattggagggagtaattgcccatgctacaaagaactattttcatgaacaacccctatattttaataggcggcctaagtaaagacctacatatgaaaaagcgtaggctctccgatcaaggctctactgtgagagtcaattttcataggcaagcttcctaggaggcgcgtctaaaaataggattattcttttaggtgcccgtcttaaagacccggtcgataaaatcgtatttttcatagaaaatacccaaaattgtctataaaaacaatcctagttggcctcataataggaccacgtgtgaaaaggcgaagccaaaataaatacgcccatcaatctgcccgacctctagtcactctttatgtcgcatcattccgtccttattccttaattatgtcatctcatattgattgcgatgatgcttgtattggatatcaagatagggtttctagaattttattattttggatttttttttgttttttgagcaaaaatcttatgcactcgagcatcttaacgtgtcagccagtgaaaaccagttttttgtgtgtggttttgatgcctatctgggaaaattcggatcttcgtaaacaagttgcctgcgtggcctaggcagccggagcgtgtttgacgttaaacatgtgccggtattagtcccaccatttttgtttattgctcactattgaccatgca

SEQ ID NO: 45485 - DNA, 662 bp, Oryza sativa
catgagctgctgcccggtagtcgagatgtcatggcacagggccggtgtcctgctgctaggggctcaaccttggttgcccgtctcgggaatcccggccgtagccagggttaggtcggtactcttgtttatggctaggatgggttgggaactatgtcacgtctttcgtccgtatgccgtggtggtatgtggcgcgttgttagacgtgaggaagacgtgtcttgtggataaagatttacacctctgatcagagtataatctattcgaatagccgcgccctcggttatgggcaagcctagcaatgtacccaagttagtggtttacttcttaaaatttgcttaacaactataatgtggaatggttggcctgggttggcttgggacaagctgggacctagtcgggttgtcagttcggtctgaatcatcgtaggccttgggttaaggcaggttcgtgagggttcacggccttgattaataacagtgtagctctaggatcgtctttataaaatggctttgggcaactaagtgacttttaaatgctgtttactgcaaaacttaacccctatattattaccccttgtacccccttgcattaatcatgcatctcccggtgtggcttgctgaatactgtggttgtactcattcttgctctatcttccctcccct

SEQ ID NO: 45486 - DNA, 658 bp, Oryza sativa
aggaagtatatatatgctattcgtctcgtacattttttttctcggactgttaacgcattaaagattgcggcacaaagaaaatttattagtgtcatttctcgaaccacacccactgataataattatctcgttgaatctattgggtatatatctgtcttgggctgttcgtgtgtcagattatatatactacattcgttttttacattcgttttttaaatagatgatgccatcgaccctttttatatgtttattattcgttttattcaaaaatttacgtaataataatttattttgttgtaagttattttattagttaaagtactttaagcatgcactactaaaaagggatttttttcaaactgtcaaaatcaattgcggttcgaccagccgtctgtccgaaatggtccgtgaaatagcaatttttccatatggctcacccgcatgcgggcatttaagccattctcatgtgaaaatggaaaatcacaaatattaatctaaaaatcaaaacctgaccctaatcctaaccctagtcggccaccaccgtcgtcgtcgacggtagtggatctgcgcgcgtggaggccggatctgcgccgccgccgccatctgcacctgtcgccggagcccgtgcctgccaccacaatgccatctgccgcgcccg

SEQ ID NO: 45487 - DNA, 693 bp, Oryza sativa
aatacgatacccttggaatactcttgggtgaaatgctacaatggtatatacgtgtgcttgcggataaactctgtaaccataatatttctgcagtaatgtagtaagaaataccaacacacggcaataaagtaaaatttaagaaattgtgcaactctaaatttaccatcaccacaagtatatcactagcatacactgtatttgtttttgaccctatcggcattctcattttttttcaataatttctcttcaattgagctgaaagtgtcctccagtaaattactagttattcaagtatcttttagccatgacacgttttaacagtatctaatttcaaattacacaatgtttgagtgtcctgtagtaaattttgccatgacagaatcaacacatagcgaagagaacgaatattttttttttattccttgctagtatattgtactactattttgtgacatttcttgcttagtacagaccttttagtatttattattggaaaaagtatgaattaccccctccctccgaaccacaaaaccagacatattaaacctcaaactattgaaaccggacaaattaccatcctattagattcggagcggtttcaatcctacaaggcgttgacgtggaaatccaatcagcaaaaaaaaaaaacagggctcacaagtcatattaattcccatttaccggcactgttgg

SEQ ID NO: 45488 - DNA, 625 bp, Oryza sativa
ccgtggtggtatgtggcacgtggttacacgtgaggaagatgtgtcttgtgggtaaagatgtacacctgtgatcagagtataacctattcgaatagccgcgccctcggttatgggcaagccgagcaatgtacccaagttagtgttttaatccttaaaacctgcttaacaattaaaatgtggaatggttggcctgggttggcttgggacgagctgggacccagggtcgggttgccagtttggtctgaatcatcgtaggccttgggttaaggcaggttcgtgtgggttcacggccttgattaataatcttgtatagctctaggatcatatttacaatatagctttgagcaactaagtgtcttttagtgctgtttactacaaaccctaaccccttatatgataacccccttgtactcccttacatttattctgcacttgtgggtgtgtcttgttgagtacggtggttgtactcagtcttgctcaatttttcccaaacccagaagaggagtttctggaagatgaaggctttggtgtctagctcgtgcctgccgtcaagcgcctgtggtcgtcgccctagtctttcgctgtttcccgtttgtctttgtgtgctgggccttcgccgcccatg

SEQ ID NO: 45489 - DNA, 692 bp, Oryza sativa
ccgtcctggttccggccggacggagtagttctccgcgactttaaaaaagataggttagcaattgagatatatatatatatatatatatatatatatatatatatatatattgcagtcttaagctgtgtaggtttgcaattctaagcctcggctaaggctccgcaagttgctccaaattccgagcctctctacggtaggctctgcgttcggagcccgtggtaggctgaattcggagccactcaaaaaaaaaaaaaactacgtacgctcatgcacatcaacccgtgcgttcaacttcggctggcctccggcgcggggcatgcctccacatcgagctccggcttcgaccttgtgaccccgctgatgcgcgataggccgtggctccttgccggctccacccaacggcgccgggagctagcgccgcgccgcgcttcggcctcgcgtggtgggccttgaggcgccgacaatgctccgcgtggactcggcctcgtcgcgccgccgctgttccatgcttcggccatggcgaaacagcgtcaggccccacgacgccgcttccgtgtcgtgcttagactgcttcgcggaggcttcgtccttgtgcgccgccgctgaacaacggcgcggctactagcgccctcaggccgtcagaagcgcaagaaaaaccagaaagaaacatataggtggtgcgcggcacagca

SEQ ID NO: 45490 - DNA, 1568 bp, Oryza sativa
gatccggtaagcacctttgttagttaatttcaccattagttgtgatttgttttcatatatgtctagtcaaggcagccgtggcggcctatcgctactaccagatctccaggatggtggtgtgtactgttcttagtttatatatgaaattctgaatcacagatccacactcagatgagtatacactatttcttattcttcttccttttaatctctgtacgtacacgtagataaaaattaatcctagagttcagaatgaaaaatactgtgatttggatgaaaaaaatgtcatcaacagatggtagattaattgtcctttgcatgcgtgaatgttgttccaggatagtggtttgtgatggatttctttagttccttgaaatttgaatgaataagcccctaatctttttgttgcttgcaggtggtgtccggccgcgccggccgtctgcagaacatgtcgactcaacgccacaatccaacggcaccagcggagagaatatacacgcaaggggaaggatccttgtttgacaaactgtgatttggatgtacattattacttttcaatctgcgattcagcatgttcaatttgtgttcttgatcatgttttctcgtctgtgaggctagttcttttggaactacatatatctttgagaatatactaaaacttttggatcataatacgtgcatgcagcacgaacactgagttctgcgacagggtaaaagcaagtaataaaaatagcatatatactgctactatcttaaaaaatagcatatactgctactgctaaaaatggtatatactgcaattatcttaacaaaagtataaacctgcaccttaaaaaggtatatgttactaccaccttaaaaagaagtatatatgtatattgctaccacctaggaaacagtatatatactagtcttaactgaagcacagtacttaaactactttggtgaagcacagtactaagtaaaaaaaagaagtatatactattaaaaaaaataagtatatactgtcataaaaaacacgtatgtgggatatttatctgtatatatttctctacatcaaaatgaagtatatggcagctgcctataaactgctgcctactacaaataaaaaaaaacagtatataccgttgcttactaaaaacaaaaacagtatatactttcatgcagaaatggcagcatatacatagctaggaaatatactgcacgaaaaaagagtataaactgttacctactactaataataaaaaacagtttactaaaaacagtatataccctatatgggctcttctggccccagcttcctccaggagacttccatgtgggcccctaaatcagtgacatacattctaggcccatttgtgattgttaaattggacttttgggccttctcatgcaattgcagatcaccagcagactttcgactgattgattgatatatttccacatccttctcttcatttatgagtgcttctcctgcatacatgttagtagcatagcatatagtggaagtaattattttatttgggaattatgcattgcaaccataggtagtcttcatatattggata

SEQ ID NO: 45491 - DNA, 559 bp, Oryza sativa
aaattatgtgtttctgtagtaacaggattctaatataattggtgacaaagtaatttcagttatttctagtatactcaccatattgcgtgcttggtgagctcggcgtcaccacggacatttccatgcctacttaatttcattgacgctgcttcggtgtaacactaatctatctgctcatccatgttgctcagaagtgcatttgaaatccccccacaaatttttgatgcaaaatttgtgtattcaagcctagagctgggacatgggctgtgcattctggggccgaggcaggcccagggaaggcagcccggcacaacgaaaaacactatagcctcaggccgatttgaacctagccgggcagttgggccgtgcctgtgcctgaaaatttggcacgatggctgtcatgtcaaagtcctattttggctgcactatgatctggaatcatagttgtgaggatcagaccatgcgtgaaaccgttgaagccctcgatttactgttcgctcagtacgaccggttctaccactcgttcaacacgactcaaatatactagcactaatggccg

SEQ ID NO: 45492 - DNA, 704 bp, Oryza sativa
caacaagtataataaataaaataatgtacttccacttagtaggtagctagagagcatgcgtagacccagaggttggtgcttaggatggtggcggccacctcggcgaccttcacctggttgccctcgaagaaggcagcgtaggggaggagatggtcatagcagaagctggagccgtcgcggtcggcctgcagggcggtgtcgcagcaggagcggacgaacgctgccgcgtccgcggagggcgcctcccctggcgccgccgcaggtggcagcaccaccactggcttctcctccttcgcagcggccgcacatggtggggataagccgccggcgctgacgaccatcaacaccacgaggacggtggccatgctcgagctcgacctgctcatttctgtatattatttatctctctccctctctctctctctctctctctctgcttgtttcgttactacaggatgaattacttcataacaacgaggtacaatttatactagtaggctcgattggtcgttaactaattaaccacaacctttctttctaatttattcaatggctgttctagcatcacggcatgtctttttggtgttgtgatgtagtgccatgcttgcaattataaactactatattaatgcaactaattgcccatatatagacagcctgctcgctttttgtttcatatccattcacttaggcgcctagcattg

SEQ ID NO: 45493 - DNA, 1457 bp, Oryza sativa
tcttcttcttcctttgtctccttctattctgcactagattccccagtctctttccatattatattgagttctcattgtattcgatcttgtggtagtttgtgtgattcgatctctcacgaacttgggtcataacaattggtatcaaagccgttccgatccatcgtctcttggtctgagcagtagatccaagcaaggttggtgtttatccttagcgccgtgattctgttccatggtttgagcagcgagaagatgagtgaagacggtggttgtcatgctcatggagacggtcatgtatgctttgaacaacacggcaagcaccacaaagggtaacaattttggtgaagctttgaaaagttagatgtcatgcttcacaaaggaggccatgtatgctcgaattttggtgaagctttgaaaagttagatgtcaatttggaccataccctcggttgtgcatcctcttccccagccggcctccgatgtaaattaatgcttcaccagcatcctcggatatcaccagtaatgtgaatggttgcaggagaaagaaagattgaggagattcagagagaatatgatttaggggggcaacgtagatatttcacgtcatccgttcacactgggacacctaagaaaacaatattaagaatttagaggttatatctccattgacaaaaacatctaaggccaaacctaaaaatggacattttcaaaagttgtcggtttttattgcgacaactagtggaaattcccccttggctacaacatttccactgttctcttttttttcttcttctttcctctctggctcagttgctcggcacatctgttattttaatattttttaattcccagcttgcatcagtaaccacggcagcaacaaacgaagagtagaccaggcagcaggcagcagagcacaaagcagcagcagtagaaaatagcaagcaggagcagggatgggcagagcaaaagctagcgggggtggaagccagctagagcagatcgatccatctctttacgcctcttttttatccgttctccctttatttatttttgagagtgaatcgaacattagtctagatatcttaaccatgtactttcgtatcggatcagggacagtggcggacctaagatttttttatcttgggtgtgcccacgtaaaccttagtatacaaattgagtatttcattaaggttttaatctgaagatagaacggtactagagaggtgaaaaactacttgatgaccttatctaggctatgtttagttccacgataaaattgaaaatttaaagaaattaaaacgatgtgacgaaaaaattaaaagtttatgtgtgtaggtaagtttggtgtgacaaaaagttagaggaagaaaaaagttggaatctaaacaggaccctaagtcttgggacaaactccaagccccagttgcttgtcctggctgccaatgacccaatggccttagg

SEQ ID NO: 45494 - DNA, 1291 bp, Oryza sativa
acaagttttctgaaaaccctacttgcaaattgtctcctctcgcccttcggcatttctttgtgaaacggtttttcaaaattctcctcccaatctctccaattcttttagttgtcaaacctagaggaccagctgtcagcttcatgtctgttcggaagtcaagtcaattcgagcctcaagcttcgtgcaaggagtgagaagatcagttcagagtcgtcgttctgcgaagatcaagtggagttttctcggagatgacctaaacccaatctttcccagaagagtagttccgttagctttctagatcgtgtgttgtttgcttgtgtgtaggggtatggtttgcatcattggtggggatgcgaccatactaggttgtttgcttaagcaacttgaagaataaaagtctactcacaacatatcagtaggcaagtggtttagtaccttatctttagcaacccctctcttccacctctcttccgtcctggcagcggatggtcagtgtcagagataagatcaattaaagtcaccaatcaatggttcagttgaaagctacaaggtatcccagtgccagaagaaccctgctcgtgatcaacatttggtgtccaagattagatgatggatgtattgatgcgggagatgcaaagctcgatgcaaggtcaagtgtagcggaaagaactccagcagtagtgtgttgcagtcaagagtcagtgtgtccatgagctaaatgagagtcacttttatgtggaatttcctatcatcaactaaggcttaagttccaaatcttgtcgggatgaaagtgcatcgccattgcttcaatttgatggaccgatgaagtttcagtcttcaaagtcagggcatctgtaaatccgagaaatgttggtcatttttttcaaggacaatagttcaaaagttctcagtcaggcgaaagtaagactacccactgtaaggggggtaggtctcagagatgagttttggtttacctcgtcggcatttcacttgaatgttcaacccagtgcagcaatttggttagtaattaaaggagtccgttgcgagccactagcagagtctcccaatctcaagtcaacaggttcaattctaatgtacacccttgaggccaggtcaacagttcagcttagagaagtagcatcgaggatggttgcagttcagacgaaagacaggtcaagcaggttttcctggaattacttgttatttgaattgggaccagtcgaagcggacatagggtaaatgatttataaatgccagattccattttcatcctcttatagccagcgtggtg

SEQ ID NO: 45495 - DNA, 1591 bp, Oryza sativa
agctttttagcagacctgccccttggcttccctatgcccattcttggatccatctgcaagtctttggtcaccttgtcctacagcaacctatagctttgtcttctgtatgggcgggcatcttaagtgatacacctgggaaaaaccatctctattccaactccttttatattctccactcccatctctctctttctcccactcctacctaccctggccactccccctctctcccccactcctcactccggccacctcctctccctacctcccgcaacagggcatcttaagtgatacacctggaaaaaaccatctctattccaactccttttatattctccactcccatctctctctttctcccactcctacctaccctggccactccccctctctcccccactcctcactccggccacctcctctccctacctcccgcaacaacaggtgtggtcgacggcggtgcccccctccgctctcccttgcgcggagttgatggcgtgctcgagtgggaggtagcgggcgcggcagatggcattgtggtggcaggcacgggctccggcgacaggtgcagatggcggcggcggcgcagatccggcctccacgcgcgcagatccactaccgtcgacgacgacggtggtggccgactagggttaggattagggtcaggttttgatttttagattaatatttgtgattttccattttcacatgagaatggcttaaatgcccgcatgcgggtgagccatatggaaaaattgctatttcacggaccatttcggacagacggctggtcgaaccgcaattgattttgacagtttgaaaaaaatccctttttagtagtgcatgcttaaagtactttaactaataaaataacttacaacaaaataaattattattacgtaaatttttgaataaaacgaataataaacatataaaaagggtcgatggcatcatctatttaaaaaacgaatgtaaaaaacgaatgtagtatatataatctgacacacgaacagcccaagacagatatatacccaatagattcaacgagataattattatcagtgggtgtggttcgagaaatgacactaataaattttctttgtgccgcaatctttaatgcgttaacagtccgagaaaaaaaatgtacgagacgaatagcatatatatacttcctccgtccgtacatagtataagggattttgagtttttttttattgtttcatcactagtcttatttaaaaaatttgtacaaatataaaaaacgaaaagttatgcttaaattactttagataataaagtaagtaaaaaaataaataataattctaaaactttttaaataagacgagtgattaaatagtataaaaaacataaaatattttatattatgagacggagaaagtatatgacaaggtaccacgctatcgctacctactatatatacccagcatgaaaatgtcgtgagtctctctctctctctattggaatctttctactactggtagataaacaagtctttaatacgctggccttctactgatcaagaacaaatgaatcagaatctgacaaggttgccagaaataaaaataagcag

SEQ ID NO: 45496 - DNA, 2072 bp, Oryza sativa
gatgaatccacgagtggtatactgttgatcgacgtcagcaagcaccggaatttctgcctgcagggccattctcctccacacaagaccatcatatgtaaatggtctcgaatggaccggcagcagttagcgtgcagctcttggtctctcaaccatcgtactactccctccgttttataatgtaaaaggatcttaagtttgcttatagtgtttgaacattcgtcttattcaaaaaaattttagaattattatttacttttttatgacttactttattatccaaagtactttacgcataacttttcgttttttatatttgcataaactttttgaataaaacgagtggtcaaacactataggcaaaaactcaaaatcccttatattaaggacggagggagctaataactaattagcactgtacttgttttggaagactcagcgtacgtgcttcatgtttatcatctgccagaatctagcggcatctttttccttgcttaccacgagcacgtactgtacgttttattttttaaaaaatcatgtagaagtccttttcaaaatcaaatgaactaatttttaaaatttctaacagttaatatttaattaatcatgcactactagcttccctcttgtttaatttcatttggcaccgacttatcaaatcctacggctctatcaaactaagggtatcaacaatgtattatttaccaactactccctccgtccaaaaaaaacgaatctataattagatgtgacacatctcagtacaacaccctcattttacataccttcagtacaaatctggacagaacaatacatcccttataccaaataataaatattgtagtacataccttctaaaataagttcattttacacattccacctaccaatgtataaccaacacaactagaatacccttactttcttaaaacccaatgccattattccttactaagagtaacaatgcttttttattccttcctatgaggttgtagtgctattactacctgatattagttgcttagtaccttcacaatgtttactaattggtactataagagatgtattttcgcttactatacccttgtcccaaatatgtatttatcccacggtaccaatacaagaccaaaacgaccataataccgttacttgctgagatgatcaatgtttttttattccttgctagcaggttgtaatgcaattgtcacatatttgtagcttactacctccaaaatgtttactattcggtataagtgttgtatttggtgcttactacaccctcatcccaaaataagttcatgtttcacacatctcacaccaatacaaaacaaaaagaccacaatacaatagttttctcaaatgacaatgaaattcttgctaaaagaattaatgtttttttattccctactagcaggttgtagtcctattgctctatatgtgttgcttagtacctccgtatgtttactatttggtataagggatatatttattgcttattacaccccgctcgtaaaataagtttatttctcacacatcccacacatagcaaccactatctatttaatttatttatctattttttcttctcaaccaatcacaaacttcatccaattatttttgttacttctttaatatccatgcccacctaatatttgaacggagaaagtatctattttgtgacaaagacagtatccttttcaagagttcattctggaagccctatgccttatcctatataaagcagctagctagctagctaaagcaaccatcagactaccacactacaatagtatcagtgaactgctagctgttgccctcccaagggaaatatactagtatgtctacttccatccctctccctttcttcttctctcatggtgttgtgcatgctaggacaggccatcctccaatctggccgccggttgggctcctttctgctggtgccccggcaaaagtctccttccgacgacaaagcaatgcgcatcgacatgctgcacaagttgtgtccacacaatcaatcactcctgcgaaggaggtgtctagctttgagccctctgtgtggggggacttcttta

SEQ ID NO: 45497 - DNA, 503 bp, Oryza sativa
atgtcccacggaacggtcgcgcgggcccgcaatggtcccaaaacgcgggagcgaactggccagcgatttatttactgagtcggcactgtttgacaatgtttcgggtactgtttgccactttacatcactgtttagacctgtttatggccagttccgcacattgaacctgcggtaccgccttacaaaactgtgtcaaacagggctacacagtgtccatagtgctaaacaacgttaaaaatcactggctgcctcgctcccgaattttgaacctgcgggaccgtcgaggtcccgcgcaaccgttttgtaggatcgtcggtcatgcgttttggagcggtcacgcgttttagagctgcgggaccatcacaggcccgcgtttccgtcccgatatttttgcaaatcgtctgatgtagatatataaatgtaagttattaaaaaaaataagtatattagcaaattttttttctttaaaaagtttgcaagcactcattgtagaacggcacata

SEQ ID NO: 45498 - DNA, 723 bp, Oryza sativa
tgtatttagtagatcaatgaatgatttgatctaaaagaagtataactgtgtaccaattagcacactctccatttttttttctgctgatctatgcattatgtttatggaactaaataattaatagaaattttagcacaactctcaaaccccaaatttttgaacaacgggattttattataagctataaaatctctggcagaggtaagatggagaactgtgattacataccgtcaaataaaagagtttacactatcaaactatatggggagagtttttttttttaccgcccatcaaaactttggtacctcgcaggagcagacaagtggccagcatcgtatcaagaatttgttcgcaggcagggctagctagagattacggtgtcgatgcgggcacgcgaggacgagaagattgaaaggcatcgatatacaagtgctcatttgtgcgagggagagggcttgagttcgtttccaatcgtgcccccatcaattcgactgttcaatggcttctggtaccttgaggtactatctgttggaccatagcaaaccttgtatagggaacatctcatattaagaatttattaacacacacaacacaagtgcatatttcacaacgccaagaaggataatggaggcatagccacacttgtgtagttatcattcaatcttattccttccaggacgacaatggcggtgtctcggagtccctctaggtggtgaggaagct

SEQ ID NO: 45499 - DNA, 900 bp, Oryza sativa
attctgataggggtctgaataggagtcctacgggccttgaaggcccgagtcatggatcctatatattcgtgaggggtgtgactggggaggtattgaatcacgtgagaaaccctagccgctactctccttcccgagaaaaaccctagccgcgcgcgggtgctagcgcatctgcgcgtggcgttccgtctctgtacagtagaggcgccgctgcattgcggtgctgatcggcgtggtactacggcgaggagaatgcacgggaaggagaaggtcgacctggtgcgatcgacaacttcctctacatcgacgcgcgctacatcgcgagggttcctttgccttcttagcgctttcttccgctgcgcaacacgtcgagtggtaatgatctatgatctaatacttgcatggttcctagtttacgtggtagaaaattttgatttatgctatcgtagccttcgcgtatcctaacagtggtatcagagccgccttgtataatttatgatttagatcattgcatatagttgatatgcgggcgtagtagatgagatctattttgtagtagatgagtacttagatgatcggaacataagatggaccgataggcacatgggttgatgagatcaatcagtatatgtgttggtgacttcactagaatgtctggtactcaccacggccgagcatgattgtgttcatcggatagtccgatgtccactggaaccgcacgcattgagaaaaacgagacaatgagattgactcagtttcggcacaatttgattacaccgttaaggttttcatatggcgaatcatagatgagatctgtgtaccccgtgaccttttcaggatatgacatggtaggatagattccctcaaaaattaagtgtaatttatgctcttacgataattgca

SEQ ID NO: 45500 - DNA, 771 bp, Oryza sativa
taaaagggataaagtctagggaacggaagagaaccaattcaagaaacggctgagagaatcgagcgaatcgggcggaggaaacggcagcgtctcggcagctgcacgggctctatctggagctggaagacgacactgtagctggagggaaaaagtatagactttcagctgggcttcatattccaaggcctgattaaagagggaagcaaatgcccggtttacgggagcttctcccagctgcagcttttcccaaaagctgcttctgttagaagctgcctcaaactgtccatagcttctgagaatctgtagttacagattctgaaaaatgaactaagaagccaaaagctggagaagatgggtttcagagcttttccacattctcagaagctggctaccaaacagctgcttctcagaatctaaagctcccccaaatagccccaaagcagacttcgacagagagaaagaggctgctggatcggctgggctgaaggggagagatgggccagattaagacctgagctttcgaaaggattttaattacttttccaactaaattaatcactgaaatgatatttgaattgttaaaaatacttcaaatactgaaatatgttcaagaaaaatctcgcaactacttggacacttagagtatttaacaaacttaagataagatcatttaatgactaatttaatatttaaataattcctaaaatgttctttgtattattaaaattagtaattgagctctaaaaaatccgagaaaatttcagagagtat

SEQ ID NO: 45501 - DNA, 691 bp, Oryza sativa
aaatttttgatgcaaaatttgttgtattcaagcctagagctgggacatgggctgtgcattctggggccgaggcaggcccagggaaggcagcccggcacaacgaaaaacactatagcctcaggccgatttgaacctagccgggcagttgggccgtgcctgtgcctgaaaatttggcacgatggctgtcatgttaaagtcctattttggctccactatgatctggaatcatagttatgaggatcagaccatacgtcaaaccgttgaagccctcgatttagtgttcgctcagtctgaccggttcgaccactcgttcaacacgactcaaatatactagtactaatggccgtccttgatattttttttgtctgaactctaatgaaagaattgctttcgcccacacgtttcctaccaataacacgagggggaatgtgtttttcttttgctgtagggatgtggaaggatctacttgcaaaaagaagtttcatgaaggaccacaagaagattccaccgatgcaacaatccaacggttcgcatcatctggagtgaagatctgacgacctttgttttagacgtggacatggtaactttgcaataaaggattcttctttcacttatttagattagcgatttcaattaaattgtcaactgatacatagctcagtggtgtaagacaacacctgggccctaaggt

SEQ ID NO: 45502 - DNA, 500 bp, Oryza sativa
ccgactaacccacaagcaacaaacctaagcacggaaactagcaagcaaacaaaactaagaagacgataaagctaagggcggcgactctgaagcttggagcggcgcttgcgatcgaagaacatgtctgacttctaaggtagacaagggataggaatcaatgcatgctcaaatccaaatttaaaccaagcaacaactggcccaaacaactagccaagcatgatgatttttatgcatagaacatttttcatgaacccggataaagacactaatgcgactgactaaactatagcttaatgcataaactagatgcatgaaaaatggtgcgcgtaacattgccccatcgaacatagacacgacctaatgcatatcacccgataaattcccaactgactgtcaaataaactccaaataaacttttaccaaaccctagactgtccctagtcgagaaatccaattaaataagcgaccaagatttttcccacaaactcaaaagaacaaaa

SEQ ID NO: 45503 - DNA, 679 bp, Oryza sativa
ttttgcttccggcgccatcattcatctcgccgcttccggggcggtgtccgggtgacgacgacggcatcgatccatcggctagcctgtatggccgtgcagcagagattccggccaggtgacagcctcgatcataattgaggcgatgcaattcttgtacaaaaattgaaacgatacttctttctccagggatatatatactcagtagttgttgtaactctgacaattctgcagctcgtacaattctatacacaccccttgctgggtaaatctgctacgagtacattttttttaataatcgtgtacatatatcttcaatgaggaatgtagtatatactggccaaagaatactacatatatactgaaaaaaaaaggggggcagtatatatatactccgtcaacgaaaaaaaatcagtatatactactattatgcaaaaaaaaaaaaaacaatctagcttcaatgaggaatgcagtatatacgtgctggccaaatcgtcattgagtacatactgacaaaaaaaaaagagcagtacatactactaatttagaaaagtggtatatactgaaaatctagaaaaaaatggtatatacttagtacactagaaataacagtatatactagtatgaaaaaaagttactaccaatgtatgaaaagtgatatatattagtagtccaaaaatcc

SEQ ID NO: 45504 - DNA, 904 bp, Oryza sativa
caacatgctaaattatgttgcaacatgataaaaagaaaggttgtaaaatttctgctgaaaagaaagataaaaaatgggccattagtacagtaatagatgtacagtactaacaacacaaaataatgagtaaattttgaatgagaacaaataaagggactataaactgcatatgccattagcttggtttaattaaaagagaaagagaggagaacagttctactttttcaatatttttagagggcttctataggtaaccgtttggcataacctagggtcaaggaggctctgataccaacttgtcacgcccggaatttctatccaaaattccaaacgcttacatgtgtgtaaaccctcgtccaggaatcagccgaggcacacaataacaaattgataatagagtgcaatcattactctaattaataagcgaatataaagtcattacagaggtagatagttcctctcaaacaataaaaatccaagcagtggaaaaataagatgaacggcgcagacgactctatcccacaagcagcttgaccagggctacgcctaatccttcacaccttcagcatcactgtagaactcttcctttgatgaataattaaaaggtgagtatatgacatacccaacaagccacgcagcaaatatgcaaatgcagggaataacaaagaatggcataatatagtctcatttgcataaatggcatttaataaatactccagaatttaataaaattgcaaagtatttaattaaacaatattaatccaacgctatacaacatacccgttgcataggcccaaccattctgaacaaccaaacccggctgcacagttctacctccaaaccaggaatataccattctaaaccaggagctaaacaaattattatcatcgtcatttaatatggt

SEQ ID NO: 45505 - DNA, 2826 bp, Oryza sativa
agctatttgacaatgcacatgatggtcagacatgggtccgaagagatatagaaggaacaactgtcgataacatggtaactaattaaaggtgaggttatgaaggttgttctctgtctatctgtccattatcactgatttccttatatcgttgatatcctcacttggcgagctctttatttttatggcagtaattttggatggagatttactgggatcgaggcttcttcaccacaatagctttactgtgtcgttcgtagatttcattggattgtccaagtgattgagccagatggatgcattttttttatttgcatatatgctttgtgtaataatgttgtacattagttatatacagaattggtggttagatcttatttttcaatatataagatatcatattgtttatatgatgagaaaatggaatggccgactatattttttgcatctatctgtgttgtgttattctatttccatcttatacaaattcctcgagaaaactatttacattgtcaatggcacctaacgtgaataaataaataaaacagacttctccaatgtgaagtggacatagcctagtggtacttggctgtttctactgaattgaggactccagttcaaatactagcaaatgcatattttttttcatttcttctctagtggcgattcctaaaactttttaaattctgtctgctcagatttttttaaatttcttgaacttttttatttctaaattttaaaataaaccattcaaaaatatatttttagaatatgtggtttttcgctcgtcctaacataatttaaataactattaagaaaaaaaatatgttacgtccaaatttcacgcggtctatcctaatcgggtcgacaacgaaataacacgtggcttttttgtggtgctaacataatttaaataactattattttaagacaaaaaatatgttacgtctagatttaatccgcggtgtctggaccacaagtgttttttcggtagcgctaacataatttaaataactataattttaagacaaaaaaatatattacgtccggaatttattcggaatgtccggaccggattgacaatgaaaaaacaggtgattgtttggtagtgctaacataatttaaataactataattttaagacaaaaaattatgttacatccggaatttatccggtctgtccggaccgggtcgacaatgaaaaaataggtgattgtttggtcgtgctaacataatttaaataactatatttttaagaccaaaagtatattacgtctgtttttcatgaggtatgtccggaccaggtcgatgacgaaaaaacgcatgctttttcggtcgtgctaagataaattaaataatgattattttaggacaaaaaattgttacgtcttgatttcatccggtctgtccggaccagattgacaaaaaaaaacgttttttcggtcgtgctaagataaattgaataactactattttaagacaaaaatatgttctgggccgagtcaacaatgtaaaataaagtggttttttttcgtactaggataaattaactaactacttttttattaagacagcaatatgttacgtctggatttcatccagtctttctagaccgggtctacaatgaaaaaacacgtgatttttcggtcgtgctaagataaattaactaactactattttaagaaaacaatatgttacttttggattttatccggtctctcaggaccgagtcggcaacgacgcggtttgtattagtagaaaataatttttactagtgcatttatgaagttttataactagttcttattgatccgcacaaaaataaattagctgaactagattagataactggaggttaaatctgccctaaaaaaatcgagcttaaatttacttgatgtgaatttaacattttgtgtatttgcgcaaattattttgctctccctccattctttccctcttttttcagtcttattccaaatcattccctccgaaaaattgagcttaaatctactcagtcagaatttaacattatttttatctccgacagaacgtttgctctcgctccgttctttccctctttttttttttcagtctcacgttattttccaaatctttccttcgaaaaaaatgagcttaaattattttgctctccctccagtattttcggtctcaatattttttttctcacgtctttcgttgtcgcgccatttattccctccattttatccctccaagaaaatctaactgcccgtgaaaaactctatctcctctctctccattctccaacaaagagctcgtgggtgggttttcttctccaacgaaactctatcccctctcttcttctctctgcactgctcctcccctcaggcctaagccaggcaccaatctgaaggtaaggcaccatggtgatttgctggccagccgctccgcgtgtccacacctctcccaatctgtgttggctgccatcctctgcacctacgcctccccgccgaccaacaaccctgagtaggcgagctcccccacggccgctgagggccacgcggcgacgcctcatgcccggtggctgtgcgctgcaccgctagtgcggttttgcctccccagcgcctacgtttacaccgcgcgcgcagcccacggccctgccgccatgctcctgcatctccgcctcccttcctagttcctacacgtttcactgctcagctgtgttgccaaatcacactcgggcctaattccatttcagcactatactacattactaatttgatatatatgttctctgtatgcaggttttggatcagatgcagtgatcaatcctaggtgacagagcctatt

SEQ ID NO: 45506 - DNA, 1331 bp, Oryza sativa
aattgttcattagctaacagaggtatctaataacctgtaggctagcacctttctcatcaatacaaaccatagtggtacttttttggacaacagtagagtaaaatgcctaaagttttagccaattctgaaattattcttctagagcagtagagaaaagtggtactcagactgcaatacataggtttatgctatttttgttttggtgcagcagatatggcaaggagtagaaggcggtgcattgttcaaagccatgaggaatatttgtcagaggaacacattgcagaagaaaatgcccctaaacagcttgccacaccatctgaagagaaacaatatgcagtgatgttcaagagggtaatgaagatactgatgacgatgttggagaagtcaatgaagatactgatgacgatgctagtatgaatgctggagaaggcaatgaagaatctgatgatgatgttaaaattaatgttcgaggtaaatactaaatcttgatggtaagaaataatgaaattattcttcttatcctggactgttgagcatcacttttatctttgcaatttaacattgaacagatgaaaatggaacaattgaaacacgtgggaagacaaaactgaaagatatttggaaccttccgaaaggtcttaggattgtggttcagtgcaatgatctcaatcaggcagtaggagatgaagctggaattttgtctaaatttcttggaatggtagctaggaatggtactttgtgtagcttaagctacacagactggagatttctaataggaaagagagagagaaaaaaaatgaattaaaagttaaaaaggacattcttaaacaaatatccatgttcaggacaaggttttgcaactaccaaccaagcaatctactgtagataaggtcattctcttcctatttgttatgtcgaactcactacatagcattatatgatctcaatattgtttgcaactgtcaacgtttattgtagctgttcattacaatcttatgtcttatcttattacacagcaatcaaacttatggccaaaatcaccttgagaaacagaggaagattatttgtgtgaaggctagtcttcacttttttattgattggaactgacagtgtttgattataaaaataactagattattgtagtttgtgccaatattttgatattccgtgcagaataaaggaaacatgaaccagaatgatcacatgcaacaagggaagaataattctaatgcttataaggtaaattttcacttctggagccacctaatataaagataagctatagaattctatttggtataatatgtttgtactttatagttaaattattg

SEQ ID NO: 45507 - DNA, 502 bp, Oryza sativa
ccagtggagcaaccacgccgaagaagaagctacttgggagcgtgaagacgagctgaaggcagcccatcccgatctcttcgccagttcttccgaatctcggggtcgagattccgtttaaggggggtaggtttgtcgcgtcccaaaacgactctaaaatacatcctcgaaattgtgcaaagaataattaaaattcatgtgaaagcctccaacaattaaaatgtgcaaatataaaagtcaaataaggcttggaggatttttgtatatttcctaaaagcctaaaatgcgtaaataaattttagtggaattttcagagcacaaataataattgagaagaaataaacaaagttaaaaaggtttataaaaagaaaaaccctaaaagaagtcttctttcccccccttcccttcttgggccggctcggcccaacttcctccctccctctcctctcccccgcggcccatcggccttcccccgcgcgcgcgccgctgacgggcgggcccgccc

SEQ ID NO: 45508 - DNA, 820 bp, Oryza sativa
agaatgtatcttgtccaattataggttactcccttcttctcaaattgatcatcatataagggcaagtactataataccccatatgttgtccctaagagtgccatattaattgagtgatgaggtggaggagagaagtgagaagagagataatgagccacccctaaatcaagatacaacctccacacaaattttaaaaaggatgtgagagtattagagatattggtatttgtgtactagaggtgatacattgtatgggttgactcttagtttatgagtgaataaaatatataaaattagaggtggtaggcacctctagcatagcacttgccctaagtttatgcaccaagactaaggataatttaaatcacatcaaacaagacaccatgcacatattctcccacaatgtatgcatccattaaaaccccatgccaattacaccatagcatgcacacattctcccatactgcattaattgtattctgatgaaatccatatcatgcagttatatgatgatcaatttgagaaattttggattttattacatgatgatcaatttgggaaggagggagtatacaactgtggagtacatcggaatccggtgttttgtgcgaacacaggattccaaattaggtgctcttgctgctgtccacaaaggtttgcaaatggatataagagcaggtataacggatgagagagaagagtagcggggatacagaggaaagagaagagtagcggacaacacggactccaagatacaatttgtgtatgacagatgaactaaatattaatagtgtaatatatgtttataggtaactattat

SEQ ID NO: 45509 - DNA, 977 bp, Oryza sativa
ttcttgcatgatgtgtgtcatccttgttttatttttttgttaatgatgttaggtttgactaaagtgtcaaacccatcacattaattagcaagtaggagtatcatcaacgaggaaagggttgtcctttggaatgaagaggttaagctaagcttggcacataaaggcagcacagatatgctactagctcaattatttgcatgtacaagatggtctagactatagatgattatatattaatacttaagctatgcaggggaggaggagaaagagggttagcttaccaaacaaaagcttcagccacaaaagattttacaaacaaatgggagaattattttgaatgccaaccaatctgatcttccccaaattaaacacacccatctacatctccaaatcctccatggtataagaaatacatggaaattctgaagagcatgggcaggtatactgtaagccacttcaaccttttttctaatctgaaataccttcttaattaatcaacaaaatacttaagtcaattcaatggagacgaggattgtagtagactagctaatccaggagtatgccttatattttcaataaattaaggttcgccctaactgaaatgaaatcatttttcaaaaatttaaaatggagaagccagttgcccactatgtgtacagttgcccactatgtgtacagtgcaattagttaattggcaaaaataaccttgctgaggtgatctgtatatttattttatatgattcaaaccacagtacgtaccaaaaagaattctgtaagggcgtcacatacgttgaatttctctgaccgtagtaagacttttgaggtactacaaaacaacactatcattattttacttaatcttcaagcatatatggatcattaaagaaaaccacaattggattagactttgacatgcttcaattatgagaagacttgtcaccacaaaacaacaaatgacacgtacatagctagcacca

SEQ ID NO: 45510 - DNA, 1724 bp, Oryza sativa
tttctattgaaaagccatttgtatttttctaataaatagtgaaaagtgaccggttttaaagcttatgttgtattttagactccaatgaaagtatagatatacaacaatggacttctatactatctataaatttgcaaaaaaaatcctataaagatccagtgaattttatgtattccaatgcaggccttattatactatactcctagctccaggggagcagccaaggagaaaacaatgagaccatcttaatttacatatacaatcgtcttaatataaggcagaaaaagaaacatcgatgatcagatgagccgcatacaactttgacataaataaatattttttcttaaagaagcacagcacttgcccatgtatagggaaacaaaacacaggcggcgcatgaaaaagttgggggtcggatttgattaattcgacaaggaattcttctggatcttgactagaaagtagtttgttgacttgcttatcactacgaaaagacgatttagtcttgttcgagcagtgttcctctgcctagctagagaacaaattaaaaatatcaaaattgattccagattctgctccggctttttaagtacacctagctagctgcgaacaaagcagcccaattagaggcgaaaaaaggtccttgcatgctggctaaacactctacagttgcagatgagcaaatcatcttccaaacatccgttcatcatatctagttatgaactatcgacgacaaagttaccatgatcactgagaaaatgttttttttctccctaaaagctatagacaaaacatggattataatcaggtctagatctaactagtacaattttttaaacaaaaggataattaacttccgatctactccctccatcaaaaaaaacctaaccatccatttcctagtataatgaatctggataatctttaggttgatatttgtcggtacagagggagtaattaagaatactacgtgtacactgaaatttaaaatttaatgagcggagtacatagatagttagatatgtacatccgacatgtattgggcaaatcgtttggtagaatacaaatgagaccgtacaacaaaaacccgtggtttacttacttttggcacatgtacgtgtgttcggtacctacaaggccaacgaggataggaaatcgaccgacaaaaccgtggattttaattgcaaaggctcgctaccgtccgtgagcgccaccggacattcggcgccgccataaattcgaatcccggtatgcaaactcaaaccgatatcctactacgatttcatttcacgcagttttttttttcaagtttcaaaatccatttggctccaaatactacagctactagcgatttctcgatctggtaccacttgctactgtacgtcttgcaacaatgtggggttcgtttcattcaagcgtacgacgacgtggcctgtcagatcagctggttgaaggggcttgaagtagtagagtacgagtgagtacgacgcagttgttgcctgaaaagttgaaatactatttctgctcttctacgaaacgtgcagtgccggtagttgcatgatgtctacgtgcttaattggagtattaaaagttgttgctgctgctgctgctgttgcttgttgctttgctgtccctccgtgtattctgttcttggaggaaacgacggatcgatcgatctgcggagattaattaacgacgatcagtacagcgagagattaactaag

SEQ ID NO: 45511 - DNA, 709 bp, Oryza sativa
attgactgggttcgttcgacataaacagtacaataggagcagactgtagtagaaatcgatgaagtccgtagtttgcagggtttaccggacaccgaaccgccacgtttacgtacgtgtcacatggttacggcgattacggcagtgtgttttcgaagcatatcgaacggacgattgcaccaagcattgacaacgagatggtactgtaattgacaatttgacatcgtttgcatggacgagttccgtggtgttcccatcgagcagctgcatccctgaattcaattggacgtcagggagaaattttttttttttgaaatggattggcttgcaagcaagtcgacaccgaggaaatggactaccgagcgatcgaaagatattcatcacaccccatcctgttgaagagtactatggttttgttcagttcattgattgcgaagaaaaatgccttaccatgtatttattggtaaagttaaaatttggcaattataaaagtttagtaggatcaagatgtgaaggtggtgtttagttggacatcttaatttgatatattattgtgagtagaagtttctaaaaatactaaatgttggtagatattgaaaagattgtgatggtaaaatgttgtttaatttgttaccttaccaatttttttagaacagttaccttaccaatttgatatggttgattatagcaacaaactgaacacaccctatat

SEQ ID NO: 45512 - DNA, 548 bp, Oryza sativa
gagctaaccagctgctaaaactctcggcaaccatgttccatgcacgaccagatatataaagatcaatcgcatcgaggcaacagtggataaatctccctgaaatcttcagctgaaaaggtttgggtaaagtttgtggcgtggtgttttggttgctgttgacgcatcacatcgaggtatctatagctctgatcagcagcagtgtagtagtacagtgaatgaaaaccacctgaacggatgaaccgtgagtggctaatcatgtcaagctggctagctagcctgggctgcctttctgcctgataggtagccgtagtagttaggatcaattagccggttggtgacacaggctcaagctagcgcagcaaaggatgcggccgtgcacatgatggatggaccggttggataacacaaatttttgacaatttgaccctttgcaaaaactaattttacaaatgaatcgtgccacaacttatttcagaaatgacccttttgtttagcgccaaatcgtatggtgctgaacttagacacctcagcgtcacgttaactggtgt

SEQ ID NO: 45513 - DNA, 595 bp, Oryza sativa
tagcgagggaagaagagaagaggcgccgccgcaggaccggtgctgcatttgcatcgatcgcataggcatgaagtcatgcaagcgtacacctacgcggtcaagtgaccagctgctgctgctgtgcacacgcagccgcagtggttcgccatgaatgtgtctgcagcatcatcactcatcagcgagcaggaatcgagcaaccgaatgtgccgtctcctttgcgcgtggaaccaatcccggaagatatgccatgccaggccgttttcatcccatctcattcatcggaccctgacctactgacctcatcccaaattattatcaaactgtttctgttcgcgtacgtaggcccctggttcatatggtatacctgtctttaattttttttaaagaattacgcagtatactcacaacacacgcatactcacccctatgaacgcacgtgcgcaaaccctcataatgcacgcacactcaccactgtgagcatcttcgaagatcgggccaacaaatcataaagattgacgaagtcaccgtaggcgcctcgctgtcgacggatacgtcgcctaccactgaaagcacgagaccgttaaatcctagaaaa

SEQ ID NO: 45514 - DNA, 676 bp, Oryza sativa
cagcatttgggtgcaatgtttttggagcttggtcgaacaatgatgatgcttcggatggggccatcccctgtatgcttaatttaaattctctattatagtatttaactgatttctgcatgtgttaattcataacgcttcttattttggtaggctgatgcttttgtcaatgctggatcttctgtttatataaactctgcaggaccgaatccaatcatggttcaggtgacatacattgagatgctttctcatgttgactttaattgttgtgccactttaatgacaacacacattctattgctctgcagccatcttttcaaaatactcctccttttggagtttcgagcataccagtcctcggtggaatttctggtgcctttggtattgttgatccttctcgtacatctgctgtcaatacccatggtaagatcacatttcaagttctcttcagtggctctgttgagtgtactcagctgagtcatgaagctaccatttcaaatccttaatctctactgagaagttcaaatggttatggttatggcctatgattacaaactattacactaataggttagtaggtaaattatctgttagttatttcccttttttttttcttgaacacgagggagttcttccctatattacctgcttcgtcgtgatttacctctaaccagaactg

SEQ ID NO: 45515 - DNA, 865 bp, Oryza sativa
aagatggaacacctcttcccctaagccctccgacgtggccaacttctaaaaactaagacgccaccacaagaggatgagaatctagagcgtgcttgcaccaattgctcgggtggtttcggcgaggggatgcctagacaacgtctccaaggagataagcgacggaacaccgccgccgccatccaccaaggtctcaaaagggcagagaatgacctttcgcccggcaaccacccttgaggggtgagacggcacgacaacgccctcaggagggggaatgacactcgagcaccatcgttgtcggtccgagcaaggacgagctgggttttcacccgccgtccaccacctgccaatctaccacagatacaccaatgctccaccaccatctagacctccgccggtgcgtgggcacactgcaccgacgccctcccccggccagtccccacatgccaccacctcaccgggctccacctccaccgacatcacctcccgctgcgcagccatcacacactggccgtcctcgacgccgccggccacgcctacacgcgttccaccgttgccggtcgcaactccttcaccgtgtcggttgtcggctacgtctcccagcctcgccggccatccacagccaccggcgcccgtgcatgccgccacatccgccacgggtggcgccgcccatgccggcctccctgcagccgccggcaccacccacaccaacctcccgctgcaatggcgacgcccaccgacgcctccacggtgccctgactgttgccgccggtgccatcctcgcgcagccgctagctccgtcgcgctgtccacgccctctttccgtgccgtgtcgttcacagctcttcaccatgccgcgccgcgccgt

SEQ ID NO: 45516 - DNA, 658 bp, Oryza sativa
aatgagtaataaagttaaatttttctttaatatatcatcacaacacataatagataatatgacaatcaaagttatcattttcaaccaataaatagttcaaaaatgtgcaatttttttgtatatgacctattctattgagtcaaaagagctcacgagcggctcgtgagccagctcgggcttggcttgtttcggaaacgagctaggaagcagtcttgggcttggcttgtttggctttcgagccgagccgacctatgcgagcctgaaccaagcttgagccgagctcacaaggccaaactttttgtccacccctaattacagatggcctgtcaaggatgaccgaatttgtagcagtgatggtggcacaccatctatatttatatttatggggtagtctgcgttgcagagattgggacatcaatcttttgcatataattacagctttaaaaccatctataacctattggaacttatatattcaaattcaatagctattcgaccaataacaacttctctcttcgtcccaaaatataacacttttacgatttagaatttgtcacaaaatataattacgtatccaccaatattttcttcttgatcaatcacaaccctccaccatttaattttcccattaccttcacttctcatccaatcacaacat

SEQ ID NO: 45517 - DNA, 2934 bp, Oryza sativa
acgtggtggtgatggtccacgacgagacggcgggcacggcggagctggtggtgctcgacgccgggaagatggaggtggcggcgacgtagcagctcgccgagcagagacttgattaattagttttaggactccctccgttttaggatgtttttgacctttgtcaatatcaaactgctttaatttgactaagtttacagataaatatagtaatatttataatactaaattagtttcaccaaattaataattgaatatattttcatattgaatttgtcttgagttgaaaatgttgctacttttttctacaaacctggtcaaacttaaaacagtttaactttgactaaagtcaaaacgtcttataacctgaaacggagaaagtatttcttattagggggtgtttagatggggttaaaattttttagtccatgtcacatcggatgtttagacattaatttagagtattaaacatatactaataaaaaaaactaatttcataaatgagaactaatccaggaggcgaattttttaagcctaattaatccataattagcaaatctttactgtagcatcacataggctaatcatgtattaattaggctcaaaagatttgtctcgcgaattagtccaaggttatgaaatgtattttataattaatctatgtttaatactctaaatttgcgtccaaacatccggtgtgacagggactaaatttttgtccctagttcccaaacacccccttagtttgttgctaccaggtttaaaatttcagttcgaaatatctgaaattaatttcagtaatttcggaaatccctgcgaactcacaccggcaagcaaatatcttgtacggaatttttggtttttcatatttttatgtaagaatttggttaaaatttattcacatttagtcaaatttattaaatttttaaataatttcgttaaaaaaataaattcccaaaatatttgaaattccggttactactgaaatatcagaaattttggttttcaccaaaattataaacgttggtagctacaagcttctcggatattttgattttttttctatttcaaactaaatatattatcaagttttggaagacaaaacaaatatattatcaaactatatctcatattggatttaatggaacaaaatatttaatgctacgcataatgctattttttttaaaaaatagtaagtttgacttgaaaataaaaatcaaaaggttgtacgaaacaggacgcaccatatgtaggggataaatactctcttcgatcagtaatatatgacactttgaatgtcatagattttttttatgagggcaagtatatctatatatttttgcatgtattaattaacattttgaatctatatatcttcagatcaccaagcgtgtgtgataaacaagcacccgtgtgttgctcggcaaataggtagcctttctcaaactcaaactcaggatgatatttgaactgggctttataatcctttttttttaaaaaaaaaacagttgctcacaaatagataaccttcctcacgccgcctttgttgctgacaaggttatgatatgctcgtgttcatcctcgatatgatttacatgaagaggtcgatcgaggtgtcatatctagaagacatggagatctcatcaacgaaaaatatatgtgtgcaagcactaattgccacaaatatgtcgcatgaatattattagttacatcatcagtttgatggatcatttacatgaattgacatgaacaaacacaatgtacatttgcgctgtgtcaatgctccctccaatcaaagatgtcgcaacaaaacgcatctggacaaaatttcgaggcatcaagtatcaacgccttatgatacaaaattaatgtatggatgcatttgatttagagtgttaccaaattttggtaatgtttttaagagttaaaacttttgaaaattatggtaggatggtattgactaaagtatgtttattaaaatttattgacttaccaaactgtggcaagtttaaaagtgacaacaaaccaaacatgtcttgaatgaatttgtatatgatttagggctcctttaaaacacgggattcgaaaaatataagggtaggctatcacatgttgaatcctacaaggaaaaaaattcacaagaattaacgaaacaccttgattagtaacccaatagaaaaaacagacgaactctagacacaagaaagagaaactatgaggtaagacttcatgttagggggtgtttagatcccactccaaaattttacaccccgtcacatcgaacatttaaacacctatataaaaattaattatagacttaaaaaaataactaattgcacagtttgcgactaatttgcgagacgaatcttttaagcctaattgcgctatgatttgacaatgtggtgctacaatacacatttactaatgacggattaattaggtttaataaattcgtctcgcggtttacaggcgaattctgtaatttgttttgttattagattacatttaatacttcaaatatgtatccgtatatctgatgtgacatgccaaaactttacacccctggatctaaacacagccttaggatttctccaaaaatcccatcaaatggcccattccatagaaattctaaagagacttttcagagttattcttttcttcaaaacagtcacataagaattatttcccctaagaattcaatccttgaaaagtcctccatttcccctttgttccgaaggagtccttagaagacggtgtctatgtccaagactttacataattgcgaccatatagaatatatctcacggtatacgtgaggactgacgtgccatggttctatcatggtacacttgcacagcccccttggaacgatcttatgatcttcggagacaacaatgcctgaaagttgtggagattttagctgcaaatgttaccatc

SEQ ID NO: 45518 - DNA, 1282 bp, Oryza sativa
ttgaagggtaacccaaagtgaaatactggtaataaaaggtgacccaaagtgaaatttactctttttttaaatttttcttttcactttcccctctcctttccaaattccgaattccaatccccaactgtgaggtggcggcatttggactgaaaaaaaggggaattagtatggtaagatataagcgcctatggcattgatagagtgtggggatcattggcgaaattcttaatgggcgggcgatcgatcgatcgcctctcctcacgaggggcctgcttggcacagctccagctccaactccacccttcctggagctggagctcagccaaacagtttcagctccaccaaaaatgggagtgtagctgggtggagctctcacaaaatgaactagagttgtggagctgggtttaggcagctctacaactccacttcagacccaactcctggaactaaatttaggagttggagttgtaccaaacatgcacttggttttcttttttttcaccgtattacttttctattttagtaaatttatacacctaaagtttgtacgcatctaaagtttatacacctaaagtttagagacccaaagtttataagttaaaagtttatatgcctgattcaaatttgaatttgaattcaaatatgtttttttatatatattatttctatacatatataaagtttatgcacctaaagttcatagacacaaaatttataatcaaaagtttatatacccgattcaaatttgaatttgaattcaaatattttttatatatagtattttctatacataaagtttgcgcatgcgaagtttacggtataaagtctgtacataagtacagagtctatgcacataaaataagagtattagattttttttctattttaattttttttctagactttgtttttttattttttaaaatttatggtgtagtagtaagagaagaagtgaggaggaagggggagaggagcgtgtaagagggatggggggtgatcgccccagcgatcacatgcccattagggtccccccgatcattggtgctaagatatacgtgagattgatgtaaaagagaagggagatatggatttttatagaggtccagcccctaaactgacaagtaatacccttactccttattagctgaagtcggtgttgcttatatatagtaggggcgagaaagtacaatatttaggatgatctaatctactttatgcttgctcgaatatgaacttggcgagattggaggtcatcctagatccctcttgtcgacctctgtag

SEQ ID NO: 45519 - DNA, 3122 bp, Oryza sativa
actgttcatatatgggcacgttttactgaatttatcagggcaaagatggtctgaaatgataatgactaatcaaccatttccttgtcattttgtgctgcttcagtttattagggcaatttactatcaactcaagcatggctttcagcacacacaggataatagaagtggtgaggaaatggggaattctctgttcttagatgaagcatggttttcaagagacatatttctctatcgtctttctaaggtacttattaccatcttttgttgataaccctacaaaatcttcttggttacaagatatatgcttactgtttaaggtaaatatttcctaaaactagttgtatgactaagaagaaacattatataatttttaattgtgtcaaatacgaaaaatcaagtaatggtaatattgatctctagatcagattgtacatcttgaaacaaccacaacaagtcaccactgtccaacactggctactgatcgagtcatttttcgtattttagttagctcctaccagatatgtcccaacagttagtaaaacctcatctctcctctatcactgctcttttcatttgaaactgtatttcacccttatattgattactccataattgcatttaaatgggtccttaagcaattgcaatgaatgcactgcttggacctgaagtaaaacgattttagcttcactgtgtatagttagcagacatatcctggattcaattagttacatgtttactgtttttaattgttgtgaagacagtaagcagcagcgcagtgtgcctattcaatgctaacttaagtttgatcgtccatttgggactcgtaatgcagaggaccctaacattcgtacatttttaaactcgaggactattaaacacctataataatagtaaactcatcaaggtagaggtgaatttgcatatctggaaaatgtgtgaatatattgttcagttcatttgacttcatgatttattttggaatcattatatttaatcatgaccaagcatgatttcttatcgcatatttgaattatggagtaagaaacagtttgcttagaagcacagctagaagctgaatagcttgttctgctattgtcaggatttctttgcggtgatacttgaagctacagttgttgatggtgaccttctgtcatgggtgggcattcctataccttctctctcacatttacacataccacataagcaattctgtagcccatgcttgaattaccacatttagactgagtttagaacttcatactttctctgaaaataccctagctggactagtattttggttacttcaaattcctggtttaatatccacaaaaccacaaattatggacctttgaccagttattttgagggagttatattttcgtgcacttgaatgattggtctgtggttgccgtttatatgaacagaggagagtaatatcagagaaaaatgtttttttattttattcataactagagtacgttgcagacaaagtatgctgcaaattcaatccattgagcagccagcctcattatttctgtagaaaatttatttcagctttattattgtgtaatgttggaataatatcaaaagatgtttctaatgtttacctccatatattcagactcgaaaactaaaatcacttctggagaccacatttggatgggatcttgacaacaatacggtgaatctaattgatgaagatgatgaggtaaatttggatcacgattcatgatcgagtgatagcatttctttgctgcactcagagtgaaaacattcttttcatctgaatgcagtttgctcctgtggtcgtggaaatggatgggtcatagactcaggtggacttttgaagccatattcaggtttgttgacaatttgcagtttcacccttctgttcagtcatccctatatcaaatttcttggtttcctaggtttactggaatctcattgtagctagacttctgctcgtagtactagcataaaaaaaatgcactgaaatgtttactatatgtatttctaggacatctgatccgactaacactggacttgcttaacagctggctacttgatcagtgatggagatgcatacaagattacaagtagggctttcttggcagtatgtatcctggtttcctaaattcctgtttgtaaatatacgaagaataatttctctttgcactaagcggtctatcttgtactagtacgctatttaccgagccttttatcttctgcagcgaacggcagttttctctatggtttgttctagtacttccagtaaagttcttatcctgttacacgagttctttagataacagctagaaatatccgtaaaataccagcgcttccagggtaagatagtaggggtaactttacagtggaaaccactgtttatatgaaatccagtcaccacatcatttaaattctcagataattgaaatcacagtgtagacagccatctaaacaatactaggtgatttctactccattctaccaatgagattgatggtacctttatcaaaggagcatatatgtaatatatacatccactggtttaggcactctttgcccttaactgtaattattgaccgccatgctagaaatacaggttttagttttacgtgtaatgtccgtgtacagctctagttggtgtacatcccaggaattagaacttttaattgaaaaggataaaactaaacagattttacatctatcatgaacatcagtatcacccagcctacaaaacaaaattaagacctatgcccaattcagaaattaatataatcatgcatactaatgttttgctaataggcacaaagaaatttggatcttttggcggcggttccacgtggctacgagcctagctacttgcttgtagctttgtatagtacataatacacgttgaaaaagagatggagatggaatggtaagataaacttaagtgggttaagcggtgtgagatggaatctaacagcatgtgacgtcctaattaaccttgggatgcgtgtatagttaatccgtctggagagaggccagtgttttaacctttaaactcgcttcaaaagcagcagcagctgaccgggatggatggtgtgcagtgtggctggtgattatacagcatggtcact

SEQ ID NO: 45520 - DNA, 1584 bp, Oryza sativa
aaatgtctagtaaaaaacgaacattgcttcaccgaaacaaccaacattgcatatatactgctcctactttgtgacaacagagttgctcctgcactgtctgtcttgaactcgctagggtttggaaaaccagtgttctctggagccttatcctgtttggtctctatttgcttggctggttttctctttatttggatctgcttgtatttgcagtttgaccagaataggcattatatcacctgttttctaagattatatattatatcactttttgccttccaaattaatggaccagcttttgtgctggaaatcacctgtttcaggatgaaaaccagaactggcaatatccgttttttggccccagaatggttatttaaattctctcttttcaggtgttgatttatagtagtagtttattaattcattacaccacttgcgctacttaaatgctattcttttactctccagtattagacccttactcactccacagtatttaagaccctctttgccaaaaagttctagctaatttttttctcttctgttgggtgactcacttcccttgctttcctggtttcttccctcaaatgaaatactggaatacctagttgctagttcatttcattgaaagaaatcgtttctggacttgatacttgattcacacaggagataatgattccccgcatcctacccattctaggtttgggtttcctttttaaaataataaaataatctgtagatatgataataccatttggaattgaacattaccttgtgctggaatggttggcaataggcagtagtagggtatttttttccattgcacaatgtcgtcaatttccactgttgtcccagatagccgctgccactactgtttcaatacaatctgtaccaagttatcatagccattatctgctgtgtaaaccagccgatatagatatatatatatattttacttttatgtactttttatgtaagtgtcaattaacataaatcgaaatatttgatacgatgttgaaaagtactaattttcccatagcgtggataaggataaggggatactatggtctatggcatggtggtgtacattgtatgacgggtctgcttcgtacctgatcaatgactttgtcgggtgtcatatgtaattttaggtgaaagacaatgccgtggagcttgccaaggccatggaatctgaagatggtgtgtcaggtgcagtcagggcattcctcagacatctaccttcaagagcagaggaaacagcacctcagcagacatccagcttcctggaattcttaggtcctgtaagtaaatgtcttggttgctcataggtgacagtgaggcaattacacaaagaatgccatttctccctgttgaaagaagagaattttgaacatccctgcaaggatcaggagaacggatttcctggagagtgtgctttattatcttttatttttttcctttttgtgtattttttctcttttattgtgtaaaaggtgcttgtctatacatcattttgatgtgcatcgttgccctgctggtcctgcaacaagtaaagaatctcacatgtacgaccagtcctttctgtgt

SEQ ID NO: 45521 - DNA, 4300 bp, Oryza sativa
acaaaggggaaatggaggaattatcaaagattgaattcttaggggaaataattcttatgtgattgttttgaataaaagaatgactctgaaaagcatcttcagaattcctacggaatgggccatttgatggaattttttttttgaggaaaactaacatgaagtcttacctcgtggtttctcttacaaaaacgccacacttaggtttttagcctttggattagaatacaagagctgatagtggtcgagtgcatgagtacaccaagataggtgtgtgcataggataagttgcctagatctcaccccaaaattttaaactctgtcatatcgaacgtttaaacacatgcgtggagtattaaatataggctaaagaaatagctaatagcacatattgcgactaatttgcgagacggatcttttaagcctaattgctccatgatttgacaatatggtgttacaataaacatgtgctaatgacagattaattatgcttataataaattcgtctcgtggtttactaacggatactgtaattagttcttttattagtgcctgaacaccccatgcgacaccctatataatacctgatgtgacacgccaaaactttacacccctgtatctaaacacctcctagtatgcaaacttcatcacataataagtggcaacctattcacattttttctgtttcaaccacttttgatttaaattaattccttcccattttatcattcatcatttaaattacatgccatcccactctcaatcccatccgggcatttaggtaattcgtttgtcctactaatttggtttttaattaaattctacaactgcacttaatataagatggagagtactcttgtacttttttttcctgtctagatttacatagtagtgtaagttacatttagttatagactgctatattctaggatgagagagtatataaaaaataagcaaaataaactaaatttatacaaagtcacatcgaagtttgcctctcagccgctaccaaaattaaaaattgtgaagcagaattttagtttctttattggctaagaataaaacgaccaccgcgccgcgcggatggccggccagccgacctcaccacctggtgtcgccgccggcgacaagcatcgccttcccgctgctcgctgcggccaacaggtggccggtcttgcctatgatttatcgacaggcagcattgctagctaactagctggctacctagaaaacgtagctgcttataagctattttatctgtttgttattagggaattggtttttagctggagcagtccggaggcaggcaccatcctcagcgttccactaagttgacatcagataatcatgttatgtattttccacggtcaagattttcttttcactacaagtgaaacataatccaccacacggacgcttgctaagagcatgcctagcagctcatctatcatgttctccattgaaaaaatggcatatggagggaaaaaagcgactctagcatatatgctatccaggcctccaaaaatggtgcatacgctatcccacagagagaaacaccaaatttatatttggcgtttctctctcctcacgccatattgcaaccgactcctccagatcaagctcccgcccccattcggatcaactacccctgcccctacgcctgcagcacctccaattgcgacaacttcggcggccctgtgcgacccgcgctatcacctgcgccgctcacgccctcccctaggaggctctagcggcccacagtctgtgaccagtgcacctctcgtgctgagccgctgacccaactccgatggccctgcaccacccgtgcccatctgcgtcgctagctcccactgtcgcccctctactcggttgtcctagtccacccttcccctcttcctcttctctggatcgagcacccgggatgaacctgtcatagagaaaagatgaagagaaatatacttttaccagttaggagttgaaagatattaataaaatataaaaaggtgtggtttattgaagatgtaatatgaatgatttgttggagtgaaaagagatatagagatggatttttttatgaccattcaaatggtaatatggtagatcaggtttggatgagctaggacatgctctaacatgttagaggtagcgggagttctaaaggttgccaaagacgaactgcgcgctaattacaagtcaggaacttttccaaaatgtaactacaagttccccgtcaaatgccaaaaaaaaagctgatttctatactcttacctactattggttcacaaatggaagagttttatcccttcaataccccttacctaccaaccaacccaccaatactactttcatattaatgagatatgccaattttccctatatcaaatccctattacttatgtacggttttattcgagaataagtagaggcaacgcgacgagcaagggacaagacgagcaggtcgccaacggcatacggtgcagatcggcaaatggcgtagcttgggtagttgggcgagtagtttgtcaatttacttgtcaaatgaaaaagaaatactgcatgctctcaaaatatagcaagtgttaagctataaatctgaacacatatttgtccatattcataaccaaaagttggttatatgcatggtagaaaacaggaccaaatctaacaaagggcaatcagttaagaatctattacctccatccttcataaaatatagctacagctagaaatagccatattttgataactataaagtgaggtataatagaaggggataaatctcataagcaggcctcttgatcactaacaatagaaagataatgacatggcggatagctcggccgagacaatttaatgattgactacacagaagccatcatttgttgaacttaaaatcccacatccctaatcaaactgctacgtactatatgtatgtattgccaaatgccaatcagcaggcttgtgcaaccagcaagaatctacgagatctcatggagtatcaaaacttcagttaaaatatatgatgccccgctagcaagtcctaaagcaaatctagtttagtgactgatggacctacctttcaaagtattgctgcgtgggaaacaatcaggtaacctattctatgttgtatcgttgcgaacaccaaagcaaaaaatctgctgttctcccgttccaactgcagcacttatttcttttcagggttgatgagcaatagggtaaagaaaaaactaatccatggtagctgtttccggaccaaaagtattctccagatggattcacttctgtggaggtgacggagatggaggcggaggtggcgtcggcgttggttgggacttgcatgccttgcaatcaatttgtggtgatggtgtcgtgttgtctggaattgttaccctaattgtttggtgtttcccatcgtcagtaggaacatcaaggatagcatccattaatagtatttcccagtcactgcgttgcaggaatgaaaaccaagactcatctgcaagaataagaatgacatgggattagaaataggctcctacaacatggatcaagacttgtagagactcaaaaaatatcaaaatcagttgtctaacaaaaatttcttcagttaaccggtacttcagttctgtatcaacatgatttttcaaagatagcatgccaaagggaaaaatggaaacaagatttcattggaggaaaaatctggaagtgatgaatttaagaactaacaggtcccagatgaacgcaatatcagtagcaacacgatagaatgtgctctgggcctcaatatgaagaaaaccatcaactgagcaatcaaaaacaccaatgggaccaaaagttacaaactactccctccatcccataatacaagggattttgagtttttgtttgccctgtttgaccactcgtcttattcaaaaaaattttagaattattttttttgacttactttattacccaaagtactttaagcacaacattttattttttatatttgtacaaattttttgaataatagttacaatagttattttaggctcacatcgaattggatacgggcgacgtaccaaaattccggcggaaacatcttcaatttttataatagtagagatatttgaaatggcttgaactgttattttgtaaatggcaatcagacaataggttttgttgtgcttactttgtttgcattgttgtgcatctctgggatagggtcccaactctgacaattttggcctgcctgcttgtgctcgtttgttgttagactgatttgggtggtaaactcaagtgagttactgtatgcagagagtta

SEQ ID NO: 45522 - DNA, 2240 bp, Oryza sativa
tcttggaaggacagccttagccaagttcatggtagcatcccaatatgcacatcaacttataaagatacttgtcagtgttatggataaggcataccccacgatcttgggttgggctcggtctaatatactaaatcttatacggaatcatgcctcatatacggaaggtgttttggataaggagggaggagcaaagttcaagttggaaactacaaggactactcggatcgtatccatatttgtctacttggttctaattggacaaggggacatctgtgggtataaatacaagacccttgtcatgcccagaaattcccgaatagaattctaagcagaatgtacattaaaatccctgtcttacagatccacgtcttacaaacattataaaagtcttacatgaatgcaacggaaaattaaagataacaggagctaagccttgacttggattgtcgccggaacaccaccccacaggcatcctcgatggcacggacgaagcccactcctcagagaaaccaccatcggacgcacacacgaactttgagggttgggagatagagcaagactgagtactatccactgtactcaacaagtcataccagaacggaggatatgatgcaatatataaccaaaggaaggctaaaggggatcatttgcataaagctagcatttataaacagtagttgaaaatagtaaaacagttgtagtaattaatcaatattaaccatccactgtccaacactacaccacgttgcaacaggcccaaccaaccacctgaactattcaattccattagactaagctaggctgagactaatcacggtgaatcaggttgaccgcccataagacacagaggtgaatctgatcagaggtgtacaactgtacccacaagacacagccccatgacacgtttccgtgcgccgacatgccaccacgacataccggaaagaggccatgacaggacccttcgcataaccccctctagccaagcacaccacacctcaggtttcacccttgtccccagcgggcaacgggcagtcccctctcgtgcctaggtgaatccggaagcgacagaagccgtcgcagggcccaccccgctccatcatgcccacccttgcctgggagcgtcggctagaggaaagctacactacaagcccagccgttgcccacgttggcttgtggtaagtacgataagttcttccagggcgtcccgcgaaccagcaaaaccatgcacccacaacccaccattggtatattttaattagccaacaccatagtggtagtacatgtccaacattaagctaaaccaatgtctaacatttaatgtgaatcccccattgtatgcgagttcaactaagcatggctaagcaatccctaactcaacatctaatcatgttatatccccaagctaacaaaggaacaaggtaacaaatagtatggctgagacagtaggtaatcatctcatggtagcattgtaaaataatgcagtatttaaaggaaaacaatagggcatttgcaatatacgatcaacatgtccaagtgacaagcatgacttgccttgctccgctgttgaagggacctcggctacaacttcgaagtacaccggagcgtcgggagagccggattctacacgacatacaaggcaaacaatgcagacaggctataaggctactgaaacagagaacaaaaccatttttaacggattctttgtatttttcttgatttactgagccttgaatgggcttaaacggagctcggatgaattttctatgaattttagaagattcactgtgtttttactataaacagaaaaatccttaattgatttattgtgcaattattaaaccctggagggagagacgggtggtgccgacatgcgggccccacatggcagtggctttgggcgccagctcatggtgcatcgggtccacggcccggggaaaggaggtgcaccacgtggcacacacgtggcgccgatgtggcaccgacgcagcagccacgcaggtgaccacgctggcggcggaacgggcagccccgatccactcggggtgaatcggacggcggagggggcggcacgcagtcggcgcgcacgggcctggctcaagccggcccggcggccatggtgcgcggcggcgcggctcgacgcagcggcggcgcaaggcggcgaccgaccggcggcggagatcggcggcgacgcgggcggcgctagcggcggctgagtggctaggcgacggcgcggcggctaa

SEQ ID NO: 45523 - DNA, 924 bp, Oryza sativa
tgttagtacctagcagatttcagtcgatggagattagttttgttagctaacagtgcttacttcagagctaccacctatacctagttttgttagttttgtaagcaaaggggtcagccgatggtcgatggagtagcgaaggggctgccggcggcggcagcggcaccgggagggggcttcttcttattctcatcaaggtcacgaggaccttgatgggcattggcggcccccattcagtccaatggcacgacgataagcaggccaccgctcgctgctgcaattccctcgcccgccaaccgccgccaccgctccagtgcccgccgccaccactctgttgtcgccacggctcaaggggaagagagagagagagagagggggggttaaagagcgaggctgacatatgggatatgtgggtcccacaatactttttttgaatgaaaaataggttccacatatattttttaattctaataccacctaagcgccacgtatgatgaaaaccaagtcaacaccgccacgtagatggcacatcagtgaaactgcgttccaaaaccgtcgagggagtcaaattgcacctgttttgataattgagtgatcgagatatccggtattgtggttcagagatacgaatcagattcggtcactagctatgggagtccaagtgaacttatttccctacaaatctaggtccagtttgttcctgcaatgtgggccaatgcaatctgggctcagtaaatcgaacctgcaaatctacggggctttttctcaaaacaaaacgagcacgcaataatgatgggttacaaacttatagttccgcacgcactgtgcaggaggcgatcggggagggtctcgttcgggatagggagatcgtgcacgtttctccatcgtacggcaagaaatttgagtgtaactaaaaaaaaaattcac

SEQ ID NO: 45524 - DNA, 785 bp, Oryza sativa
tttcaaatggtccattagcaacatataaaagcagatttcctggttttcagttagcagccaaacagaatgcctagcaattgaaggatcaagacattcatcaaaggaaacaaagcaatggaggaccaatcaatagtccgtatgtctacactgataaccattacaaaagttactagaaaaatataaagtgatataatagattaaagacaattctatcaatcagatatgtcacctcctcttctggtagttttattaatctctcctcctgtgcatgccacttccgaacaatcacctggaaatagcatacagaaaatggtactgtaaacatgcaagttactgccatcatcagaatccccccccccccaaaaaaaaaaaatcaaactttgacttccttcaaaattttaagtacagttgagaatattaatcgtcattcactgtgacaacaatcacaacattcattttcatctcttgcttcagtacatcttacaagtgagttcttctttgttggcttttcttctgttcattctatagaccaaattagattttttttcttttagccaggcatacatatctatatatatacaatacatgcaagtttatccattatttgaaaatgagtggttagatccacgcattcatgtaactacacttcagcaaatcatatcaacagtatcttatttgctaagatgaaaataaaaaagagaataacatacggtagtaatgcaactgtagtaaaaataaatacaatactactttatttagcaggacagggttctacatttgaattc

SEQ ID NO: 45525 - DNA, 952 bp, Oryza sativa
tgttcacttatattctggaacctgatgtagtacttgttttctacaactttgttaactctatgaaatattcaaaaccaaaggttttatgaagtaattctttttttcggctggaataagaaaggacagataccaatactttaatttgttaactttatataagccgaatggtaatcttttttctgcgcaacttttgccaaagctgaatgagaatctcgtctttgtaaaaggcttttttttgggcttgataaagggtgccaacttaggcagcacaacgtcaatcaaaagaaaaggaaaaagggaaaagagtggaggctgtggagctagcgaagaactggagctgtggagatgcactgatgcactggtcgttctttgttgtctgtgcaaagttgaaaaaactcaccggtaggccctccaagtttgattttaccataataccatttttttcttgcgcgaggaaatatcagtttgcctttgaccaaatgaattagtggatccgaagatgttgacatgaactctctctctctctctctcaagtggttaaccatgcatgcaaccatttttttaaatcttttataatttaactgaaaaatcgttcagtaaccaattgttaaaacaaacaatctagccattcactgaaggtaacatggtaagctattgactgtaaatatttatgtaatgtcgaaaataacttgccatgtgacatagcaaaaatataattttcaaaatacaaaaaaaaaatcacatgcgacccaatcaaatactcctatcagtgataattgaccccgcaagccatctagggtcaattctagtacaattccacgtagatttcctcccaccctaagaaaagttgtcactttgttctttaaaaagaccaactcgcgtgactttcttctttctgcgctgtaaagataatagaatgaaacattccggcttttgctcaagagagctacag

SEQ ID NO: 45526 - DNA, 667 bp, Oryza sativa
gcttcagaatatctgatttcctaccaaaaagtaaacttcagtttcctaaacgaaaaaccaactgggcatatctgttatgtgtatttttgtcaagtcatagtgaattttgcagaagcacaagtctgtggaatatgtacaagttaggggtattagacaaatttaattttacctgattcatgtaatgtacactgtttctcactaacaacagtggcaatccatagaaaaacaagttcaaacttcaaacataggttgagtgcattttgtctagtcctttttttagggaattgtctagtctaatttccactgtcatttatggtgcaagtatgagagagctgcaattccaattttaagcaatgtatcttatacctcattataaactgatttagttattcacaagttgccatgtctgtcttcataatgtacaatcacaatacaattgatacttggcatactttacagtttaacagcgcatgaaggaaatatgaaaattacaggatttaaaagaacttgaagctactataccaacattcagcaaaatgcactcttttatcttctgaaatagtggcttttcaagacacttccatctcagttcagtgcaatgtagcctttataagaactagaaagggacaggtgcttctatgctccacatactttaatttgcaccggt

SEQ ID NO: 45527 - DNA, 1901 bp, Oryza sativa
gatccatgaaaatgtttagataggcccacgtgtgaaattctaagcctccgcgtatcctattttgaactatttccttctttgtttcgaacatctatttgaaaggcaagctcatgtgttgacttaaaaagtttatatatagaatttttctataaaatgaaataagtgtttgtttgttagttatagccccggctcttttggctctacccaaaagggactatagtggctagagtgggagcggagtttagcttgctccaaaacttcactgcgtacttatttttttagttaaatttatgagttcgagctctatcaaacataccataagaataaaaaaacaatttatcaaaagattgaagtgtgtggtcaatccctaaactcgttgatttatatcatctagatcctaaactctcaaatacatttgtcattccggtcctaaaatgccataacccttccaagatcctacgtgacatatcacacgggtgtttgctcttttttttttcttcttctcccttttctcttctcttcttccttcctatctgtgtggcaaaaaagaggaaaaacaaggaggaaaaaagagaaaaaaaagtagaggagaaggaacaaaaataaaaagaaaatttgggttccgaatgtttatggagtgatgctatacatacgatttgccgtttacaatatttgtacgatgaaacaacttgtgtttattagcgtagatgctggtatgcagccgttaacccagtgccatgaattcttgtcatccgcgttagatcgtaccacgatcgtaagttcaaatcgtacgcatagcatttttcaatgtttttgtgctatgccatgttgtggcaatttataattgaaagacacagtttaataagttcggatgcctaaaactacattttaaaaattcaaaaactagatgacatatagggcctgtttggcacaactccagctccagctccacccctcctgaagctgaagctcaaccaaacagtttcaactccaccaaaattgggagtggagttgggtggagctctctcacaaaatatactagagttagacccaactcctagagttatatttaggagttggagctgtaccaaacatacccatacaagcaactgtgcaattttcttaaaaaaacaaaacacccatataattcggtcaagcaggccaccactcagattcggcctttcccagcacgacaagctcacaaacgttcgccgattagcctttccaatatagtactcccttcgtttcaggttataagatgttttgactttggtcaaagtcaaaccactttaagtttgatcaagtttgtagaaaaaagtagtaacattttcaacccaagacaaatttattatgaaaatatattaaattattgatttgataaaactaatttagtattataaatattactatatttgtctataaactaagttaaacttaaaacagttcttgaaacagtttgactttgactaaagtcaaaatgtcttatgacccgaaacagagagtagcatagtttatatagctcggtgcatggcgcgcacattttgtaccatataaaatttcaatgtcagcagtatgaccaattgtaccaggttactttgccatcttttgtcatacattagtgtaagatacgaatttgttgttcgcgtgtacagcaatcggagccaacggagtatttggaagtttctaacagagtacacaaaaaagatgtaatactatacaataaacaggatcgaagcccctctctaaaaaaacaaaactgatctaagcaaatcgtgcttggtgtttctcttctcatcctttctgcgcaatggcatggatcattcccgcacttatgtacattgcaattggcaagtcatagcccgagattgatcccaaaatctggttatgcattgctctctcgc

SEQ ID NO: 45528 - DNA, 758 bp, Oryza sativa
aatacactagctgaatgcacatgctttgcgtcagaatttgaaaaagagaaccccaccatacactctaaagccccctaaacaacaacaataatatccccattgttatcaatatttcccaaaaaattgtacatctacgtcaagctacatagttcctttaatatatatttgtacactcgtctatagagaagttcacttactcaccagtaagggtccctcatggcagtggtggtgggtggtgagactggtgacaaacaccattcaccaccaccattggagtcctctataggagtatatacaatatttatatacacagggttccagtgatcctatcaactacagggtgactgctaactgtcttttcaaagtattcactctcagtttacagggatattgtaaaagcatcttattaatctctttaggcctaaattaacagctactttaaattgtaaaaaccctttagttgcttttactctcaaaagattaatcaaggtggtttgaagatgtggttaactgtccaagcagttagatgttactgttgtatatgtacaagtgttggtgtttatagagggattatgcactaaaaattctcttaactgcaatgttgaacactcattcatcaaatgcaacttcaatgagcagtaattttgtccggatgtggataatttgtttcaacgtagtctttacttgatttgtcaacatacagaagggttctagcatattactccctccgtttcatattataagactttctagcattg

SEQ ID NO: 45529 - DNA, 779 bp, Oryza sativa
ggggaaatcacgaggagggcggacacctcaccctcgggcccgacgtccccgaaggtgccaggccacgtgggcgattgcgtctgcctcaagcctctggtcatgatactcccggtcccatatcaccgacaatgatgaatgcatatacttagataatgaggaggctgttgctggtcaagctgatgaaactagaggtgaaggggctgccaatgaagaatccgaggatgaatcttgggctacatctgaggatacatctgaggatgcatctgagggtgatggtgttgatgaatctgaggatgagtcaatggcattggatgggatgccagaaaatattcctagcgcaacttatgacaagaatgacccaccaatgatcgtaggaagcatatatcctaacattgatgaatttagattggcaatagcacaacatgcaataaaaaaggagtttgaatttaacattatccggagtgaaccagggcaatatactgcaaagtgtgctgctcaaggctgcaattggaggatccatgcatctgtggttgctgatggtgtcactatgatagtatgtatttaatttaaaacagcatgcattcttcaagtattgtatatgtattttattgtggtattgaatatctttatatttcaggtgaaaaccaatccttttccacatgaatgctcaagtacgagaagaagtgagactatcaaggctacaagcaagttttggatttgtgagaaagtaaaggattggttgttggaggatgctagtgtgggagcgaaggaattgcaaa

SEQ ID NO: 45530 - DNA, 2569 bp, Oryza sativa
tgctctatgcgatatattcataactctcttttgtagatcaagatcacttactggctcaaaccaacctgagccatctaatatgattgcagccatgccatgtcttggagagcaaacacctccagttgcaccgaaaaaagccaagagcaagacaaagggaaagccaccatgttctgctgttccaaacagcccagctatgggcacaaggagcaaaaataagagccctgcaatgggcactaggagcaaaagaaagcttatggactaaattatatatatatatatatatatatatggctagttgattaggttttatttggtactgacaatttattatgtggagcctgatggattttgttgttgtttgctgtgttatgcctcatgatgcaatgatgtagtggtatggaccttatgctattatgctcatgatgtactgcccacttactgtcatttgcaacatttgtgtatggagtggaaagttggtttggttcctgcactactaggtatggaaatgaaattgtggtctttgcatgatatgaattgttctgtatggatgatggaaatgagattgatatgaaatgctctttgtggatgatgaaaataaaattgatatgaagtgctttgaatggttgctacatgatttgattgatgatgtatgatgctcttattgatccggactattttgtttcacaaaattctatatggatactctctttatttacatcctgcctaattttttttgtatggatatgaaaaatttttttgcaatggatttcctcctttgtccacaacaagttcagcttcctattgaatgtaccaatttttgttgtacagaggaaattaatgtcactttgattttctaaccctattattttttttgatcctattatttttttaaaacgaaagtgatgtattgcatttttttccaataccacaataaaagttttaaacttattattagcctcataaatacacatattgtgtggtcaacgtttttcaattctttttcaatctacctagcacctgctgttcctcctccatctacaagggtattatggacattttcaatcacatgtaactggaaaatgaagaaaacctaacgggagaggcatggaagggatgaaagcgaaaattcgggggtataaaggggatcgagtaaaattgggggtatagaagagattagggaagttttcatgggtatacaagggatttactcctaaatttatcaagggtcatgcacttgataaatcaaaattggagtgtgacctttttggggtctactgataataatcttttggtacatgctaaatttcaagttatatgccttgaacagaatatatatatatatatatatatatatatatatatatatatatatatatacacaaaactgaaaatcatcttaaaggattacaactgaatttacatggaatccaatccattagacataaatgaatctgagtaattctctggatagtacactatgtgttcacggtaatctttaaaagcttatagaatcctcagtacatcgagttgcaattttgcacagataaatacaattctctaagaaacaggaatgaataataagaaatgtcagtggtagcatatggggcaactgtggaggcacaaatggacgcgccaagaaaatgtaaaaatgtgctatcaattgcaacttagggtgtgtttgaggagaaggggattgaggagattaggaagatacgcaaaacgaggtgagccattagctcatgattaattgagtattaactattttaaatttcaaaaatggattaatatgattttttaaagcaactttgctatagaaatttttttgcaaaaaacacaccgtttagtagtttaaaaagcgtgcgcgcggaaaacgagactcaaatctcccctatgtccccagaacgaacggagccttagtgaacaaatcttggagaagaacaatagtttattagttcagacaaaaatgagagttttaacttctatactgagaaatggaattttatacaaaaccatatacctttgaagcatgaaaaaaggggtcactcctatgatcaccaggaaaaaggcaacatcaaatgagattgtaattttatagtgatcaataggattttagtactgacctgattatttgacagagtctctgttcacttggtaaaagagttcacaattcaaattaatctgctttagtcactactcatattggaacactattccatgtatataccttgagacaaattccaggcctgctgatcaattatgaattgaccagcacatttggactgcagtgaaaacagaagaaaaatgatatctcagtcaataaaaaagccaacgtgtgagaatagccggtaaattagaactaaactgcacatagatattatactgctcttccttcctaatatctgaccatgcactgatttggctactcccaagaatcagatgggaatgattagaacaaaccactgtgtacaactatgatatgaagtatatgaaccgttcatatctaaaactctgcattgcaacaagactacctgaccaaactgatccatggaagcagatctgaaaaatgcat

SEQ ID NO: 45531 - DNA, 608 bp, Oryza sativa
aatgttctggatagcaagattctgatgttatcaagcataggcagcattggatataaagcaggtataccaacttgacagagcttggaagttgtaacaggaaaaggtaacatactggttttgagaatactggagttcaagaagctaggcttgttagctggagatcgctcaatcaagggtctcacaggatataaatgtgctacttgtgctgtcatatattgctgtcttgtgcgcaacatcctttccacagttttaagacggacatggagaccattttcccctgacagcaatttatcagcttcctacaaaaataggttcaagaaaaattagttaaatagaaaaaggcacatcatatacagtttaaaagcacatcgtatctttcttgttctataaaccacacatttagatgtgataattcttatatcataaggaacagtcattactactaaagggcactgggacaatatggatgaagaggaggaattaagagaaaaaggagatgatacagcatttgaggagaaggattaattcattggtcttgtagcttaatcataatgaatacaagagttatacctatatagaggatgaactaggatgcctaacaggaaacc

SEQ ID NO: 45532 - DNA, 699 bp, Oryza sativa
atggatcgagctctgaagatgacgagagaattgtcagagttgtcaccaaactcaccacgctttgccgccgggttctacatgaaatgagtagcacaaatggcgaccgacgacagctcagggggatggtcctcgttgcaatctccacggcgaatattcttctttggttaattagtggcttattattcgccgtcttagaattaataatcacatcctgtaattaaatggccaaagacagtacagtacactagttctactgctcatgacacaagtctcaacaagtcggcaaatcttgtttgcatcgtccactccaccgtcgtctggaacgaagaccatatgccatcttctcctttgactactttcttcagcttcaattagcatcttactcactacactaatcccatcagaagaaggttctaatgcacattaaggaaaaaaaatattggatcaccaagttgttgtaggggaagaaatctagagcactgatttttaatctggttcggtggagatgtggctgtaaagtaagttcagcaggtcatggcttgatggtgacttgtctgaaaaaaatctgtttttcaggagggtttacttgtctgcttctgtaactgcaagcacttgaggttcagacgattggatcaggttgaggttccaactgattttcagatcatgtgggacttttggttgcaccatgaccatactaca

SEQ ID NO: 45533 - DNA, 619 bp, Oryza sativa
atagtattatacctatgtataaaattttatcttcaaattcattatattttagacgtaacaaaaaagacagaattttacccttaaaactgttagatttttcacatctttgttaccgctataatataatgaatttcaatataagacttcgcatatatgtgtaatactattaggagtaagtgtccatttttttctaaaattttttgtgacatttgttagttggtgtgcacggggaacttgtgtgtataggatatattttctaaattaaaaatgctcaacaatacagtatgtggaaacgcgtaattctttttatcaaacaaattatctaaggtatgtattttgaatatccgaaatgccacatcgcctccttgtgctcatcttttctgccacacccacagcacgccacgtgtcaccaccctagccaaccttcggcgttttaccctctaacagtgccagggtttacctaataacgcttatgctgggacacggtaacggtttaccgtggtatggtttggatgaaatttgagcaaattaaaaattccaaaaaaaataaaaaaagaaaaaaaatcatggatgtagttcttgatttgtagtggcagatgatgaagatttttttttaaaa

SEQ ID NO: 45534 - DNA, 609 bp, Oryza sativa
ttctggcagttttgttgtagaagattttatctgacattctttcactgtacataaggacttgtaaaatttgtgaaaccattcttggaaccacacgatgttaggaaattcttggaaccagattgtcccagttacctaatctgtttgtttgacagtgagcgagcagaattgctcgctgaatgttgtgcagtatgaatcagaaaagtgaagtatggtgcatgggcagcatggctgctgtcgtcagaaagtgaaataagatcttcaggattcgtttgaatctcgcttattttactgattcgatttacaacctcatcttttcgcttatacttatacttatcggtcaaaatttaaattttcaaccttaaatttggagttgattttggagttttttcatcgaagtttatttttcaacttttgcttttagttcgccaagaacacatatataaaagttttattcacattatttttcgtttgtaaataagccaaacgatggggccattaatttccatctaagttattttgcgtagtcctgatttgtttatacttgcaaaaggcatagtcatgatttatttatactggtaaaaagataaaggtggtgaatgcccatccgac

SEQ ID NO: 45535 - DNA, 695 bp, Oryza sativa
tgttctggaagttttgatcctaaactcgcttttaaactggttgctcttcacttgattttggtgcagtgaattttatattgaataccaaaagaagcgggcagccgaggttgatgacgcaagactgaaatttgaaataagcacagttctgtctaaggaggtaatgcactacattcagcacatcttccttcctatgggcattatgattatctaattaatgcaccgagcgtatatattttttaagtagaagactagcagttattctggaatattaatatcccaagaagaaccatgtattcgtaactcataattggttgatccattctacagcttatcgcctcttatttttgcctatttaactttcttgttttatgataatcgatggttcagtaacaactttttaaaatggacacattgaacaggggattgaagtctgcacggtatcgtccaatggtagagtaagtttactagtttccatatctgttctttcatgaaaattgatgtttgctcttacttatttttaatatattcacttatagccagatgaggtgaaatttgctgtcccacttctggatctggaccttgccaaactggttcctggatgtccttggaaacttcctcaaagatccatttgcaggttaacttctaatgccattccttccatgggcatagttaaaatggtagcagtgatgatgacg

SEQ ID NO: 45536 - DNA, 678 bp, Oryza sativa
gatttgtttctgcttagttaggtagccagccggtgagaattctccacgacttgatgcaccaaacacgcgttgccgcaaacggagcgctttgtttgggttcgaaatctcaatccgccttccacgtccaattcctcaaaatcacaagttgggggtattattgatttgatgttattttttgctgcgtttcttctctcgccgccgtgttcagaaattcagagaagctgtcaaactgagcatcactgtgaagctttaattgagctgcctttcgctgtcaaggcttccatggggacttcatctgaagctgctctctcgtatttcagtctccgctttgattaactcaaatcaaactagattggcagtggtctgaggatgcagaatttcacaaaccgtggggaatctgcactgcatctttgcatgaattctttaagcggatcaggggaaagagagggacacaacaatacatacagcaagtgaaaaccaacagcttacacacacaaaaattcatcaagtccgtgtaggatgcagcagagtcaatcttggcggcccttggtttatcatattgtaagcactattgtcctataggaggaggattccgtccttttgctcagataagtgaagaactgccgtgcttatttaacgttcacgttgctgtcagcctgagtctacttcttggactgg

SEQ ID NO: 45537 - DNA, 610 bp, Oryza sativa
ttaagcgaataggctgtaccaaattcatttatatttgacttcatcatagtaccattttttaagtgaataggctctaccaaaaatggttcagctcaagaaacaagacaatttcagcaagacaattttaatgtagtcctccgtacgaatgtagtacctatagtgaataaaaatcgaataacggaggtaagtaatcgctgataattagccaggataccagaacaaaatctagcagaaaacttctactataatgtaacaaagaaatcttggaagacttggtatttcggcaattaataacatgaaacaacttgatcttactgttttccctaattataatcctgaaatgtacttgcttgcaattgcatacaagataatgcagaataaacacgcattatcctcgagagtaactaaaagacaattatgaaacaacttgatcttactgttttaccctatttaccatcctgaattgtacttgcttgcacacaagataatgcagaataaactcgcattttcctcgagagtaactaaaaaacaaaaacaattatgaaactacaagtacaaggttgatagatttgggtggctgcaaaagcaattgtgaaaatgacatctaact

SEQ ID NO: 45538 - DNA, 612 bp, Oryza sativa
agacaaaaagatgagcctacacagcatatgattttcccctcagccaagaatgtaattttctatgtttttaatcagtcatgggcatttccttaacattaggatgcgcatcactcaaatcagaaggtgaaggaactggaactacatgtttagaggacagcaagaaaaagtgttttggactaagtgctgaaatgcaaaccagtagaaaacatactgagacttagtcaattctatatccacaaaagcatgcatcattttgacaactgaacatccatacgaaattttggacatgatcaaaacacacaatttttctgcagttaaatgtgaagttggggaccaactcctagacttgatgattcgatttatactacactaacgtaacaccatatcagctgacaatagtctctatgatatcaaaaggtgacaaagtatttaaatactctagatgactcatttcaatgatatttagcatgattaaaagcaactatcaacaaatctgacaaaacactctttaccattgatcaacacagtggggataggtcatagttgttacaaaaaagaaggcttctggagatgcagtgtaaactctaatttataacagaatagatgtagctt

SEQ ID NO: 45539 - DNA, 678 bp, Oryza sativa
atttaagaggtaaacactgtactaccagttgaactgattagaaaatatttaataaatgtgtagtcgagtggtaatgtaaagggtaggtgaagtaaagcatacccttggattccacttccccacgtacccaagttactggactatcaataatgagggcattatggctaccgacatctaaaaatgacatgcattaatttggcaaacagaaaatttaaacctgttttttttttctcaaaagtgttttggtttggtaatgtacgtctcctgaacaattgagatttgagagtcggtggttaaaactaaaccgtgagataaaccaaccggtgctttaattaattttgcacccccaatataagcaacaacgaactcctacgtggcggatggtcgagacggtcatggcgagcctctaactccccaccaactgccgcctctcgtcgcctcgcctcgccggcgccacctccgcattccgttccgaccagccgatcggtttcttcctcgccgttgcaaccttcgagcgcgatcgatcgaggcggttgaccgccgattcgccgcgcggcgttgcattgcacgcggctttccagttgataaatcaatcatcatccccttgatcgatgcgagtggcgttcttgttcgatcgagaggaggagatcgtgatcgcgagcgatccgggcggggcgg

SEQ ID NO: 45540 - DNA, 692 bp, Oryza sativa
agatgtaaaccatttatattatcttaagagaaaaatatatacacagttaaccgagcactcctaccatttcataattctttgtgttttgaacaaagttgaggtcaaacttttataactttgattatcaataattttaaatatatttagtttaaaggagctagagatttatctttcaaagtattataagaaaattaaacatgcatttatttattgtatatattataataaaaaaacaaaatcaaatatatattttggagaacatgtcattgtccaaaacgttaagaattatggaaccggagagagtatatatagttgtgtctccaagctaattaaatcctgattactgtaatgtgggatattaaataaaggcactaatctgttcattttaagtgatttggtataataattgtttatagctcgttaagtaaagacagatatggtattatattccattataaaaaaaagcattaatctacacaattcgaactttctacttatggctattatgactaactttattttcatatccaattgagattagataaagagatactccctccatactcataaaggaagtcgtttaggataatgtttaagtcaaaccttgggaatataaatcatgaataactctcaaattattaagtttgaaaatgtaaaaattatatgaatagatttatcttgaaaaatatttt

SEQ ID NO: 45541 - DNA, 635 bp, Oryza sativa
agtcaaagttataaaagtttgacaaaaaacttgtccaaaacgttaagaattatgaaaccggagggagtatattggtatgatttttagacaataaattttggtccagaccttagggctggctgattagtatgaaaatcaaccgagggagtatttcttaagtaagatttcccgagagaactgattcaacagggccttagggctggctttaaatagagcaatattgtcattccgcacacaattgtcagcagaaaatgatagcttaggaaaatttggaatgacataagatgttaagtacttgcaggaaagcccttatttatcatttctttcatgaaatagagggtttaaatgatccagttgcacacagttttttttctttctgacaagtgccatgtaaggtaaaacaaggaacaggggatacctgcagaactgcctgtttcttcctcctttgctgtgtgtaacataattgttccggtaagaattgttatcagaccacaaaattcagaagcaatgctactgaagctttgaccagcccagtcctgcatttgatagtaagatgaattaagtcgtgagccccatccaagggatcagtctcaattaactaaaccttaaatatttgtttctaccttgaacataat

SEQ ID NO: 45542 - DNA, 552 bp, Oryza sativa
cctcatacgtatgataataagcgacaaggttcagccaatgtaaaggttcggctggatagagctttggcagatgaaagttggagggatatttttaccaatgcacaggtggtccatctgacttcgccatgttctgatcattctcccatcctagttaagtttacaaccgggagtgatagacagtgccgtgctaaatgcctgcactatgagatatgttgggaacgtgaaccagcagtccaggacatagttaaggatgcttgagtagagtcagatgagatgttgcatctgggggatattagcaaagctttgaaaagggttatgggggctcttcagtcttggagtaaggtgaagtttaagaacattggtagagagctagaaaaggcaaggaaacatctggcaatgttaatggaatgaaatgctgacagtagagagatccgtcaggccttaaaccgcatgaatgaactgttgtatagagaggagatgctttggctgcaaagatcaaggattagttggttgaaagagggggatcgcaacacaaagttctttcataataaa

SEQ ID NO: 45543 - DNA, 723 bp, Oryza sativa
atctttctccacttcaaatgtctttagtacatgtcagcctgcagttgctgtgacactacctcccactgattgtgaattgtgactggcaaatggtgacacccaaaacctctctttcctatgatgtgcttttcgaaactaccgtctcatatggactaaaaataccgataattgatcactagaccagtgtattcatgtcagcttttccccagatgtgtcacatgaaaatccacctcaaaatcgacaatccttaactaaaagccaaaaaggacagataaaaaaggtaggttaggacatgtactgctgattggttagaatatcatttatcactagcaacgattggctaagtcaccaatttaatcaatgtactagctgcatccaaaagcctcttcacaccacaaattaagacttgggtaactgttcgtccctcacaaatgcaactatcttcccctactgtttccagtcaaaaaagaaaaacaaatgtaactctctaaaggaggaaaatgcagaaatatcctggttcaaccttactgtctatttctctgaaagacaaactcctcaaaaaaaatgaaattgaatgagataatcctactccagaaactgagcaagattaaccaatcgccaatgtagaactaatgtggcaaaatccgagattcgcaatcttccatttgtgccagtatccttggggggggggggataatataataagacaaaattcctaaatct

SEQ ID NO: 45544 - DNA, 658 bp, Oryza sativa
ggtggcaatgaatgagtacggggtgaatgacaggtggggccgtgtggactcgtggcgggaggtgggtggtggggggagtgggtgtttggtgtttgtgtgtgaggtggggtggtttggggggcgctccagaaacacggcgggtggccggggcagttgatgcttccgttgtccacttgtgtgtctgtaccccgtttttattacacccccaaaacctgcctctctctctctctctctgctatcaaggattagtttgtttcttcataaccttgattagtttataatgaaatggatcactagtttattttccagtacatttgaccaccatttcaccgtggctttaacctctcacagtttgttctacggtttaggtggttttcttttctccagaaaatgaagatgatgaagattaagttttttacgtaaaacgaggtggtatttacgtatgatttattaagtataaattattacaaacttgaaaatagattaatatgatattttagagaaactttcatatagaaagttttcacacaaaacacaccgtttagcagtttgaaaagcgtgctacaaaaatctttaacttcatccgactcttattggagaaatgaacaggaccttaatgaaatggattactagtccttaaaagatgaacgaggcaacg

SEQ ID NO: 45545 - DNA, 691 bp, Oryza sativa
agtgcactatgcagctcgcttatgatgccgcatgacattccactgtgcattgtgacatcgatatgctatttagttcgggtttcttgcatcgcatatggattcttgctaaacagtgctgtccaaagctttacttccgtgttgtatcaaacttgagcccatttccaacctatatataatttatctctcataaccttcaattttatgctcaagttttcttatgttagaatatcaacatgcttaatgctttgttacgttgaagtctgaacaaattcatatttcattgttggcattcagcacagaatattcttcttaaaccttgcacattagttcaaacatatgtaagttatgtaagttaattgttagataggttatcttacaaacatacaatgatgtattgtgcacaatattgttaattggggtgattttttataagaaagtttgaaaatcgctgcctgcaggcacaggtggcagtggttcataaggggaaacaattgttacaatttagaatttcgaactggaagttagtactaataattattccagttaccacatatccctgctattatgggcattgttgtaatctgatcaattgcttgtgataaccatgcacccaaagtggcagaccgttagtgtataaagttaccatgcaatctgaatataatgtcaaattggtgaaatcaacacatataaa

SEQ ID NO: 45546 - DNA, 684 bp, Oryza sativa
tatgtcatactaacatgctccaacatgtgaactgacaataatgtgtgcataggttcagagcaataacatggttaagtgggaaatacctcgattccaacacaaataggcagttgcgggtgcttgtcacctttcccttcagaactcttcttgtcatccagatacatggaatagccgatacatccatatctgaagtcggaaaggttgcgaccttcctggatagcttccatctcaatttctccaaccatgtgatcagggactgatgcagaaacatagaacagtcagccaatgccaaccattgcgaccgaagaaaacaattcagattgagcatttaaacaatccataaaaattaggccaacagttaagtactccattaaatgacagcaaattcagagtaaatgacaacaaaacatttcaaaccaagcaaggagttacggcgcagtgcgatggcatgtaacactgtccagatctgcagttctgctgctattaggcattagcagtggcagtggcatgctaactagcaacaagtcaggatgaatacaaatatcgatcgtgcgttgtggtgtgtggtaaggatcatggttacttccaaaagttacagttgctactatgaccgcgccaatccagcagttgcgattgaacatctacgttccccattgttcctgcgtgcgtgcgtgcgtgtttgca

SEQ ID NO: 45547 - DNA, 815 bp, Oryza sativa
cctctcccattccaaacaggtggatgcaggcgacggagacagaggtggcagcaccggagcaactcacgagcaggatgtgacggtggcagcgctcgccggcgtgagcagcggctgctcggtagagagcaggtggtggctcagcgacgctgtagcaggggaaggggtggcttagcttggctcagcaacgctgtagcttgctgcgaacatcgttcagagtaggagcagcaacaaggacacacgacaagcaagctcatccacgaggccaatgcaagggatgctgcctcctgattttctttttttttccccatctcatagttgagagtatatatttgggagaattttgtttggtaaatattttttttcctgtgaatgcgatgaatccttggtgaattttttgcgccctgtgcaacttctgtaaaagtgatatccaaactctatcaaaatttgtcaagtttggtcaaatttgagagaaaatgtgaagggtatatatgtcttcttgcagctcatttgacactgttagttggtcttaacagagtaagggcaaattgaaacttcgtttgaaaaaagtaagggcaaaatcacaaaccctaaaaagaaggggtaaaatcacaattacaatccaaaataggggtaagaatgtaattgtccctttctttttccccttcctttttacagtttgaaatttcatattgttttgtatttgaagtaaggatgtgtaatctaaaaacggcaaatatacaaagacagtgtatgaaaaagagcactagattagaaatgtgcatcaaatcgtacagtagctctctccttttcagctt

SEQ ID NO: 45548 - DNA, 643 bp, Oryza sativa
agttaggtctgcaaaacgagagagtgattagtacatgattaattgactcttaattattataaacttggaaaaggaatttatttgatatttcaaaacaatttctacatataattatttttgcaagaaaacaaaccgtttaccagtttcaaaagaatgctaacggaaatcgaggaaaaatatgtgtcttaattggtgggttcttctctgattaagatacaaaatttacctcgatttttgctagcacgcttttcatagtgctaatcagtatgttttgtgtgaaaattttatgtatagaagttactttaaaatataaaataaatttcttttttaagtttataataattaaaactaaattaatcataaggtattagctattttgctttgtatgagtataatagtcaaatcaaagtactcatccatagtgcacaatcatttaaagagaaccaaatgagaccctctctctctatgctcatttcccccctataaatactctacttgcccaatccctctttccccacaagaaccacatcctctcatctctgtcattctgcagctagctgaaaaaatcttcagagcatcatcagttcatcacaaaagactatcaagtactacataagatctcccttactctctctctagacct

SEQ ID NO: 45549 - DNA, 1334 bp, Oryza sativa
cccttttcctagagctcaggttttctgagagtcgtcccctttctcggtgggcaaggtcctccttttatacctcaaggggataccacatgcactgcctctacctactctcctattgggtggggacccaccctatcttgaccgaatctcgacccgtgccttcgcctgtaagctaagccatagcttgtccttgagtggggcccagtgtcgtccctcgcctgacacaggggacagccctgtcattcccttattaataggtgaagacttgtggtggcctccctttcgtggggagaactccgaatgaccctccgatgggacgggtcatacctacctccactccaccggaggcagatgcgacgtgggggcacggccgtccgtccagtcggatgtgaccggcgacaagccggtcacagatcgatcattcctgaccgacgcgcgctagtcgggcacgccgcacgtctgcccctactgcattgaatgcggcatggggcagttggggcgctgcgcgcattaaaggtggttcaggctgggccccttccccacttgctcccccgccagatggcagctgggcgagggcctcggggcaaagtggtgcgagggcccgaggggcatgacgtggcaccccgaggtcccccggccgctcctgcaagtcacggggtgtgggggtagggccaggctgtagggtcacgcgacaggatgggaaggtaaattcccctcacttcgcatacccccgggcccatatctccgacaaatacaatctcagcgcatcgccaccctttttacttccgttttgtttcgacgagttcttgctttcgggttgagctacatcggtatcgatcttcaacaagaggtaaaacttgttatggtggcttgcgttctcgggattagtgcttccatcttcatgacactctaatcttgtttatgtaattcgccgggttatcatatatcttatataatctccggcaatatcgttatccaacctacaatcggctaaaatctgtcagaaggcagccgattaggttaaataccgatgttgacctacattatataggatatccaccactctatgacacatccaacgacttgattgtctagatattgtccttcttttcatacttatagctgcatcagttgagtttgaccttatgagtcgtgattagaatctcaatctctagcttgtctttggttgccgattaggatagtatcggagtttcagccgatcttatctgatttgactatatttatcttataagctttattgacatgttaaatctgccctttatgttaagatcttgttgcatgtaagtatattaggctttctgtttgatatattttac

SEQ ID NO: 45550 - DNA, 1143 bp, Oryza sativa
tacctcatatgtatcatcatgtttgaacacgaggtatccgccgatacctagcaggtatcaagcgatatctcagaggtaccatcctgtacgaacgggacaccgtcacgtagaatttccctttatatttagcaaatatttgttatcatatttgttccgtttcatattcatttcgtatctatattcgattctattttcttattcgggttttcaaatccgattttgagaaaaaattataaaaaacgaacgtgataaaactagtttccgatttcgaaaaagaatagtgcctttatcctaaaatataacaatttatatctctcaagatttgtctcaaaatataacaacttcttcaccagcattctcttcccaaccaatcacaatcctttaccattcacttttcccacctacctccactacttatccaatcacaaccctccaccatttaggccctgtttagttcccaaaataaaaattttcacgctgtcacatcgaatgtttggacacatgcatggagtattaaatgtaggaaaaaaactcaattacacagattgcatgtaaattgcgagacatatattttaagcctaattgcgccatgatttgataatatggtgctacagtaaacatttgctaatgacggattaattaggcttaataaagtcgtctgaatatgtaatttgttttgttattagactacgtttaatacttcaaatatgtgtttgtatatccgatgtgacaactaaatccaaaaagtttccccaactaaattaggccttacttctacctactttattactcactccacccctaaatataagggattttggttgaacttatatatcctgtctagattttgtctagattcgcatacttagggcatgctcactttaatgaaaaaaaaaaccttaccaaatttttggcatagttgccaaaattttggtaacttgttaaaattttggtaggatttcttatatagtcatcaaaatttagcagtaaactaaatatagtcatatttttagtaactttatgttaaaaatggcattaaagtaaacatgccctcagagggagtaataaccgtttccgtccgttttcatgcgtctagcctggttccgggtccggtcccaccggaccatccccgtgtgcgatgcg

SEQ ID NO: 45551 - DNA, 1297 bp, Oryza sativa
gaatgaaaaaactaatttcataactcatctagaaaccgcgagacgaatcttttgagcctaattaatccgtcgttaggacatataggttattgtagcacttatggctaatcatggcctaattaagctcaaaagattcgtctcgtgatttacatgcaaactgtgcaattagttttacctatatttaatgcttcatatatgtatccaaagattcgatgtgatgtttttggaaaaatattttggggaactaaatagttcctgaaggcaagctgttcagattgagaggcaaaactggtctgctcctgcctgtaatgcctgacactactctagcgtgagatctttgacctaattaaaagcagcatgatctgattataaattactattactactattactaacacactctgttctatatggttgcttcgttgacctggagctggaacagcttaggccggcgaatgcaggagcatagcagcagtacacgtggacaagataaacaaatacggcatgtctccattagatcgacaacgagataattaagcttgtcaatgagctaattaagcctgtttagatccgctaattaacaccggaaagaaaaattaatgcagggacgtgcaccacctacggatgaataatgtactccctccgtcaaaaaaaaaaatacctaggtttccgtgtccaacatttgaccacccgtcttatttgaaaaaaatataaaacaaattaaaaaaataagtcacgcataaagtattaattatgttttatcatctaacaacaataaaaatactaattataaaaaaaatttatataagacatacagtcaaacgttgaacacggaaacccagggtttgtctttttttgggacggatggagtagtcctgaaccaccgacctatgaggctatgtggattaatcttgtacggcaggcacgcaacatccaccaattagatccttgtcatcgtggtcgaccgctcagtacagtgtctaagggtaattcctccggtatttaaagtttaggatggataatgtctgattttcaagttcagagaggtaagtcagtcgaccgcgatagttcggaggggtaattcacactttttccttaaaataataccactgctattcacaatatcggctggatgtcatcgatattttatcaaattataaccatgccatatatacatttgaattaggtttttacataaaatatttttatacataccaaaatgcacccaaccctagaagctaacaagtggcacccacattatcatacgcatcttcgtccccaagccttatcttggctg

SEQ ID NO: 45552 - DNA, 1768 bp, Oryza sativa
aaaatggtgagttgctaaagttggaagcatttttaaggttctcgtgaaatacgaccaacttttaacctttagagactctgccattggtggatatggtcaagctatccacggcaagttattttttaaaattaaaggaaacttttgttaatctcagatgattacattaagttgagaggaccatattaagaacactcccaacctttgcataaataggatgaatagatttggcacggcaatcagccaatcacatagattttggtagccaaaggtacgccataatgaccatcaaatgaccaagttgtgtcgaacagtgagcactagtaattctcaatgatagggatcttcagcatgggaaagtatataacaaccacaaatctcagtgagaaaatcatcataatctgcgtaggcagtccaagaaaatcaggggtactactggggtacattatctggtaggggggcgatatagacatttatcagataggaatgcatgactcaagaatcagcaacacctgccaatcttgcacaaccaagaatctgcaaatcaatgactgaaaatctgaagtaagaactgcaaaaatcattatggaattattaactgccggccggcagataatatcatgtctcagttcataccacatcaaccatcagaggacaacagttacaatagcatgaagttttccagacaaatagtactattccgatatggatgcacaaaagcctcagactttgtactcacaaacttttcaaacatcatcttcaatcgcactaatctccttacataaaaaaggtgcactgtcagcttcccactcacttaattgtatgacatgccgacagttcatttttcaaacgtagctgctcagacaaagaaatttggctgaacaagagatgcatgagcacctatctagtaaagagcacctaaaaacatttaagatcatcattgacaatttgggaatgattagtaaggtctatatatgctgatttacagaaggatcaccttcccccaataaatctggcctctataggagagctattcaattcaatacaaacaaacaagagagtaagtatgattattgcccagcaccaactcgttgacaagttaattacagtgaccatcactactcaatcacaaccgacagaacttttatatcaatgaaaatcagattgaataaataccgatggaaagaaccaccaaattaagaaaataaccccaaaggacagccatgcatgaaaaataaatgctaaaattgcattaagctaatgtctaagcagtgcaacttgcattgctgaagaaatcaatcaattatcaatgtccaagatcatatgctgactgtacattcatgctttttttttatacataactggacattcatacttactatgtttcatttacgcatagtactttattgcacgagcaattttgaagtccttgtggaggtaccactttttctattataaatttggtacctcatagtacactaaattttttatacctcatgatatctccttaagaactgtagaattgttcttattgcgcaaccttcgaattagaagatctgggccaaaatgagaaatattggattattaatcaagataagctgattacttatcgagatatatcattaaagacataaactcaaacttgttttcaaataaaacatggcacttatcttcatcaggattaatataattacacttaaatatctagcttatgcaatgaccttggatattactccctctatttcaaaatgtatgacaatgttgatttttt

SEQ ID NO: 45553 - DNA, 705 bp, Oryza sativa
agcaagcaatacacgcatgcagctcaagaaggcaaaaacaaatggcggcagcgaacattcagtcattggaccttacaaaaacagagcaccgtaagctattacggtgacctcagctcaaacggcgattactcaaatggggaagggaatacatgtgcaacctctcaaacatgttgtttattcatgagtacagcacaagccatgttatgcatacagcatgcaaagccaaccagcaaccagagattgtaacaactaacaagcccacgcaatgcgagctgctaccatcaccacgtgtccacagaccagcacagaaacaagctgccctgctgcttgttttgcggccgtcccagcaattgacagattaataggagcccataatattagtgcaccatataaataacattatgattttagccagaaggcatcagggcataagctttgatgaaattttacagaaagcatcgcatttttttaattaatgaaaagaataaacctaaaccacagacagggaaacaattcacaatgtcagattgcttctcatgtatcacacagaataaagtttcaattccaatacttcatatgttggcttctctccagtagcggtagaagtacaagagggaagagaatctcaaaccaaaaatgatctcctgggtgctgtgcaatggcttcaaaattggggtataccacccaaagaaaaggctcaacttt

SEQ ID NO: 45554 - DNA, 739 bp, Oryza sativa
ctgtagtccacgtgtagccagcgcggggagaagtttggccagccagttagtcaggtgttggagtgtatttttgatccaaaattgccaaaatttaacttgaagagtgggataaggaggctgcctggacatgcagaacccgtagtccacgtgcctgtcgtattccttcgctgccatgcacgtcgtctatggtgttgcaccgataccccactcacgggcgagtacaacatccaactgtgaagtccaaggcgacatccgcagcagtggcggacggcggtacgacactatttcaaccccattatttcgcttattcatatgcttatccaaatcgcttattagaaaataaaaaaatatttgtgactaaaatttttatattcgtatccttatatactcaaaagcaaatgttgtaaagtaaactacgataaaaaaatcaaattcaaaattaaattctaaaattaaaattttggtttataaatataagtataagccaaacaatgatgccctttgcctgtctggcttggcaacgcctagaggtacaagtgtgagtgagtccccttgctctgcttcttagaggtggggatcacaagtgtacgagcagaatagtgtactacctctattctaaaatgtactaatataggattaggaatatgaacattataggatgtgtgtaatctaattctcggtttctacattttgaaacggagagagtaaagttttctatgggcccattccgacagatctg

SEQ ID NO: 45555 - DNA, 2167 bp, Oryza sativa
ataacgacttcctaccaacttaattaatttctcttaacatgcatacgggggctatgtacttatacaaattgaccttgatacttttaaagcaatcttttttggagataaataaatgttcttaagaaagatgatcataacatccaaattacacatatgatctatgaagtcattaataaattagagaaaaaaaattaagtgacataattttttaatcataaatgtactcatctagcattatagacaacaagttgaaaataaaggtgcagtcagttgaacatcataccgataagcatgtgaattgcacctaggaatcttaacaatgaaactttgaggtggtcttagaaatatatcaagtcacttccatataggaattaaagaccatgtccttatttttaattttaattttgtggtaaaacttactaacattgtaaatcatgagtcctgatgtagaacaatatataaaagtgtatttttttatcagacacttcagtatagcgataattccctaaaaatactacgaccatgtcttcaatatgtcgagagaaaattcaacacattttcctttacaccatgccataaatgcatttaattttcgacccaaattgcaaagatctcagcatttcaatggtgattcatagaatggaaatctcaaaaaaaggacatgaaatatattgacaattgctaaaatgttgctggatttaaaacccattataaataggaaaaataaaatgtttaacgaagactgtctagacgaaaatatataaaacttaaaataaaaaaatgttattattggatttcttttggggttgtgagatattcttctgggagtcaaaataccctaaattttctcataggaaccgcctccattgtttcaacatattttttttctcataaattcaaaactgcatgatcttaagtaattttattttagaatttatatgttgcaagtgtaattataagaaaataagtagcattcaaagcacaataaataagcttaattttagtttagaatatagtaaaaatattttaataaaaaatcagccacacataaatattgataataaaatttcactcatattatatgaggtgcccgcacatgtgcgtgggctatctttctagtttttcctaataagtagtagtaaatatgaagagaatgcaaaaggtattaactagagataatagagttagcatcagaatagatatatattttttagatatagtgaggacattacagcatttttcacaggaaacagtttagttcccttaaacatcctctaaggaggcctaaacagttgaatatcaaatgctagcagcaacaatttactagtccctgccagaaaataattagcaagatcagtatgctcactgttcttctaaatctgcacaaaagttacgcataaaaacaaaaggtttgactaatctgaccagtgacgacattgataaaccctgctccatcgatctgcagaaaggcttgcggtaacataggcgtcggcggcaggccattcaagagtggtggccggcagaggcttgaggagccataaagattataaaaaggagtactctctccgtcttataatataaaggattttgagtttttgcttgtattatttgaccactcgtcttattcaaaaaaattttagaattattatttatttttttgacttactttattatctaaagtactttaagcacaacttttcgttttttatatttacataaattttttaataagacgagtggtcaaacaatctaaacaacgactcaaaattgagtggtcaaacaatctaaaaaaacttaaaatcccttatattatgggacggagggagtacttaataagcacagcatgtagcaaacggcgagaagaagataattaagcaagtctccatcgatcttacgcagcggcaaaattaacctaaaagctttagtttattgttgcgaggcctatccggttgtcgggcctgccaagtgcaatgctagctttcaaactaatcctcttagctggatatgtatcattcgctaatctgacaaatgaaacagcaggagcacagctgcgttattatatggaaggccgacctggctcggcaagggatatcccctctcgatcgctcgtcggctatctgtcatatcacgcacgaaattgcggctgcaaatgctactttacgctctg

SEQ ID NO: 45556 - DNA, 1567 bp, Oryza sativa
aggggaagccaagaggaggtacgacgagttcgtgaggaggaagaggggcaggaaggagtccaaggccaggcgagaggtgctcgtcgacctctgctgctccgccgtcagcgccgtcgccgtcatcagcttcctcgccgccgtcgtgctccggtagcttagcaagcagagtctttcccaaccaagaccgataaaaccaaaaaacctgtttttgctcttttaccgagagaaaattttgctctgtaaatatcactgtatcgagataaaatgtgttttttttcacatttggtaaccaagcagtgcaacatattcctttcgttcaaaaagaattaacatgtgatcccttctaaaacaatttattagaggggtcatttttcctcataggttaatttttttggccgggtcacttccacttctaggttttttttttttttataaagagagtaaacatacgtacagtagataccctactgtgttgcataattgcatcagatccgtcttgccaagaaacaccatgttcctctacactattggagctaaaaattcaggcatttcaacagaagaccttagccatgatagtgtcagcaataaaatcgtgaggtctacataccgatcgccgaggggggccgggctgaaggatattgcaatctgtcatggccaaatggctggcaaaagtccataaactgataaaaacatgcatttcggggtccataccgagacgtactcgtcgcgatcgctacatgacagtcaactgggcaccatccttatccgagatggtgctatcgtttgcatgtatatttgtgaacgaaaaataatttgtgaatgaaatttttatatacgtgttgttagcgatttaaaagcaaagattaaaaaataaattacgagaaaaaaaaacctcaaaatcaacactaaattttaggttgaaaatttaaattttggcttataatgtccgcaatgcagtgggtgtctgttgtactatggtgttcggtacctcttcaagtaccaaagaagaaatacgttgcatatatttttcttttccaatcatataaagatgtacatgcgcatcgcactcgctcaaggataaagagtaggaatgcaaactgatcggatttaaacggattattatcattgtatatttgattagaaaaatcaggtgttaggtacggcatgagcgaacttggtctagaaacatatcaaattatcggataatatgtgcatgtgcagataacataacaagtaaaatacgcaacaaattagcatcaactaaggaagccaattaggcttaggctcctaaactcatgaaaaaaatcacttaatagcatttgtatgagttatcatggtgtatggtctagccatatgatgtggtgaaatgggccaaaatataagattatatttatcttaatatttcctccgtttcacaatgtaagtcattttagcatttcccacattcataatgatgttaatgaatctgacatatatatctatctagatccattaacatcaatataaatgtgggaaatgctagaatgacttacattgtgaaatggagaaagtagtattttatctcatt

SEQ ID NO: 45557 - DNA, 1280 bp, Oryza sativa
ctcccttttagaaatagcattttctaatactcgtactaatccatcacttatacaaaaatctttaatccactggattttagaaataacttgccatatcctgtgtcttgttgaatttatagtggattggatcagaaactattcttccgttctcattcctaacaagtaatccaccccccatgtttgtaattgtggcaccaagatttaattccatctccatacaaaaagtgctccctgaaacacacatatatgactaaaggcatgtttagatcaactggtaaaatttttcaccctatcacatcgaatgtttggacacatgcatggagtattaaatataaaaaaaataactaattacgcagattaattacacagattgcgtgtaaattgcgagatgaatctttaaacctaattgctccatgatttgccaatgcgatgctacagtaaacatttgctaatgacagattaattaggcttaataaattcatttcgtaatttacagacggaatctgtaatttgttttgttattagtttacgtttaatactttaaatgtgtgtccgtatatccgatgtgacatgccaaaatttttcatccctgtatccaaacacagcctaagcaggtcacttcttcacaagttcgaagcctgagcagtactacgaaatctcccaatctggttgttctgacgttcatttcgacacagatacatcgaggggttgcttggtcgaatgtatttgttgccgacctatgtcctacaacaattgcctaacacttttaagcaaaatttagcatatccacagattaattgcctccacagattaagcaaactacagattaacaattttacagcaatgccttatttcattgtgaatgtttcgcaaaagccacatgtttgcctatttgatgagcaaaatttggcaaaaactggtgcccaatttttttttggggtgggggtgggggttgggggggggagcccatagtacacatgttaattagatctattcttgtgtacaggtacaacttattgcttatcaacttatcactttttatatctgtatgattatgagattcagaggttatttgccatattcaacatctacgcgttgcgcgttttctgtgtattgatttatgcttctctatctttttgaagtgatttgtgtacaatctacatcaagctcttcggaaattgctaggtcacttcaatctgatttctggagcgatgcattgtgctaaaaaggcaaaggtggaatcacaatcagctgagagtttagatagactcagcagccta

SEQ ID NO: 45558 - DNA, 1575 bp, Oryza sativa
ataaataagatgatggcatcttttttgtctattagagtaatcttttttctattagaaatatgttatcagataatgatatgatttatgagatgaatctatactactttaaaagaccccaactgtagaggtgaattgtgcattttccaccaaccatcacaactgtcatatgcgtcccccaaacaataaggtaggtgaaattttgtaccttctctaatcccaagccatcaatcaagggaaatttattttcaaatgatgacaaatatggactaaagatttaattaattgggaatattttattttaatttttgagctttaaggtgtacgggatgttctctttttttaatttattctcgttgcagtgcatgggcattcaacttgtcaatataatttgttatttttagttcttattgcaatgtacgggtattcaactagtcaatataatttgtgataaaatctagacactaatatatagaaatatttaatttttgtatttggtcaaatataaacatagcgggtacttagataactgtttgtggtactcatcatgatcaggtagttcatttaactaaacaacttgccaaaaacattttcacatgcggttacttaagtgatccacagttgaaaagtgtttgtacatgtagtttcttttaggtgagccacccgtgcaaacttgttctcgagggatgttattttaacgaaactgcccgtgaaaaggtttctccatggacagttgactttttgcatgtgtaactagtcgatttccataggcccttgactgtagacgacccaaaaacaacactataaatgggtcatcagccacctgcataagtgttttctataccagcattaccttgccatcgttagtcttgggcttcctataacctcacataacatggaatgccttactatcagcgtcctagatatgggataccctatgtatgtgtagttacctcgtagggaccaccgcataccaagttatttaaggaaaaaaaaacctcatacatgtggataaaatctgaagtagataaggtaagagtcctagttaagggcaaaaattcagagtcctatttgggtccaattaataccactcggatcatatccatacatacctacctagttctacttggacaagggagcagccgaagatataaatagcaggccttaggtagggataagaacatgcctgagagatttcaactagagacaaaacaatacaagacacctccgatctcaccatgtaaacacccaaagaagttgacaacaactagccgcctatcaccatactagattgatatacatatataatggcaacaacagatccggccaataggtgtagggctattgtccgtaatagggggccgaacctgtatagaaatccatgtattccttactctctttacaacttcgtttgcatcctcagacgagccaatccatatgacctaaaaatatatcatgtaagtacatatcctatgatcacggtataacccatcaacacttaccatatattattttgttctagctagcccatagatataccatagtactcacgacttgccctagcttgtacagctctta

SEQ ID NO: 45559 - DNA, 940 bp, Oryza sativa
tgaccttattcatttgtgaaacataatgcttgtgaattgtgaacaataatactgtgaatggattctgaaacataatgttgttatgggatcatgatgtaaataatcataacattggattgtgatatgttcatatgttataaatagataatggcatttttccttttctgttagaaatatgtgctcggataatgatatgctttatgagatgaatctatactactttaaaagaccctaattatggtggtgaattatgaatttgccaccactcatcaccactgtcttgtgggtcccccaaacaatgaggttttacaagccatcaatcaagggtaatttattttaaaatgagatgcaaaacaatgacaaattaaatatggactaaagattttacaaatgggaataatttttattcccattgcaacgagcgggcattcagctgcattgtgataaaatctgggtgtataaatctataatttatgtatttgttcaaataaaaacataagcgggtacttagataattatatgtgtcactcatcatgtttaggccattcacttaactaaacagctcatgaaaatactttttcacaggtggttacttgaatgatccgccattgaaaattgtttcgcatgtaatttcttttaggagaaacacccgtgaaaacatgtttttgtgtgcggttatctttaggaaactgcgaaaaactttttccacgaatggctgacttttcacatgcgtaaatagtttattctcacatgcccttcactacatgcatattggataccactagaaaggataccatcatctcaatcagatggtaaaccccatctcaatcgggcacggcgtccgtcacaggcaagaagtcacagatgtgaagagttatctcaatcgggcaaatggccgtcacggatgaatctatctcaatcgggccctaattaaagcccg

SEQ ID NO: 45560 - DNA, 591 bp, Oryza sativa
gtcatctgtgacgggccacatctttaggtccgtttgagatatggaatgttatctcaatcgggcctaaactacggcccgtcactgataggtgtcatccgtgacgggcttaagttttaagcccatctaatatgtctgtgcgaccatatctcaatcaggcatttttttggcccgattgagatgacttccttgtgacggcccgctatttctaggcatattagagcccgtcacagatagaaggatctgtactagtgtacgcccgtataaacgggttatcagttgcttgcacaaatatttttttaacaaatgtaacaacattacctcctgccattgtcaatcttgggccttcctacaaccttgcatgccttggattgtcatgtcttaccagatattattttgttctagcctacagagatataatagttcaccgcttgccctagcttatacaagttttaggtttgaaagatcaaaattaatttcttgtgtaagatgggagtaccattcaacttcttctaaatgtgcatgcttaaggtttacattgacgatttgacaaaggatattgtgaaaaaaaaaacaatctgcattattaataat

SEQ ID NO: 45561 - DNA, 955 bp, Oryza sativa
cgacgactaagatcggcagggttcgagtcagacagggttagctgattgagccgaatctgacaatatggcacggcatatgttgtcgggctaggttaacgtgcttcatgatgattgccacgcatggatagagtcctgagaaggcaattgtatctattaattaggatattttatgtaatttacttagagatatgtttgggaaaaagtctgtcgcaaagacttatgatatcttaggcagcgtttgttccagtgagtttgaggaagaaagcacatcgttttccgcgtgcacgcttcccaaactactaaacggtgcgttttttgcaaaaattttctataggaaagttcttttaaaaaatcacattaatccatttttgaaatttaaaatagttaataatcaattaatcacgagctaatggctcacctcgttttgcgtatcttcccaatctcctcaatcctctcctcctcaaacacacccttagagtttgttagagataagagtcgtgtccgatatggacatattttgtaattctcgggtataaatagacccgagccccatgtaatcaaactaacagacgttcaatactgtcgaggagtgatcctctctagcaggagatcgtgggatccccctttcgtgagtttggccgggggaaaaggcccgcctctggaaatcgcatctctgcccccaaggctgctagttagcgtgtgcacaacgagattatacaggttcgggccgctatgaagcgtaataccctactcctgtgtatgggatttagactgagagttacaaaggttcctaaactccggagagcgctcttgcttcccttctcctagagctcaggttttctgagagtcgtcccctttctcggtgggcaaggtcctccttttatacctcaatgggataccacatgcaccgcctctacctactctcctatcgggtggggacccaccctaccttgac

SEQ ID NO: 45562 - DNA, 683 bp, Oryza sativa
cgttataagcaaaaatttaaaatcccttatgggactgagggagtatgtaaaacctgatcatgaagttgacattaaccaaagctaattattacacctctggaagcataaactaatttggacttctagagcatctatccattggtatgaaacaagacgtgccgtcctaccgccaggccataattattaagtcacgcggtttaattaccaggccatgaatccagtggacatgtttggatcgtttcttccaatgtgatcgaatttactcgctgtacttgtgtttggagcagttgcattgaatggagtatggacttgggctctagcagaggattaatgcactgtctgtctgcacgttctgtcctttctttcttttttttttaagtctgataatgctccccaattaataagtactccatcagctaaaatatactaaaatataagtaattttggatggacgtaatatattctaatactactaatttggacaaaaacatatgttcagaaaacctcttatatttttgggacggagtaagtaatactccctccgtcctattttaaatgcaatcatgatttttttatctaattttgatcttccatcttatcttaaaaaaattaaaaacaataaaaatactaattataaaaaaaataaataaaatggacgattaaaagttaggtaccaaaactcg

SEQ ID NO: 45563 - DNA, 591 bp, Oryza sativa
ctccattgaatgcctgcggcaaggaaagaagaaaaacaagagcaaaaatattcaattaacttccctgtgaccgaattgccgttttcaccccatcccccctcaggctcgttcctgtgaaaaggtaaatccgcgcttggtccgccatatctaagtggtgaggggcaagaccgcagccccgagggagccgccagtgggactggccagaccaaggctacgacgaccgggggtcggggacggccgtgcgtaggcccttccgagcccccggggcgcggcccgcgattaggctccctttcggcagttttcaagtcgcccaacgccacttagggttcggagtaagcgcgaaatgtcctttgaaccaggacgagccagaggaaagagtaagaaaaaaggcgtgtaaaggcctccactttaggtgggaaaaaatttattgcttggaaagggaaaaaggtacaaagtaattcacagtggtagcccccggccaagcctgcacaagccgaggggttgtgcgggggttggcccgagctcctggaaagcaaaaaattgcgacgctatggatagaagcggcggaggtgtttgatattctaggggtta

SEQ ID NO: 45564 - DNA, 1018 bp, Oryza sativa
gcatcaattaggtatcaatcaagagttattagcttaatgctcaaaaacaaagctggtgtattattattcgggtacttgctgaactgcaagtcttcaccgttgtcggatactgtgataacttaaaagcctgcagcttgacttttctgatggagaagaaaacaactgcaggactacctaactaacatagccaatataaagttgataactcagcaagctgtaatttttttgtccaccagaaatcaccagcggttatgtagattaacacgagattaaaccactaaccacagaagctgttttaattttttaccaaggtgcaaagtactacttgcatactccctccgtttcagattactaagtttatagacaaatataataatatttacattacaaaattagttttattaaattaataattaaatatatttttaaataaatttatcttggctttaaaatattattattattttctataaatttgatcaaatttgaagcagttagattttgaccaaagccaaaacatcttataaactgaaacggagggagtacatcagctaaaattcagagccatgtattgctttgttcgtctatggcatgatattttcttgtactagttatgtaataaagctaagctatagctaatactgaagataagaagaaaccaaaacaaaccaagctttgaagagaagatgtcgaagaaaccaagacaaagaggaactgaagaacatccaaaagttcagagaagctagctgagcacaatctttgcttaccgttgatccagttcatcgggggctggaagtggtatcctgtcctgagcagggggctgacaatggaggccggcaccgagctcggcgcctgctcggcctcgaggctccggtggacgacatgggacgcgccggcgagctgcaggaggagcagcagcagccatggcgcgagcgccaagagccgagtccccattgttttgtactagacaggccggccagggagggggagaagacgaggggcagaaagggatgtgcgg

SEQ ID NO: 45565 - DNA, 1495 bp, Oryza sativa
ttcttcatccgacaaagtgatatgtaagattgttcacaaaatgtacatatctcttatataattttataaactataagagagatgtaaattttgaacaaatgttactatcactttgtcggataaagaaatgaccaaaatagaagttatagatcttcatgagttatacaactttgttattgatgactttttcagcagaatcatttagtatttgaaaatattgtttgaagttttgaaattcaaatttttaattataaaacaaagtcacaagaaaaaatggccaaaataatagcaataagaacataataacatgatagagcatgattttagaaacatttgggaaaaagaatcatccaatttggagttcatatgagtgagatacactagtttcaaaatttttaaatttatttttgcatacggctgcttaagacgttttgatttttccatgcaggtgcttaagtgagcgcatgcaaaaataaggtcatttttgcatgcggacctcttaagagacccatatgggaaaatcgatttttccatatgggcgtcttaagcagccgtttgcgaaaatgccgctcgatttttgcagacgccactagttatagtctgtttgaaaaaatgaaggagtctcgtacagaaaaatcacttttgtagtagtggtagtgatagttctcaagcctgtttaagtcatatcactgtgggttcaagccttcaaggctcaaacccaacagtgattctatggttcggataatatgatcatgctatccaaaccgttgtagacccggtgccctagcaacctatggaaaatttatatgtggctttgatcgagttcatccaatctctttcacttccttgagttatactcaatcccatttatgcatcatcaataaagaataattttcataaatgagaaaaatctcagtggcacataggaaatcttctcccatagctaccatccaagtgccacttagactctatcaaatattgagtgtatgccctattcgtgatacaagattgtagggctaaatatgtatttcacttatatgtcgattgataataaatacttggactatagtatttcagtatatagggttctgctagtacgaggacgcaaacgatgttatagcaaggaaataagagacaaagatttttatacaagttaattgagatcccggtgtgtgtaataaccctattcatgtccataactgccagtcaaaaattgacactgatctcgattatgatccacagttatgctctgttctatggtagtgtttgtaactagccaaaatttatgtgcaactgtattttcctatttgaaataaagtgttcagcacacaaatcttccctacttaaacatataattctggtacctacaaaaattacttttaatcaacatgagtctagttttggttctaacacatgtgatcaatggttttgatctttacattattttatccaactaacctggtaacttcttgttattgatgtcaaatgtgttggc

SEQ ID NO: 45566 - DNA, 1111 bp, Oryza sativa
tttatatgcatgttacttaatttatctcgtcatgtgttttagatggtcttttatttcaataatatttatttttatcaaaaattttagttatttataaattgtattcctaattgaaatcttatttttctttttctaatttcagaatttttttttaaaaaaattagttattaccgtattgtgttcttttaatgtttttattttttattttcaatttcagttgtttcaaaattgtattcctacttgaactctcttttaaattttctaattttggatattattttattttttatcctaaattttaattaatctcgtattgggttcttatatggattcttctttaaatattgcttatttttaattccgaatttcagctaattttaaattatattcctacttgaactcttcttttattttcttttgctaatttcggatttatttatttttattccaaatttttattaatctcatattgagttcttatatgcactcttcttttaatattccttattaatctcatattttttttattaatctcatactgtgtctatatgaattattcttctaatatttcttattttttattcctaatttcagttgtttgtaaaatttatttttacttgaactcttatatttgatttttctagtttctaaatctattttattttttattacggatttcaattaatctttaattgtgttctatatgaactcttctttcattttttattgtgttatttcaaaatcaaataaaaatccgtgcacatgccatcatgcttttctggttgctgacgtgtgcatcacccaaatacggctcactgtgcagccgcacggcttgacccgctgcttcggatttccatcgctcgccgttagcatctatcttcatattaacaaaaacgcatccaaattacggttctacagtggttcgttgcccgctgctttatttatatatgtatattatagcctaattcatctctaactttggttaattggtttaggaaatcggacaaaactcttttgagtccgtttgcatataaaggtcctagctagagattgattctaattctacacgcgtactgtactccgtatctcttaattaacatgccaagtttat

SEQ ID NO: 45567 - DNA, 902 bp, Oryza sativa
aggggaggcggcagcagtggcgacaccctccctgacattaggccattgttagtgtttttagtgttcttagtgtttttggatattcttagattggtcgtatttttttaattcgtgaaacctcaaatatgtcggttcctaaatcggcacctatttcccctccacatcagtgacaccttctatgtgccggtcgggaaaccagcatcaattaaggtttttgcagtagtcgttgtaggcaaaaaaaaaaaaaacacgagagcaccagataacatcaggtattagtaaagattgatgtcaaaacatataattagaatgtattagtaaagatttagctcaaaacaaaaccctttgtagcattccgcttccatggattgaatacgtaagagcccacgccggactttacttttgaatatgtcctaagttttcttttacttaagaatattccctaagttatgcgtataagagccatcaatatacgtacgttattaaaaggatttagactataatcagagatgtacacaattctatcgtatgcatatactatatactaagttaaaacaattttcaaagtcaaaattaactaatgaacgtcgttacacgcctcatttaagatttagaccgccgtacatacatgtattctcctcatctaggtagactgaggagttgtggactactcttccatgccctactgatcaccgtgcaacgtgcatggccaaggaaatcgtaacagttcccatgacaaagagacgtgcctgcctgactgactgattcctgacctacgtacgtcggcgtcaagctgacgttctgatatgattgctctcatgtagtactaaatccgtcatattttaagtgtaaccacgagttttcgtacctaacttttaatcgtccattttatttattttttt

SEQ ID NO: 45568 - DNA, 2096 bp, Oryza sativa
taagctaccagcataccaccacaagcccacgactatacatcctcatcttttctcttatgcttatcactcaaaatttatattttcaactttaaatttaaatttggagttgatttggaggattttttaatcaaagttttttttagactttgcttttagattgctaagaacacgtatgtaaaagttttattcacagattatttttcgtttgtaaattattccatcaataagccaaatgaccggggcgagaggctccttgctgacacgtggaggctgctgggctggccaaggtggccgacaacgttggcgtttgcatcgccggtgacgggaaggccgccttgcccgatgcccagcgacaagcgccattggaggcaagggataataaccgtcgcgaaacatatcaatcatttgtataaccattttttttaaaaaggtaaagctgaaaacgaaaacgatgttgagaatatcggaaaacaggaaacggactatacagacggaagcatgtcgatatcgatcggaagctgataataaatatcgaaaacactaaactataaactcatatgacaaaataaattgaaggttatactaatactctcatatttagagtgacttgaatataagaagttggcgtgagaataccaaacaggcatctggctgacaggagtagtacacactgtaaacagcaaaggccctgttgctataaatattgtagtatatgaaaaatttaaagtcaaaaattaatttttaagattttgttaagtttaactacgtcttaataagtgagacagagggagtagtacatttgccctcctggggtcctggtgcctgcagataccatagcactgaattccaccgtgtatggaatattttcctgaggataatgttgtgtacaaagtcttcctccgtctacaaatgcatcccctgcatttaacatctaatgaagaaacaacattaggtggaaatgcccgtataccatcgcttaaattcacattttgccaaaaaagagatcactggtgtgcccacatatgaacgaacacatcagtgctattttggcaaactgtgaagtcggtcataacatgtgaggatgtgccctcgagaaattgtgttactattacactatatcacacagatttaaaatctgcatgtgcacgaccattcacaattacagtaatcagtaacatgagcgtctccacaccacccccccccccccaaacacccccaaagagttacatagagaatcaggctcccatcggatagcctattcagccaaagaaaaagccaaattttgaattttcaaacttaattttgatattgattttgagatatttttaacgtagtttctttttcagcattagctttttaagtcaccgagaacacatatataaaagttttacctacaaattcatttttattctctaataagccgttttggcttattacgaaaaaagccaaacgatgaggctctcaccagtcctgcaacagtaccacccattcaacaattaacaagcagtttcaatacagtttaccctttaataaaacaatagaaaaaacatattttatgaacaaagcaacataatgcttacattgtaaacacatatgtaaattataactgaatagacatgtgttctaaaaaaaataactgaatagacatacaaaggtctacttatgagtaaagaaaatgaatttaatcctgttaaaccaatgttcttttaatcgacaaagccttgtcctttgctttgactatatcactattctatacagactaacactacatcatttctaggagaaatgactaccggtacgatctggaatcgcacatcccactggattgttatacatggttcgtcggcttctcgccttatcaatcatccatcatctgctgcctttggatctcaccaatatatgatgtcaaagaagatccagaagaattggccgtcctattattgacacggcattgcagcaattgttgctgaagattctggatgtgctcattcaatagccgaatcatcttttcttgagataagattatctgcaagaaagtttaactcagccagcgcagcaattttgtgaatttgcaaaataaaaataacttgtctcta

SEQ ID NO: 45569 - DNA, 700 bp, Oryza sativa
taaaatctagcgccctaactagattaaaggaaggagtaagttcacaataggtccctcaattggtcagcgagtttaaaattcatcaccaaaccgtaataccgtatataacacgtctctcaactttctaaataaggtccaaaggcggtttggagtgaggttttagctgacgtggcacctacgtggctagtttgacttggtctgcatcctacgtggcggtgacgtggcgatggaaacaaaatataaactttagttttttattaaaaaatgtggggcccacatgtcagccagacaaaaaaaataaaaatagtgggtcccacccttctctctatctcctaatactgctacctcctcctcccctctctaccggccatctctcctctcgcctcttctccctcttgcggcggcggcgctccccaagggattccggccaccgctcgcgcctgcgccaccacctgaacccggagctccggccgaggacgcatgtgatgaggtccttgtggctggcgcgcacgcacatcttcggcggtgggtggccgacgagacgacgaggagcagctgcgtcgctctcctacggcgtcctcaactgccgttgtggcatgggggaagaggggagaggaggcggcggtggtttggttgcgcggcgtcttcgtcctcgtcctcctcactccggatctacgcttggcccgccgaccagcccacc

SEQ ID NO: 45570 - DNA, 787 bp, Oryza sativa
ttcatgaatttacaaaactttaggtataattttcatgagtttctaacacttggcttgttttcatcggatatatcctctacaaagattatgctcatactccttccatcccatattataaggctttgtttcaaggaaagtcaacatttatagcttttgactagtaattaaattaaacttccgagatatatatttggtttcatgcatgtgacattattatgcttgtacttggaagtactataaaatgttaatttttgtagtttttaatatattgtgtaggacaaaatcaatggccaatgttctatagagaccatgtaaaagaagtatacaaaataaattttgagatggaagaagtatatataccctaaattcgaggtgtgcattgaatcaaaccaatcgtagtagtgacatttatgtatctaatgctacttaaaatggggagtttcgttaatcctctcccaccgaccacgcgcagcgcacttccttctaataaggacatgagggccaaagaagtccagaactggacttgcattggagagaaagggaggggcagctaagaagaggtctacggtctgagcaaggccttaccacaagggagccgcgtaggtgcttgcgactgataagtaataagtgattgacggcttaagaaatgactcaataaggacggggacagcgagtcattgaggccacaggggcaagaaagaagttggtatttttgctttaatctaattgggcttgggccagtaggggtgccatgctaccaacactattaacaacaacttcccgagag

SEQ ID NO: 45571 - DNA, 624 bp, Oryza sativa
cacatctgctcgagtcagagagtagttgaatagtggggggaaattaagcaacgaatctagaccatcccttgtatgctggatggttagatgatggatactgctaaagttacatgatccgaatccatctacccctggcttctcatttcaccggcaaatgaaaacagtatatattattgtcctgtgcgtgcagcgtgcgtacgtgtctcactcttgttggtgtttatttaccggcgtccgtcgccctggtcccgacgtagtacgtggtgttatgttaacaggcggccgaatgtcgggggtgattcgtcccctaacctgccactgacaaacaacatggcagtagaatcgcagcaggtacactggtactggttacagcaacagttttttttttaacaaggctttccagtttccacatgcgtgtgtaacttctttgtaacatccagtgtgagtgccggcgcgtctttacatacatatacatacattatacatgcacatacgtacatatacgtgtcgtgaatgggcaggatctcttagggtgtgtttgaggagaagggaattcaggacattggggagttacgcaaaatgatgtgagccattagctcatgattaattgagtattaactattt

SEQ ID NO: 45572 - DNA, 759 bp, Oryza sativa
aaccctggtgaactttctgttgccaattcaagaatcttgatgtctctctcaataaatcgtactatttagcgataaatcgcaaatgatatcgtaacggctgagaagtcaaaagaacgaattgctgcaatcattaattatatatgatcaatcaagcaatgtgtactaagattctacaaaatcacaaaacgaatcaagatttgatcacaacaatcttgtaacccaaaaaattttattgcgatacaaactacacgtcgatcacttgatgaggttggttatggccgtgcagatgatcgacatctgcacggagcaccagctacgctgcaccagcggcgacgggacggcggccttggcgaaggcatcgtcgcactggcgcgcgagggggatggcctctcccaccttctccttccccgcagcgtagctttgcgcgttgatacagtcgtatccttcggcgaacacaaaggacatctcgttgtacagctcctggcaccgcgcaagcaacggcttcgccttggcaccggtgcctggcttggctacaagtcccttgatgtcgaagaccgtgtcttccgcgttggagatgcccaaactagccgcgatcaaggctaggccccgtgtgtccgcgtctgggctgaggtggtggttgctcagcttggacacacagaacttgtagctgatgcggctgtcgatgccggccgcggccttgcatgttccttgcacgtccgcgtgtgcggcgccactcaacgtaagggggtaccgagctcg

SEQ ID NO: 45573 - DNA, 695 bp, Oryza sativa
caggtcgactctagaggatccccgacgggcgtggagcatgagaaagaaaaaaatcatgtccttattccctcatgcgtccttatcttcatgcacatgtcgctcttctccccttcatattcgctcctatcctgaaccgtgcctatcattctcccttgcaaggccacatgcccctctctctctctgccatgcacggtgagccagcaccggcctctctccctctctcgcacttcctcctctccgtcccttcccgccgatgcttgggagcagccggatccgacaccgccccttctcatcagcgcttgggagcggccagatccagtgcctcctccctctcctgtatggcgtggcatacggccaaagggacttctctataacagtgagtgttggttacttcacggtgtgcgcggatggactttactttatttttctgatttgttcatcttattattttcctctaatgcatgcaaataatcagtgtaatggactctaattgaagtgatggaatttttcatttgcgccgaaatttgtgattcagtttctttgatttgtgccacgggtggatgtgggatggatggctggtgatatgtggatttgggatgagagctgctcgatgcaacggctcgatttgagccgatatatcaagccgcctttttttttcaaaggtgtcacctgtgggtaccgagctcgaattcgcc

SEQ ID NO: 45574 - DNA, 557 bp, Oryza sativa
gagtgtgctcaagcttccaccgccctggttgcatccgccgcttcccctactcggtaccctctctctcttgaagtttttcttcgaggaaacgtttctcgctgtgagtccgatcctggtgcatggttcgaatttttttttcttcctgaatttcttttgggccgcagtttcggcggtgttgtgttccgttcatgattttttccatgtgcgctacagatttggttgcgatgttatgtttcgtgtgcttggttaaaccctaggtggaattcaagaaggggtagagccatatcgaaccctaaatcttggcctgttgagtttagtcatcgcgaccattttcgcaggctggcagcctgccagcgttgcagtccttgatcatgcgctcattttttttcttaaaaaaaatgggctgttttgatggatataaacctagattttgcatatcgccggttcattccgtgtgacctccttcacgtttctactcataaactgatgccttacagtttttttttttcaaaccaagtcctaacttgagtctgattttgcacgcaggttgaaagctt

SEQ ID NO: 45575 - DNA, 607 bp, Oryza sativa
cgctgcgcgtaaccttcttttgactaccagaggaagacgacgagacgatcgagcagaaggaacaagagatccagcgagagcgaaagatcgattaggagccgacttggttgtttttctttgggaggggccccttctcgcgtaaaatggcgcgatgaattaacgtatgattagttaagcattagcttaaaaaatttagaaatgggaggagcatactcgtgactttatcttatgattgtattttatctgtaagtacttattccgttagggatatggactgtattttgtaatacggatcccttctcctatataaggaggggtccgggtgccttgaggggcacgattttctccagatcatacgatcaataatacactcggcggatcaatccccagatagaagtagggtattacttcttgattaagaaggcctgaacctgtataaaattcattgtctctaaacccatccacttgtccagcttgatagccaccccattttagtattgccgaaatcttgttttgacagtggacaagcccgaaatcgatatactcgaagagtcgcatcatctggcatgaagatgtacacgccgtcgtgacgcgcgcagcaacacgt

SEQ ID NO: 45576 - DNA, 1144 bp, Oryza sativa
ttgactaattaaacatgtgttcacgttgttgtgatatttaaacttacggatgaattacattctatcataatgctgtgtaaattaaagttctctaccggccggtttctgaccttgtagaagcaggattgatatgaattattaaaaaaaattatccccttttgaaatggattgttcgttggactgttctttgaaaatacagtacaagaaagtgttttcagaaaatgtattttagcaaataaactgtgacaacgtctgcagccttctacaactgggcttaccatgtattatactcctcgttttggccttcacctaccacctatctacggtcgaacataagtttcttattaaaaaccaccgtaattttgataaattgacaatttggaaaacttagaatagaccataccaaaaacttattaaaaaataaaccgccgactcaacaccatagatattggcgctgaggtataacgctttaacgccatacatattggcgctgatattttatctgaggtggcaaaaatttgctaggtcaggaggggtcaacgccaggctgtttggggcggagctttttaccatctaaaattgttttctggatcaaaacattcatgcgtgcttgcttcgtgtggtggctagaagcctactctctcacctcaaggaccacggttcgattatatagcatttattccctccgtttcataatataaaggattttaagtttttgcttgaactgtttgactactcgtcttattaaaataattatacaaatataaaaagcaaaaagttgtgcttaaagtactttggataataaaataaatcaaaaaaataattccaaattttttataagacgagtggtcaaacaacgcaaacaaacactcaaaattccttatattatgggtttgagggagtaatacttaaaatatataaaaagagttcttgggaaaatgtgtagtttcaaaagtgtagaacttggtgaaaggaaaaaaaagaaaaaaaaacattgaaaaaagtgcaagctagagactcggacagtggtctatgcaatgagagcaatagcatctaaccaccccagcagaggtatacatgcaatagagaattctgtagatatcttttatttgttaacaactcaggcccaagtacattagtgctg

SEQ ID NO: 45577 - DNA, 812 bp, Oryza sativa
ttcgtcgattatttcggcttatacagtttcacattttgcagggtaacgtcccgatgcccatgtattacgactgaacacgagtgcaatgcaagcagagagaaattatttgccaaacttttctatcagaaataatcgagtggtgactctagtgcttaaaaaaaacacgatcgtacagactagtacttgtttcttgtcagtatagattgaattaataaacttttttttgagacaaacaaacccaatattgcttacgcatctcaatcccctgcaattggtcatcttagtcattagtccttaaagagatcctcacacatttgccttgatctgtccttagtccttacccacaaatcctgaagtcgttgagttaacccaaatattacgatacgtctccgtgaaacgtgtcacacgccatagaaatcacttataacccctcggtgaaaacgatatttgagctgccctctaatttccctgtcattttaatttgccttgtcaattgtcataccagcgttggaagcgcacgcttgcttgcggcgtcgcgcataagcagcaatccaatccacataaaaaaatcattgaaaatactccctcgttctccttccctaatatttgacgtcgttgactttttaaatatgtttgaccattcgtcttattaaaatcttttgtaaaatatgtaaaattatttatatatatataagtatatttaacaatgaatcaaatgataagaaaagaattaataattacttaaatttttgaataagacgaacggtcaaatatatttaaaaaaagtcaacggcgtggaatatttacgaaga

SEQ ID NO: 45578 - DNA, 1998 bp, Oryza sativa
tggtggctgtggctggtccatttgagtggagggtgatcgatcgatcgagctcgcgaagactgaggagaacagcgtgtgcaggtcggtcgggattgtgctgtggcatggatatgcatttttcatgcactatatattgcacttggtgatgatacgatcgaagtggacggatcaaaggacagctcgatcgggatttgtgttgtggcaagcagtggcaatggatgcatatttttttcatgcgcttggtgatgatacgatatgaattaagtggagcaaataatggatatggacttgtgcaagtctgaggctctgatgacggtctgaactatcaattcagtgcagaggtgcaggtgtgatgtgaggcttttctgaaggttttgccttcttctagcacgttttgtcttgttgttgtattgattttttggtgatttggatttttgatacgatttgggagcaattggaccggcatgcacttccgttatagtggttgtagtttggtgattgatctggattcttcttttgcagtgaaaaccccaacagaattgtgcatctatgtttgcgttttggagttgagtataagtaaaaatttcctccatccctaaatataagggattttggttggatgtacatcctaatacaacgaatacttcctagcaaatacttcctccatctctaaatgtttcatgtccaaatttattgtattagaatatgtcatattcaactaaaaatctttatatttagggacgaagggagtacgaagtaaactattggtttacttactgacttactgatagtgttgcaaaattgacagtggtaagtgtacgtgaatgcacgtgtttgtactatatttaaaaaaaagaatttgaaattagtaattacgactatatttgtccatatataaatagcttctaaattgcatatgatccatgaaaatatttttgttattttttattattatcattttaatgtttttaaattcagaattaatataataaatttgcaattgtcatggaatcttaatttatttttcttcattaaatagttccaaaactataacatgataaataggaagtaatcgtaggctcggaattagataatttattaatcctaaattcaatataataaacaccttaatgtagtctttgagtctcaatttcagcatttatttaatttaatttgaattgttgaatacaaagctgcaactcaacttagattctcaattacgacaatttatgatttcataattctggaacacaaattaattaatataagtcgtactctttcttgaatataggtcttacggttggggaatatttgggttcaatattcgcttaattagaactatatgtcgtaacacacccaatatgttatataccttaccgaatgcaccaatactacgctaagtaaaaaaatggggtcaatgttggagtcgtgactatagtacttcgcacgatatgaggatcgttggtaccagtgtatatgcgagattgaagtaaaaagatggaggcaaggatttttatacaggttctggcccttgtttgacaggtaatagccctacttctgttggtcgaagccggtgttgctctttattcatccgaattacacaaatacaatgatttggataacctatctaattgtcatcgacttggcggcatggataaccaactcgtagtcgacgacagagtagtcttcctccccgaatatgaactcgttgagatcagagatggcgctagatccctcttgccggctttcgtaggcaccggattgggtttgtctaggctaatctctgatgtcgatatctggcggtgtatcttggcttgtgtatatgttgtggcttgtggcttgtttatttgtctcctctcctcctagggggcttgtatttatatccatagatgttctcttgtccaagtaaaattaggaagatcaatatgtatacaatctaagtagtacttgttgttttcatgtagaattattcttgtcatttcttattcggaactcctt

SEQ ID NO: 45579 - DNA, 578 bp, Oryza sativa
ctcgtggccgttttttgtcgggtctttctttctctcgcgcacgcgcggcgggtttgagaaaaaagaaaaaaatgagcccgggggataaggatgactaacacagcattcactgaaagaaaaacgtaagaatcgagtgaaagtaaaacattcggcgatgaacctgggcagccgtgtccgtgttggaacggtgtaaggtcggcgacttgacgttgctggctctctttgtggtagtcgaagccggcaggctgcgaaggtgaggaaactgagctgaggatacggccggtggccaacggctggtgtcatctggagcctggaggaagattgagatcgatcagtggcgaaattgatcatctggctagctaggatatgtaggcctgggcgtagaattcgtcccgaggccgacgccgaccaaggcccagtccagttaggatactaggattcactgggctgcgaccgtgctctctcattctcatggggaataagttcactttgggtccctcaatttgtcgcccagtccgattttcgtccctttaccgcaaaaccgggtatgacccatcccccaacttacgaaaaccggg

SEQ ID NO: 45580 - DNA, 632 bp, Oryza sativa
ccgaatccgatcgagacgaatcgagagagagagaggcgccgcggatccgggtaagcatgctcgagcttccaccgcgcatggctggtcgcatccgccgcttctcctagtagatttctttttctctctcttgatgtggatgctggtgcatttttcctctgccatttcttttgattttttttttttttggggggggggggggagttttggcggtgaggcggaggtgctccactcatgattatctccatgtgtgctccagatttggtcgtctttgccttctcctacgttgcgatcatgcgatgcttcgtgtgctttgattaaaccctaggtagaattcagagaaggggtaaaaccctaaccaattctatttcctcgcctatctgcgttgtaaacttcttctttctttctttctttctttctttttttttttgcggggaaagcgttgtagaattgtggcgtggtccatgtgctcaacctttttttttttttgaaaaaaatagggtggttttgttggatagaaccctagcttttgcatatccgctgatccattccgtgtgacctccttgccgtttctgctcggcccctgataagttgatgcatattttagtggttttttttaacaaccaagtcttaag

SEQ ID NO: 45581 - DNA, 591 bp, Oryza sativa
tagacgatcgagcagaaggaacaagagatccagcgagagcgaaagatcgattaggagccgacttggttgtttttctttgggaggggccccttctcgcgtaaaatggcgcgatgaattaacgtatgattagttaagcattagcttaaaaaatttagaaatgggaggagcatactcgtgactttatctgcacatgccgcatcatatgcaccggcaatgggagatcgatcaggagattcagagggaagctcaagtttaggcgacactagagaagtcaccattaactaatgctgtactactactatatgtataaactgagcctgcagagcagagtgtagctagccggacatcgtgatgtaggcacactaattataattaaacagagttaaccgattattagtataaaaatgacccatcctacaccaagacagagttggaggcaatggaaacaagaaaaagggctaaacaatgtatgtggctgtggcttcacgagtgatgaattgatgaatgggccatgtggtgtcaccaagagcttcaactgctcctatgtttctttctgcctgaatcgtcctcagctcctttcgttcactcgaa

SEQ ID NO: 45582 - DNA, 529 bp, Oryza sativa
caggcggcgcacacacggcgcgtaacgtaacgcctcaaccccggtgtggcaaaccacgggttccgttccggagaccggcaaaatcacgagggaaacgcacgccctcgccctcgccctccgccgcgccccgcgcaccgcgcccgcacccgcacggcgcgcggggctccgccgacacacggacaaaaccgccgcctgttcttcccgcgactccccaccccaaccccacgcgaaccgcgagagccaaatgccgcccccggtgtacgtactccgcgcgagtcgcctcgcctcgcgtgtacgtacgctcgcgagcgccacgcaccccggacccggtcacggcacggcccaccccgattgaaaacaaacaaacaaacatgacatcggcttggctatcgcccgcctccctataaaacggcctcgtccccgcgttgccgactcgccatcgcgatcgcgcattcgtttcccgctccccatagctcggctagctacgtcgcatccgttgcaagagaccaccggatccggagaactcaac

SEQ ID NO: 45583 - DNA, 1176 bp, Oryza sativa
atccttcatcatgattcaagttttatatttgacacggatatttatatttacagctaactcaagatatgcctggcccaatttttcaactaactcaagatatgttcggcccaatatttcagttatgctcatagtggtagggtgagtgtgcacgtgttaggagagtttattgtttttaaaaaacaaaaataaagcgagtaccctcccaacaaacatgcagccatcttggaagttaggtccagacaaattagtcttctccttcgaaatattttttgcttcttcttaattactactccctccgtctcaaaaaaagacaaaacctggtttccgtgcccaacgtttgaccgtccgtcttatttgaaaaaattatgaaaaaaaataaaaagacaagtcacgcataaaatattaatcatgttttatcatctaacaacaatgaaaatacgaattataaaaaaattcatataagacggacagtcaaagttggacacggaaacccagggtttgcctttttttttgggacggagggagtagttcggtccagacaatgtaaaatatatttcactaatatatgacgctagagaatcaaatggcatgatatacaatatcatttactccctccgtcccaaaataagtgcagttttagcactgttcatgttcaacgtttgaccgttcgtcttatttgaaaaaagattatgattatgattagtatttttattgttattaaatgataaaacatgaatagtactttatgtgtgactaatttttttaatatttttaataaatttttcaaataagacggatggtcaaagtgctaaacacggatatctatggctgcatttattttgggacggaggtagtagatatgatgatgtactatcttcacgtaaaaaatcagctccagggtgtactttagaacgggcataattgcagagtaagatacatacaagtggctgatattgggatcaggataatataaacgtgcaaataattgtcatgttgaattaatatatatcaacggcccttccaatattgttccttttttgtcataatcaaatttggacggatactgatcagaaactgcttagatataaatatcaattagttaacgtatcagtcaagcaaaactggtttatttaacgcatatgaacaggaatctctctcgaaaggggtaccgagctc

SEQ ID NO: 45584 - DNA, 794 bp, Oryza sativa
aatagtggaggatgttctcatcattcccacccccttcacaagggccctgctctgataccaaatgataacaatttggcccaggtagggtcagccgaggcccaataacttaaggttgcctggaccccaacagttctttaggcacacccactaagggaaaggcccaatctccctgaaagactagtccaataggggaagggtggctctcccttttaaggtggcttcctcctcccaagctaagcaaggtgggattattcaaagtctcacacggtcgccgcccgactttggcgtctttgccagcgggcaatagtagaggatgtcgtcatcacgcacgatccggtgacggtgacgggagcgggcggcggatccggccacggcgatggcgacaaagacgacggtgacggcgatgacgatgggaaggcggtgacggctagtgttagggtttcattttttcatttttttttgattttttatttttgcatgtgggcgacaaaagcaccagcacgcgaaaatccgattttcgcgtgcaattgcaccgcacgcacgcacagatagcgattttcgcagacgaattgctccagacgggctgaagctctgcacgtgaaaatatgttcgaccgcacttgaaaacattttgtgtagtagtgatggtgacaagggtaaattttagattctattagtaattggatatcgcacgagtgcaaagcatatatataagcaaacaccggtagaagaatggtcgatctgcaacctttatcctcagcatatatagaggaaagcatattaaaatgttgtggg

SEQ ID NO: 45585 - DNA, 972 bp, Oryza sativa
aaatgaattttttcctctcaccacccacaacattttagattaatttaaaattgtggcacattgaaatattttggactcaatgttgttggtttttttattaaaattgtgaccactgtattctaaagagaacaccagaggatgcacatgacatgttctccttgcaaaaaaatgcttatcttcttgagaaaaggtgctataggtcaccttcccatatattctctctatttttaatatatgccaccattaactttgacgtgacgtttggttattcatcgtactaaaaaatttatataaatgttttattttgttgtaacttgttttatagaaactctaaacttaattaacttatatttttatatatttacattaaagttttagaacgttacatgaaaagttaatggtaccatataaaaaaacagaggtagtacttatatcggatggcgagataaagagctagctagctagatctaactactaagtgatgatatattccaaccaattcccaatggaccaggaaatggatgcagctagccattctgacgcatcaccacgtacaccacaaactcacatgaagagatcagaaaaaattgtggctgtttttgctagagggaagggtagcttcagcatcccaaagcatagcccaaccgctctgcatgacctcaaagtgaaagcaataacacaaccaacataaaggaaagaaaatgcaactcatgtttatccggaagtggtcgatcaaatgtcaaagagatatatatatatatatatatatatatatatatatatatatatatatatatataaacctgtaatatcatgaatcgtcatatattcaaatggtacgatgtaccagttgtgaattaatgatgaagtatatattaattacaattcggtatccatcggctaataggttaagttgttattaatcccatgacagatcgagttgttgtatgcttgctttaatatttttatcca

SEQ ID NO: 45586 - DNA, 1099 bp, Oryza sativa
caataaaaaaaaggaacaccaataaaaaaaattctatgttctatctagtgattgcttctagggtttgagaaagagaattatttcacaatcgaagcaataccttgtgagcggtgctcctccatcacccaaaagatgctcgcaagtggggagatgcactattgcgcttgttcttccacaccgaaactaccaccgaatccgttgccctggtcgaagcagagattcgggatgggtaaccacgggagagactgagcagtaccctccacatacccatgtagccaaccataactagtgagagagatgatgtgagaggtaaagatgctgacgatgctgcaacggtcatggcatcttgtcatcgtcatcgatgaagtaggaggcgagccccgtctcgcaccatcctaccgttgaccattggtcccgccacgcgatctgctccctccttttggccctttgttgacggtcgttatagaccaatttcgaccgtcagtataaccaaaatataggagaattagctatgcttgcaatgcatatttgttttagaataatctatttgcacttgcacttggattctatctgattgtagatattgctacataaagagaaggagaatcgacggaaaataaacgaacaattaatcggaagccatcaagaggtagacttacggatgaatgggcctataaatccaaataaataatctcaaagtgcccaaaacaccttaccactggattgaggaaccatcagagagggggcctgccaaaaattgggccgtttgggctaggccagggttggccaaaccctgggttcggccgaacccccatcacagccgttcatcctgtggtttggcgtggacatccaggattcactcccaatgatggttagagggcgttttcgacccttccaacagtcattacaaggctatataaaggggttaccttcttcattatttcacacacttaagcaagaagatcaagagctctctctcaagtttagttagtgttctagtgctagtggaataggaaatagaatagttctcttaatcctcgagtcttcaggaaaatttgggtatggctctagtagcttctctcccgtttgtaagacttgt

SEQ ID NO: 45587 - DNA, 1069 bp, Oryza sativa
attcccttcccaggcgttacactattcaaggaattattgtaagtctttcttcgtgaacattaatctcttttgtttcaattaataattaataatgctagtttcaaattgattttgatgtcaggattattgggcaatcttacaagagaaggataacacttggcaaacctttgaaaaggttgaacattaaatcttgttcacattagttttattccaggtgttgcatcataagcaatgtagattacaccttgcaattaactgaagagctttatgttaactttttttaggttgttactggaacttccactaaattgattgcatatcttccacaggtacataaattattatttttccacagattttattttgtacaggtacagacttcttttcgtggggctgtgtcattacttaattatatatgtatacttttacagttttggagggatacacgatattataaacatgagtactatgacatcgtcagggaacccttaaaaaaggtatgtcttagtcactacaaaactttttaatatattgcgtttattatttttgtatttactgtcatgtttatggatgaaacattgaaactacgagcctcaagaaatcaacacaattttgaggtgactgtagcatttccttgatcaacatagaaaacatgtccagcaaaatgtaggtcttatatttactaacaatcaaactagaataaatagaaaacaaacatgacctggtgtaataatagcgtttaccatgttgttttttgtataaaaaatgattttcagctgtcctatttatgcaaatttcttgacatgatgacctatataatccaaatacaaatctcaaatatcgtgagaatgagtttatggtcctcatttctaatatatgaattttactcaaaactatttccctaaaattgttatttgggatcacaggactgttgtttcattggcacgggttggaaaacagaatatcataaaacaatgtgatcgatcatctatagttatctgaaaagcgttcatttgttgtgttttttgtggtagtctatgactctgtggattagatgtgacgtacatgg

SEQ ID NO: 45588 - DNA, 3819 bp, Oryza sativa
cgagctcggtacccacatctaaaagaacattaacatgcaagtaacagagattaaatcgagatgaggttagcagttaactaattactaatagtcagtgatgacacgtcaataacatgtcacatatgccatagatgcaccgacaaatatgtaatcctgttggtacacaatgatgacatgactgtcatgactggtagggctggtagcctgatgggaacaaaagggggagagagagaaaggtggccctcattgattcaggttaagattgcacccaagttctaacaacttaaagctggtgggtgtaatatagcgcaataaccagagaattgaacgtccgggtgcaacaacttaataaactagacgataccccgcgcgttgctgcgggattttgtagtagagaaatggaggtgaaagataaatataatggataactgcgggaattggtgattttattctatttcagcaaacaaaagccaatattcttgtgatacaatctttaaactgaagcagcaacaggatgtgaagattgagacacaaatttctcaacagtaataaaatgcaagagcaactaattttgattattgttactgacgacctcttctcttgaaacgacttgtatgtgagacctgcatgcatgtgtgaggtagcttcagttgaatcttttggctcgtagaagaatacatttcggcaagtgtatccaggtatctattgccatttgattgtggacaaaggataaaaaaacatttgtgaatgtttgggtggatttctgaagaaaaagatcagtatatgtgatgaagtacagaagatttgataaccccactcctagttagcacgacaacagaaaatgctgaggcgtgaggaatagagaaatgaatgtaataaaatttgttaattaattagtggtgacctgttggttggttattcttgttcaagatccatatgtcgcaatgagaatagcgttgatgacaattaggagaattgaaaaaggaaagtcgatcttgcaaggagaaacaaaacggtgtgtgtgatactttagataagtcgatcaataatggtgcgaataaaattatggatattatagtaataatatgtttgattcgttgttgattgctgattgcattagcattaaacgctgcaatcggggtagttaattattatgttttcgaacttacagttgagacactaatgaaaatttggaaacaataaaagaatagatatgtatctagctagagtaacagttccgagtgaatggtagccaacaaagtaaaactaagaaggtgatataatggttgtagaaattttagcagagtcagtagcttaatttgtgtgggaaaagtgattgtttaatctaaatgattacatgtagctaagtgaaggatgaaaaataaatcaaatttaatcttcaaaattttcatgtttgttcatatggtagaaataatatcaagagaaatataaaaaggtaaaagctttgcatgcatgacaatgatcttggtgactttcgctaaatttatgctttattatttttatccattcttattaacttattggatcaatattgtgcaatccctttaccatgatgtatattcagagaaaaaaaattgtttgtgttgtaagaaaagtgtatgtaattaccatatttgaataaaaatatcagaaaactctcaatcttaattttctctctttcttgagaacactaatcatgcattagagctgaaagatcgtgtttatagaaacaaaataacttgtactactttgaactgaaagatcaataaaacaaaataaatacttgcactaacctgatgaatctccgaatgtttgattgagctattacaaagaacatcctttatactccagtcaggaagaacagaaatccaaagaattaagttgaaccaaccatagaattgtacctgacaaacccaaatataattaggaacatcatataacaaagaaggatgagcatggacagatccaggaactaatatgtacctaaattaagttcattgctgaaataatcaatctgacctttcagtctgatattctaatgtgaaaatcttatacatagtagtgttgttaaggaaaaaaataatacttagtacctcttgcaaagcaggtatcgtagaatgggcatataatatggtgacaacgaatatgatgcaattattcattacttaatatatcgatatattttcttgatagaggaatcatatcagtagaaatacgtacatgctgcagtcgctgctttagattggaacatcaggggattgacctcagctgctcagcaatagcccagagctactactacagcgttagcaggcaatgtacttatagcaatattctgcaatcagatttcagaaattaaccaaattataggtgcagcaatgatgtaaaattggtatacccacctgtgatctttagagtcctgatgtaataccatgagtccatgaatgaaatagatcctctaacaaagtgtacaggctgaataaagtttgaatccatttgaatagggatagtagaaacctgaagaatagccaaaaccgaatcgatctctctattttttaatgctttcataatctcagggataacaggaacggatcaacctagcatcagtacattttcagatttgcatcaattgccggatcaaccaaattaacacaaaccctgattactcatttggagtcataaaaatgccatccaatgaaccgtgcaggataagagaataaaacagggggtgatggtcagatcaattaatccctacaaagcagatcaaactaattcagttacctggtgcaaagttaatttctgcaagcagtgataagataacattctaacaatgtgaaagaaacttcaagtaatcagacgaaattaaagaatgcttcataaaagatagaactgattgaccgaagtattagagacagagatcacaagcaacgattcaaggattaggagatctagaactgatgaatgaaaatgagctaccgatcgagcgaagcaaatgatgcagattaattccatcggttcctgcatcggcgtgtggatgtggacggctcacctggctgcactttatagttgggtgtttttgtcgagtcgaattttattcccatctagtggccgacgattcccagaagaagaggcggcggaggagaaggtggtgcccgacggttcccccaagagtaagcggagagacaaaggaaaggcggaacggcgtagggaggagaagcgcccggagggggagggggggtgggggtgaatgagaacggcacggctgggatggggaaagcgagagcggcgcggggatgcgagaagaagcgagacgaagtagcgcacgattggggaggaaccgcgcggggagagcgaccggcggcgggcccgcgcctggcgcgcgcgggggctggtggggagggagaagtcgcgcgcgcgatgggggagagtaggggtgggaaaaaaaagacctagaccgagaaattcggtcatcaattcggtcctaggtagtgaaagaccgaattttgttaggtcaattcggttagtcttctcgggtaaccgaatagaccgaaaagaccgaattatcaaaaaatgtctaaatacaacctacaatccactatgtttaataggattacactctaattttcacatccctacttctaggcatgcaacataataagagtctttactcataagtgcttacgaattttttttgtgatttttgtgttgaaaatttccattatttctttgcatatatgaaaatgttgttgaatttcggtcaggaccgagaccgaatttgtcggtcttgacattttctcactgaaattcggtcttcacttttta

SEQ ID NO: 45589 - DNA, 1998 bp, Oryza sativa
cactctaattttcacatccctacttctaggcatgcaacataataagagtctttactcataagtgcttacgaattttttttgtgatttttgtgttgaaaatttccattatttctttgcatatatgaaaatgttgttgaatttcggtcaggaccgagaccgaatttgtcggtcttgacattttctcactgaaattcggtcttcactttttaaagaccgaaaagaccgaaagaccgaagaccgagaccgaaattttcggttaaaccgaatgcccacccctaggggagaggaccgcgcccggcggcggaggaggaggattcggtggctcggtggaggagggaggcaagagctgtgggatagaacgcatcgaaccgttggaaccatctgatcgaacggttgggagtaaaagggtgacgtggcctcaccagaactcagcaaaatcctaataactacggatcacttgtatagtattataggatgagtgcgttctagtacaacaacttgacaatttagtattttggtgcatcaacttggctaagtatatgttgtgtgagtttttttttttcacgatgtcaatatgccattacatagtaatcctacggatattaccttactatattgaatttaatctttaaaaattatactacacatacaatttacatctaattacctttaagattttttttcttcaccttctcaaatatcaaccgaaatataataatttctacatccaatttaattgactttcgattattagttattagaataaaatataaatatgcttatacaaatccacaatagtatattgtcaaataagtacttaaaattgaatttatataaaaaatgctccaaataattaagtttgttgtcgcataacttcttaaattatatcaaaatcgtacctaccttgtaagttgttgtatttatatgatcgtttataaagttcttatactaaattgcatctacatgctaagttgttgcactaaaacgcttatatctcaagttattgcaccaaattgcacccacctgccaagttgatgcaccgtgggtgcaatttactcctattataatctagattattaggagtaagctgaaacaaacagatagtttattatgatatattattacaatctataaactggattactataatatggtaatccactctaaaggtgcttttttggtagattattgggtggctaacagctaataatccagataaacaaacaggaaaatccttccgttcgggcacctggccaagttgaaataaatcgggcgctctctcagccacaccatgtatgtgcacacctttttctctcctcaacctgtcaactcactgcatacatgtaagaatggcatgtaactctccctttttctctcatgcaacttactgcggctgcaacaaatcacccacatattacagaaccctctaataagggaattcgttttatttttttcctccaacaatgtttcagcaagtgcactcgtgatgtttcactatgtatggattaaatgttacagtaaattaaaacattattttgcaacaaatcactcacatattacagaaaccctctgttaagggaatcattttattttttgttccaccaaaaatgtttcacctagtgtacttataaggtttcactatgtatggatcaaatgttgcattgaattgaaacattattccgctatttgctgaaacattgtttttatataaggtgaaacaatgcacgattttttgagaaaccgttgtttcatactttgtagcaaaaatttttcatgaggtgatttaattgtgtttcagctttttaaacaattaaaacatttttgatctacttagtgaaataattccgatctactttgtagaacaacgtgcaacatttaaaaataattcaataataagctaaatatttttttcattggattatatccatgtgtggtcttgttttaaagatttaattgcaacggatttaatggggtaccgagctcgaattcgccctatag

SEQ ID NO: 45590 - DNA, 1639 bp, Oryza sativa
agtcgctggaatcaatcaacatgcagagtctcttcgattgtgtctgtagagttgatcggacggcatacacggcgcccgatatttatctctccgatcgggcgaccgacatatagttgcttccaaacaaacaactaacaacttattctatatcggcttattataatccaccttatagtaatatgactcaataacctagattacaataatcttaaactgagacaaacaggaccaaagtcgatggcttctctaggaagccaaccgggagagtccacggccacgctccgttccggctgaacgaatattaaagtacagacaaaggatgtgttcgtaagtgctccttcccaactcccttcgcagttttttatgcgcacgcttcccaaactgctaaacggtgtattttttaaaaaaagtttctatgcgaaagttgcttaaaaaatcatattgatccatttttgaaaaaaaatagctaatacttaattaatcacatgctagtagactactccattttctatgcgcactgttccggttgggaacaacaagcagcgaacagagccaaatttatactttctactaggtaattctagcaattattaaaatttaaaactcaatgtacaagtatgttgtatcattatccattagcaattattatttagatcatctgaaacaacaagatcatctaaaatataatattgtagacttccatatgaggcaccatggtgtccgggcaacaaggtatgaaatacacaaatacactaaaaaattttcaaattgtgagtatatacctagacataagaatttgattcatacatacctagtaacaaaaataactcaaattcaactttatttcgcgaagtgagcgtagctcaactggttaggttctttgtggtggaaccagcccacccgggttcaaattctagatttgacacgggtgctcgcatttacggctaattattctttcagtggtaggcgacgtacccgtcgacagcgaggcgcctgtggtgactttgtcaatcacaagacatgccggctcagtctttcggaggtgctcataggggtagggtgtgcgtgtgtgcgttcataggggtgagtgtgcgcatgttgtgagcgcctgcgtttgtactaagtttctcaaaaaaaaattcaactttatttcacaatccattattgcatacctaactaattatatgtttggatgctatatatctagaatcaaaatctaaccaaaagatgttcaaattcagttcaaacaagtttgaactcgttagtaaataagttaatgttcatacctaaacattttaaaaaaaatcatactcatttgaattaagtatatactcaatttgaatcttggtgcccgggcaccatgaagccccagctaattttactatgtatatatgtgtgtgtgtcaaatcatcttcctcacatcatttttaaaatatttcaatattcatcatttctataatatttaacgtatattcatccatttatttcacaccaaagcgcgggatatcacctaataaataagaaagttattaacgtatgatttattaagtttaattattttaaacttttaaaaaatatctaatatttgaaataaattcccatatagaaagttttcacacgtaatacaccatttagtatt

SEQ ID NO: 45591 - DNA, 1588 bp, Oryza sativa
cccaccggtcaaacccgcctactaactccccccaccacccacctcttctcagctctcgtcccaggatggtgcagtaacacgacgaccactgtgcagtaacgttgtgtcttacgtgcagtaatggcgttaaaatatagttgaaatatagtcatgacggatctacttttgataagctctttttttctaacatcatggtgcaaacggttttaaaaaaccttacatcacttgggagatattgttcttcaaagcttgacttttttgcaatttgtctctctacaagtagtaatactatactattacttgttattacttgtctgttgtacgttactataatcacatcacgatgttactacactgcgttttactatatttttgggtagtgttactgcataaacacgtggtaacgtgtaccttccgtgcagtaacacttttacttttgtgcagtaacaagtatatggttagcatctgagacttttaacctatatatttttgtttcaattcctaatttactgtaattcaccacaatattactgtcacatcttacacatgcagtaacgctatattggatggaggagaccaattttcttgagaagagggaggaagaacggttcttgaggaggggagtacatagatgcatcttgaagtttaatcctccacatgcagtaacactataacatcatggtggaaacggttttaaaaaataatacatatcttgtgatatattgcttttcaaagattgacattttgaactttagccctccacatgcagtaacagaatgtgtaatttacgtacagtaataggggtatatatatgcagtaacatggttttaccaaatgtataaaattgttcaaaacactcctacatcaatcagacatcgctcaaagccacctacagactttacctatggcccacctatttgatcttcatctcgtaaaaatgacatagtaacactgcatttatcatgcagtaatatagctacttgaaagtggtaacatgcacctattatgtagtaacacttctacttttgtgtagtaacaagtatacggttagcatgtgaggctttaacccatatatttttgtttcaattcctagtttatgtagtaatactattcaagaaatgcaagacactttgttactgcaaagcttattgtctttactagactcttatagtaacgttgtgatagaactgtagtaacgtgtaacgtacagttgcaacaagtaattctattgtattactacttgtggagagtcaaattccaaaaagaaaagcttttaagaacaatatctctgatgtcatgtatggttttttaaaattatttgcaccatgatactagaaaaaaatgcttatcaaaagtagatccatcatgactatatttcaactatatttgagcgttgttactgcacgtaaaacacagcgttactacacgatgaccgtcgcgttactacacagtttcacgagacgagagctgagaagaggtgggtggtgaggggagttagtaggagggtttgactgagctttgaccggcgggagggggaggtgggtgtatatatatatatatatatatatatatatatattatttctata

SEQ ID NO: 45592 - DNA, 1136 bp, Oryza sativa
aataattacattggcctatttgtacatttgatgatatactttgtacacagagtctatggaacgtggggaaaacattgaagtgaatgtcgatgccaagtctgattcagtactgtaagttgttccctttcctctaagttttgtattttttttcttctacttaggaaaattgaccttccacccgaagttagttgtccaagtggcttttgccccacggtggatatattggacttatgatttactccaaactgtagtgaaaactagtcgttttggcatattttaagcttttaccttccatagatgccaaatttgcccttgtatatttctcttagttctccacatgcacatctattggtggtgtcccacataggcacataatttactgttcattagtaggaatggatgtgttttgctctgaaggtaacctatcatgagcattgggccatccatggtccaactgtccaagattcacacagtcaaaccaacgagactgatcagagcgctgccaaggaggcccgcacgaagggttgtacatgagggacatgttagagaggttttcttacaaataggatatatgttaaattggattgttaggtgtggagaggttttcttagaactggggtatatgttaaattggattgttaggtgtggagtttaattagtaatactaagcaacctatcaaaactaaattattgttttcctcaagtagtatggggcaaatcatcaaaacaatttgcattttgggttggggtggaacctaggttaaaactaaattattggttagttccttgtggtggaacttaccatggaaagaataaatagctggtaggtgacattcttgttgacaatgagacgtccgtggtgggtgtacgtatgtatgctcatatgggtgagtgtgcgcgttgtgaacgtctgcgtttgtattgtgtttcttgaaaaaaaattgctttgggggcaaaaattgggtgacctacttactttggcctggtcaacagaccgcattttccaagtgcaaaagttatttcttctgtcaatttttatatgctctcaaatgttgctttttgtttcttagggcacatatcgtgggtaatttaccagtgggacaggtaatttcacttgaacttagatttcttcaaca

SEQ ID NO: 45593 - DNA, 1859 bp, Oryza sativa
caagtagtatggggcaaatcatcaaaacaatttgcattttgggttggggtggaacctaggttaaaactaaattattggttagttccttgtggtggaacttaccatggaaagaataaatagctggtaggtgacattcttgttgacaatgagacgtccgtggtgggtgtacgtatgtatgctcatatgggtgagtgtgcgcgttgtgaacgtctgcgtttgtattgtgtttcttgaaaaaaaattgctttgggggcaaaaattgggtgacctacttactttggcctggtcaacagaccgcattttccaagtgcaaaagttatttcttctgtcaatttttatatgctctcaaatgttgctttttgtttcttagggcacatatagtgggtaatttaccagtgggacaggtaatttcacttgaacttagatttcttcaacaaaaatcatatgagtacatgcatgcagataacatttgatattcttttgtgtagatcaaagttgaacaaagaagttgtgagttagctattgatgatagcaagattcctgggacatcactacatcgtgcaacatgtagcacaggaccctgtgttgcaatctcaaaaccaattgaggaagcaaaaacgatataccgcattctgtgccaatgtgaccaccccaacgtgctgaaacccataggtgtctggaagaatccctcggacgacgctagtgcatacctggtactagaggaagttgaggcatctcttggctctaaagacagagaattcatgttctctgtcgaggactctttcatatatggtttttcaaatattggttttaaaattttcaggtatgattctgttgaaatcaactagaacaatataaatcatacgtaagctcatttattaacatattatatacttgtttaaatattgtagggcgctatgtaatgtggtgaattacattaacggactttacatgaatagtgctgctgggaccagtagtagtgttgctggagcaattccgttgacgcccattaaacttaactccagcatgatattttataagcttatggtagaaggggaggtggaggttgtggtgactgatttctgtgtaagacaaccccgagaccttgtaaagaaaaccaggaagggtcgcccaaaaggtatgtttattgttaattgtttctactaagccttggtttcacttatttaggtccatactgtttcaaatagtaaaaaaagtagaaacaaagattatttgcaaaggtttacaaatgtgaggggcgaatctagaaaattgatgtcacatttggatagaatttgttattattatattgtattatcttctaatcaagagagaagatcctgaatttccatgtatgcccttggaacacttgaacttggaagaccctccttatcctcggtcctctgtgtatactgtccacagtcaagtgaatcattatgagcgtgatatttcttagttctcccctcccccaccatcttaattatcagcattcttcttcaacaattatggagctagaggaggcgggtaccgatgcacgaacaggccattacacttctcttctcatggattctttgtgtcgaaataccatcttccatttcctggattccattcttttagataatagaaatggccacaaaagaatctctggcctctaccattaggcacagtgccgttgagttctattgctgaatatcctggattccattaagtcaaagtcctatattctattccctgggattcttttgtgtcaaaacctcatcttgttacaagggcatgtttggtttgtttcccaaaccaaccctggggcagatgttggattaccaaagtttggtagagttgggatatgtttggtttggaac

SEQ ID NO: 45594 - DNA, 1650 bp, Oryza sativa
gttgagttctattgctgaatatcctggattccattaagtcaaagtcctatattctattccctgggattcttttgtgtcaaaacctcatcttgttacaagggcatgtttggtttgtttcccaaaccaaccctggggcagatgttggattaccaaagtttggtagagttgggatatgtttggtttggaaccttgccagatttttgttagagttttaagagtggaagcttctagaatatttattgtgtcttggtatggtagcaatgatttaagtgtcgcggttggttgtcctaccaaaatttggtaaggttttatgtgccaacaaaccaaacaagccctaaatcacggattaagttaattcttgagctagtatgatgctccttccatttataatcaatcaccatataatttttctgatgttattcccaaatgatcatatattagtatgcattccctaagtcttttcgtcatatgcatatgagagtaaatggacattggtgcatgcatccatgcacacaaccctttacaaccaacatgcaatatcttggtttgttattggctaggaaataatagggatggtgcatgcatcaagtttgttatcggagtaaatgtagtatgagagagttattggctttccttggtcttggtgtactcatgtaatatgattatcaattaggaacggagggagtagtgtgtaagtgagttgctgtgagtttcatgggttcaagaaggcactaatatggtcctcctttttagctagttcctagtttatggtgtaagcatttaagctctagcttatgtgttcctgaaccaatagcccaccaagttcattatatttgatgattacagcatggactttgatgtttgccttgtcgatcatcatgctcacaatctattcaatgaaatgaccgtgcacaattgggcaatcgtaatcatggctggcccccggcgattatcataatttcttttcatgtgttcatggggtgccaatccgggtcttcgggatactattgtggtggtatcacgatgtttggaccaggtggtacaggagttttttacccaggagcatggttggcgatctagttctacggattgatagccactaatatttctgttttgtgagaggggtcttcataggtctttctttgtgtgtggctgtgtgcattttatgcagaggccgggagtgggctcaattgaaatgtatcatcttggtgtatttgactgagtttttaataaagctttcattatcaaaaaatggggtgccaatcatcccttaatcgttagatgtgctcaattgttgttaggtgttggggtgacagtacatgatctaccataccaagggcaaacctccctgtatggatggagagccctatgctatgtttgttcctcaatgccaaggagatgggaaagaaacagaaaagaagggaacaatttgggcatatattatatagtctccaagatatttgaaaacaatatttctaatagctcagtgttttctagccaaagaggaacagtttggagtgtctttgagctgagcatgattttcagtgtcacaatgtgaataacaagttaagcccttaattgccccctttttttctatgttttcctttccttttttatgtggaagttgtataaaaaaccccccctaccaag

SEQ ID NO: 45595 - DNA, 607 bp, Oryza sativa
ctggttaatctgtcagtgcaaacctctttgtgacagtgcaccactctatctgaaaacttgcagggaagcagaatttcaagcagaaacctggtctccatgaagacgatgacagcaaggagaggcctcgtctccctcagatcccctcgcttccgcgtcttctgcgcggtaactcgctcgctagtgatgcaatgcagatggcctttaatttctttcattctttctttgcctgaatgttcaatgatgcaatgcaacgggcctttctttctttatctaaatgttaacgatacaatacaatgggcatttctttctctgtctgaatgttcaatgatgcaatgcaatggcctttctttctttgtctgaatgttaacgatgcaatgcaacgggcatttctttctttgtctgaatgttcaatgatgcaatgcaatgtgcctttctttctttgtctgaatgttaactatgcaatgcaatggggcatttctattgtgttgtctgaatgtttttctgaacctgacgagattttaggcgaaggcggagacggtggggaaggtgatgcagatagtgaagcagcagctggcgctgggggaggaggcgaagctggcgccggagt

SEQ ID NO: 45596 - DNA, 1238 bp, Oryza sativa
tatagggcgaattcgagctcggtacccattttaggtggattgaacacatctagtcctatgaatctggatagactccgttcagatttatagtcttaggatatgtcacatccacctaaaatcctttataatatgggacgaagggagtacatgttttttatatctataataaagcacgtgcatttaggctctcgtggatgtgacccatcatttctgtccaacctcgtgacgtacaaagatcaccatgggcttctcatgcaagtacagattgaatcacgagtaatctcacaaaccatgcacgccgtacgtacgcattgtcgtcgccaaactaattagctcgtctaatcgtggtttagtcgtgcatggtcagcaatagcttgcctaagcaagctttacaaaaaaaaaaaacgtcagccataagtaaaaggttcaagtcctcgtcataagcaactaaccaccattagttagtgccaaagcttatctccaaaacacactgttgattgtcttgttccatcttagttcccaccttcacgcatgttgccacgcttgcacggcgcagttcgttcatgcgaaaaagtttctttcgcccctcatcggttgctgatggttgattatgtcgtaatgacttattagcaataaaaaataatttgtaggtaaatttttttatacgtgtgtccctaccaacttagaaaccaatgtaaaaaattcattcaaaaaaacaaaatcaaatttaaaaattcaaattttggcaacgaattataagtaatagagcaaacaatgaggcccttcatttccagataaagtagagtagaaacagcgttgtcatgtttaggttaacccagaagatgtttaaaaaaaagtgttcggttttgttgtcgtgttttttttaccaagtatagtaaatatttacccaaaaagaattaccatccctgcaaaaagaaaaacaaaaaacatgaaaagcatccctcaccatcccaatcttttcagttttcacccatccgagttagtagtagtaattttcagcatgagctccctgtgagccctcctcttacagttgttcaccaaaccaaccacatcttccacgttcttcttctgccacacccattgactcctcaagttggcacaagaagaaaggtatagcctcaaccaacaagggaaattctccgctgtcgcaacatgaatcctgcatagtacatatgccctctccctgaaccctcctcatctcttttgatgaagagagg

SEQ ID NO: 45597 - DNA, 625 bp, Oryza sativa
cgcgccgccggcggccgacgactccttcttgaagtcgtcggcgctgatctcctccagcgaccccgacgagtccccgtcggacccctcccctccccctcccccaccgccgccgccacccgccgtaacgaggtctcccccgggtgccacgaccgccgaccgcggccgctcccgcgccatgagcaccaccagcctctcctcgtccttgggcgtcaccgtcacacgcatatgccgtccctctctctccctctccctctcccgcctccggcgaccgcgcgcctccgcaaaaatcgagtcgagctcccgttccacgcggccaaatccgtcgacccggagctcgatccgcagcgccccgcgccgcctccccgaccaaatcgccgcgccgcgcccgtgcccccgccggattcgccggattccgcggcggattggcgccggatcggaggcgcacggggggagggggagacaaggcgatgcgagatttgggggaaaaaaagaggggggagatgggggggagtgcgtgggcggggtatttatagggaccggccgggcccgatctgaccgttggagtttgatttggacggcggatgatgcggacacgtcgtcgcgatggggggtttggtgtgggggg

SEQ ID NO: 45598 - DNA, 634 bp, Oryza sativa
cacgaatgaaaacctaatttcataactcgcctggaaccgcgagacaaatttattaagcctattatcccatcataagcacatgtgggttactgtagcacttatgactaatcatggactaattaggctcaaaagattcgtctcacgatttccatgcaaactgtacaattagttttttttatctatatttaatgctccatgcatgtgtcaaagattcgatatgacttttttggcaaaaaaaaatttttggaactacacaaggccatacttaatgtccaatgttgacacattatatagctcgtcaagtaatgtctaatgttcttcatacttgctgattcattccctagacctttttaagatacagggtacacctagtagatctcggaatacaagaactaattgttgttctctgtaaatgctgtttgaacaaggtaaggatcgaatccaaacagtgccgtgtgttacactcgccatgaataatgaataaatgaatgaagtacaacctggtacttaccatgttaggaaagcagcccaaaaagggacttcatgtcatttccatgttaagcaaccaaccgaacaagaatacaaagggtgtgttcacactaaaattgaaaatttggttaaaattgaaacgatg

SEQ ID NO: 45599 - DNA, 520 bp, Oryza sativa
ctgctctaccacagacctccatcacctggccttccttgctgctccatcgggctagccaccgtcctccctcgctgggtcgtcgatccaccctgagccccaacctcctgagccgctctctttatgagcaacatcgtgagagaccgtgagaccctcgtcaatcaggggattttggatctgagcgattccctttttggacacagatctgatttggtgaagaaggaaaaaagaggaggaagaagaagccctccattgccatgcactccactgccttgcagcgccagcagcggaggcccctggcgtcaagacggtggcggtgacttggaagccctcactgatttcgctttgttgcggtatggatatggatggcacctgcaggccaacgacggagggagggaacgatggccactgccggtggggatgatatgcgtggcgaggatgatgatgaccaatgcagcaataatgatgggcggagcatgcatgcgctgcagtagggggcgtcatccggggaggagggcgcacg

SEQ ID NO: 45600 - DNA, 647 bp, Oryza sativa
caaaagaaccaccattttctcacctctctctctctcttgctcactctttgttggtgattcttgaagctgcttctcctccatcctcccttcctgcagctgctgctgcgcttgtgttgtcttctactgctgctgctagtgaactcccaatccaaatcctccgacgcatcgaggccggtggtggtggccgacgcggtgggtggcggcgaggtcgacggtggtggtggccaacgctgccgcggcagccgggggcgcctcccaccgccaagaactggtggctgcgggcgcaccggcgagccgccgccaagaacgagggagaggaggtggcggacgcaaaggacgagcgccccgaggagagagcgggttccgaccgacaccgcgcctccccatcggcgccagagatggcggcggcggccgaggaggaggaagaaagcccccgcgcgtggaggaagagcggtggggcggaaaacaagcggcggggaggggcaagggcgatgtaatgggatggaaacgagtccacgcgcaggcgagggtaggtgaggaaaaaatttcgtcgccctcccccgtctcctcgtgggagggtcacgctcactgtgggcttggtaccttttacccaggtctccatccaattaagccacatatatatgggt

SEQ ID NO: 45601 - DNA, 1168 bp, Oryza sativa
ctcataaactacttgcgttactaaataaaggtcttgtgcaaccaagttagttcaatctgttacaatacctctgcactgtcgtccatggcatcaacttcttgcaacatgttaaaataaactggaagatacctttggaattcatcttcaaactggaattcaaaaccaataccaacccagatgacggttcaacattgagatgtcaaagaataaattgaagttaagagaatcaacctcccagttccactccccattaaactccattggagcagaacagaatgcctttgcacggagatcttccttttgctttgccaaccaacatgtaaagttattttcaacataagcattgcctttctctccccccatcaggtcctagtacgattaagcatacagtcagaatagtgatcaatttaaaaaataaaattcaactgattgtcacttgcctggctttgtgggtacaaattgctggaaatatagatgtatatttcttcacagagaacaataagatccttatcaacagtatcatttgtactggagttgaacttgaaaattaggtttctcattgcacatggtagttgatcatctaagcgccgaattatagatggaagcaattcatctgcaacaaacagcttgcacctctcattgtcggtactgcctgcaagtcggaccatagcaaggcaaaaggaaatagcacttgtagttgcttcatcatccacccaatacccaaacaagctcatccttgaactcccaagacaatcatgggttaaaagataatgtaaaagcccattgtttgattctggagacgataaaactcccagcaaatgagacacttcacgggtgaactcaagaagttgagtatcttcaaacttctcaatgttttctgttggcccagagagtttcccgaagtataaggaactttagctcggccatggtgcataaggctgaaccacgcaaagtaaagtaaatcctcacagtgatcaagtaagggtcgtagtaggttcaacatccacttcttccagaatttggaaggacaatatgttaccaaaggaacgaaaacaagattgataagtttgcttaaatgcctaaactccattgaccctaaatcttcaaagatagcatcattgaaagatgaaatatccaatagatcagaaaatgccccttgaatagataa

SEQ ID NO: 45602 - DNA, 1835 bp, Oryza sativa
aaatatccaatagatcagaaaatgccccttgaatagataaagatagaccaatgatgttgtacctgtgacatggcatagcatatccaaatataagtttgataagaaaacaactccacagagccaatttataataatatatgcataaataagttcgactaaaatacatgtattctaaaattacatcctcatgtatcacattagatgttctcaagaatgagtaagtcacaatattacaaatagttgaaatacagaatgaaaataatcacatactgcatgatgcaagacaacatggacaaataaataagccatccatgttagaccatgcttatgggaagcatcccacaaaagatgcattatcacctaaatctcgaatttgtaggataccaagtttcgttttagttcattttctattttctttcaggttcaagttgttagtgccaatctctatttaagagatattgtgatccgcagatcgcttctactgtcccatcaggaccatgacacttcaagaataggaacatctagaatcatgtttcaaattcacaagtacaaaaccaaatagtacaaatctgtcaagttccaactaatcatcatacatcagagccattggtctaatagtgtaacatggaccccaaataccattctcctagtacaatagttactagttgaagacaagtatgtggacatgaaaaataatgcacaaattatgaccaactacaatcattgaatctaacaaaaaaatacaataaattaccaataattaagtcaataaaagtagaggttacatagatgaaaaaggcaatcaaaataacatatatgaaatgctataagcaacaaactcacccactcagtcggatttcctccaacaattttcttgtcttgttttgttggacatcttcatcactcatcttgcttttagcactttcaagttgatcaggaagactgccagagatttgtcctctccaaagagaatgtatgcattggagcaactgtaaatcagacaattaacacagttagtatgatagttaagaacgactcaaaggcacacaatattaaacaccgtttggtctatgcaattaagacatgaactagggaattggaattgggcttaggtaaatattgcagttaggatggaataggaacaggaatagattttggagctcaattccagttggatttgaggacaacaaaaacaacacctccacgattcaaatccccacccattggtttgggaggatacctccttatccaccctaaccagctaaccctctgatgcgacctcactggagccatgactgatccagcaatgctgaacttcacagttttcatggctactgaatctgaaccatgcccgcttacttagtgatatagtgtccaaagaccactgacgctgagctacactatgccgccaccaccctgggtaaaatttgatcatataccctccgcttagactgaaattgaggatttaccctcctgacccccatgtaattgaccatggttaccccacgtcattggcatgggaaggtaaatccttaatttccaatctgaagtgagggtatatgatccaatctcccccacgatggccattgcaaataccatggccatcggtgccaccatggctgcaactgataccaagttccatggaagctgccatagggaattgggaatttgaggcgtcgaactccatggtagtcaggggaagtgatctccctctcctacggtggcatcaaagtcgatggtagaatagagaaaaaagctcagactctaagttaggagaaaaaaattccactcgacgcaattctggtcaaaaatatacacaagcatgaaatggagtt

SEQ ID NO: 45603 - DNA, 557 bp, Oryza sativa
cagccacactggcgccgtgcccgtgccaccgtggcaatagggctgtcgtggaggtgctgactaggccgaaagggggcgccagtcaaagtggcgccgcccctcatagcacggcgccagcatggctggcgcgcccctcctctgcaggccccaccaactttctcccccccccaaattttcgccaagtctgttctgcctccaggcaacggctggcgcccccccccccccgaacgcggcgccagggtggctggcgcccccctcctccacccatcgaagcccttctgcctccaggcctcggctggcgccgccctcatggaccacggcgccagggtagctggcgccgccctcccccagcccgaaacccttctgcctcgcggcactggctggcgccgcccttctcaacctcggcgctagggtggttggcgccgctctctgcctccctgcaaattgtagatccatattgcacaaatgtaccaattcacagttcgcaattcaaatcacaattcacagattcgtacagactaaaacaggttccaattgcacaaatcacaatgccaaaa

SEQ ID NO: 45604 - DNA, 3833 bp, Oryza sativa
acctgtggaagatatgcaatcaatttagtggaagttccagtaacaacctaaaaaaagttaacataaagctcttcagttaattgcaaggtgtaatctacattgcttatgatgcaacacctggaataaaactaatgtgaacaagatttaatgttcaaccttttcaaaggtttgccaagtgttatccttctcttgtaagattgcccaataatcctgacatcaaaatcaatttgaaactagcattattaattattaattgaaacaaaagagattaatgttcacgaagaaagacttacaataattccttgaatagtgtaacgcctgggaagggaatgtcctgtgaaaacttcatttttgaatttttctacaagctttgagaaacactcattgtcctacataaccaatcaataaaattaatactgtgtaagccttgaacataaaaaacttattcatttactaaacaaacatacccaattgacagagttactgtcgatgtcaaaaaaaccttcagcattgagctcactcatcaaactcatcagacgatctttaagctgggtttgttcatatcaattcagaacttagtcaacccaacaaaaaaggcaatgtaaaacgtgcatttctaattaatacttatcaaatgtttactagcttaacgaatataatacatccctgtattttggctggtatttataaaatggcaaataaataaatatttgtcagttttcttgtttactgatccagcttgttagattaggaaattcacatgcaccctttttcattaacatgctttgtgctatcaacatttaaattaagacctattatctagttgctgatgtcaagcgttcagagatcaaacaatcacaatgcagttgtgcatcatatacaagatttaaacaagtccctaggagtctaaacaatatatatgaagtttctatcaagcaaataaatcagtcagtggtactaaagtttttaccaagccaataaacagtcaatacaatatacttcctaaagtgcaaataagttttcaggaaaggaaaataagacgtgatataatcatagctttcaggatctgagcattcaaaagaacaggaaaaagtgaggatttcacatattctagggaaaaaggtttccaagatgcgaaaaagttgcccaacattaagtaatcttgcattcaatatgaccagatttttttccttttttgacaaacccagtgtcacgaagatatttggccacttaatagacaacggagtgatctgtgatctgaatatccaatgatgtgttagagaaagcaaaataactatgacatctaaatggttcacagtttctaagttgagcagattttgctctgcgcatgaaaggggaaagcgggggatgcctgttttccaaatttcaattcagcaaagcagacgaagcttaatatgtcccaaataaaacggtatacagcacttcgcattttttatatgctgatatcttgtaaagaagatgtacatcctaagaactccattttcaaaatatgcactcttggagcattttgactcaaacaaaacagatgtaaaaggtttttgctttataacttggaatggctgaagatttcctccgaaaacggactgagttggaattgcattaataaattctttttttctacgggattgtttataacctttctttagtatggttctgcttactggcttactgttaccaattaaaaaaaaaaactacaaagtggcacctacaagagatgacatatggaaaccaattaaccagatcactcgaacacaccccaaaacatcctcagttctgaatttgcaaaattagttttatcagaagatggaaactaaatgttattgtagttcagggtgacaactaaacacaagaattaagttgaaggaacaaaattggaattctcgtaaagtattattgcagtagtgttttgcatttcataccgactcattttcaaggaggtctcttagacacttcgagtatgtgcatacttgattatgcatatccacaatctgagctcttcgctgcaaaacacagatgtttttcaaggaaaaaaaaattcatcaaaacagatcttctaggaaattctgtaaaaattgcttagcaccttgagagataaatggataagatcatggtccaaaactgagaatttctgtggcactgcattattttcaacatcttcatcagaaaaatcctgcaggcaatttacagcataattaacatgtatttatgaaactctgaagtaatttattatcagcatttattagaaaaattgttgtttatacctctgagacatgtgagtagatatggctatccagttgaccagaagctagatagttgtcataatcctcgtgcaaatggatttgcattgcagccctagcatactgaagaaatagatatagtattcatacaaaaatggaagtggccaactggccacagaacaagaaacaccaaaaagtcgttccatctaatagactatggaaatacaaatgtcttactcaatatttaattattagtaatatatgtgtgataataactacggaaatatcatcaaagcgcacacaataagccatgcaacagtggaagtttgacggttacatgtttgatgagagagagaaatggacaatattacaagccttccaacatgaagtctactttcaccaggggcaaaaggtttcatgaagttgattaataaaaaaagacattcggtatccctacagctgtcagcgtcagggatgtattatttaccaaacttctttattagtttgtaatgttttattccttctatcttatagttaaaaatatgagcagcccaagttatgctattccttctatcttatagttaaaaatatgagcagcccaagttatgcattatgtgtaggactatagacaactaagcataataagtgtagcatcaaagatgcatccatttctaacccaagttacttcttacagtatcattctcacttccactaagaatagttagccatgttggtaggtaaataacacttatacgtatgccaaagttgatacaattaattgtgtggagggctctaggcagtgctaagccccaaactgactgaataattaccaaaaagttcatcaaaatgctgttactgacaagaaaaaagtgttataaactcatcatggtagcatgaagtatacttgataaaaaagaacatcattacaacaagcaccacctgattagcatttgtagtacaaaatatgcgcgagaaaaaaagaacagtatatgaacatggtgagtggtatttgtgacagcaactttcacaacaatctaaaaaaaaaactacagaaatggcacccattatatgatttcctagttatgcagctgctacacatgcagacctgcttggacttatgttagtttagtatacttcagttacagttggatcagaaccaaatgttctaagatgaaaaaaaaaagacttgcaaatctgaagtagatactaagccttaaacgaattttctaatctatttttgtgaacaacaaaaagttatactgtgttgtcttgtaagctgagaaattttgtcagtccagtgtttgagccagtgaagccaaaaaaaaaaaaaaaaaaaaaagggaggagtgctcccatggaccacatttgacagacttcaaatctgccaggatgcaaacatgataagcacaagaaaaaagtaaggcaagcacattcagtccattggcatcacagatactgtttattatcagctaaatggtgtggcatgggtggaagaaaggataacaaatatgtgcacgtgtggaggcgaggatcacatgtcatggtgggatttgttcctatttgtgacaaggggct

SEQ ID NO: 45605 - DNA, 1123 bp, Oryza sativa
atcactaagaaaacgatcccaaacaaacataactaattcatgcacccggtgcaggcctcatgtgccaggtggagtggctgatgttgccatagtagacctgttggaataagtattcctgtaaaggagttcaccacatcaaattgcaaaacataatttcatcataaaattgtttaatttatattcttagacattcatgggcatagttgttcatccaggcacagtagctttcaaaggagataaccttcatcagaaagaaattgtgacagtggcatgatatgtcgcttttggttttcattctgactcgattttattccaccaagaaatagtatctccaaagtttaaaagaatggttagcatatgaaaaatgaactaggaaaagtatatttatttgctcgactaaaactaattaaatattactcatgagcagagaaatataaaaaatcaattaaatggttgacaaaggaataaaggacatgaatactttatacaataccatggacatcttcagcttagtctgaatgtagaaacgtgcataaggcttcaaatgtggcgcaaagtctccagggtctggtgtcagtggctagaggaaagtgaaaatcagatttcaatgaagttccaagaagattcccatatgatatgtatatatgcatacctgaaactgcttgttttcttttgcattggttaattgaccaactatctgcaaaagcaagtccttgtgttcctaaacagtcagatcattatgcaggccattaaaaacaatcataaaatggatggatgaagatatagtactctaaaagacccataagttacttctcgtatcagaggatgaaatcgaggctcccagaaatacagcacatgacaaagtaggacctggcagtagaagaaatattcagacttgagaggagaggcaacagcaatatcatatttattgcctgtttgggattccaaacaagaatgttgcaagtacttcacagaaaacatggtgcccacattaataagcctcttataaaaaagtaaataaattaagatgacaaacactcacaccaaccgactgatccacttcataagcatcaaaagtggattgtatctccaagttttcttcaagacgttcaattacactata

SEQ ID NO: 45606 - DNA, 596 bp, Oryza sativa
ttggtgagcatttggccaacctaacaaactaaccatgagaccatatatagagagagacatatgtgttatgtttgtatatcgtaaagttgtattttgtatggtctgcttagtatcacatttttgctgtttttatggctttatacctttagataaagtgggatttggttttttttggctaccatgtactctcctaactgaattccatggattctcatgattttgggcaaaattttgttcaaatttattttgaattccgaatccggtgaaaagcctgaatattcaagaaggggataattaataggaaaaagtccaaattaccccatgaactattgcggtcgatcaaattaccccccgacaaatagcagacatttttcactgtgaactattcaaatcggacaaataaccactcaagcactgttctatgcgattttggcccaagctggtacacatggcgccgacgtggcatccaatcagcaaaaagaatttttaaaaattggggggcccacttttcatatatctcatctctccctctccctaaccatatcttttgttaattgggatcgggatggccacatgggggaggcaactggaacaag

SEQ ID NO: 45607 - DNA, 715 bp, Oryza sativa
caggggtctatttgtaaaataaatttttaaaaaggaccaaattgtaaaaatttcagcacgcgagatcctgtactccaggagctgcacaggcatcgacacagagctccctgcgagaagctgctctgcccagcgaatccctccgagaagctgctctaccacagacctccatcacctggccttccttgctgctccatcgggctagccaccgtcctccctcgctgggtcgtcgatccaccctgagccccaacctcctgagccgctctctttatgagcaacatcgtgagagaccgtgagaccctcgtcaatcaggggattttggatctgagcgattccctttttggacacagatctgatttggtgaagaaggaaaaaagaggaggaagaagaagccctccattgccatgcactccactgccttgcagcgccagcagcggaggcccctggcgtcaagacggtggcggtgacttggaagccctcactgatttcgctttgttgcggtatggatatggatggcacctgcaggccaacgacggagggagggaacgatggccactgccggtggggatgatatgcgtggcgaggatgatgatgaccaatgcagcaataatgatgggcggagcatgcatgcgctgcagtagggggcgtcatccggggaggagggcgcacggtggcggtgttagtgcggggcatggggtggcggggattgcgcagccga

SEQ ID NO: 45608 - DNA, 623 bp, Oryza sativa
ggtacccaggggaaaaaacacatgagcttaaccactgatcattaaatgagcttcagttgttagaaacgaaaattcaataaaattatagattgatactttacactgaaattaaatgtactgtttagtaataaattcacttaagcactcatataagaagcaaattatagcgacaagggacaataacaatgtaaacttcaggattgtaaatttcagatggcccagttaatattaaaaacaacaatatcattttttttaattttcatttcaacacagcgattcatcaatctgactactgttggtgatctaatggagagcggtgaccaactcagcagttcgaccatcatgaattggttgtagagttttttttttagataatcaagtgagtcatatttgcattccgcactccactgctcacctattcactgtctatcagtatgaaaaatggaaccactctatggcgaggagaaccaaattgcactggagatgatatcattaattacctatagctacaatgatataattgccctgagtaagcattacatctattgcctaccgtgcaatgtgcataccggaatctaaataatcattaagcaataacgcatgggaactgaaaaggggaggag

SEQ ID NO: 45609 - DNA, 603 bp, Oryza sativa
gggcgaattcgagctcggtacccatagccagtgaaattgaaagggctaggctaggcactcgtcggcgtccgacgcgtctgaaaaaggagaaaaaaaatatttttaggatattttatccatgttcgtttctaaatgatgtaattataataagtcttttaaccatctggcgttaacccatcacatgtttacaatcttatattaaaaaaaaagagacggagagagaaatgttaaaaataaattggttgaagggaactaatagcattagtttttcatattttgctaaggtataatgaatttagggtaaattttgaagtcatggggatgacaagctcctgctcacctcccctgtctctgccctcacattaatgcttccctatatcctggattacaagctcctacagtccataattcttacgttttgaataaaattgagatcaaattttttaacttcgattatcaataactttaaaagtatttagtttaaaaataactagaacaacacatatggttttgtctttcaaagttctaaaataaaagtaaacatatatttatttattgtactagaaaaaaagcctgtgcgttcaaccggtaaaaatatttttg

SEQ ID NO: 45610 - DNA, 1005 bp, Oryza sativa
atcttcccacgggattaaacaaaatatgatacccttggagtactctcgggtgaacttctacaatcgtatatccggcgcttgcggatgaactctgtaaccataatataccaaaagtatttctgcgccattgctaggaattatacgggcttaatcttaggcccgtcatggatgatgtcatctctatcggtcattataagcccgttacggatgagtatattaccaaaaaaaaacaaaatttgttttttttgctagcctcaggcctttgctagccatgctcatcttcatcttcctgattttgtgcaccacttctgtctgtagctgcgccacttcctgattcttgctctccatgcttcactcaacatgtgtagccctccataaatcctcgttatatcagatgggcgtgtacatccactctactatcaaacatattttcattcttgcaatctgcacatggacaacacatgtaatcgttgtttcttcttttccaatcctcctccgtggcatttataaaatttaatgcgccatttctatactccttgctatgatgttttacagttttcccatacatccaactttgatccatcgctgcaaaaatgaacaaaatattagagaaaaatcttgtaaaataagtattactaatttaatgataattgattagtatttttcacttacttttatgaattttctgtttttcttggaaaaaagacacaaaaattcatccccttcaacctcccaccaaaatagtgaatagtgggataactacagagaatagtggggtggagtatttgaagtgtgacatagatatcggtaacggccaatgaacggacatcggtggcgggttcttcgttatctcaatcgggcatattattaagcttgtcaccgataaaagacataggtgacgggccatagattaatctcaatcgagcctagtttagcgcccatcgctgatgtgtctcctccgtgatgggcttacatcttgggcttgacaaagattatagaggtaat

SEQ ID NO: 45611 - DNA, 643 bp, Oryza sativa
taaaatcccttatattatggaacggagagagcacaaagttattacatcaatcaataaatgaatactagagtctggcaaattctacaattgtccacatttgaatcattgtaggagtacttcactgcaagtgtgtacaaccaaactaaacatggttaattatgagatatgaactaccatgtaccatcaaaggtcctggtctcctggttaattaaccatcacaggggctccctgccctttcgaaggattccctaaaaaaactaagttggttttgaggacttcagaattttgcccagatttctgtagtgttctaaaaattctagaaaaaatcatgagtgctccttagtgactcctaagccaatggaagtttcataattttaaacttgtgtagccacctgtagaaattcgcagaggacctgtgttgaaaaagtcgagcttaaagaccttcttgccttctgctgggcagaacattggccacggcaaacccatgtcagccaaaaaccctgcactgcacagaaactcactgctccactccaggccatcctcaccggctcaccatttccctctcactgttagtccggtcccacctgcagaggtcgtcctccacctaaaactgacacgtgtcagctccagcttcagaagattg

SEQ ID NO: 45612 - DNA, 631 bp, Oryza sativa
caattggtcataactcgcatccttgatactataaaaattcaagttcttctctcgttttttactctagcttcataataaatttaatgcacaaatgcaaaacaaacttcatgtttacgtacattcaaacaaaatacacgttcgatctgtttttttttcttttgaaaaaatacgttcgatcggtgcgcatgcaagtggtgcatatactgacatggttttagtttggaataagttcactttgtgaccctcaaaagtgatcgaaatctaattcgtgaccctagaccacaaaaccggatatcttgatccccgaactcttaaaaccggtgcaagttgaccccctagacggttttgctgacgttgcgcctacgtggtggtattgaccgggtctcgtttacatatagcgttgacgtggcgtttaggtggcatttataacttaaaaaatatgtgtgggacccatttgtcatcgacacaaaaaaaaattgtgggacccacatacatgtggagcccacaatcatcctctcaccttcttcatcctccctctctctcccttctctcgccacggtcgggttcatcctggggcgtcgacaggcgggagggcgttggaatcaccttctgctcatggttcttcacaaac

SEQ ID NO: 45613 - DNA, 515 bp, Oryza sativa
atcatgcataaagaacatttgatgataaatcaagtcataataaaaagaaataataattacataaattttttgaataagacgatggtcaaacttatcccaaaaatttaacagcatcagaaattaaaaaaagaggtggtactaataataagtaaccttcatagtccctagtataaaatagtgagactaaatatcacgcaagcgacttaaagaacccacagaatatatatcagggaattagtaaacgaggaagaggataatagcgtcagttcagaaattggcttactgtaaattccttcaggtagggcaagatctgatcaggctccacagttggtttgatatacttcgacttcgatgctagtatgaaaacgaggggcacttcactctctttaagcccaaaatactggaacattgtgcattcaaaaatggtcagacagcatgcattttcaactcttggacattggttttatacgaaatgttggggcaaagcaatgtactaataaagattgttatggaaa

SEQ ID NO: 45614 - DNA, 1331 bp, Oryza sativa
actagtatgccttttaccataaataaatttttatggaagaaattctgtggtgaactttcataagttaatttgtgttttcagaacaaactgagatttattgttagtttgtggagtattaactattgcatcaaatcttgcaatacgtaggctagattttacttttacaatcatttcttggaatatatatttcggacgaaaccgaggagcggccggagtggagagcgatgctgcgatgtcgggggaggagatggcgacgtcagccagtgcaccggcgaggaacagtggacggccagagggttcgggatactggacaccgctccggctttacggtgtatttgagagaagaggaaagaaagattaagaagatacgtaacatgaggcgagatattagagcataattaattgagtattaattatttaaacttaaaaatagattaatatgtttttaaagcaactttgttataacttatttttaaaaatgcacatgctgtttagccgtttagtaagcgtgtgcttgaaaaatgagagtatatcttctttatcattgaaacaaacgaagctatgattaagaggatgatgttataaaaaatatcctactttgatactcccttcgatttcataattcttgacattttaaacactgacatggtctttaaaaatatctttcaccttgtttttttattataatatatctttacctattataaaaatttaaaatgtttttgcctagggatttcatacgtcgcttgtccgattttttttcaccctcgcgcacgattttttccgcaggtgcgtacgtattttcgttagattcctttactaccctacgtagtgtccgtattcctttcctatattgttgagatgtccaggttcgcttttatccaggcctatgtcgctttgcattcaggcccaggcccttgataattccaatatatttacaccaaacagctacaagcgtatccgctttcagtgtttaaaaaacatctcaaggacaaataaactcctatatctatatgtatatttctatctctatctctattattataaaaattgaaaatatttttgttggtacttttgtaagatctctatatctactattataaaaattgaagatgtttttacccgtactttgattagtcatccgtgtttgagtcagttttaatttcttgttttggtttcaatctctaatcctcaaaatccgtaatttaaaaaagggtgaaaaaatcacacgaaaaaagaaaacgcccataaaaatgcgaaagaaaaacagtgaaataagtctgattcataccggaacggaaaaaataggcaaaaatgctaggtaaaaacaa

SEQ ID NO: 45615 - DNA, 735 bp, Oryza sativa
ggcaatattgctatctaacccacaatcggctaacatctgtcggtagagggcagccgattaggttagatatcgatgttgacttagattatataggatatctaccactctatgaaatttccagcggcttgattgtctagatattgttcttctttttatacttaatgctgcatcagttgagtttgatctattaagtcgtgcttagaatatcaatctctagcctgccttctggttgccgattagggtagcatcggggtttcagccgatcttatctgatttaactacatttgctctatatgttttattgacatgttaaatctgccctttacgtcaagatcttattgcatctaaatatattaagcttctgtttggtatattctgtttgttttaatatcttaccatagagttgtatcggagtattagccgatacatgctagatctatctgatcggctatgctatgaacatatatagtcttgttgttaatatatattttgatctaagtgatttatactgtctcggcacggcgaccaatctattccaatcacttgatttaagtatatatcgacaccaggattatatattgttaatatctacagccgatcgagtagatttagttctttattatctattcataactgccgatcgatttacatatgacatcggctcaaagataaatgatacgtcatcggcacctagccgatcggctatcatttatgtacttaaccacggtatctttg

SEQ ID NO: 45616 - DNA, 518 bp, Oryza sativa
atttatttgaaggtatgcatggctcaacatttgtagattagaactggagagacaacagctccatgctcagccgccactgctgcctcttgagtcttgatatcccttcctctctagcaagaagaaagaaagaaagggaaaaagttgcatgaagaagctggatggaagcaacagaaagggtacgatcaattttatgatgataatatcacagagtagaacatgcttatttctaggtgacatgacaaatttgaaaaagtatacagtaatttcagaaatggatcaatccaatgattgggaacttgctaatcctatttgtttgaccagttgtacctgtgggtattcaattttctacagtaacctaggattttttctatgccacatatctcaccttgccacatatctcaccttacaagtacaggtccatgaatattttgtccctagataaccatttttactacctccgtagtagggcggtatttttcttagttgcctggagttattccaatggctaccttcttacg

SEQ ID NO: 45617 - DNA, 522 bp, Oryza sativa
agctcggtacccatgaagggtcttgtcacaatcactcgacatggtgacgtgtctgcacagacacggtgacatgccggtggattgtgttttgtgggtacagttgtgcacctctggccagagtaaaactattcgaatagccgtgcccgtgattatgggcgatcgaccagattcaccatgattagtcacatccttaataattggttaatgaactggtgtagttcaagaggtttggttgggcctgttcaacgtggtgtagcgttgatcagtagagatttattgttaccttaattaatcaaccattttactgttttgctcaataaaatgctttgcaaccgcctttatgcaaatagccactagccatccttgtttccctttgcacgtctgcatttttggtgtggcttgctgagtacggtggttttactcagccttgcttttatttccccctttcagaagtatagcgcttctgagttgaagacgaagttagaggaccaaggctcatacggggatcctctagagtcgacc

SEQ ID NO: 45618 - DNA, 852 bp, Oryza sativa
tttgcattttctgaccagaatgtatagagtcaaaaattcacccctttcgagtttgatccatcgccattagcttcatcagtaaaagcatttgaaagcccaagctctgcattgatctcatcatctgtcttctcttgtggtatagagcaattggcaaatgtcttatcttcgttttccttacaagtcctttgtataaacaagaaaggaaaatgagttgtaatttattaaccattcaacagataaagaaaaaattcaaaatgagtaggcaaacacatctgaaatgacatctacatcaaaaagatcaataatattaaaccaaatggaagaattaaaatatatattttcaatgtagcggagccacatgttggtaataaggttaatctttgccctctcaaacttcacaaacacaggtcatttttcacttttcagtctccaatgcaatattgcccatgtttttcattacaatatagtacatggaaactgtctgttatgaaagtattatgcaagacaaatcccatgacatcacctctcaagtcaaacgatatgcttctacatatatacattaatagtctacatgaatcccgtggaaagtatgagcataaatgaaaaaggcccatgaaatacgaatattttaaggaatggaatgcaatagatatctgtagttacactgtagaattgaacagcctctgtttgcacaggaaatactaatatgaaatattgaacatgggcacatctaacatgcaagaagcacctttcttcctctgggtaactggctggctgctagccaactgccaaaatgatagagcacaaacaaatgcaaaatgtaagatttactctacagattatctaaatata

SEQ ID NO: 45619 - DNA, 521 bp, Oryza sativa
aatccttaagtctgaacactatgccggaacttggcaattgcatactggatgcatctttggatgtagaggctggattaatatcaattatttaaaaacttggcaatagcagaatttcatagttatgtgtctgcatatagaacaggttaaataaaggaacacacatatataactaataccaaagccgcaagggttctttttcataggaatggaaagtcgagtttagagtgttctgaatgttatgtgtaatttagaagtgctgccaaaaaaagaaaagaaaaactacatctttgtttatccagggtcaaactgatctgtagaactgtgttgaggccatccggtccaggtgatgcatatctctttatccctttcagtttcttcaggatttcatgttcatcttcgatagatatagtcgatccatctttactgacttgtatcactgagtagcaactagaatctgttcatcattgaatcagtcatcgccaatctgcagttacatgccatggactctttttctggccatt

SEQ ID NO: 45620 - DNA, 716 bp, Oryza sativa
agctcggtacccacttgacttgggccggcttgggctgcacagcacgcgcgcgagggagagagaagaggaaggaatgggccgaaaagggcccaagctgaggaggatgatttttattacttttccaattaaaataatcacttaaatgatctttcaattgttaaaaatacttcctatgctcaaataattccaagaaaaatcttgaaaatacttggacactcaaagtacttaaaaaaattataattagaccatttaatgattaatttaatatgtgggtaattactgaaatgctctttgtatgattaaaattaggaattgagctccgaaaaatccgagaatattccagagagtataattaaccatggagaatttaataaaaattaaatccatccatgctttatatttaggaaattttatttcccacatttaacttcacttgtaaattaatgaacatttaatataaattctgataataatttattaaataatttataaatcctgaaacgaaaatcagggtgtgacaggagccccggggagtgtttttataggcctcggggtgcggcatgaggcaggaaatggcagaaattgccggcgaagtgggggcggcgatgtcggggtggtggtggctgattttagggggacaagtgggaagggcaatggccgcgggatgggcgcgaggtagaggacaggggcggcaaccggcccacgcaagagagagg

SEQ ID NO: 45621 - DNA, 1484 bp, Oryza sativa
tccaaaagccatgccttgctggaggccataactgagttgcttaaagtgcagcgtcgttatttgtcactaccaatatagctgctttgcatcttagtcggagcttcaaaattcgccacaggctaggacaattcttgttgtagttgttggatatatggtctttcctagtgtacatgttataggcagcagtaaaatggggtggtgtagttgagaagagtgctaagggaactagggactttgtttttatctccctaacagaaactgaatcatattgaacagttggtttgaaagttcatgtatgctgccatcatcatttgcctgtatcagcatggcatgtgtgactaacgcagggaaatattgtcaagaggaattttatgtgctgaacagttttagcatctggaatcattgtattgtaatgaaacgaatgaagagtgcttaggtatgcccaagcttgtttacggttatgactgaagtaaattagcttatgcctagcactctagcaacaattttggccactaattaacagaaaggtaaacataaaaaaaaaatctcacaaatataagctccatattggagaactgtataacataattggagaatgctcttaaaactctcgatattggagaattctctcattatgaaattatatatgagattgtatacataattctcattttttttcgtcatttcataccagtctaataaaaaatgtcaaaaacatagttgaggaaaggtcactgggtagcctgcttttagttggttgcttctgtatgctcaatgaatcatgtcagtatttgaatttgtatgtggtgctgcaacggatataaattcttttatagttttaatgactatcacatagaagcaagtaaattgagtaaaaaaacaaaacttaatggcctacgtggatcatgacactctaatctggtcaaaatatgaagccatcaccctttgccattagattccattaatctcagacgagtataggatatgtcttattctcaatttaggttttgcagcctacatagcattttactgtacattcattatacaatcttgaatctgctcgcctaatatcaccaattccctatgcaagtttttcattaaatgggtaagaaatgtgcctatgtcttcttaggtttaaatgttctagcggacgttttaacattaacagagctctgtgttagaagttctcgggtataaattagatcagtaagtacgggcatcacatgttataacttataagtctagtgattattttttatgaagtcatttctttgtaaatgtacgggcatcacatctcactcttatttgtatacatattatctgcggaactacattagatatcagtgatattgtgtcatttgcatcgctgacggtgatactgttctgcagttcgactgtcatgctttgttttccattaccaaagaaattataacttgcacctgttggtccctaactgtttagtgaagtttgttttagaatcttga

SEQ ID NO: 45622 - DNA, 1435 bp, Oryza sativa
aagaatgtccggttgtatggttcaggggtgcaattcggacgaccacaataattcgagagggtaatttgtactttttcctattaggatcaactagttactccattgtctcatttttcgaaccgagcaggacgttgaatggtgctctccttttaaatcaaaaccgtgccttcctatcttgtctggagatgagaaatcatagttcacgtcaaaattaaaagtttgtttaaaattgaaacgatgtgacggaaaagttagaagtttatatgtagaaaatttttatgtgataaaaaagttaaaatttgaagaaaaaaattgaaactaaactcggcctcgggcctagtgtttggcctgttcggccaaaatttaatttactccacgcaggttcgacatgcattaccgtacggaacgcttttttttcccttacctggctataccccttggttggtttctgacacttaaaggcaatggaataataataaaatattttttaaaaaaataataatagtgataaatttgtcatctattatcctgcagaaaaaaaaaatcaaattcgatcaaccgggtgacaaaaaagagaatatttgttattttgtatatgttgaattttaaactttatatgttgttggagtgatatatcacacaattatatttattatgtttctctataaccattatatgacacataaaaaggatggatgtacatcccgaggtaaaatgactttcccttagcgtactgctatgtaacaagaaagtgtaggagatatatttgtcaaatgattgaattatacttttaaaaattgcataaacacactgtatgtatgagtagaactaagaatactgggttttatttatataagtggtttattaaaaaaaatccacctgtaataatagaaaggaaatcatgcgatctaaattcaattgtaaaaatatatgatccgtatgtgaaaatagcccatattttcacaggtggtcctcttaaatgtttgtccataacaatcacctgagagtccatctgcaaaatcgtgtgaccataataaaaaggatggccggccgccctaccagtaataagtacaagaggcatctcttctcctccatctcaaatctcctacatctttctccgtttttccctcagctccctctcacgaccagcctcctctgccactgccagagccaacaagccaccatcattgtcaagctccacctcaccacaacaacttccttcaacagctcaacctcgatctcctcttctccacaacatctcagcctcttctcccttcccattgagcgttgatcctcaatctctttctacaatcgttcaagtaggggggcaaatggatgacctggctttgaaaatgcattctatttgtttggagaaatggttttcgtaatcttaatctaggttagtgggcttgagcttggtcatgttccaggggta

SEQ ID NO: 45623 - DNA, 535 bp, Oryza sativa
tttttaatgatatttgttagtggtggtaaatgatgaatacattcatcattgtgtatgggatacgtttgtttagccgccggccatacatctgttgatttgtttcagtgactaaactgacgcccaattaagctgggtaagatggacatcggttgagccctatttgatatttgtttcagtgatgactaggaatgccacacagataggggatatcttgctggacgtacaaacttgtaattcagctagggaggaatcctatatatcctatcctatatatttataaaagtcctccccactcagtgcaattaaagctaatttcctatgctgtggttgttccacgtcatctgaaatatttttcaccgccgtaagattgattagatggattcgctatgtcagtctctcaattcggccatgtttagttaccaaaaaccttttctaaaaaacatcacatcgaatctttgaatatatgtataaagtattaaatatagataaatttaaaaactaattacacagttaggggagaaatcgcgagaccaat

SEQ ID NO: 45624 - DNA, 1022 bp, Oryza sativa
tttactatatattcataaaatgtaaaatttacctatataaaaaagtgatatttagacaaagctactaatataatttttaaatatcaaatttaataatgatatcactgtgagtctctatgtggcctttgttaatggacagattaaacacaaaagatttactttagagaaaacaattcaacgctcaaggaggaacctgatgtgtaacatgcaatatgacaaccgcagagtactctttacacctctttttcacatgtccctttgctcaagaatgctagaattacactagccctaaactggaatctaaacatggagttcataaaacaatatacaccacaagaaacaacttctcacacacatccttcatggaagttatagcaatcgggtgttagaatatttggagcaaagaaatgatctcatattgaacaatgtgcaagttaatttcgtcaaatggaaagcagatttcaaggaggaatttagtcagcataagcatagagtaaaagaattagacaaacccttctggcaatcatggatacacaatgttacttaatctattcttttttgtaatctcttttgtaatttcttccatttcttcttcttctttgtaaatcctttctgtaatcttttgtgtaaattttatatcatttttaatatagcacagtagaagtttattctgctgtttataccatcaaaaaaaatctaatttaatattttccaactattgaaaagtaatattttgaagtccggtagcacacgaaaaactcatatgaagaacacgcaacaacctaaatttggttccttctaataagtgtgttttcattcctgcatttcaaatgttaaaattctaaaccaatttattttattaactccatcttttgctcctcagcttatcagtcgccaccaaaatttaatgttttaaacataattttagagtttattttgatgtttatagtagtttattttacagcattggctttaagtcactaataacacatatataaaatttttccacaaataatttttta

SEQ ID NO: 45625 - DNA, 1265 bp, Oryza sativa
gttttgagaagctctcatcatgcagcagccttaatcatggacggtgtttccagaaccatttttgatacacttttttgagacggttataggaacgcgtatatgtaatgaggcatctctcgtatatgttgcttttccttttacagtgagtaaaagatggcaataagacggaacttgtggatgtggtcagacaattataacacgcccatagttgatctcaagtgagtttgctatatacggcggggcccactcccgtaaccccgttctgatctactacttgaaaacttcctagcagcatcatatccgtccttgttgactgatgtcactttcgtgaacccttcgatctatgaaaagtcaagtactatataagtttaacaaaacgtgccactcccaagtcctaaataggagcaaattaaattaaagcaacaggtaccacgatgctagctatatataagacgagaagaacgttaacactagctaagccgccatgcatgatttgtacatgttttatgcatgcgtacaaatatgaaatattatattacagtcgtcagaaaagtgctccgtttttttgttaattgggagtaataagtattgaaagcaaaatatgcgtcgccactaactgtgctagctaattccggaataccttttgctatatttttcattatgcagattagatgggcaatattgttcattggatacgattaatctactccctccattttataatataaggttgatcaaatttattgaaaacacagtagtattttcaacacaaaacaaacatattattaaaatatataatgcaactttagatttaataaaattaatttgatcttttagacgttggtattttttttaaaaaaaatgatcaaactttaaaaaataatttactaggaaaaaaatcaaaaataactgataatataaaaatgaagagtgaagtgcatgggcggtctctaaatttgttcaggtgtgtcactaaggtctctgaactctcaaaataaatttttgagtctctcaacttgtcttatgtatcatataagtccaaatgagctctaacccgctttgtgagaagacgtggaataccacagtgatggttacgtgtcagtgggatccacatgtcagacacatagaaaaaaatgaaatttaaaaagagaggagggagagagagagagaggagaaaatgatgtttttaaatttgaaaaataaatgaaaaaggaaaggagaaaaaaaatatgttcttaatttttttctatatgtgactgacatat

SEQ ID NO: 45626 - DNA, 508 bp, Oryza sativa
ccatacccaagggcataaaatctaacccacacccatacccattacgtgtggtacgtgcggtactcgtgggtacccggtcccataggtaaaattgatatccctaaatgtacatatgtagagtgggtaataaggtgggacccacaaaaattccccaaacatgaaccatagcacaattaaaaaaatagataaaacccaccaaaaaccgctaatacctaataataagcttattacttgctatttcatcacattgtggatgcctttacagagctggagaacttaattagttgattaattaggagtagcattacacgtgcttgctcataatcttaacttatgatatgttctattaatatcattttcacaaaatatagctacataaaagtattttactcgactatgcaacagctctattaataccattttcatatataaaaccttaatattttttttactaatgagatttcaagatctcactgcattgcacatgtccgggacggatacaacttct

SEQ ID NO: 45627 - DNA, 527 bp, Oryza sativa
ctctcccttctaaccttcgtacccccgggcccatatcaccggcaagctgtgatgatggacggatccagcggaagcggcttctcctgtgcgcagggtggtggcagcggcggatgggtttgtggttttgtgctttggggatgttttgggggtttgtgatttgtgctaggttaaatcgtgttttgtgtgatttgtgtcgtgttgttggatggatctatggtggttttgtgttgtgtgctttggggatgtttatagatggatggtgatgtggatgtaatggggagccaacttttatttgcattcagtaccgcctttgtgatgccaattgggaaatcgatacctatggggttttttcaaccggcaccagtggcctttttttttagtagtgccctcttctttctcttggagttgctcatcttcatgtatcttttgtgtagttcttggtatgtaatacccactaaagctaacatattatcatccaccaaggacatgcctagcacaaactgactttatctatatctatttagggg

SEQ ID NO: 45628 - DNA, 1625 bp, Oryza sativa
gaatttagaactggatttgagatttttttcatcgaagtttattttttaatctttgattttagatcgctaaaaacacatatataaaagttttattcacaaattatttttcgtttacaaatataccgtttgacttattcgacgaataagcgaaacgatgagtccgtatcgtgtggaacggtggatgctagactagactactactttttgttttttgcacaagatatgataatacatattccctctgtcctataaaaaacaacatattatcggactaatactatgaatatgaatgtatcatatccaatcctagctagattcatttttctgtggatggagggaattcacaaaagaccaatctagtattgatgagagtttttcttatccaatttgttatactagaaaaagtatcttgttttttcttaggacagaggaattacgccggatgcgccgtatttcaataacgtgaagaaaacgatcctatcaggaagacagcagcgtgcaatgtaccttgctctgtcgatctcatgcaaatcacctgcaatacaccaccactatacaccgcaccatgcaaaggaatgtattgtttccaggtgtctaatctttttttttccacaaaattttctattgcttagaaaagttcggttactcctgtagcttaattatatgcatccataagtacgtacagctggttaaaaaaaatcagcaccctactgaagtgatgaacagagatcaagcacaaaattagttacggtacgacaaatcaaatcgctgtgatcgcgttgcgtgtagaaaggcgcaaacagttttttcatcagtctttgctttattaggcgcaggtcaagttttgcgcccatgaaacaacgtgcacacgggcgctagtacaaaatttaaattgagtacatacttttcagttccaaagagtagattatattactgaccaaacagcgggcgatcgatggactacatgcatacacaacaaagaaaaaaatgcgatcaggaatactggtagtagattattagtacttgcacacagccagcacacttgacttttgacaaatacgtaagcatggaaatctagcagacttcagatgcagacagtgctacttgttgttccggccagtgtcgtgtatatgttgttgtagtaggagtagtacaacgtatactctcgcaacttcccagaaatggcaaattccaaccgccacggtccaatctgcagaatggaaaaagcaaatggagcacgtgtttcacgccacattaattaattaattctcgtttttcgtgcgaatagagaattaatatttcatacagttgagaatagtttacatacgcttgttggccctggcatgtgcatcagcttgggtcaccggcttttgactgtgtgtaggcttgactatactatgtctcatttcatttattctctgctgagattctattatcatcaggggaaaagtgaattacaagcatgcatcatgaggtatataaaaaaacattttcagacttaaggctcttagggcatgtacaatggtagccacaagcaactgtggtctcaagactccacgtaggatagaaccacacaaaggtcacactacccacagtgaaaaccactccaaaacgtattttgcatg

SEQ ID NO: 45629 - DNA, 717 bp, Oryza sativa
catttatttattgtatatattataatataaaaacaaggtcaaatatatattttaaagaccttgtcattcttcaaaacgtcaaaaattataaaactggagagagtatatagatagtaaatagtattaggaggagagagaaagtagaaacaaataacatattttattctctataggcaactcatatgtttatgggtagcttttgttatttctttgctatggactagttacacaatattgctatgtggctgaatgaaatattgtattacttatagattatttttgcactatattgtggatgccctacaccttatatacacacgcgcacacacacatacacacatataaaaatttgtagttacatatattctcttaaatattcatatgcacgtctcaccggattttgctaactcattaacccttgagagttgagatgttatgcacgtgaagctagctagtggtcaccatatatgcatgttcatcaaattggtacccatctgttgcatactaattgttcttcggaaaaatatattaattattagactataagctggttttaattagtttctccgctgcaagcataggcaccaacaaaactgatcagacatgcttggtcaagcatatttcttctaattaagacccctatgtgaaatagattgttcactggattattatagtgaattatctacacaattataataatattgatgagctactgta

SEQ ID NO: 45630 - DNA, 1573 bp, Oryza sativa
cacttcttagttcattcttctattgatgttccaagtgtttttctctttgtagttgtagatacctactccctccgttttttaatagatgacatcgttaacttttgaacgtatgtttgaccattcatcttatttaaaaattttatgcaaatgtataagatataaatcatgcttaaagtactttgagtgacaaaacaactcacaacataataaattataattacgtaaatttttttaataagacgaatagacaaacgtgtgataaaaagtcaacggcgtaatttattaaaaaacggaggttgtatatcacaaatatttagatatagtcccgcagcaacacgcaggtatcatatactccctccattccaaaatgtttgacgccattgacttttttttaaaatgtttgaccgttcgtcttattcaaaaaatttaagtaattattaattcctatcatttgatttattgagaaatatacttttatgtatacatatagacttacacatttcacaaaagtttttgaataagacgaatagtcaaacatgtttaaaaaagtcaatggcgtcaaatatttagggaaggagggagtagttcttgtaagtttgaccggcatttttgttctcttgcaatgatgctctgttagctactgcctgaaggctgtctaccattcccatacgcgtagcacaactccgtaaaaaaaaggctgatatgcgagcccgtgtgcccgtgctttactatgactagtcgagcaaaataagtccactttgactaaaatatagattcaatctgagatttgtatccctcaaccttaatatcggatattttaactcccaactattagtgcaatttgatttcctcgatagtattgactgtggtttcctctatgtgacatattgacttacaccatcccgctgagttagcttgtggggctcacatgtcattctctctccttcccttcttccttattcctttctctctcttcttcctcttccctatttggccctttcttctagccgacttcacaacagtggtagcggcagtggtggtaggacgacgatggggagtggcggtggcatcttgcgcacccatgcactcacccatgcatgctctcccttatggcaccatctccctagtcgatctctccctacaccgcagatgtagaagcttgcgctggtaacagcgcagcgctgttcccgcacagcggctggcacaaccaccatcgatggcgtcatgcgagtagcagtggcaaggcgcacgcgtgcggggtgatacaaggtggaggatgaggcaagcgccgctgtggaccgtcgttatcgatcagtttcgactgtcaatataattaaaatagaggagaactagtgatgcttgcaatgcataaatatgttagaataataatattccacttggattaggtatactaaccttttgcagagaatggcaataaagtggaggagaatcgacatcaactcagacaataaatcaattggactttgtcaagaaccagacttatgtatgaatgggccaagaactcagaaatgacacgatgaattaggccaaaattcacaagtctacgaagtga

SEQ ID NO: 45631 - DNA, 849 bp, Oryza sativa
catatgcttcatttgccacgaaattggccattacatgagacactgcccccaaaaaccctatatggatgcactactacaagctaatatgagaacctcaaggacgcccttctatccccaaggaagcccgaattcgcaaaatgttaatacagtacgtccaacctcccctgacgacaaaagagcaaaagcatcctgtgacatgtgccaggacatccaagaaaagaaagagatgcaggaatacaagaaacgcaaagtatcgtcggtagagattcaagaaagagaaagttcacgtcaaaagaaaaacccgccagtgcagcacaatcaaggagcatctcagtatcccaatagttctggttatatgcctcgttcgacagtgtcagaatctagtcagcacgccacaatgatcaacagtaatagccatgaaggaagcaactccgtatcatgccctccaccttcaaaaagacgtggctataaggcaggagtcgaatgtttcatctgccatgagatgggacactattcgtgggattgcttgcagaaagtcaagtcaaagaaagtacaaccaacaacaagccttcctaacgtatttggacaaaaaaaattcaaagccaccaaacaatggatttgtctcgttaacctcaccgcctgttgagcagaattgtttgaaccaagtgcaagaggaaaccaatggaaaagttatgaatttcaagccaggtggagaacagaaaggcccaaaagaaaaaagccccccggtaagttaaggcatgttaagttaggtaaaagtaccagcccgttttgtggcgagtatgcagtctcgagataaaggggtaccgagctcgaattcgcctatagtag

SEQ ID NO: 45632 - DNA, 690 bp, Oryza sativa
tttcaaaactgaagaatttacaatgacatggatccaatattaaagtggcatagttataatatcacatattatcatagtatatttcaaaactgaagaatttacaatgacatggatccaattaaaaaaaaggggaatttggggaatttctatttttctatcgcatgtttttgtggaccaatactttcaaatatctaccagtacaccttcgtgaagaagaatcgaatccggaacacgtaagttgcgtgcaagcaccttaaccaacgagctactcatttgtttacgaatctttatacaccagttacaattacataatagttacaataatagttacatgtaactacaatgtaaatcgcctgtagttatgtatgaaagttttctattaaaaaaattgtcgaaagttttatagatacacccttaaaaaaatgaggtttattcttgagtcagctcaaatttgggggaagattaaaaaaagcaaaaccttctactggaatttaaaacgttgaaatcaaaattcataaagtttctcccaaactttaaaactttcatctcactttcaactcaaattttaaaaagttttaactcaaaattcaaaattttcatctcaaaattgaaaggttacatatcaaaattgaatacttttaactcaaatttcagaaacttttaacccaaaattcagaaacttttaactca

SEQ ID NO: 45633 - DNA, 912 bp, Oryza sativa
ataatgaatgcagtagaatacaagagcatgtctctgattaagaaactgcctaatgcacaataaatttaatattagttatctagtttcctttgatgaccgtttggaggcccataaaaaaccaatctagtaccggatgtaacactatgaatctgtatatgtatatatatatatatgtatatatatatatatatatgtatatatatatatatatgtctaggttcatagtactagaatatatcacatccgattttaaattcgttttttataggacggagggagtatatatttagacatagcctaaatgcacactaaaaaataatcggtaacttcctttgaatattttaggggtcagctatatttgggaattataggcgaatttcgtacattttaccctttttatcctctagaccaacatttcactttttttggtgacttttggtgtggatccttgctaatatgaaaaaaaaaatctgtgtaaacatgcaaacatatgttaatccacaaatgaaaaacaaagcgaatgaaaaggtacattactaaaattgtgatcttttatactatgcaagtttggatcatgactttgcaacctaacttgactaacatataaataaaatcagataccccattcatcccaaaatataagatacaaccactttttatatgccttataatataatacgtgcatgtgtgcatacattgactattacctcttgatcctttaaattaggtttattttaaatcgtttaccatcaagcctcctaatcacattgtttgcatgtatgaatgtgatccaattgaggaggtgattaaattctttcttcgatgttttattaggagtggttgtcccttatattttgggatagagtaactgataaaaataacaaaactgtttttagtgccatgttatgccgg

SEQ ID NO: 45634 - DNA, 740 bp, Oryza sativa
tcgcaagcatgctatattatctatatttttataattattaaattttagagcttttaaaatgcaagcatgttaaatgatcatctaccctataatatcctatatacctatatagtttatccttagttaattttacttttctcttttctcattaagccatatcacatcaattgcttttagtctttagatgattaatttatagtccaaattatctctctccttttcttctcattaagtcatatcacgtcaattttctcttgtttttagcccttagatgattaatctatagtcaaaactatctcattttttcttctctcataaagccacatcaccttacttttacatttgaatcatcattgtatatactatttatatttaaattatcataaaccacatcaacttacgtaagcttatgttgtttaggctattttacatattatttttacttattattatcatactaaactcccgcagtaatgctagaggtttcacctagcagtaaagaatgttatgagcaggcaatagtacacggtttcctccataatggacatttgtacatccggacaaaaaaagttcaagatagataaaatcatgtgtgaattggacacaaataactcgcatgtcgtcccttcatagcatatctcccatattctcactactgaatctttgatcaaatttcacttgttcaaagccatgccaataaataagcgcgagtcaaacgtacatatcaccattcttcagga

SEQ ID NO: 45635 - DNA, 1006 bp, Oryza sativa
ctctataaaaaatatttgaattcaaattcaaatttgaatcggatatataaacttttgacttataaactttgggtctctaaactttagatgtgtaaacttgaggtgtataaattttaggtgcataaatttactaaaataggaaaataatgcggtgccaaaaaatgaaaccaggtggagggaggggggagcgaattgatcgctgcccccatcgccaggcgagcgatcgcccattagccgtttcgtgatttgacgtgcaccaataataatgtcaacaaggaaatgagcacgtacggaatagtgataagaaaaagaagtggaggtgcggtctgaacatagtggataaaaagaaaatctcctgtgagacagctatacatatctctgtgcacaaatgtgagaatttgaccctttgcaaaaactaattttacaaatgaactgtggccaaaacttattttaaaaaagatccttttgttcagcgtcaaatcgtatagcgctgaacttagacacctcgacgctaaatagcacagcgctgaatgcacgttggcacgccgaatcagcctcctatccgcagtggcacggcattcaacgccagttgacgtggcgctgaggtgtcaaatttcagcgtcatacgaaggttatttttgaaataagttttgaccgcgtttatttataaaattagtttttgcaaaggatgaaattgttaaaatttgtgtatctatgtgtgttgatttctcgtgatcgatcaatcgcggcaacatgatttgacatgcatgcaatgtggttccatgcacgatatatagtgaacgactgagactctgagagttaggtaggtggtcaccttgatcgagatcgatcgatcattgtgcagatagttgaggcatgttacgtgttgcgagaggttgcaaactaaagcgaaggtgacagccgtcgtcgatcatcactattgagatcactgtgtactgtattgaattgaggcgaatgcagacaattaagccgacgcatcatatat

SEQ ID NO: 45636 - DNA, 841 bp, Oryza sativa
gtaccatcgacaactttttaaatttgtcgttgtcatgcatccatgtaccacctgttgatctagctagctaggagtagattgccggccagcttttgaatgcatgcttgtcttagcaaggatgacaaatggttgagaatgatgtatgaactaatcactctccagctgttgcaacttgcaaacaagaagcattagtgaagaatagcgaattagttactaccaagtcataaaaacaactccctctatttcattttatattataagtcattttaacttttctctaatcaaactttatatgtttgaccaattttatagagaaatttagcaatttctacaacatcaaattagttctattacatctatcatcaaatattttgataatatgtttcttttcagttcgaaatgttgttatatttttctataaacattagtacgtatccttccatctgtggcggcctctcacatgcctggttttgccggccatcacagcttcatctcaattgggccaaaataaacaccgtcgtagaactcgtacaggcataatcaagttgcatatagctagagcccgtcatcgatgatactcatctatgacggtgtcacgcccagaaatttagcccaaatttctagtctattttgtgtattaaatccctgtccaggaccaaccagggtacacgaaacgacaaattaatatacagattcaaacgtaaataaagcgtaaaatacttacagaagaggcacttagtcctcacaccgaaacgaaagcagcagtagcgaaaaaaggcaatcctagtggagcttcagctccactccacaggcaaaactcaactggggtatgagccttggt

SEQ ID NO: 45637 - DNA, 915 bp, Oryza sativa
aaacattgtccttcatgagtccactccggtcctacaaacgagctgcgacagatggatatctgatttttattatatcctgagtaaggctaatcctcaagttttccatgaaatcaccttaataacgcaatgtcaaaaaattcaaaatggtaatccagttaagacaaccttcccgacggaggcacatctcagttcagagaaacctgccccgcttttggtcgtgaaaaatgaatcacatcgagacattctcatcgtgaagttccttgtgattagccagtcgccacccatctttactggacatagccgcagcggtataaggaggctccgcctttcaggctttttgctcaaatcaacgttttaccggcaagccgagattaattgaactggaacatagtgcttcaccacatcgaggatctgattgaactggagcatagtgcaaataataataataataataataataataataataataataataataatgatgagtgctattttgaatgtttcatttcgtagggtactggtgcgtcagaatcttattaactactccacctgtctcagaatataagaagttttaaagcaagtttaatagtatagccaactacgagctccaattcatttatagtcaatctaatagatcattcatacaatagttacatactacactattaatacctggtcctacctgtcatacacacactgcgtcttggagtctgtgctatagccagctacaaatctgtagcccgctgctcttctctctcctcatttatctccttcaaatatgtttgtagctggtttatagcttggtattgtacatgctcttagggttggacacggttattaagaaagttggtaaaagtgagcggtggaggattgtggttggatgagtagtggaggtaggtgggaaaatgaatg

SEQ ID NO: 45638 - DNA, 693 bp, Oryza sativa
ccctttttgggtgaaattgcggccgggtaacaacattacacaggaaacacatcaacttgttcctctccactaatttggatccaatcagaccccttctctttgaaaaaaattgagtgaggatgtatagaaggcttcgaaatcaattcttgtttgtgcctaataatattatataggcagtgtacggatcccgtaggggtatattacccaaccatatgttttacaaaatctaatttgagagccatccttaattgtaaaggacctgtgtttggcctccgtataccacgaaaagataatcaagatagtgaaattacagctgaaaggatttttaatatgtagaggaaaaaaagggttccgaaatggtctccaaaattattgcacgcccgtttggttgccacggcacgggcatctctttgacatccgtatagcacgaaaagataagcaagatagtgaaattacagctcgaaatggttaaatatttctccaaaatgatttcacgcccgtttggttgccacggcacgggcatctcgtttttttccctgcacaatcgtatcaacgcccgcctttcgtgggggcaccatcaaccgagacacatccttcaaaatgttattgcttgaaaggcgaactaatgttgcaagaacaatgttgtcgccaaattcaaagaactagctgaagataaccatccacaaatattta

SEQ ID NO: 45639 - DNA, 1105 bp, Oryza sativa
atttgaaaaatttgtgaaaaatttgaaaatatttagtcacacataaagtactattcatgttttatcatctaatagtaataaaaatactaatcataaaaaaatttcaaataagacgaacggtcaaacgttgaacgtgaatagtgcaaaactacacttattttgggacggagggagtagtatgttactattttttttcaaaaacgcaggagaactgcgcttcatttcagtaagaagaaataaatatttacaaaggagggatcaacaaatcccaaaacacatcacccatgggtgaggcccgactaatatgttacaataactgctgctcaaaatatcaaataggttaaatttgatgagaacagaaacttattttccactcaaatcgtggaatcatccacgaatccagcttctggcaagtttctagtgtttttcttttcaatttaactttgtaagcttggtctagcctgaagattggtgctccctaaattttactgctttccttctcttgttacaaggtcttttgtgggctcgtgtgtgttttggctgtgtgcatcctagttatgcaaaggccagaagttttcttagtatggttctatcaacttgatgtaatcatctgagattagtaaaaagcttcctttatcaaaaaaaaaaattgcaagctctcagttcttttacaccttggagtgttgaagagtgttagtccttgtcttgttttggcaacaaatggctgcaaaacattctggcatgtacattacctgcctagaactgattcctctaatcagctgattctaaaacccaatcaagaatgtattgccaatcttgttatcttctcttgagtgaagctcaatcttgatattatttcagctcagtatattttagtgataacggagaagatcaatctcaaactagaggcaaaagaatcaattatgtagagtaggagtagctaatcacatacagcagtacaccttgcaagttgtctgtcttgacaatacagctatctaatttgagatttggaggttctatacagccaacgccccacccgtccatagttaaatcaagggtaagtaccaattggagatgcctagattaccagtagcacgaaagttgt

SEQ ID NO: 45640 - DNA, 757 bp, Oryza sativa
atgctttttagtgtttgcgctttcgtcctacctgtagtagtactgcaagatgttgcatggcaacttgatatgttcattacgttttcgttttatttggtgcgcatcgatatcctatgttgttcaagaggccacaaggtttcattaattaatgaaattaatattccattatattatctgaaaaaatacttgtgtaggatgggttttaactccaacacaaatcaagttcatatgtggacaaaataacaaaaaaaagcatctggattatatgtccttcgtagaatcagagaaaagggtgtcagtcaatatacgcgagaggcaataattacacctgtaagcagccaagcctagctctccttggctcctgttgacaaagcaaattccctttggatgtaatgcaaccatcagcagcaggccctctggctaggctgagtaggctctgtatatccttgtccctttccacaaacaacggagtcaagttattgctaatgctcccagccggtccatgaaaacgagttgatgcgtgtgcttgcccttaatttagataagtagatagagctagccatgttgctgattgaggccaaattgcccgcccaagaggtcatcttttccctggcggtatcatgaccttttcgccaacgactgctgtttcaggtcgtcgaacttaccaacctctttttaagacccctactttgtttcctccatgcatacgcacgaatcgatatgactaagtcttaaataaattaaaaaaatatactcc

SEQ ID NO: 45641 - DNA, 687 bp, Oryza sativa
gctgttttcttttctttgtaagtatgtaacgttattattaagatggattggtatattaattgtccagttcgtgtacctcggctgattcctggacgaggattttatgcaccaattagttgggaaattactagtgaattccgggcggtgacagctccctctcccatttccccctcctccccgggctcgccacgccccctaaccacctccccaccgcgctccctctctccaccgctccccggcgaactccagcaactcgtcaccgccgctagagccactgcctgatgaacctgagtttctttcaacactctaggcaattgtttggcctgatctttcggtgagttgatgataactacgattttggagaaatgttgacgacccgactacaaccttacaagacgttgtgttgcgcatttgcgatcgatacacctctccgtgggttgtggatcttgccggtccagatcaatcttattcctgcaagcaaatcgaagaaacaagcaagagcaagataaaagcaatctgaattacaaataggaatgaatacacacgataagttggggattcgaatacaagctgacggacggtctagccgacatgcacgccgcaaggaagtagaaatggctaaacttttatctaaataaaacccaagaaaccctaaaggggtacctacctatttataggggtgggagg

SEQ ID NO: 45642 - DNA, 508 bp, Oryza sativa
ggcgaattcgagctcggtaccctacttgactcgttgtatggtagctaaagccaaatttgaattttggaatttggttttacaattaatttaagttttttctttcaatttggtaccttgatatttggactatcaaactatttttcagcttagtcacgtgtctttggcttataatccatgcctataaacctaacacagtaaccctgaagattaaaaatccacctttgaaatgcttattcatagttctcaaaaaaaaaacgctaatggatgtgatgcgtgcctatcaaaagtgcaaatgtgaaacatcaattttacccgttcactaacaatagtgtcttcctaatgataaactgatttaagatgaaaatagtgctaattatccccctttctttttataaaagggttttaaaaaaggaaaaaaccccggcccccaaaattttcccctgctatagcgagacgtgctgacctaattttctgaaggtgctcatggaggtaggatatacgtgtgtgt

SEQ ID NO: 45643 - DNA, 678 bp, Oryza sativa
tctaactttaagttagagggacatgggagccacatgtcagcgacacatgtccctctaactttagaggagcaccttccttctacatctgcacaacatccattactttttatatactcatcatctcacactaacactaaaattttagacatagttgctctgtgattagttcctaataatttatgtttccttctatactctaatcatttcttatttagcttatgcaaatattattttcttaagggttgttaagtgatattgctttgacaaatgttctcatattctcgatacttcatgaattatgcatgttgtttcttagtgtccaattatatggggattctctttgctcaagttgatgtaatttcaacatacgtgaaggttggactatatacaatatggatttgattggttaagagtggtcaggtctggtgaagcttgctggattcggttgaatttgacgaacgctttggtatcgcaagctgggggaggagagatggaaatgagaagcgtgttgtgagtggaaaataatgagggtaggccctacataaattgtaaacaaaagtctaaatactagagaaaatttgcagaaattaaacttaaactctactgtatcagaatgaggaaaaaaacacttacatctttccagttgcatcaagtgatggtgatctcgtgatgagctac

SEQ ID NO: 45644 - DNA, 673 bp, Oryza sativa
tcacatggtaactcttgcaagatggatgttcggtagaaatggcagaaagggattcttggaaattttctttttagcatcatggcacatatgtaagcagagtaataggctaatttttgataatattattccatcatttcaatcttggaaggccttgttcgccaaaaaaaattattctacatctgtgtaaaatgaaggatctttaaagcaatccgtttttgattggttgcaaactttgtagctttaagatcttgttgtatgtaaacctctgtaaatattttttgctttaatgaaaatacactgctaggcaaagccatttccaagtaaaaaaaataatgtaggctgcaacaagcggactatagaggccattgcattgcaaactgtcctagaaaaagagatagttacaacctgtaaaactgagggaacacaacattttatatttaacaaattattttatttgaatattggacaaatcatataagtttaattattttttttggcaaaaagaggttaccaatgagagtgaaaccatttgaaacatcgattttaattatcgcatactgcactgctgcacactttttgggtgaaaagacgagaaattttcctcgcagagccgtagagcttatactttttgatgaataataaaaaaaactttgatgcatggaatcctttacca

SEQ ID NO: 45645 - DNA, 712 bp, Oryza sativa
gcattccctaaaccaacatctaagtattttaatacccaagttatcaatggcataaggtaaacaagatatggctgagtagtaggacccatcccacatgatattataaaacaatgcaatatttaatagaaatgagggacatttgtaaattgggtacaatatgatcaatcgtaatgcatgacttgccttgctctcgcactgatgagaccatagcaacgtcttcgaggaaccgcggattgacgaaatggccgaaatctacgcgacaaacaaagaacacaagcaaaacacactataagtctaattaaacaggaaacaaaaccattttaatggattctatgcatttttatgaatttactgagacttgaatggacttaatcggagctcggatgaattagatatgaattttagaagattaaatgtgtttttactataaaataaaaggccttaatggattttattgcgcaataaaggtccctactgacatcatcaaaggggggggggggttgcgccgacagatgggccctacttgtcatagactcaagggcgccggtctactgtggaccgagtccacgggaccgcggagaggagcaccacgtggcgcacacgtggcgccgacgtggcggccacgtggacagccacgcgggcggcagccgaatggccccgatctaccgagcgggaaatcaaatggctgcagcggctcgcggctgggcaatgc

SEQ ID NO: 45646 - DNA, 688 bp, Oryza sativa
ttgtcctcgcggagcgacaggttgagcagcgcggtgacgccgtgctcctggagcagcgggtccggccgggacagcagcgccaccagcggcggcagggcccccgcggccacgatgcgtaggcggttgtccgggctgtgcttggccagcaggcggagctccatggcggcgcggcgcaggtcgtccagcgacgacgcgggcgactcgagctcctccaccagggccgcgatggcgccatcggtggcgcagggcagcggcggcaggcggtgtatccccgtgcccttgggggacgacgaggacaggaggtcatcgccgtcggagcaggtggaagagtcgctgctgtcactccggcgcggggaggtcgacgcgtcggactccatcagagatcaacggtgatgttgtgttttggcctttttggtgactctcactacaccagtgggctctgcttcgggttgctctgctcgggaggagtatatatagtacgtagtacaggttcaagtgacactgcggtggggcccggcgcgtacgggggtcacgtgaggggtgcgtgggcgcgcgacacgtgcggcgggtgcccaactggcgcctggctggattccgtacgtggagccaacatggactcggtccggtccggtccgtgcggtgcgcggtgggcatttgccaaattgccattttggggagatagctagcg

SEQ ID NO: 45647 - DNA, 682 bp, Oryza sativa
tatctatgtgcccacgacaggcagaagacgacatgacatggaatggttgattggctagccggccaaatgtatgttttgttccttctagtagtagttgccaagtagtcagaaaagtaaagttaatccctggaaagtcaacatttggtttataaatctgatcccacaagcaccacgaacgaagaacaagctagctagagtcaggaagaaagcaatcagagtcccgagccaatgtccaatatttttgtttcgaaaggtaacatatccaaatctaataattaagcagcaatcgtgcacgtggacggcgctcgattaactgtttttttaggtgatggttgaacatagcagccgttcttgcctatctatatatttttccaatcgacacccagatagcggcactgataagaacaatcaaaggtgccagttctataaacgatacctttgaggtctcaagaatcaaaaaaaaaaagctggctcgatgcatcggctcgagccgatacattgaacaactccccttcaccccaaccagatcaaacaacacatagacatcaacaacatacaagaacacatgacttcggacaaaaacatcaagaacacgacgttgaagctccaatggacgatgttgaacacatggtgtcggagtcctttcccacccctgctgccatcggcggatggagaagaagag

SEQ ID NO: 45648 - DNA, 659 bp, Oryza sativa
actacaaaagaccgatggaagagcaagaccttaaggcgaagcctccaaggaggtgaacaacgacataagccgctgtcgatgcccgcccaacaactggactgggttttcacccaaaagtgggggggggggaatccacaagacaacatctccagggaggaaacggcacccgcaggcgtcgatgtcgccgatcctgggagaccaggcaaggctttcgcatcggactcccttaaaagatgcaagacatccacaaaaccagagcaagagtattgagtgttattgttgcccagctcatctgctaacctgatacagtagctccgactccgccttaagtacacaaaaactctcgcaccttagaggtaagcaaaccgctccaaacttggcactacaacaggttcacatagtcacagggtacttgaagcaccggtgagaactaagagccctgaatacaaacagacaggacaccaacatggacaaacaaactcctcaaccatcgaaaggctccatggccggttctggaagcagatggctagaaaaagggaggagcatcaaggcagcaaggaggcaaggccggcctggagaggaactaagaactgaagacagggcaaaagacatcggtgtccaccatgtttccggggaggaactccgtaattcacgtgatg

SEQ ID NO: 45649 - DNA, 792 bp, Oryza sativa
ctcatcaccttgcttattattgcatatttacccatacttttgaacattacttgtgtttttacccctattttgtagataaaacctacaattattttgaactgagattttgtgagataatttatatctgagctgaacttgaacaaaattttgacacatgcaatttcatccaaaacgaggtcagaacaacatttattttataagcgaaaatagggagcagcacccctcaaccatgctcgccttgtgcaactgcatacgtcactatcgactcaacaaacaccatcgaggtgaggtgtggccgtgtggggcccgttcggagctcgcgtccaggagctgccgccgcctggtgctcgcttacccgcgctgaggagctactgccgccttgtgctcgtgttgaggattcgccgtctctatcttgcgtcgtcgcgccgatgacagctcacagcctccgccgctgtctgctgctcgcgtagccgcaccgcgcgaggaatcgccatcgccgccgccgcgtggtgctcgtgtattgaggagtcgccatctctgcatactgcttgcgtcactgagccgacgagccgtcgcctggtgctcatcgctgcgttggctcgtcagatccaccgccgccgcctgcgcatgctagaggagagtgaacaggtatgttaatactcagggtcaggggtagagtagtaatctaatatcttctaaattattttttcctttttcatttgtatttcttcaattcaatattatggaaccaccaaactgccatccatactatttcagaaaagcaggggaaat

SEQ ID NO: 45650 - DNA, 657 bp, Oryza sativa
tcatgtgttccaattggatccactctaggtgtatgatgctttcacaggaactacaggatactatgcgcaatggtgctacacgcttagaattagtagccaaggaacttttattccattttagatggcgtagtacctacagaatttcgtgatagaatctacgtgattttgaaaaaaaaatattattttagtagatcatatcatcggcagaagttgggggttcgtcccatctcgcctttttttatcttttctgttcacgtctgaattttttggctgtgtgcctacgggcagaggccggagatgtaacatattttcattatctaaaaaaatagagtacaaagagactgtctaaacaaatttttccaagcaattttgtgggcaatgttctaaaattgaaattatatatttttaataaaactgtagcaacgatctaatacattccaattaatatttcttatacaatgcagaggagacgtagatgatgttttttcaccttattttagaagattatcgatctaatttcacaggctagctatttgtgtactggtttttgtaaaatcaaaggtgtttttgattattattctgtgatgaataattggcatcggagattattggttttgttatttagaatttatttacgaagtggttttggagatgatt

SEQ ID NO: 45651 - DNA, 656 bp, Oryza sativa
ccatttgtgcattcttgtgaagtctgaatggtaattcgtgtgtttggtattgttgatctgtatcttctttgtcaataattgccatggtaattctagagatagttctgttcattatgaagagcatttatcagcacatgactttgtaatcttacctgtgttgattggtcttgcaaaagatatcagcaagtcccttttgtcaacgtctgttccagctggttgatctccagaagcaactggtactaaatgatcaacatagcttgcaattttgtacattttcatgtggtttttgttgagcctgctaaggggaaaaacattgagtatcttcagctcagcaaatcttccaaggaagaacttgttttacatcagttacttttaaatatgtcgatgaattggtagtttaggtcctgtctagtgtagagaagctaagtttgttacatcatatatgtgccactccatatgtcctaaaatatagcacctagaagctttttgagtagatcttctttcttcctctctagtgtgctagcattggttccagtgtaaaagtgggactgaatatattctcctatagtggttggaaataatactccctccatcccaaaatttaagggattttggttggataaaacatattctaatactatgaatctggataaatt

SEQ ID NO: 45652 - DNA, 947 bp, Oryza sativa
ttttaaatgctgtttactgcaaaacttaacccctatattattatccccttgtactcccttgcattaattatgcatctccggtgtggcttgctgagtactgtggttgtactcattcttgctctatctctctccccccttcagtaagagaagctttggagaagaagtcttaggtggagtcctggcttataccccagttgagcgcctgtgaagatggagccgtaggcccgctagtccgctgctgtttatttttgattgtcaggccttaagtgcctttgtaataatgtaaatattatcgatgtaataaagatgtgtcttttatatcatgtttgtatggtgtaccccggcttttcctgggacggggattaatacactagcgttcgggaaaaggcaattttcccggtcgcgacgctagtatcaccatcctttggagtcaaagtccacctgaggatgcggttgcggtagatatgaaaaggcttgagtccctctgtggtcccaagtcacattttacaagtcacatttttcgtccatttgagtttattttttgtatggttggttcttgtgtgctcctaagcgtgaaaaaaaaacaaaagaaaaaaaattgcaggggggcgccagccacattggcgcgctctccctgccaccttagcgccgacccgccacggtggcaggagaatggcgccagcctctctggctccatcccgttggatgacggcgctagtgactcctgcgccccaaaaaggatcattttttggataagttttttcagggatctatttgcgaaataagttattcaaaaggatcaaattgtgaaaaatccagcagcccatcgctgttttcagtccgagggagcggagccgcgacgactagcggctccggcgagcctactcctccttcctccgatgagtcctctcctcctccctccggtaacaggttagctcttttctcca

SEQ ID NO: 45653 - DNA, 704 bp, Oryza sativa
cgcgatggttgggttccggcggtccttgcggagacagcaggtcgtggaggtagcgccacttgtggtcctccatggcgcggagcgcggcggcgccgtggtagtaggggccgatggacaccaagcgcggctcgtaggaggtccggctgctctcgcgaagaaaggcggggacgcggaagatggtgaacgtctgattcgttctcgattggactcctcttagaacactcaaccttgcctccaccatatcttccaaccgcgccatgcttgcaactcactgggagaaatacaacagctttctcctaaaatataaagtcactggtacttagcttgatgttaatacttatttcgttagttgagatttatagcactaggtgatatctaattaaatactatgttgctagtacattttaggatggacaaaagtttgtttagtttcataatcagaaatgaagttaatctatctattaacttatcaaaggaatagaaaaagaaccctccacgttcgctctcatagcctagaaattctcacattaatcggagaaaaagaaaaaatagagtccatatagaaatacaatttaaaaatagtttaaattcggaattagaaaataagaaatattaaaaaagagactgaggccatataggaatacaatataaagctaattaaaattcagaataaaaaaaggaaaacatagtctatacatgaatac

SEQ ID NO: 45654 - DNA, 555 bp, Oryza sativa
caacatatatactatatggtccgtatgtatattcccaacgtattatatattgggctttgctcggtgattgcatgtcagagtctgagaattgagattggcgtacgtgtgacagttttccattttgctcgaaaaaggaaaaaaagaaaaactccgcactgttgcaaaaagattaactgaccggctatatgatgtttacaagttggagtatcagaggaaaagacaaccaaaatgtctttcgaatgaataatcaacaggtaattttataagatttgaaactataaatctatcgtaggatcaacagataggccctcgaaaaaataatcatatcatagatgcatgctagacgtatattatggcctatggggctgtggtgactatatgaataatggaataacaaatatctaggactgtgagagtcctgatttaagtagcttattacacgaaaccaactaggaataatactgtagctactatacgtggcacacgcacaaactatataatccaatacacataacagatcgagcaacacaactagctcaactaaccctaatctca

SEQ ID NO: 45655 - DNA, 524 bp, Oryza sativa
actaaagacaagaccttaaccaggttaacactgatctgatgtgtgtagaccattatattgttcaagttgattaagcaagcaacctagtatagttacacactcatcaatgaactactccaatgatgggaatgcaaccatacctacacacaagcaagcaacaagcgttctaccctactaactattcttcaaagacactttggcggcataggttctaaggtaggatccaaacttcattccatcttgaccacttggcacttcggttcttcctcgatccacttgactgacctccataagtagacctcattaacatcttctagtttcaacaactagttttagaactactcaagttgaaagcaggaggggagaggatgataaaatgatttatagagaattctagagaaggaagaaaggaaaattttcacacatcatgttttcggaaaattagtccttaaggtttgaccatttggcttatcctacagtcgagatggctctgataccaacttgtcacgcccggaaattcacta

SEQ ID NO: 45656 - DNA, 774 bp, Oryza sativa
atagttaacaatcaatgcacagtaaacatacgggagtggcatgagtgggtatataaatttgagccagtggcatatagaggaagagccaattttgagtggcatacacaggaaccgaccaattttcagtggtatataaggaattatctcatctatatctctattatcaatcgcactgttttattttggtccaccaaaatctaataatttctcggcttccaaaacgaatccttttcgacctatctttataatataataatataatagataggtagatgatatacagtttgtatgcaatttattaaaggaaatcatgcctacataaatctgttctgtattggatatgatagttttcattatatatagtcttaattgacaggtaaatatgtatacatgtacaagagtttttatgaactctttatgtattataagccttttctgcacctatataaattagatattgtacgtgcttgatgcttacctgctcctatatataggctccttgcggttatatgcttttcctgtattttactgacgtaccaattcatggcgtcatggacaccttccacttatttttgcaatttattttcatttgatgtttctatttgatttggtagatagaaaattatcagttcgcagttaaatcatcaagtccttgtatacatagtcacttatgctttgccttggggagttgggctattccattcctcgcttacattacagccattactggtgcctcaacggggataacttctgtggtagaattaaagaagtgag

SEQ ID NO: 45657 - DNA, 647 bp, Oryza sativa
tcaccgctgcaagtgcaaggcactatggtttcaagttgaattttcatggcctaacaagatgcatgaaacaaaatataaatacagtgaaatccaaaaccacaagcatagtgtctattcgtcaaataaaaataaacatgcaaacgtgttgatctgtctagttcgtcgattgaaatcgcaagacacatataaccaacgtctgacccctctttccaagcaacataagctgctacttgggcttttggaaaggcccaacaagttggaaaatcacatcggagcccaaagagatcacgtcacatacgccggtaacaacacggacgtcgcataagccgtggtcgtacaaagagtcggacggcggggttgtgtgtatagcattttcggcaggcgatgaatatgcaaataattaataccatcggccaccgtgttggacgaggccggtgtgaccttcgtcaagcagaatgtagcgcttgccaagttcagcgagtgttttaatcatgaccaagcggaccgcaccgccgtgtccgcggacgataccgcgcgccaccgagctcctcgagggggccgggggtcaccttcgttctgggcgaggcggcggcgccggagtacaggttcggcgtgacgttcgaccgccggagaggagtgatggagat

SEQ ID NO: 45658 - DNA, 542 bp, Oryza sativa
tcggatggttgagattacgtgtgtctgtcagatgcgtctgctatgtcaggaatcaagaccaccactacgaattttttaagtagtagagattaaacgtagactaataagaaaacaaattacagattccgccagtaaactgcgagacgaatttattaagcctaattaattcgtcattagcaaatatttgctgtagcaccacattgtcaaatcatggcgtaattaggctcaaaagattcgtctcgcaatttacatgcaaactgtgcaattgatttttttccgtccatatttaacgctccatacatgtgtgatgtgtccaaatatttaatgtgacggaaaagttgaaagtttgaaggaactaaacaattatttttttcgagaaagcaaggctgcaattactcgtgtgtgaaccccgcaaatcaaagccgcactgtcgtcgtcgtcgatgttcttgcgctgacttgaaaacgtcaattgaaacttttctcgggagcccatttttttttagagagctcgcatcgatatcgaccagtagttttttctgt

SEQ ID NO: 45659 - DNA, 1241 bp, Oryza sativa
caattcaaagcttagaaggatgtaatttacttcctccgtttcacaatgtaaattattttagcatttcttacatttatattgatattaatgaatcattttagcatcactatgaatatggaaaatgttagaatgacttacactgtgaaacggagggagtaggtgatttcaaaagtaagaattgtcaaaaaaaaaaaagaattgtcatatgaatgaaatctagcaaataattaattataaataaggcactcccccgtttcatattataagtcacatgaactttttttctagtcaaagttgaaaaaaatttacaaaaaatagcaacatttttaacctaaaataaacatattatcaaaatatatttgaaagttagttttaataaaactaatttggtgtttttctaagctttatcaaattttaagaagcttgacttaaaaagtcagagcatggagggaatagaaacgattgaatctgtaaggactgattttaaattttttagcagttatttcaggtgatttttttttttttgcaagcggttgtagaccgagctattttttttttaactacgcaccttgtgcctcgcagcagtagaacccctctgtttccaaccaatcaaaccgttccccagccggctcttgaacggtccacttcgcaaagccaggagaagagccacggccacccccacgctcgctcccaaaattctctaatcgaccgatttctcctctccacacgaacaggtactcatcaggcttacctagctctgacaacttcatgccgaaatccttccttcttctccgtcgacggcaaaagaggcacctcggcatgaaacacccgacaagtacggtaaaagaagaagggtctggctagctatctctggctctgttaatatgctgggcagttcgcttcaatggcagccttccttttgtagtgacgagtagctagctaggtcgctgcataactgtataagcaatagcggcatgcaggatgcgcacgcacggaacttgagagagaaagttaattagaggcaagtggtgatgctcaccttaaatgtcaacgaatcaacgcgttggtgatcgtgcattttctgctcgatcgactagaaaacgtacgaacaaaaatgtcaacgacgacttggatgaccaaatgcgtgccgtcgcgctgggtttcagatttttcagtgttttcgtatcaccactatttcgctagatttgccaacccatggcggcggcggcgtcgttggaagc

SEQ ID NO: 45660 - DNA, 1181 bp, Oryza sativa
tgagttcttgacggagatgccatttgacttcgctagctagcaacgaacgtgtcgtgcttttctgttcgatcgactggagaacatgcatgcgcagaaaaatgtcaacgacgagtagcatgcatggattccatggaactgtgttcaggccagtgtattcctgtatatctgcaatttgatttcataattcacgaatgtgcatttctctatctgcagtttggtttcataattcatcaaggtgcatttatgtatctcaagttgcacagctatgcagtactatatgtatatcatcacttggctagtttttgggatccttacctttctggatttttcacaatttgattcttttgaaaaacttatttcataaatagaccctgaaaaaaacttatcccaaaaatagttctttttgagcgccagagtcactggtgccatcctcctaccgacgtggcagggcggtgctgaggtggcgggggagcgcgccagtgtggctggcgctccacccccacaattttttatttttttttattttttttgatattttttcacacttaggaacacacgagaaccaaccataaaaaataaactttaatggacgaaaaatgtgacttgtaaaatttttcctctcctctctagtactccctccgtcccaaaatatagcaatttttgggtggatgggacataacttgtccagattcgtaatactagaatatatcccacctaactagaagttgttatattttgggacgggggagtatagaggagagagatgtgcagcttttttatttttattttattttttgattttttttatacttagaaacccaaaggaaccaaccatagaaaagtttaactcaaatggatgaaatttgtggcctgtagaatttttcaaatctctaccgaaaagcttctcacctcaaaaacacaatctttcaagcaaaatttagaggttctaatttcaccgaacccggcaaagcaggagagaattggttgtaactttttctgtagatgtccgtggatatattatttgcctaatttcgaatacgtaggagaaagttacgcctattttaagaaatgatacccggggtgctttgttagagctttggaaaattctacatgtcacatatttcatctatttgaatttattttttctatgcgtcggttcttgtgtgctcctatgcgtgaaa

SEQ ID NO: 45661 - DNA, 650 bp, Oryza sativa
tccccagcatcccttggccatttgaagtcggaattggaccgttcaagtctctaatttttccttaagaagtcaagaacccatttttgtgctttgttcctgcttgttatatggagtttattagagtaaaagccttttcttttccgttggtcgtgtagacgctgcagcttcggaagatccgctcttcgtggaagttgaagccgacgtttgggaaagcgagcaaggcaagtcacatcatccttgaacatattgaatcccagtttataaaattatgttgatttaaattattgcattatcgctttatttaaattcccgcgttatcactattttatctagccatgtctatttacctttgttatgaccttattattgttattgttattatttccttgttcaccatagaataaacaaaacctcaactagtggacactctactcatggtaccactagtatgattttaggtagatgcttcgctggttgattaggcaacattaggtggttttacaactctagactttgggatattcatatcacctggacactatggaatggtttgattattggggaattggattcacaccttcccctctattcaaaatcctcaaaatggttttaggcttggcttcggatgcatggtttttgtagtagcacct

SEQ ID NO: 45662 - DNA, 2528 bp, Oryza sativa
ccaggacttaagatggtagcgccacgtggctggcgctaccatttttattcttttttcttttattgttttttttgctgcttgcatctcctgatttcaaccacacacgccgtcatacccaaatcccaagaaatcatccataaaccatacacaacaaaatcatccacaatacatgcccatccacaatccacaaatcaatcacaaaatcatccccaaatcaacaaatcattcacaaaataaaaaaaatccactggccgctggccacccggcctcccctcccgccagatctggtgaaggggaagctgccgcccgccgcctccgccgctgcccgccgcctttggggggagggggaggagatggggaagggggaaggggaggagaggggagggagagaagggggtgagaatgagaggggaggaggagggggaggagataagatcgaaggttgacgaggtgctcgatcgacgcgcggctcggactaaagatgccccggttgtatataccaaccgggactaaagataatgggggtctggcatgtttttgaaccgggactaaagatcaaaaagttgtactgggctttttaaccgggacaaaaaatgaggaaccggaactaatgcggtttttggctaacccgacaaagatggtttctccagtagtgctctccagatttatatagtactatgacatgtctcatcctttactatattaatttattttgggatgaaggaagaagttattaattaaccctactgaaaaaatgtcatcaatacagattgaaaaaagtcatctctaccggttgtagctacgaaccaaaaatatttttaatactcctatcatccttacataccacttcagtgttggatgtagacatgaacactcctaccatctttatcgctgtataatatgaagtctcacgtctcaaccactaggacctatcttttcaagtcaaatataatccttttcatgggggaattcgaacctgagatctctcccacgcgtgcacctatatttaccaacacgcctacaagcctattagaaaatgaatattgttttccttttaagccttcctaattgagatttgaatcatggatttgagtatgtaaaacaattcaaataaaaatattgtcaatgataaaattgtagttcttatcaagagctacaatttttatatacactttgtcgcagttcgagttcgtatgaaaaattaaagttcatatctaaaaccgacattaatatgactagggtcattagtatcaggtcataagaatacatcgccttttgatgtgagttgtattagtgtcgggccggtatcatgatatttcccgccaacaagcctacccatctccgattggcttgaaccaatactgattccttaatgataaaatttgctataggacattaaaaaacatgtaattagctgagagacaccgcaaaaatgtgtatttgctataagacatctttaaaaactggtaattagctgctggacacccgcggtattattttattattttcagaggaataggagagagaaaccatgtttaaaaacaagtttgccttggctcaaatgaatccaacgtgggccccacatgtgaccttaaatgtaagcccctctctctcccccccacgcagcgccgctttgaccagccggaacacgccggcggtggcaacaagtccagtaggctcttcgtcgtgtaatcaggtcccgcgctgcgacgtcgtgtggtgaagcggccgagcatgcggtggcggggcgaatggaggttgccgctagggcagaaatctttgacaatgcaggagttgtcctagccggcgttgaagtcgacaaacatggtgtgcaggaaagtgtggtcgagccagcgcaggacgcgcttctcctttgaggcgacagaggtagacgttcccgatgtccgcggctctgacgcagcggacgagggtgaagtcccacgggccgagtggcgcagcggcggcacagatgggcgcctagagaggtcggcggcgtcgtgcggatgtggctgggaggaggtgggcatggccgagtcgatagagaacatggaggagcggccagcgacactcggccgtccttgcctgcacgccgacatccgtccgtccttgcctgcgcgctggcatcacctcccctcctgctctggcgccacctctactgcgtcgtgctggtcccggcacttgcgcgcgaccgcaaagcgccaccccatccaaggcgccacaccggcccgcgcctcgtcgcgtggtcaccggcgctctccctccccgtcgggttcacttcaagaaagagcaaagagagaaagaatttgatagagagagaaaataataaggaagaaggagtagagaaggatagagaaaaacaaaaagaaaaaaaaatctaagggtagaaccgtacttacacagttgtttctctctccaatttctccggatataataaaataatctcacgggcgtccagcagctaattaccaggttttcatggtgtcctatagcaaatacacgtttttgtggtgtctcacagctaatatgtt

SEQ ID NO: 45663 - DNA, 1452 bp, Oryza sativa
aaaatctaagggtagaaccgtacttacacagttgtttctctctccaatttctccggatataataaaataatctcacgggcgtccagcagctaattaccaggttttcatggtgtcctatagcaaatacacgtttttgtggtgtctcacagctaattacatgtttttggatgtcctatagcaaattttgccttggttaatcatcattgccgggtattcagataaaccagcactaattggacactgaataatcagtttcctctactagagaaatgatctttgctgggtcactcaaaatccacaatagtcccggttccttaaaagaatatgtttagtcccggttcaaaattcctacggaactttttgatctttagtcccggttgaaaacaccaaccaggagtaaaagatcatttttaatcccggttcaaaaattttcaggccttatcaggacccctattatctttagtttcggttggtgttatcaaccaggaataaaaatcaatacaccgtatataatctcttacacttatccttaccaactcctcctcctcatctgtagcttcttccttttcctctctttccttctcctctcctctctgtcttatcctcaggcttctctctctcatcctctcctttgcgcagcagctatatagagcgagcgagaggagggcagcgggttttttttgcacagagcgaggagcgagcgagcggcaggcggcggcagcctcctctgcgcgccggcctgcggcggcctctgtggcgggcggtgcttttgtttatttgttcacatgaatttgcttatttgtgatgtaaacttgtcatgtgaatttgtttattacgtggatctgtgaatttgttcattgtggacctataaatttgtgatgccaatttaagtatgttcattcgatctgtgaatctgtgaatgattttgtgatgttttgtgaatggggatgatttgttgttgagttcggtttgaaatcaatataagtagcaaaaaaaaattaaaaaacggaaaaaaaaagactaaagatgggagcgctagccacgtggcgtgccgatcttttattacctgggactaaagatctatcttgagtcccgattatttcacctaggactaaatataaccatctttatcctggattcgtggtcccagtttacaaccagagactgaagggggctgcaaaccaggagtagagagggttttccagtagtttttgtttgttgttgatgatatgatccagcactgatgttttctcaaccgtgctagatcttgcctctgcgtagcgtaagagtacgtacgtattttgttggtcggaaaatcatcatcagtgctgggttttgttgaaccgggtgttgagatgatgacagcacttatgtactcttctaaagtagcgtaaaaggatgattgatatggaagaaaaaaattagtaacttaataaaaagataaacttaaga

SEQ ID NO: 45664 - DNA, 612 bp, Oryza sativa
aattaacccaaaaatatgaggtttgattttatctataaaattcgccggtcgagacaaaaatatattttaatgtccgacgaattttatagattttaatgaagatgaaaagaagccgtgatagactgactggacagccaattaaaggattgggtgtggaccatggtactttttaaaattattaaaattaagaacccgatgcttataagggttggtttttaaatattagaacaccaattggcctatttaatattttttttaaaaaaaaatatgtgtaaaaatagataattttatataagtgccgtccacctagctagtttactctacgtgattggtacggtggtctctgtggaagatacttgcttcgatatgctcgaccctattctttttcttcattatatactgggaagatgcacactgtatatacatacccacaagtacggccctcttaatgcacgcaaagcttaaagttattacgtatatttggtgataaatcaatgagcttccaatatccatgtgtacgtaactacaaacacgtgaatttagcccgtggtggtacgactcctccgtcaaacatttttacaataataaaataatagtttttacctccatgtt

SEQ ID NO: 45665 - DNA, 892 bp, Oryza sativa
cataatgttcgttgcaaggaagaatacgcgagaagaaggaagaagacggaaaaaggaatgagttgatggaaaatgtgacggcaatggcacggttctaattttgtaaaatttcaatggtatagctataaatagacaaattgtaatggcatttttctgataggcaaatttgcaatggcatgatccaattaaccctatattttttgtgctcttggaattgtaatgccaccgggcatgacagtgttgaccccggtaaagaaatcacaactacacaactacataattgattttcgtggacgaggccaacctccagcctctaggctgaccataacatcatccacttgcgataatatcgatcccgaaggaaaacaagatccacatgcaaaaaatcaattttctcatgcgagccaacttaataggccctccagcgaaaataacttatttcacaagcgggcctgttaagtggcatgcctatgccactagcccaccaggccgacgactgtcgacgtctgatatcgcgattccggtatttgcatagtatggggatcgttggtactagcatatatatatatgcgagactgaggtaaaagagacggagatgaggatttttatacaggttcgggcccctgaattatcaggtaatagccctacatcctgttggccgaagccggtcgttgctcttattcaccataatcaaactagtacaatatttggggtagcctatctaactattgtcgacatggcggtctgaaggtctaactcatagtcgacaacagggtagtctttctcctcgaatccgtgcccggcgatatcagagacagtgcattcgtctctcctgacagtatccggagacattgcaggggactagccgtgcttatccctgaagtcgatatcc

SEQ ID NO: 45666 - DNA, 708 bp, Oryza sativa
atttttactaaaattaatatgcccaccactccgatccactagattagattgatttgttccctttctcaaaaaggagatgtccccttttcccgtttatttctttatgaaagtttttttttttttttgctatcggaccaaattatacattatatttctgtaattattttatttataattaaaatcacaaattagaatttaatgcatacgttgactataatttaacttgtatattctaagaaaaacatatgaacatctaaccattaattattttaacttaaacacggtgtacttattattttcaactgatatcttaacaatataaaaacggaaaaggtccacttccaacccttcacatgtaatgtatatcttcacatgaacatccccacgcgtaccttatctctccttctctcccctcacctcctcttatttttttcaacggacaacatcagataaaaaataaataattagatagcttaacgattataattttaaaagttgtatctgctttttagtttgtttcaattgttgttttatttataactaaataaataattcaagttccacattatctatattttactataaattacaatacatcatttcaagtagactccaaattttttttcacggaaaccaaataagaatgagacattacaaaaaagttgactatatgcattatgtcataaatcagtctagatgacaaaaatt

SEQ ID NO: 45667 - DNA, 1092 bp, Oryza sativa
ggcgggcgcggcgcgaggtcggggatgacaggtgggccccacccgtcagcgagggtggcgggcgggcccgcctgtcagtggcgcgcgcgcgggggaggagccgatgggccgcgggggaagagagagagagggactgggccgagccggcccaagaaaggaaaaagggggggaaaaagactttttagggatttttctttttataaaaccttttcaactttgtttatttcttctcaattattatttgtgctctgaaaattccactaaaatttgagggctccttttagaccaaggagaatttaacaaaaattctccgggccacatttgaatttttcttgtacgtattttagtgtttgccaatttcttttcgaattttaattaattctattattccttttagaagatgatttttatttcgggatgaatttatcaggacgtgacaaatccaccccccttacaagaatctcgtccccgagattcgaggaggctagcaagaagataggttaggcggtcttctcttcttgtctgacttcttccgttgcgtcttgacgaacttccagcaaaacttcaccactcggaactgcttggcttgacctcctgttgcggatggaatcttctcttcacctgacttggaccagggtgcaccttttggctgactcagactaggttgcggtagttcagtgatgcttccgttccagaacttctcatgattcaaatcttcggagtcaacctcatacaagttaccacttcatgtcatgcgtcgtaacctgcttgtcattactaggataccatgcttgtcatcatgagaataccatgcttggcgtttccttccagcttaccaccatacgctttagactatgatatcccgcttactaaggataccatgattggcaacttgccattaactgtctcatattggctttcctggtctccagtgctaggtacttctgctattcgatgccagggtcaaccactctaactataagttatgcttcccaagagaaccaatttatcccgcttgacatgctttgacgtcttcccgaatgactttgctgctggacttgttattgtctgatcgtgatcctgccagatctg

SEQ ID NO: 45668 - DNA, 651 bp, Oryza sativa
gatttagagtaattttctttacttaattttttttgttacatatatttttatgttttacttatttaatgcaaccaattctaccaccatgtgatgtataaatcggtgttagaagagttaatgttttacttatctgtttaattaaaaaacaaaatgaagatatttgatttatatagttgtacacatctaaatcttcgaaaagtatatactcttgtaaaatttgtacatatattcacgatcgttaaatttccgtataattccgattaattgtccatattctaattaattggtgaacggtaccatttccgtccgataaccatattccttcttccacaacattgagaagtaatatggttatcctctttaaacttttataggcatataagcttctttataccaaaatttaacgtgtacctccagtactagttggtctaactactttataataagttgagaaaatcttatctatcaaatactaagactaattggttagtctaactactttcgtccgaaaaaatgcgcaccgctggcgcgcatgctccgactagcctttccccatccaggcacatggttcgagctgggaggtgtgcatggacacgaagcgggccgtgaggacggcctgcgggtgcatgcgggcgcaacaagtagggttga

SEQ ID NO: 45669 - DNA, 638 bp, Oryza sativa
caacaccgcgtacacacctgacgcgtgtcccatcacattagtgcagccaagcgttttccttgagccaagccgatgtcttcctcagctcgcgcgttggaacggacaccaagccgcagttagcgactgcacatggagttgagccgttgtttcattagaagacagaacagatagtaaatctgccgctaaccaagaacagatgaataatatatactccctccgtccctacatatttaacgccgttaacttttttaaatatatttgaccgttcgtcttattaaaaaacttttgagaaacatgcaaaactatatgtatacataaaagtatatttaacaatgaatcaaatgatatgaaaggaattaataattatttattttttttaataagaagaacggtcaaacatgtttaaaaacgtcaatggcatcaaacatttagggacggaggaagtagattgtaaaacgcaaccgtatggctacaaccagggttagaaattccggaatgaattttagtcatttcagacccttgatacaatattatttcggccgaatttttttaatttttttattcttttgtgaatttggtaatattttgtttaaatttaaccaatatttgatcaaaattttgaaaatttcggactgaaa

SEQ ID NO: 45670 - DNA, 623 bp, Oryza sativa
ttaataggtccgtctatgaaaataaaaatgttttcgtcggcggacccactaggtcagctgcccacccttctctcacttaaaaagtctaagtcctatcctctcctgtctcccctcctcctttcccctcctctcctccctcatagccttatctcctctcctccactctaggaggtggcgaaggatgcgacagtggcatgcgctctaggaggtggtgaaggcggcaggagcgtcaggtgctacgcgaggtgatgaaagcggtagcaacatcgagtgctccgggtgcgacgatccagcagccctgacccttggaggggtggatcctccgccgctggccttgagtgtggtggggtctcagcaacgatgatggcggcggcggcggcggcggactggatcaatgatgatggaagcggctagggtgaatcgaagctaggttttgaattttgtgggttttttttaggtgagtggcttaacttgaccgcccgtgaaaatcggattttgcacgcagttgtgccacccatttgataaaatactattttcgcaaacgcctcttggcaggtcgtctagccatttgtgaaaatgtgtttcagcggtttgtaaaaatcgtttatgtagtgtagtgcatg

SEQ ID NO: 45671 - DNA, 1346 bp, Oryza sativa
ttattactcattttcacaattcattattcatcaatgttttcattattcagatattagaaagtattgatgatttgacactaataagatatctaattaagtggattcctgcccaaccttgggccgatggggagatttatctgtattctccagatacacatagttggtcttctcaaggcatgaagatgaaattctttatcatggatgaaaagtataatatggaagccaaagggatttataagaagattgatgagttggtcagcctggctaatcattcaatgtttctggctccagtgtttgctttgcatgataagaagatcggtcgtattattctgtgttatccaaaatttgatcaactgcttaaagattggctgcctgctcaagccttttaaaggccggtttataccacccatatggatgcatcttataaagtaagtataattttattcattctatttttgtatctctctcggttgatgtgatacttatatcttgctctatatacacaaattctatttttgtatctctctcgattgatgtgatacttatatctttctctatatacacagagatgtcatatcttacatgagcaacattgataacttggctgcaagcttaggaagtattgactcatatgtgttggagacaaagcccgagagaataaaggtcatcctttttccttttgagtcaagagaagtaaattggcgaaaagattttgctacatttctgatagacatcttcggaacaaatggaaatccaccatgttggatcacttcatcaacatcttacaaaaagatttcaagtacgtaaacagtcatatcgtttctcttatgcttttgcttatattagtaacggaaaaactaagttgtgagcaaaacttttatatacgtgtacttattgattcaaaagtaaatattgtaaaataaactatgatgaaaaaaactacaaaaatcaaatacaaaattaagttctagaattcaaattttggcttataagcataagtgaaatggtagggctgaaagagtcctgttgtggtggcagcgaatctgtcacccaccattgtttttttgtagttcttacaaagtgctcccatatattttttgatattatgaaatagtttggtatttagttcaaacaagtaaataccatatgttgataagcaaactagtgatactaagatattttcaccattgttttttttagttcttacaaagtgctcccatatattttttgatattatgaaatagttcggtatttagatcaaacaagtaaataccatgtgttaaggtaagcaaattagcgatactaacatactccctccttcccacaatataagggattttcagttt

SEQ ID NO: 45672 - DNA, 5453 bp, Oryza sativa
aatcgatatatttttgcgatttccattacaatcgtattatttttttaaaaaaattcgctcatgctattgacacctcgtataatcgtatacatgagacttgagagtactaaacaagcaaattcacctcaatgctatctaaaaaaaatgaaaatagttagcaacgttacattttgtggcccacttcattgtaaagatgagcccgacccctctatatttggctcaaccgttaatctatcatcaatcattaaattttctctttaatgccaatttaaacgattctattattgactatactatccatgcatgttaaacgcctatttattttctctctaatgccaatttaaacgattctattattggctatactatccatgcatgttcaacgcatccttttttttcctagttaattgtatcgtcctatggttaatggatagcaaaccataaattctttccaatgttacacattttatccatatacccattttcaaaaaagaattcacctttcttgtcctataaataggcatgatatcctacccttgtgcttagaaaaaaaaaactacccaccctttgggttctgcacctaatagcaactggtatctaaggtttcgtgtttcgccatggcttgcaaggttgcctccatatttgcatccatcctaatattgtcggtcctcgtcatgtcttgcggtaatatcatagtatacgtacactctttttgcgtattttatgaagcattgggggctagtaattaactaatttctcacatatatatacttctcacaaacaaaaacttctcttaattttggcttgaacagatgcagctggtttatcctgcccaactgtaagagcgccgaatccgacctgcctgagccctcaaatttgtgctaatcagtgtgtagcagctggttatttgattggattctgtgagttttatggtagtcgattgggtgactgcgtgtgcaccaaatgcacaaatgctgtgcaagccggccgtcctcctactattgctcctactcctgcagtgagaaggttgattctgtgagaaaaatacatggcatcatcaatttgtgatggatacaccatgggaataaattaacttgtgtgttgacgattgctgaatttgttgaatcgagttgttttcttgaccaagtgttgaatcgagttgttgagaattaagaaaataccaactatatatatggtgaaattctaccttatttggtgaaattctaccttattgtgtccggcgaaattctaccttgttatagaggaaaaacctgagtatttttcgccccttaggccttgttcggttaatccctgtgagggagggattggagaggatttattccacacctactgcggtgtggaattattccccctcaatcccctccaatccaatcctcttcaatcccctttaaactgaacaatgtcttagtaggggtgttctatgttttaccacccgtacatgatatgtgggtcatgatcaacctatagtggcaatgactaagtttcaactaccagtgaaccgcaaatcctagagttcgactaatagtgggcgtgttcggctggcagtgttgtggctacaaccgtgtatcgaacgcaccctgtaaagcaggaaatttctaaaaagaaaatactgtgcatattatgtttgtttatgattttagtacgatccatcgctgcgctgcccatgtggaaagaggaatccaattttgcgttgaaccgaaacttgcagccgttaataaacgttaggagagaaacatttgatcatacaaccatcataaacagaaatcacgtataatcggtgctcaatcctcaaatcccccgtacaactgatgtttttcctcttgtgtatttacgattttacatcaaggtgatgctgaagttagcactggaaaatttggataagttgatatctgatttttttcccctggagaaatctgtattctgatgaggattgcataatgggcagtcagtgcagtaaaaaggggaaaactttactgtccaacatgattcagctgcccaatttcttaagaaaaatgggatatacaagtgtaattggcttgatcatttttttttaaaaaagcgatttcttcactacaagaataggcagggcacacatatataggttctcatcttgcaaaaaataaataaacaaataaatttcgactactacctattacgtcttgagctcttgaaggactttttaagtcctgaacttttttttaatacgtaaggagcgcatttttttatcaagaaggaataaatgtacggaaatgctgcgtgctgggcgtccaacggcagaagaaaaaatcgggcgcccacgcctcccaccgttgctactttaaatagttttaaaatgatttttctcctaaactaattatccaatttacgatccgatcacgccgttgtattcgttgcaattaaatctttacaacaagactacacatgattatatttcgataaaaaaatattttagcttttttattgatatgttttgaatgttacatatgatctttttgatgtttcgaccagtagttttacggtgtttcagttagtgtactcgcgatgtttcactatgtacagatcaaatgttgcatcaaatgttgcagtggattttgatattatggaacgcgccgttgcaacaaatcacgcgcatattatggaaaccctctattaagggaatttggtttattttttattctacacaaaatgtttcatctagtgcactcacaatgtttcactatgtatagatctaatgttgcagtgaattgaaatattccattgcaacaaatcacccacatattttggaaaccctctattaatggaattcgttttattttttgttccacacaaaatgtttcacctagtgtactcacaatgtttcactatgtatagatctaatgttgcagtgaactgaaatattttttcactatttgttgaaacattgtttttatataaggtgaaacaacacctgatttaaacgagtgagacattttcgatctacttagtgaaacaattccgatatacctgtggaaaatcgtgcaacatttaaaaataattcgataataagataattttttttcgtcggaatatatccatgtgtggtcttgttttgaagatttaattgcaacagatttaatggtgcaatcggatcatgatttggataagtaatttaagagaaaaatcagtttagagtaattttgcacgtaaatgttttggataatcatgttattctcgattttaacctccttctatcggccgcccgagccggagtggcgtccataaatgtatgtacaaagcgggccaaaaagacaaagcaaaagggacgaggtacaagaggagaaccaagaaccaaaagcctaatctccaactaaattttgcgacccttctccactaacatgagctgccaaaacagggattgcagctctagctagctgccacagctccgtttcacccgccataacccttgcaacctccgctcaagttctgctcttctggctgaagactcgattgtttctttcttttcagatcgtccatgcaaccaacgtcgtgatggtgtcaaaacctcggcgatcgtccatacaaccaacgccacaatggtgtcaaaaccccggcgatattcctttaccatcttcttgcgacagagtcctgaacttcctaacctcgttctcgaagaaacgtgccttgtgttccttccacgccgttgaaaagctctggtgctatttttttttcttacttagattttttgtagataacttttgttaattagataccaaggagcagctgaacctgaacgaaagcaatttctgcttcagaggacctcgatgaagtaaaatggaacaaagtcacacatagcctaatcagggaatgcatgccaagtctcaaataagctggatcatcctgcagttagcaagacactaagatattaacacaatcctaaatgccattattagttagctgtgtggatatagagatcatatttctattcattattaaaaaaaataccattattagacacagggttaatacttaccccttatccacttatacatcttgatcaagatttttatcaaatcatcaatgccatccatttccaatcagtggctgatttcttacaaatagtcacccctgcagatcaaatcctgaaagtgcatctaggaccctaatgattttgatgattgattacaatgcgattagagaggactaacacttttattcaagcaaatgtgaaggttgttatgtcctcaacatgttgtaatgagatgcataccccatgaatgcgacatcacgatgcaatgcggcaatgatcaaatggtatattgtatcttttaccttacattgtgtcgtaggaatgtcgtactattaagagggataccacatgcatattattggtagaatactagtgctcaaaatgcttcatctttgtgtgagttgaaaaacctaagtcaaaatttcaatcccgagttgtttcacttgtcacaacacttacaccgggtttctttgcaagtttttcaacatctcttgaaggttttggaccatgttttatgttgggtttgatagcccacgaaactagctttccatagagtccaagatcttcgaaatcggagttcggagtaaaaagttattgcagttttactttagcaacatcagactatccgatttgaaatcagactatccgatgtatcggactatccgatttttcacagaacttcactctctatcttgatttgaaaaaaatcctatcgagtgagtttttctaagtatcggagtatccgatgtcggatcagatagtccgatgatacagagactccgaaatttcatagaacttgagtctctgtttgaggacaaagtttttgcttctaaaatatcagatactccgatttaacatcagatagtccgatgtctcgaaaagtccgaaatttcatggaacttcgttctctatttctcgttgccttggaggtttaaaatatcggactatccgatcttgtatcggactatccgacgtgggctgaaagattcccctccaacggccacatttttggggggtctataaataccccccacctaacccttttctagggttacccaacccatttcattctcattcactttgggttgagcttggtgctaaggtgctttggatctttgagctctttctccctctctcaaatccctccttgttctttgtgtggtggatcttggtggttgtggatttggtgtttgagggcctagtgtgtgtttcactcgatcttgagcactagggtttgaccaagagttgtgtggtgtttgttactcttggaggttgagtactcctagacggctaggtgtcactcccgagccaccgatctacgtgtggttggctgagagaagtttgtgaaggccggatctcacctccgcaaggaaaaagataccccttagtggaaggaggagtgcttagtgcaacctcttgaggaaag

SEQ ID NO: 45673 - DNA, 1053 bp, Oryza sativa
tagctttgcttaattgtgccgctatagatctagtcgctgtttgtgctttactcttgtttgtgtgatagatctacttgttgtgcttcattggtggatcggacagtctgatccaacatcagactatctgatattttcggatagtctgactgtggatcagactttccgaccttatttcagttttagcttctgcataaaattttaaattagcctattcacccccctctaggcctaattgaccctttcaaatccaaccaaatccaataactccatcccctaaaaaaaatccaataactccagagatttcagctttcaggcttttagccatggcttattgcagctgcaagctcacaccagcagcaatggtggcgtccatattattcctggccctcctcctcctctcccctccctgcagtaagtacacatgccaaaacaaacagcagcaaaaactgaattttgatttggtttacattcactctagtgtgttcatagggaagcataagtggtgtggtagtgaagtcatggatgcataactccacctataaatatttatatccgcgaatattacgctgttgacagaaaatacgaggcctgggagatctgcttaactccagtgcaggtccaaagctcgccttcgaatgtatgagcttgccagttgatttgatcctataatcaacaagaaatagagacaaagaattcgtggttaaatctataaatgatagctgatcggctaggtgccgatgacatatcatttatctttgagccgatatcatatatgaatcgatcggcggttataaatagatagtaaggaactaaatctattcgatcggctgtagatattaacgatatatagttcttatattaatatatacttaaatcaagtgattgggatagatcggtcaccatgccgagatagtataaatcacttagatcgaaatatatattaataacatgattatatatgtttatagcatagccgatcagatagatctagaatgtatcgcgctaatactccgatactactttatataaagatatcatgatgaactactgtac

SEQ ID NO: 45674 - DNA, 3163 bp, Oryza sativa
atgcagctcaacccgaaagaagaactcgtcgaaacaaaactaaaacaaaaaggtggcgatgcgctgaaattgtattgaacatgtgtgttctttttttaaattacatagggctcgggttctatttatacccgagaattacaagatatgtccataccggacacggccactatctctaacaaactctaagatatcataagtctttgcggcagacttttgcccaaacatatctctaaggaagttacataaaacatcctaattaatagatacaattgccttctcaggactctatccatgtgcggcaatcatcttgaagcacctcaattcaacccaatatcatacaccaaatcatactgtcagaatcggacgcatcggctcacctagtccgacttagacccagccgatcctaatcgtagccgatctggacttcagccgattcttgctctgttctcggatcaatctccgccttcgactccaccttgatctaatctccttttccgatgctgatattaccaaatttggtcgttaacacatgccccccaagtccgggatatttgataatgttccgaatttgccgtgtaccgattctgagcaagtttcgcactctgccgtttttcaaccgttattctattgctttaaataccaaccattgccctcgagaaatctcatgccgtgacttccgttttcaccgctcaagcgaaaccattactctccggcgattcctccgacgcaaaagcgatcccctggcgatttcgcttttgatcagatctccgcctgcggtgatgtcgtcttccactatcccgtctactgcgccatcggccgagtatgctgaggtaagttctcaccggctagatcccttttcctcgcatgaaatcgatttcttcttttctcattatgttttctgcttcctgattcctttggatttgcagcacctttccaacctagttgcgattcccagcctatcgcacaaaaaccattattttcttggcccaatcgacaatcttgactccactgatttcatcattggtgaaaccaacagaatcccctttagactagccaaccctaacttgggtcactggaagaataccttcaagtcttggctatctcttgaaaagcctatccctgataagagctagaccacctggtaccaacgcatatcggctagtaagaaaacccactgggatgagattgggatcggccaagcgcttgctctcaccatagccaattctgctaaggatgaacctctgatggctgccgccacctatttctggtccaacaccatcaatgccttcttatttaatcaagggccgatgactccaactttgattgacatcatcatgattactggattagatgtaacttcatcggctaaccctataagtatgaacaccaagaaccaatttgacttcaagaccaaaagcataggagggtggtctggttatgtagcgacatacatgggcaaagggcctgtcactcctcgggagcacgtagctttcttgctaatgtggctagaaaagtttctcttctgtggatccagctgtggtcccacaaccaattggcaatttgtagccgaagccttaggttcaaagaaacaatttcccttgggcaaaatccttctcggctatctataccaaatgttgaacaatgcatcggctaagatagccgtcggctcaatagttggagcaggtggaccatggtggctactgcagacctggctaaacctggtagtcatgaaagttgtcaatcggccatctgtaacagaagctgaattcccaaggttggagccaattgtagaagacgatggagaagaacgcacccatcgcagatgcatgtcatatggagaatatgcatcgacaccagccgatgctggtgcaaaactatcggctgagctgctcaaagattggttctgcagcttttatgaaggcttccagaaacatgcccgggtttagtttctttatgaagacttagcagaccttgagctcccattagacttcagatttgaaaacatcaatcgtgaatgatatcaaacgtccagggaagtctttacagctgcaatcagcccatgcatcctacctgtcggtattcaccaaggaagaaatatccaagtctcctacgaattctatcaccctataagttcagctagacaacttggattaggccaactcccaatcggctttttctttgctgacaagatccaatgccgaggagaaatttcttcaactctaatgatggatcgactgcttaacctccaaggacctcccttaggcagtatcgacaatattgagttagcaggattcaggagcaggaactttgacagatggtggggaatggaaattgcatctatttcatcaatcggccacaatgtacatgtgtcacgtcccaaaacgactctaaaatatatcccttaaatgatgcatagaataattaaaatccgtgtgaaagcctccaacaattaaaatgtgcaaagttaaaagccaaataaggcttagaggatttttgtaaatttcctaaaagcctaaaatgcgtaaataaattttagtggaattttcagagcacaaataataattattaagaaataaacaaagttaaaatgattttataaaaagaaaaaccctaaaagtcccccttccctcccttgggccggcccggcccatctctcctccccccctctctctctctcctctccccgcggcccactcggcctctccccgcgcgcgcgccgctcacgggcgggcccgcccgccatcctcgctgacgggtggggcccacctgtcatccccttcctcccgccgctcccgttgcctcccccgcgccctagcgccgccaccgccgtgaatcccgccgcctcccgccgtccccgcgtgcaataaagtgggggggaatcactccccgtgatcccctctccctttccccctatttttccctctctctctctcgcattcaaacgggcggatttgcccccgcaaatctcgccggcgccattgatggcggccggacctcccacgccgattttcttcccctccggccgctctctcccccttccaaccctatttaaaccctccccgcgcctccctcgcccgtttccgccccttgccgcaccgtctccccaccggaatcgagctcgcgccgtcgccctctctctcctccgtcgccgacgacctccggt

SEQ ID NO: 45675 - DNA, 2740 bp, Oryza sativa
cccagccacgatttgttgcttgccatcgtgccacccatccccgagtcggcgagccccctactagtgcgccatgctactcgctgccgacacgttgtcgattggaccactgttcgaggcatgccaggctaccggtgaccaacaccgttgccatgttgtagtgatatttcacaaaaagaacacctagctctttgtttgtgttatgctaacaaacttggaagcgtatgtgagcggttcctttaagtagtccacatagctagtaccacctctacttccctttagaaagggattcaaactttacttacggatggtaaggatgtgatggggctaccaacacgaaaagaaaattaatgggctgaaaacattgagttcatgatgtcaaaagaatttggagcgcggagtaggaacacttagtaaaaaattcctaaacccgccactactttctagaaaacacattgaccattatcttcatatatcctcttaaaatagagagaaaaagactttgaaaagacaattgtaatcctaggccattttgcaagaatccattcatctataaagctaatgcccactaaacacctaaagctcaacatgcaagcatagtatttattagcactcctaaaatctaacatgcaagcatgccacatcaatccactaagcatacaaagctcaacatgcaagcacatagtaattatatatacaatttatttcattctaaaactaaatatacacatgctaaatcattattctcaaatcattttcacaatatttcaatccaaatcatttcaccatttctacaatatctaacatatatatcaagcaacaaagcgcggggcatcatctagttataacaaatattactcaacaaaacgtattttgcaaaattaaacttgtcccaaattgtaaaaatcaacaacaatttactgaaggttgtttaaaataaattcatttaaattctattttcacggttctttaaatttacgaaattcattaatcttattatttttatttttaaaatttgttattaaaaataaattcggttaatattttttcacaatttaaattttgtttttttaaaacgtttaaagttcaaccaatatttttcagttttaatttttttgcaattcacatatttacaaatatgggataagttttgcttattttttttcaaaaatatgtttgcatgtacctattatttgttcaagaattatcttgcaaggtggaccaaatttaaatttctcttataccatattttctcaccattttaagaagatatattaaaataatggtcggagtgtttttggacaaaacaccacaaaacaaagatatcctaaagcataagcttttgaagaagataaattaaaataatgatcggattgttttttgggcaaatcaccacaaaactaaaatgtcctaaagcataagccacaaatatttagtgtcctaaagtaaattttgcttaacagttaaggataggaaaacacagagtttaacaaaaagcaatagagatttcacaagtaaactaacttgacaaaagaaatatatattttataaaaactaaactaattactacataatgagataaacaaaaaataatcataaagaaatatgatagcatgttccaaggaattggagaaattacctgctcattctattctactactgatgatggcgatttcactaatcctaaaggttgtccattgtgttctatctcctacaaaacaaaaaaagtatggattaaaatattgttgatcaatcctacaatgaaacatatttctataataaggaactttcaaaaagttattcactaaatgcatgaaccaaaatgcatgagtagtcaaagggcgtttcctactgacaagctgctaaagttgcattagctaatagtagtagctaaaaatttcaaatggcatgtcggtgcgtagtcatagtcctctttctaatgaatccgttgaaacaagagttatgtcctctttctgctcctccacaggcaattcttcatcactaccagtaacctctctgtggagggcctccgcgagcttcttaacaagatcatccttcaagcctatgatagcttcctcctatggagttgttccttcaattcagtaaccttctactgttcaaaatcggccggttgttcagcacaggatacattgcactgtgacttctaaaattcacagctacaaaatcaaatggctaaacaattagattcgaacatcatggttgtcaagatggtaaggcgatctggggcaacccacccacgcattaccgctataggggtaaagcgctaaggtgcggggacgccataaccttcatgattagcagcgattagaaaagggagaggaagaaaattagcctagtaggccatcccacaaaagcccaataaccttcatactagcccaaggtcaaagaaacaagcgtaacacccgcatcaggtgcgtctctcctatcacagcgtcgcctctgatgtcgcttcttcccaggggcggagctagaatgagatggaggggggtgccacttgtttaatttactctgctaagtttaagctaatgtgggtgtctgaatttgaattgaggggggtgcacacatggtgaaaataggttaggtaaaatggcatggagtgttaccatataatctctgaatcagtactagtagtagttcttccttagctagtaagcattgtattggtcaatagattttttccttctccaataagctaagacctgctagtaagtcaagtctgttt

SEQ ID NO: 45676 - DNA, 1857 bp, Oryza sativa
cctttcaaaatagtaaaagaatccaagatttaaaaggcttgcatcatgttaggttttactaaggtagttgtctgagtcagccaagtcgtgctgcaacttgaggacgagctgcttgaaaggagggatgtaatctcgagctgctcaaaaggaatgatgtagtatcataggtagtgggtcgagaggtcagttagtgttccaagaggttgaggccctagtatccctagggaacggttccctcatcttatggtagctcagttggatagagtttgttacaaatgattaaattggatccttccctacatctatataaggatggattgtattgtcattctagttaagcgacgaatcagaattagtctcccatatcctaagtccctttttcattcctagcggtcgtcaccgcccggctattctcccggtgatatttacccctatgaaccctaaccaataacaactatatatataaaaaatatatcacattttccatatgatcatattgctctctttggtgccaaagtccttcaaaatgtcagaagatatatgtcatgctttaaatatgaataaaggagactcctttatgtcatgcttaaggaacgacactatgacggtgaaatgttcagctgactaacttattacgtgtgtgggtagcacacaagaatttagcgtgtgatccacatccactgatccatagaaatttgtaacattagttatagtcttgctttgggtagcagatagagagaagatatatctcgtttttcacgcccgcttcccaaattgctaaatggtatatttttttgtttttttaaaaaatctataggaaagttgctttaaaaaatatcaatccatttttaatttaaaataattaatacttaattaaccctatgctaatagctcatctcatttcacatatcttctcaattttctcattttctttcctgtcaaatacaaccttaatttgcagctgattcctggttattgatctctgcccactcagttttagctaagatcaaaactgattgctggaactaagctgatttattgctcgtttgcacaacaacctaagatcaaaactgcatctctcaaaggaagattattgagtaattataaatcttgcaaatgcagtggttaatcttcagaaatgatggttaataataagttccggccgtacagtcggacagaaattaagcaggcgtcttggaaagaagcattgaccctggctgcatccgcatctgcaaatatattcatattcagacaatttcgcatggtcctgtccagccaggccggcttcaattctcttgtccgatgtgtatgcagggcgtgacagtaactgtaaatctgtaatcgtgcagatgtcgtcatctcttgccaggttcagacaaattcagagccacaggcatgagcagaggctagattcatcttcgagtaaatcctaagccgatatgatttgttgctgtctctctgcatattcctcacattttctgaatatttcacatgctgcaaatccatggtcattagtgaaacattgtcatttacttttttgagaataacattgtcatttactttacatttggaagcatcaagaattcagatcatggaactagctaaactgttaataagttgtttctctggctagaaaataatcaatcattttgtagagagagagagagagagagagaagaagaagcctttcttcaggcagtgattatgcatgtgcataactatgtatgtttaaacatctctaacactgaacctcagaaagactggtcagtttgtgttaagctggacagctagctctaagttgtaggatgtgattagaccatcatcattagcatttaagacgctctcaagtcctatttc

SEQ ID NO: 45677 - DNA, 1333 bp, Oryza sativa
atacatattttttgtatcttgcagaaaagacgtgttgtcggagttgtccctcaagccggagtggaagagctagccctagaaggaattcgtgcaggcaagtgatgtaataatataaatgattgttatatttgtaatgcaattaaaaatattagacttgtaattagacttagcatataagattgtgtagtgttctaatattatttgagttttaatataagattattttattgcaaattagacttagtatgtaattattgactacggaattggtgcgactcctagcaattgactattgtagtcttaattagacttagcatatacgcatgaaacacttagcatacatgactattttggtcttagcatgtaatattatttgagttttaatataagattattttatttgtaattagacttactatataattattgactacggaattggtgcgattcctagcaattgacaattttagtcttaattagacttagcatatacgacagttacacttagcatacatgactctttcagtcttagcatataatattatttgagttttaatataagattactttatttgtaattagacttagtatgtaattattgactacggaattggtgcgactcctagcaattgactattgtagtcttaattagacttagtatatacgcacgaaacacttagcatatacatgactattttagtcttagcatgtaatattatttgagttttaatagaagattattttatttgtaattagacttagtatataattatttactagctagggttgtataatatacgtcatctagacttagcttatatcacgatttgtaattagacttagcatgtaaggttgtgtagggttctaatgtacgacatttacacttagcatgcataacttagattgttaaaacataaatgtctcgtgacttagcagatgtttcttgtatcaacagatggctgaccgcgatgaggaacagatattgtacgatacaatcgcggagggaagcagccagtactggaatgaagaagaggggaacgaggatccaaatgtcacaccctgaaaattcaaaatatataaattgttgtttaaatggaatttttagaaataattttaaaaagtcttgaagagaagatctaagtttaattaataaattccaatataaaattgggccagataaaatttcattaaatactttgcttaattctataattcctagatttttctgggatttatttgagctaaggaagtatttttaataatggaattgcattcaagaaataatttaaattgaaaaggttttaaaaagtcttcttttggctttgggccgaaa

SEQ ID NO: 45678 - DNA, 1664 bp, Oryza sativa
tcaaatcgtattttaaatttgctagtatacaatcgtggggccaatacctgttaaaagtgcccttctggtgttgacggtcgttatcgatcagtttcgaccatcaatattactaaaatagaggagaactagtgatgcttgcaatgcataaatatgttagaataataatattccactagcagtaggtatactaacctttttggagagaatgacactaaagtggaggagaatcgacatcaactcaaacgataaatcaatcggacgatgtcgagaatcagatttatgtatgaatgggccaagaactcagaattgacacgatgaattgggccaaaattcacaagtctacaaagtgaagcaattgaggaggtcgccagccgaagatgggctggtttgggccagcccatggttcggccgaactagggggttcggccaaacccccatctccaccgttgaggctatggttcagcatggacatccaataatgcaccctaatgacagttggagggtagttcggacaattccgcttccacaaccgtcataaccatctctatataaaggcttcactctcttcactttaacacacacctcaagcaatagctctctcatttatctcaaccttagtttagtaatatctacctgatggaataggaatagagtagaaatcaggaatccggaagcctttggaagagttcgggtatggctctagtagcttttctcttcttttttgtaagctttgtacttttattagaatacttttctaaatacatttattgtattgaaatactttccaagtatatgagtacctactttacattatgttcatgttatactaaatatacggctagcttatctaggagatgctttggtgcgggtataatgtttgcttatgcaattactctatgtcatgacgatgatattagagtagtatctagtagtttagacgtggtgtcttgattatgagatatcattatttggggttatatattgcggatgagaggtgggccgctgatggtgacagctcagtacaggtattcctccgcgccgatatataatcgtaagttaattccctggggagggtattcctccgtatttagccccggttgtatggtcatgacgggctgtcgtaatgaactcggcagtcaggggtggcttctcaaagtaccaggagggcatcggatagtgggtattagctagtatatcggttaacttgaatgtatgtatagtatgtatattagaagtataggaatagattttctttctcttttctttgcacttagcttagatgatatattatgagaatgagtagttaatgcttgtgtgtcactctaccctggattatcttaacccctgcttagaatatgattatcacaagtaatatataaattattagtcgagttctctctacatgatcttcccacgggataaaataaatactatacccttgtaatactctcgggtgaaatgctacaatggtatatccgtgcgcttgcggatgaactctgtaaccataatatatcagaagtatttctgcgccattgctgggaattatatttctagtaatgtcgttaagaaataccaacacctggtacttccagagatcaccccgggttgtcgagttccttacgaaaacctatcatgaccgtataaccggcgctaaatatggagaa

SEQ ID NO: 45679 - DNA, 622 bp, Oryza sativa
tgccgcctcaattctacaaccagtttgagcctataccacaacaaacacctcagcagcgaccatgggccgacgtgatagctgatgtaatgagggagcaatttgggcttaaaccaaaagagactgggaatttgtatcgacaaccttatcctgaatggtttgaaagagttcctttacctaaccggtttaaagtaccagacttctcaaagttctcaggacagaatactacatcaacctatgagcacatcagccgattcttagctcagtgtggtgaggcatcggctgtagatgctttgagggttaggttattccggttgtcattagctgggtcggcttttacttggttttcttctctgccacatgggtcgattaacagttgggccgatttagagaagcagtttcacagttatttctatagtggggttcatgagatgaagctgtctgatctcacgtcaatcaagcaaaagcatgatgagctggtgcatgagtatattcaaaggttcagggaaatgaggaataaatgttacagcttgagtttgactgatgcccagctagccgatttggcttttcaagggttgatttctccgatcagggaaaaattctcatctgaagatttcgaaagctt

SEQ ID NO: 45680 - DNA, 2724 bp, Oryza sativa
atggattgcaaacggataactgatgccgggatgcgcttgcttgccaatagttcatctttggttaacctcacattgcaggattgtcgcggttttaccgatgatggagtcagtgaggtcgtacgtgcacggaatttggattctctgattgttcaaggctgtcgcgtttcttggaaagctgtgaagggggctgccaaatctgttcgctatgatcgtaattgcccggtctatggccgtctaagtagatcgagcatgatatccactctggattaggtgcccctcaagattttcagttgggctcttttagatcccctgttgaattggttgagtacttgagttgttgccaggttcacatcattgattgttgtcggtttcatttttcatatacctgaatctgctttgatttgttactgttgatgctgatctgttgtagcttattatggtgagccttgaattttcgtgagccatctgttctgtgaaaaatcatggtattggtcactagtatggtacactgcagctactgatatatttcttggtactttcatctttgtttacctttccaaatccatctatacaactagttcttttgttagtgaggttaccctgtttgaattctgattgttttttagagtgttctaatttgcatttcctctcacaaaaatagcatgaatacttagcttttcgtagaattatcaatctgaaccaccttttttttctggaaaaaaatctctactctgttcaacattgtgggcatataagcatatcgcataggaaattatatcttaactattttaaaactactttaaaagcacaatcgtcttccttcctctctttaaaagaaccttcctccctacaaaaaaaccgcttcctcaccttcccaaataaaccggtccagaaaaaaaccccaaaacccaaatcactgtgaaaaaaccagcatataaagaaatttaatcatatttctctcttccaatctcgttatgattcacgggcatatatatgtaactaacatcgagaaaacttcattttatgtgattccatctatatatatatgcctaagcttaagtattagtaggattgcggctgctgtgactattttcacatattttagcagttttgaaactgctctcagatttagaacttatccacgcctttttgttcaattggttaaagcatttaccatgttgaactgcggtcatacacactgtttgaagactatgaaaaccttgtatggttaaccggataagtttgagcgactaaatattatttttctacaaacgaagtgtcttttttttaataatgcatagatattcagcctctatatccgcaaggggacatacacagtcaaataacatgactgaaaatttgacgaacttgtggatatcgaagcattggctacaaattgtcatgtctatgcttgctgactactactctccgtttcatattataagacgttttggtatatgtatttcttgtaatctctattatatatgcagtaataaataaaattcgtcatcttaaacataataaatactccctccatctacttttgatagttatatttccaaatctgaaaaatctatttttgataggcatatttcaatccaacaacctatcatcttaatgtctttctcgaatttaatgcgtgattctctattcctccacacaagattggctacatggacatcgagaaatataaatattaatgaatcgcttgttcacgaggaatgactagtagcatgtttaaatggatgataagtagaatcacttatcgttggtctgtgtgtcaagatgaaatatgactatcaaaagtagatagagggagtaataagttgctgttcttatgaatcgatttgctccatcccatcccaagaacccaaatagggagtagtacttgctgaggaaattcaccatcctttgctgctcgatgcaaaagcattggatcttctctcagcctgtgaacgagtacatcatctcagtctatgaagatcaacatgtcaatcatacacgcaagtatatgaagatcaacatgtcaaccatacacgcaagtatatgacaagaagaaagcaagaaacctggccagctgcatcgattagggtcaaaattaccaactagtgttcactgcatgagtatgtaaacctatttgcacctttcaacactgggctagtatatatatcatgagaaaaagtgttgccgctttttttttttttgacacgccgccaaacacaattccacgaatcacctaaaactttgcggtagtacggagtcgtcaactatcttgacctcgagaaaccctttgattaagatggatttagagatcaaaaatgggctagaggaaccgatttagataaatagggataaacactcatctcgtggacggaacggaatgttttcgggacaaacctacaaagaggattcgcactttcgcagcgagggcagacggcttgcaacgcaaaccgacgaagatggatggaacctggtagatacgatattgaaagaatgatttaattggctatggtgttggttgtagattgtgtctcaattgaactggtcatagctcttataaagagactggtcttgccttcttcaggaccttctctacgttcaattaggtgtagaaaccaattaggactcgaaaaatctcagctcaagcaagaaaaccagagaaccgataaaactggacttggagtcggactccgccgatttgaccggccacatgctcaacctcac

SEQ ID NO: 45681 - DNA, 1500 bp, Oryza sativa
actttgctaatgcactttatacatatatctatctattatctatctatctattatatactaaaagtccattaaacttcctacaaacgtttctcaagccaccatgtggcacttcgacaaacgctcctataccgccacatggcaatgactaatctcaccgttgattttcacttaaattgatggacccgataatttagaccattagattaggagaaactaataccttcctactgtggccggaaaaagaaaaaaaaaagtaactaatccattactccgtaagtacacacgtacggcagaaaagcaattaatcttacgtactgttcatcggaagaaaaaatatcctatgcacagacttacttaaaaaaataaagccaaaaaataaaagtccttagtaccacttaaaaatactataaaaaaataaagccaaaaaaatatacgtacagtaccatttaaaaaattgatgatctttaaaacaaaaattttctactatttagagataaaatatattacgacctaaatttaagcaaatatcaccgtcgatttttacaaaaattaatgaacccaatactttatacaattacattagttgtattttattttctaaaaaaactaataccttataactatatgtacgtatacgggacgctagaaaaagacaaaaaaaatcataagtaggccgtacgtatgtacgactgggaaaaagaaataaaggtttcctactgtccatgggaagaaaagaaaaatctacgcacggtgaaaaatactataaaaacaataaagcaaaaaaacatacgtacatagtaccattgcaaaaaacgatgatctttaaaatagaattttctactatttagagataaaatatatctatataactaatataaatattcatatttttccggtcgtcacctcatccgtacaccaatttttcgtccatcacctccccccctagaatcccaatcggaattcaatcacccccaccccaaaaaaattcccaatcgaaattcaatcacacaaataaaatcagaggaagcatatacacacaaatatatcaaaaaaaaaaaggatcgaaggggagtcgctgtcgaacaaccgccgccgccgccgaaccgccgttgccgtcacaggccaccgccaactcccctcccgctggatccggtggagaggaggggcgctgccgccgcttggacgccggcgggccaccgccgcctcccctcccgctggatccggcagaggggaggggcgatgctgccgctgggacgtcggtgagccgccggcgcctcccctcccgctggatccggcggagggaagggcgctggcgcccctgtccgccgcctcccctcccaccagaagggagggcgctgccgctcgccacggtcgagccctcctggagccccatggcgagggagaggaggccggtcgctgctccacgccgccgcccgtcgccgctcagtgtggggaggggggcgccgcgccggcgacggcgatcggggtgggggggtgggc

SEQ ID NO: 45682 - DNA, 1830 bp, Oryza sativa
gtaggggggcacgtgaggggagcattttagttattacgcaccctgcgtgcggtttagcgcatatatatatatatatatatacacacatatagagagagagggaaactcaaatgtaaaccgaagttatgcttatagcacgattgagtagtacttgttttattgattgctgtagcagcctgttatggtggatgcatacagggtagtatggctgatgggacgcatgggctccaccgttactattttccttttgacgcttcaatttctgccgtgtgtttagttaacatcaaaattagaagtttgattaaaattagaacgatgtgatggaaaagttgaaagtttatacgtgtagaaaaattttcatgtgatggaaaagttggggactaaaccacactctaataagttggctgtgacttgtcatgtcacatggacacaacttttttttatggacaaacagtgcccgggaggtttgcctcttcatgcatgcagtgttttgtcttgtcactgatatctttgaccaacaggacattgcactgattcctccctaaataaggacatggcatgctcagtggatgtgatcgaggtttagtctgtgtactagtttaaggctttgtttagtccacacaaaaaattgaaagtttggttgaaattgaaacgatgtgacgaaaaagttaaaagtttgtgtgtgtaggaaagttttgatgtgatggaaaaaattggaagtttgaagaaaaactttggaactaaacacggcgtaaattgttttttttatttgattgtatatcaatactcctcacctcggctgcacaaaactgtggagataattttgaaagcctttcggaagatagctcggacaaaggatctgacattcactctggaaaattaattttacaaatttatttgtatatttaagtgagcaaatattgctagttagttgctctagagctattatcaaatttgcaatagatttattcgatttcacatgtcaagtactattatcaaatctcaaaattagctctttatcgtgtggtcaacttggtcagattacattaccatgttaattacaattggaaaaaggtatatatattgtcataaacttagatattacgatgtattggcttatattacattaccatattaattacaattggaaaaaaatagattttatgatgcaatggcatatattcataggaacaccagtcacgtacttttttaagtttataataaatgccaagtgatatatcattttgcaatatcatttatacatcacattgcaaaatgacatttctatgcaaatatcatattttggtggtgagtggactttttttttgatatattttttttatgtagattgtaactaaatcatattttagaatgtaacatatatctgtaaaatattaaccacatgtttctttattttcaatccatggcaagcgaataagcgatataccctaaatcatatacctagtagacatgacaactaagaaaaagagctgaaagtattttatgaatgagatttttagcttgtagtgatgatgacgtgacattggtgtcagaatataggtgtggcctgcaggtgcagggggtcattgggaagcatagaagcaagtcaacttgtaccaaggaaacaagcatgcatatccagccctacataggaacggagtggagtaggtacatcttatagctgcattagtacataatgaactccccgttgcaatgtgcatacgtgtcagccatatgaggtgggtgcatatgaaccttatatatatatatatatatatatgtgtgtgtggagatactatactacgcatggggtgtagtataatacaacac

SEQ ID NO: 45683 - DNA, 826 bp, Oryza sativa
ccctccctaactccctcttctccttctgaaggtcaagagcgaccccgtccgccctccgtcctcgcaagccgccatcaggcaatcgtcgtcgccgtcatcttcctccgcgccggccgccgcttccggtgaggacctctcctcccttcccttttttttcccgtccccctttcttgccgaccgccgcctcttggggtgcgtcaccgtccccgtgcgcgccgatgtactccggccgcccgacaccattccacgtcgccgggtgctgccaccggtggccgcatgccggcgccgcgccttggctaggccggaccggctaagtgcccagcctgcgcccctggctgccactccccttggccgcctgatcggctcaggccgatctgggccgtccacgtggcggacacgcacccgaggccacgtgtggaccatgtgcaccgtgcgccctccccctttgactcgctgacatgtggggccagcgtgtcgacgccggccgccccttgctgacgtaagcgaggtgcatgtcctttgcaaaaataaataataattgcacaataaatcgagtataattcttaaaaatcatttaaatggctcaaaacttctaaaattcatatgtaattcatacgaactccaaattgggccattcaatctgcaaaattcatctaaaattgatctctacatgttagacaaatttttatgtactatggccttggttattattagaggtgttacttgttatgcgtgccagcgtgtaactaccgtcgtttctgaagtccgcggtcgcgaggaaaagagttcggaagatcaaagtgaagaagcaaggcaagtcacacat

SEQ ID NO: 45684 - DNA, 733 bp, Oryza sativa
tgtttatccgtaccaatccctggatctgtagttggtacacacatacatagttggatcacaacatatcatgagtgaatttaggctaaaagagataaatacttacattagggccaggtaggccaacaactatcagagaacaacagcagaaaacaaaataatataagggcccggttaacatgccacaggcagtcgactagggaacgagacttagaacaagaccgcactctgatcatcttgtgggatacgcaagcgtacctacaagggcttctcttcaacactctcctaaaagatatataaatagcaagggtgagtaccaaccgtacttagcaagccaccacaacaacaatgcatatgatagaggatatttcaaggaatggcttcaggttcttctacataaagctaattttacatttcttttcacaaacctaaaatctagcatagactgatcaaattttagtaccagtgttcactttaaataacgacggttctgtccaccatctattgtgatccaaaggatagcttcccgccattgaatcatcgtggttttctaaggatgtccaccttccctcctctcgggaagtggctccatcagcataaaattcatcatgcaatatcccatcccccacaagttaagaatttagagtgtagccaagtgtaatacatgtcccggtgctcaataaccgcgagcacggctattcgaatagatttggtttactcacactgcagtggatgt

SEQ ID NO: 45685 - DNA, 760 bp, Oryza sativa
ggacgaacgttaacgtgaaatgcaatatatatatatatatatatgtatatgtatatatatgtatatatatatatatatgtatatatatatatatgtatatgttacttcgcatttgactatatacatcttttgtatcttgcagaaaagacgtgttgtcggagtcgtccgtcaagcctgagtggaagagctagccctagaaggaattggagcacgcaagtgacgtaataatataaatgattgttatatttgtaatgcaattaattaagattattagacctgtaattagacttatcatataagattgtgtagtgttctaatattatttgagttttaatataagattactttatttgtaattagacttagtatgtaattattgactacggaagtggtgcgacaagtagcaattgactattgtagtcttaattagacttagcatatacgcacgaaacacttagcagacatgactattttagtcttagcatgtaatattatttgagttttaatataagattactttatttgagattagacttagtatataattattgactacggaagtggtgcgacaagtagcaattgactattgcagtcttaattacacttagcatatacgcacgaaacacttagcagacatgactattttagtcttagcatgtaatattatttgagttttaatataagattactttatttgagattagacttagtatataattatttactacggaaatggtgcgacaagtagcaattgactatt

SEQ ID NO: 45686 - DNA, 2619 bp, Oryza sativa
atccaatacaacaaagaagtttacttacaacaatgggagcatgctcaggtgtcttggctcgtcccgaggattcagctcgtcccgaggacacggggcaacctgaatatgatagcttgctggtaaaaagcacttaatcccacgaggccttagctctaattagggtcccgaggatgccccaggcaacccttggaagatcccgtgccggtaacaaacacttaatcccgtgaagcatgggtgtcctcatcatcggtcctcatggcctacctgtattggctacaccagctaacggatgggcccggggactattgggacaaagacttttaactcccctctccatttgtcaggtgtgcctgtcacatccgactagctagcttggagggataatgactagactaagcatatcaaatttcgagttgtaggccccactcttgcatgtatgcaactgtattgtggactccccttcacgtataaaagaggatccataccacctagaaaggggttcacaccctgatataatctaggttagattaaaatccaatgagcaagcaattaacttcacctactcacttagttttcatttccacatcactttgtaattccatgtaacatccatatctaccacacatgaataggatataacgcatctgttcaacatgaacttgtataatcacttgtgtttcatctcttccacacacaatcaaaaactcgggctcaaaacttgtaccccggtcgaacttttctatggggagtacctatcttccatgctagagtagtcccataatccgacagcaacgaaatcggcggcgcacgtgtcacgcctgtaaattcacaactaatatgtgtattaaaccctcgttcaggaatcggtctcttgctctctcttgactttctcgctctttctctctcagaggagtcgcttggcagtggcgcttgcccctcgatggagtgtggcagaggctcgctctcgtgcggatctggcggagcgcggtggacgcccgagcttgcgcggatccgacggcgtgacgttggaggacgtacgtggcgacgatcgtcagtgtgaagatggggccacctaatctgtatgcctagaggtcaagggccactggatctagccgcttcgagccttcatggcgatggtttgggaggtgcgacaacaacgacgggtttggaggtgcgatggcgtcagcggttggtagatcctcctcttttgcctccctctcgtgattcttgtgattgttgatgcttattcatgtttgtttgtctcggtattgatcttgaggatcgagatgtgttgtttgtagttcatgtgttgatgtgttcatggatttggggcatcatttttgggatttgggttatcatttaggatctagggatttcgaggatatgcagactcgatgcattgagctgttttttttttggctcgtgtgcatctcaaaggtgccggttgtggaaccaacaacagtgcatgatccggggtcattagtaccacctctaggatgctaattaggaaatccagcacctatggaggtttcccagccagcatcgatgactcttttttaagtagtgagggctacttttgaaatgacactgagaaggtcatcactgcacgtacagcaagtgagaaggtcatcaccgaggatgttctctgttgaccttgaggctatggaggtaactaaatgcaaagatgtgtgtgaactacttatccatgtgagctcccttggttgcctactttaccagcatgtgtaattcattgtgaaagacggggcaaggttcactactacaaaacatcaaaataggtgtcgccactatatgtgctggtactactaaaaccagcacctataagccttttcccacctccacaggttgaaattgtaaaaaaccggcaccttttaagtaattataggtgtcggttctaaataaaaaccagcacctattatattttgtatcgattttttttaaaaaaggcacctataatatattataggggtcggttaattaaaaaccgacaccttttagatattataggtgccggtttttttcaaaacatcccaaaaatcgagccgagacggagccgagccggcgggcccaccacgataggcaacgcgaggggataaggtcgagggctcgaggctcagtctctcttctccgtcttttctaccttcgcctcttcttcgtctctcgtctcgcctctctccctcccttctctcccgctgccggcggctggacagcggaggcggcagtggcgaccacgccctcccctccgccagatccggtgagaggggcggcggcggcggcggcaggaggggaggcgatggcggggtcggcggggttggcggcgggcggggaggctcgatgtggggaggcagcggtgggctcgctggcggggaggagcccttccctccgccagatctagcgggaggggaggcagctgcaggggcagcgggctcaccggggctaggtggcggcagctcgcggaggagacgcggtggcggccgacagtggatccaggcgtcgtcgccatcgtcgtcgcggccgtcattgttgtcccggccagcggtcgatctgcgcgctcgaggctagttggtggtggatccagattttgtcgtctttacggtcggc

SEQ ID NO: 45687 - DNA, 5557 bp, Oryza sativa
tacaaccgcctttatgcaaatagccacaaaccatccttgtatccccttgcacatctgcatcgttggtgtggcttgctgagtacggtggttgtactcagtcttgcttttattccctcttttcagaagtgtagtgcttctaagctgaagatggagttagaggaccaaggctcagaccccagttgagttttgcctgtggagtggagctgaagccccgctagaatcgcccttttccgctgctgtcgttctgtttcggtgtgaggactaagtgcctcttccgtaagtattttacgctttatttacgtttggaactatatattacttgtcgttttgtgtaccctggctggtcctggacagggatttaatacgcaaaatagtctggaaatttgggttaaatttctgggcgtgacaaagtggtatcagagccaactcgactgtaggttgagccaaatggtcaaaccctaagaacaagttttctaaaaaccctatttgtaaattgtctcctctcgcccttcggcatttctttgtcaaacggtttttcaaaattctcctcccagtctctccaattcttttagttgtcacacctagaggaccagccgtcaacttcatgtctgttcggaagtcaagtcaagtcaagcctcaagcttcatgcaaggagcgagaagatcagttcaaagtcatcgttccgcgaagatcaagtgaagttttctcggagatgacctaaacccaatccttcccaggagggtagtttcgttagcttctagatcgtgtgttgtttgcttgtgtgtaggggtatggtttgcatcactggtggggatgcgaccatactaggctgtttgcttaaacaacttgaatcataaaatccattcacaagagatcaataggcaagtggtttagtacctcatctctagtaacccctcccatttccccctctctctggtgcctgcagcagatggtctgcatgagggacaatttcatcggatcaagaccccgttagtttcatggggcaactcagtgcaattctaatagtattccacgtcagcctcttgaagatcagcctcaaccccaagtcatggctaatcaaactcagacagtggaagagttgttacaacagatgcgacgtcggtaccaaatataccagatgcaacaaatgcaacgacaatgtcaggagtcacgtcaatgtcacccaccgcaggtgcgagatcagatgccagcccggaacccgaatcagagtcagagtcaggagttcccaatatcggcaccgaagacccctgtcaaaatgctgtccagatccccgaagataacgacagccaagtcaacgtcagaccaaaggaaagtaagtgctacctgttatgactgtggtgagcaaggtcattatgtaaggaactgtccatggaaggtgttcgccaggtcacctgaaaaagacgagaagtagtgcccagggagtaaccaagctccaagtcagtctaccgacaagaaggatggtactttgcagcccaactctggagcgaacaggacagtgatatggaagatggataatggcaggaccatgatcatcaccggttcagaatttactcctgaagacgcagcaaggatacccaagcgtcagagaggaagaaataccttccgaggagcgcgtcagctaacccgtcatctcataaagtacggtccgcccagacccgaagatgatgaatcaggagaacggttttctgctgatgacgataacgacaacgatgatgataatgatgacaatgatgatgcgacccttgacagtttcagggaaagagagttgaagttcaaagcatgtgctagatgtgggatagtcggacacactgctagtttatgcctccccacatgccgctgtggtgaatatacccattacttagatgcatgccctttaaggaaggtcacatgtttcttgtgtgaaggaacagatcatgtgcctaagaactgtcagttgaacgcggtcatagctaagaccaagaaagaacaagggacaatcgtgcaacccattcgtcaaccaatgacaatcgacaacagcggtcacaatccttctgctcttcctccaactccagctccagtggaagccaaccatggaagaagcaacgtcaccaaggatgttcataagtctctgcttgttccagtttcagttgccaaagtgcataatcagaagcctgcaccccgggaccaagcaggtcgattctgtcgcaactgtcgtaagccaggacatcgtttcagtgattgtcctcttccaagagcagcaatggcagttcgtcgtgattcacaagttaccagcactgcccatgacaccaatcgacacctgaatgtgcaacctccgccccaacggattatcgtcaagggcaccgtcaaaggtcgcattgttccaccggcaatcgtttcaagcctacagcaccaacgccagcagggtaagcaatgccaggagaacaacagctcgctacagctacaaagaggcagtacgctccttcgtcagcacccgcggcaagtgttgtcagcaccaggtcgcccaactgttgtcagttctagcaatgcacctcgtattgctccaatctggaggcccatcgacaaatcaccgctcggtaaccccacgggcaagaagatcctacccgttacagctgacaagacagttgcccctccaccatcgaagatcaacaagcagagcaacgttcccggtgagacttctggtagtaggaactaaagaaacaagtcagtcaggtttgaataatggaagcaatagcagttctagacaagacttctacttttcaagttcagtcgtgaaaagggcagttctaatcagcaacagtctacaattgtttgattttgtagtacttctcattatacatatatgtttatggcagccatgtaatgaaaaggaaatattgaataaaatatgagtcagccagttcctctccttttatgattcatcttcagcatgcaaaagcaaatcaaaatgggtatctgtcagtgtctcaagaaaccaagggtttctctcctaactcatcgcaattctattgagctccaaaacctgtttgcgagccaatagaggaatggttaaccaacggagtgaaaatggttagaccctcaacactcgacatgatgagatctctctaaaggcaacatcagtggtactcaaatgaaaacagggatggaatatttgaaagtgacatcatatagagactcttgggaaatctctaaccttggaagctgttacaggatggtaatcggcaattacgccttagtgttgtgaccatgaatttagaaggtgtttgcttagttcaaggcaaccaatataagttccaggaatcatctcaatgtttctcagaagttgaaaaaaaaaagaaattgttccatacatgagtctggaagatacgagagtttggtccagaaatagaaatgtgtagtcaacaaggtatatggcatagaatctcttttcaacaaatcatctttaccgaagatatggatgcgaagtggttatgatcaaagagcagaaactctcggcagcatcaaagtcagtttccgatagttgttcagattgcagtattttccggaaagctgttgcaggatctatagtccgtcaacccaggaagagttagcaaaggatggtcgaagaagtgaaatgtcatgccatggaaaggacctcttgagttggatctgttgggtgatcagtgcttgtttcaaggaatgttaactatgcaatctgtttaggcatatgacaccaaaaatcaagtcagaagcaagaaagttgtaccagcagttagaactggttggggaagtagtcaagagttagtaagatcaggagctaaatgagaatttctttatgaggaatctcccatcagcaactgaggattaagttccaaatcttgctgggatgaaagtgcgtcgtcattgctctattttgatgaatcggtgaagtttcagttttcaaagtgagggcctttgtaagtaagagaagtgttggttatttttcaaggacaatagtccaattgttcctagtcaggagaaagtaagactactccctgtaaggggggtaggtctcggagatgagttttggctcacttcgtcgctgttttagtgaaggttcaacccagtgcagcaatccgggtagcacttgaagaagcctgttgcaaggtatcagaagagctaagccgatctcagggcatccgatgaggccagttcaacagcttagcttagagaagcaacagtgaggacagttgcagttcagacgaaagacaggtcaagcaggtttcctggaattacgtgtcactcgagtcagaacccgttcaagcggacgtaggatcaatgagttacaaaggtcagatgcaagtttcaggaacaacttcatcctcttcgagtcagcatggtgaattgtcaggttaccaaaattaccaacctcaacaattcagtccaagataagtaagttccttaagcatccacagccctgtctgggtcagttgaagtagaaccagtcggtccagtcttgcaaagcaaaggaacagaaaagttgaatcaatcagttcagtcgtgcaagtttggacaatcagtcaatcagtcagttcgagacagaaagggggcagtgcagtatgccgatccgtcagatcagtcaaaccgcccgccagctccagctttctttctagccatcccagaatctcgggacgagattcctgtaaggggggtagatttgtaacgccccgattttcgttcgggattaaaaaaatcatttaataatgcattttctagaaattaaataaaagttaaaccaatttaatcaagtggaattatggaggaaattaaaatttcctttaaaaatcattggccgggaatattctgtaatattctttgtgccctaatgtactctctagaattttccgtgaattttcggagctcaagaaataattttaaaagcacaaagttcattttaaccaattgaaaaaaagaaaacaaataaaatcccctcccctcccttttgggcttggcccaagccttcccctcctctcccgtgggccgcgcgcttcctccctctctcggccggcccgcgccttgcgaaagtctgctttacgtcccccgatttccctcctctctctccatccggccgacaggtgggaccgtggaccccacctgtcagctcctcctcctacctctcgccggccaaccccaaccgccattgccggccacgtcccgccaaatccggcgccctcccgctcgcgccttcgcgcccaaaccaagtaaaatcgattcctcaccacctcctccaccaaatccctcacttttccccaatttttggcgccaaatcgagcccccacttcgcccacgatgtcgcccacgtcgccggccgttgccgcctcaaatctgccacgtccggccacgatttctcctccccaatcctataaaaacgatccccggagcattgtctctcgtttcccctcctcacccgagcccgccgcgctctctctcgccctccccacgccgctcgccgtcgacttccagccacgcgccgccgcgttgcgccgccaccaccgtcagcctcgttgtcccgagctccatc

SEQ ID NO: 45688 - DNA, 3229 bp, Oryza sativa
gtccccgtagtacttgttctcaatttttcttatgcatcagtggatgtgtttttttcagctgagtgcaatttggtgcgacagctgtatgtttttatttgtttaatgaaattgtaagatagcttgcacacatgcgcgtccatcttttttattacgaatatttatacttattctattgtaaacatgttttttttaaaaaaatttatttgggattaccattgtggcgtataacaatgtataacttgtaaactaaaattacttaaaaacaccgagttttgaatttataagaaaatatcgtgtcacgatgaagttgctacctatgaaactatataacatttgtacataagtgtgtttttgtaagtatcttacttttggaatttctaaattctactaagtaacatttttttcatactatatatgtctttgtgaattttacaatattttatttgaagatattatctattaaaaatatagataatatgaccgcatcatctaattaaatgaggtggatatgttgaagtattgatttaattatcaggatatagttttgcaataggaaactacagttgtcctatctcttagcgattgtcttcctgttggctatctcttaacgtggcttgtggctatggctctctatggctcgtgattgtatgccctcttcttctaggaagaagacgagagaaagaaggaagaagatggaaaataaaggatattgatggaaaacgtgaagacagtggcacggtccaattttgtaaaattttagtgatacgactattaatagacgaattttaatgtcatttatttgaataggcaaatttgtaaaggcatggatccaattaagctaattttgtttattatttgactggttgaggtgggaatttcttggtttcgctgtttcttcgtgattcttttccttcccaaaagttttctccttttttttctccatacgaaccttttttttttggtaaaatctaaatcaagaggcatcttgttttaatgctaacgagaggccctaacaatataccttcactatagtactagctagtccaacaagcaagtagaaaaaaatatattcctatcacatgtgcttcaaataaaattctcttaaaatacttatccgatctatgatccaattacaccgttgtgttcataaaagttaaagttttataacaagatctcacatgattatgttttaatgaaaaaaatataaattactcttataatataccttaattaattttaaatttcactaaactacttcttcgacatataaaagtaaattcaataaagcataaaagtaattacatatattatattatagaagtaacttaaaataataatttacatatattatagaagtaacttaaaaaaaagaaagtaactttgtgatgatattaaaagtaaatccgttatggagataaaaacatgagtttatctagcaattaaatttaattagcacaaattacggaattgaccaaaaatgataataaaataaacaatatattcacaacatcatgaatgtataagaagtaatttaatcaaatcgaaaagtaatttatatatatgataaaagtaacttatttatataataaaaatattttacaatatatatatatatatatatatttatttcttttatcaaaatatagtcatgtaagatcttgttgtacaaatttaattgcaacaaacacaatggtgtaatcggattatggatagataagtaatttaaaagaaaaatctataagaagaaaaaaaaggcatgtattattcggtttactagtaggcaaccagatctaaagatgagtctctggttaagacaatatagggtgcggtctctgtgtagttacatctttttattgtttgttttttttagaagatccatttttcctgctctaattttggtaattgcgcttgactttccttttaatgatcaagttgttaataacggcggcaataatcagggttgcatccatttgagccggtagagagccggctattctttttcttttaccatggaaaactggcacatctttttaggtgttagttttaaaaacctagtacacctttgtgaaatatgtctctaaattggtgccagttgagaagaagttcccatccggtatctatgggtactctgtagcagtgatgtcatgtttcccttatcaaatgctaatgttgttacatatattgacaattatttggttaaaactgccagtttgttacaaatttatagtaaggtatttcacaaaatttgttatgaaacaatagggtgaactcatccatataaaaggatggatcgcaaccgaaggcatccacgcctcttccctaggcgctccttggcaacggacgcgtctacagttgccacctcttccccctctataaattgtaccgcattgatcaataaaggaccgcattgatcaataaaggacatccactcattcgctctattgtggtcaattctctctctcgctcaatcaatcttacccactttcaacatgttatcagcacttagctctaagcgaagagaagaaatccgattgctttttatctcaagaaaaagcgaagaacagaagaaactaaggaagcgcataaggtatgtctaccttgatttcatcctcgatgccgttctcggcctccctcgccgagaccgcacccatcgccttcgccacctcctctgtcgattcgaggagtcgccaccatcgccatgccgggcaccattctagggttggtggccgccgccaccatcctcggcgcagcatttgccgtcgctgctacacctccgactccaccaccacaagcgcccgccatggcaccggcgccccgccgcgtccaggtccaggcaccatggatggattgcggtggtgacacccgccggcgagcagtgctccctcccactggagatggagtcgccaccggcaccgttcgtcgccgctccgccatcaccttcacctcgtcggagctgctcccccgatcccgcgccgccggggtttcggggattggaactctcaccacgcgcacggggtagccggccttctaccctccatcatagtctcgccaccatgctggtgaagccgccgcttgccacccagcctccccgctactttccgcccgcgccattcctcacgactccccgagttgcacgctctcaaatggagtggggagaacggcgtccgaacccgaccggactcttactccgatgaggagagggggctgtcggcggacgacgggggctgcg

SEQ ID NO: 45689 - DNA, 612 bp, Oryza sativa
agcaatacctccgaaaaagttggcaacccagtcgactctaaagccaatgccatcgatttgattgtcaacaaccatcagacaattattaacgcaaattataagcgcaacactatattaatatatgaattgatatgaatgcaccttccaaattacttgtcttccctatatcagtacacgttgatagtgactacaatatactactccctccatccaaaataagttctttttcatccatcatatacataccaatataaaatataaaaaaaagagctaaaaatactctcactttatcaaatcgcaatgcaattgtttctctctttaactactccgatgtatatatatatatatatatatatatatatatatatatatattctatttttacaaatcccaatgcaataattgcttaaaaataaatttattttgggacgaactgaagaagccaaatataaacttattttggaacagaagttctatataaatggtacaaattcaccatcattaactttcttccctcgattagcacaaactaataggggataaactacattaatgcaaatagccaaattgcaaaattggtacaaatttatagtggctacaatatttattata

SEQ ID NO: 45690 - DNA, 549 bp, Oryza sativa
gactatacctgcccacttaacttctctgaccatgcctgcagtaaagcagcattcttatgcatctcatgctcatcaataagagccttctcgatttcgtttatttgcctatcattcataatggttcgcttccttctcttaggttgtctctcatcatacatgtgagtgtctcctttctcatcatcctgaagaccactttcttttctatctggtgttttgaaatggtccatactgctggatgcaggatcaagatccattttgcagcgcagggatcctgtacttgtactggtacctccccctagaaagcctgaactagttctcgccacaccaagatggactaagtcctggccgactgaattctgcaggaacccaccatttaaagcgacagtgcttctaggagtctcatccctggcatttccctcttgctttgttgaaggtgttggtgcaagctcttccatgtttggtggtgtaagctcctccatgttctgcacatcatttttggtgggatcagatgaattaccaagtcaatggctaatatattatactcaacat

SEQ ID NO: 45691 - DNA, 600 bp, Oryza sativa
gcccaaaaagaaaaggataagatattccgatgcttgtatacgaagctctaaagactaaaggaaaccagcatgtcagcaagatgttggttcagtctaaaattttgatgcaagattgctagcgccatcaggtatggcatatgctgaatgatcaatcatgaagagcgttggcccatgcatgctattgcatgtttatgtgctttagctgcagtgttatacagtactgtagcgtcaacgccacgatcctttgccataagaaggacgcctttgatccttatacattaagaaacaggaagaatatttttcggaaaaaggatgaaagacagggtgcatccttttctaaggaatgcaactattccatccaacgccatgccttttggtctatcaaacggtgcgatttcgcgaaaactccttatatatgaatttcttagaaactagtatatatgaactaagggcacgacgctgcccatttctatgttctaaccaaggcctacaaaacctcgcacggctgcataggctgggccttcttacacaagtcaagcagcaaggagaaatcaaaattcaataccgtcatgatccactccacttcacgaggaatcatac

SEQ ID NO: 45692 - DNA, 1794 bp, Oryza sativa
tagtatcaacaatttatatatgagaaccgtagagaacgtccaaactaaagttagggtgtgtttagttcacgccaaaattggaagtttggttgaaattggaacgatgcgacggacaagttagaaatttgtgtgtgtaggaaagttttgatgtgatggaaaagttggaagtttgaagaaaaagtttggaactaaacaagggcttaggagcctagcagtaattttccctccttcaaataggggttgccctttatttgtgcatactgacagcacttgtagctagggactagagtggtatacactatatattataagttttctcatttggtataggactgtagttatgtttaccttttcaggttttcatacacggatatgtagaaagataaccaaggtgtaatatttgtaagaattagtttgacccactactttagttctggtctcatgacatatataagcattgtaaagacataccagtactaaacatcaacatatatttctttcttaatgtcagaactaagtatcgataatattcattttggaatatttatgcagcataaatcaacagaccatttaccttcagaagctggggtcatctctacactgacttcactagttttgttaagcaattccccatcccatggagaaccaggaaacagagtaatagctcaaggtccaggcatgtcatcaagggtttgacatcatgactcaaattgttcgtggcatgtcatttaagagcgcttcagcaatcccaggatgacaaaatgatccatttattgatgcttagtaagtcatttttttctttgaacctatcattttctttaccttttctttattcagtatcaaagttactgttttccttttttccctgcatcaacagcacttgtcactttactagactgttcttgtggcaaaacagccctggtaaagaatgaatagctatttaggctaaactgagacccccattatatgcatttaaatatttcatgtgcactgaaaatgtaacaaagcatgatcaacatccactagcaggaggcatagtattttagtcagtttggccctgtttagatcccatcccaaaatttttcaccctgtcacatcgaatgtttgaatacttacatgaagtattaaatataggctaaaaaaataactaattgcacagattgtgactaatttgcgagacgaatcttttaagcctaattgctccatgatttgacaatgtggtgctatagtaaacatttgctaatgacggattaattatgcttaataaatttgtctcgcggtttactgacgaattctgtaattagtttttttattagtgcccgaacaccacatgcgacaccctatataatacccgatgtggcacgccacacccctagatctaaacacccccttaatctgaaaaaaagggtcattttgcagctccaagctctcatttcctgatttccttttgttttctgtatgttggcatgcatattagacataaaaatttgagacatgataaggtggaccatcatcattgatgccccttcagcccttctaaacctctccccgttgggctagattttcctaatttcctgtatcgtatgcttcatgaaatacaataataagccctgctatctgttgtatcttggggtgttatgaggctgttaaatgatattatcctaaaaataattttgatgcatgctctgcactaaagtatatctatgtaatggatcacataaatagtgaaataattctcactttgttctcatatcgtctcatttttcttggtaatcagttggtacagactttggt

SEQ ID NO: 45693 - DNA, 697 bp, Oryza sativa
taaaaacaaaataagggaaatcaaataacatttgagaatggtaagctcattttacctctttttcgctgcccgagtggatcgcaagttgtattgcgtgggttgcgtcccctgaggcgcgtcgggaagctgtgacatgtctatctcctcgtcgtctggtgcgacgtagtcgtcatcctcctcgtcctcgtcgtcatcgtcgtcgctaggtggagccggcgccttcccctttcccctcccttgcttaatgcgtgacgacgacgagccaccaactccttcacgctcttctatcctgatggagtgtcgagccatacttggacgcgcggattgaggtagtggtagtggtagtctccccggttggtacacgtcgtccaatccaaccgacctgcaacctaattttgctgcaagtttccggcacctttgacgaactttctgcatttcaaaaaaaaaaaagaagtttgttaggcataactcaagtaatgcaaagtgctaaataaattttacctctaaaacattgcggagtgtgttctccgtgtcctcaccacccctcggagcttggagggcatgccccatttcattcacactcttgaggagctctctcgactgaaagcgtgagaagatatatgttagggtctagggtgcaaatggaaataactttgacaaatgcaagaaaacttacgactttgtctctaagtggggc

SEQ ID NO: 45694 - DNA, 810 bp, Oryza sativa
tgtttatctcgggctggaacaattgcgctcagctcctacattataagataataatattgacaatgaatgaaaatcagtgtgattacgaagatatgttaagtcagacataagtaacaaagtcacaaagtcgtgtacctgtagtcccaaaccccagttgttgagggcctgcagtagaatagtgacaaatgaaatcaatcaaaatgatgattgatgaaaaataaaaggcaagcacacaagataatgggatttggatgcaaaggtctaacaaacgttcaattgagtattagttatattgcccattaaatcagccaattgagaccatcctaacctgggggctgttccaatttaactggactgccttgtcataattcattatagcctgtagaagaaatagacagaaacgatcaattagtaagacatgatctccaacaagttgaaaacaatataataaaagtattatccataaaattcaagtaaataacttcaaggcattttttccaaagtaaatgtaagtcaggctaaccaaattataataaatccttactctcaataaaatatactatctaaccaaaaggaacaatgatagaaaaagaaatcagatattatgtttggttcagtgctgctagagtgctaagaattgcacgcccactatttaccgtggacagtattactagtttacatgtcaatgacagcaaaagaagacaaccattttacaaaccgtacttgaaccaaaacacttcaacaaatgcaggcatattcctatttcatcagctcacatttgggtttgcaattcaaattgttcaattttca

SEQ ID NO: 45695 - DNA, 798 bp, Oryza sativa
atcttcaatttttataaccgactcaaacacggatgacggaccgcggaaacatcttcaatttatatttccaaaagcaaacgaacttaaaaaccgactcatacacggatgacgtaccaaaataccggcaaaaacatctttaatttttataatagtagagatagagatagataagagatatagattaaaaccaaaacataaaattaaaacccactcaaacacggatgacgaaccgtggaaacatcttcaatttttataaccgactcaaacacgaataacggaccgcggaaacatcttcaatttatatttccaaaaacagacgaacttaaaaaccgactcatacacggatgacgtatcaaaataccggcaaaaacatcttcaatttttataatagtagagaagagatatagattaaaaccaaaacataaaatttaaaccgactcaaacacagatgacagaccgcagaaacatctttaatttttataggagtagagagaagagatatactaaaagaatccgtaatggtggctagagtcctgaagatctaatggctaagaactctcccaagatcctcccgcacaatcaacgcaccagccaactccccatccgtgctcgcatcaatcatatacataggttaatgggatacggcaatatcatatactcgctctttcccgtagtataacggattttgggtggatgtgacatatcctaatacaaatgaatctgaacagactgtctgtccagatctattgtattattaggatgtgtcacatccatctaaagtctcttatactatgggat

SEQ ID NO: 45696 - DNA, 2054 bp, Oryza sativa
gtttaaggtggtgcatatgtggtggaggtggtatagcttttggtttgagctccaaagcatctaggtttaaggttggtaagtttatggaaagcagccaaaagaaggcaaacaatctttcgatttaaggctacaacaggtacaaaggtaattcaaagccaaaagagaccaaagtcagttatcattatgctttaaacaacattaggtgaaaatgaggcttcactaggtgcctactagcaaaggcggtaaatctaatcaaatttaattggtctaatagttttagcgcacttgagccatcagaaaattctcttcgacaaaacaatagaagaataaatacaatattttgtagtatagctgaaaaaacaggggcatggagttcaaattctcttataactaaataagctaaaattattcacatgatttggcacaatgtaaccaagctgtaaatagctaactgctctgtaactaggctgtaactggtctgtaactaagttgtaagtgcttgtagctgctctataactagcctaaaagtaactaatttctctattatgagaccatttagaaatatgcaactctcctatcaatatatatattgtaacacaaggactgttatgcccattagatttgtaccaaatgttgtattctaccttttaaatttaattttagatatttcttggattgtctcattattgctacatatagaattaatattgttgtacactcaatgtgttatagataagcctagtatgacagaggtaaaatacttactcatttgcatttgtgtatatggtatacctatgcctagaagtttacttgatatacgcaatattgcaagggcaagatttaacatatttattatctataaaagttttatcaatactatagaacatagttattatcagtcctcatgatcatcgttgttgcgtcgttgttgtcgccatgatgtcttcgcggtcctggcgatcatggtcttggtcaagatcatggttgtcgtcccgacagttgctcttctgacgtccatcttgggctcatcgattcccgtcatcacgccggttccctcactcctaccttcggccgtcaatttgattgcgaaggtcacgatcatgagggttttggcacctcattctcggtgtgaaccggagaggtggccactttggggggtgatttccgcttgcactgccattgttgcctcatcctcggtaggcattgaggggggacgagatcggtacaggagcgaagaccggaaagatgatggatccgacttggaccacagtgaaagctggctaggttagacctcccaggccaggctgaatgtagaagcccttgtcggagaatcctgctcttgaattcatctcatagaaatcttttagcaccaagtcccctacctagtgtgccactgtcaatggactatatccaaagatggtatttggagagtatagtgatcgttggaagaactagggtatacatgagatcagatcaagcaaacaaggaacaaggatttatactggttcgggccctcaaaatgagttataactctactcaagtttatatgtattatggatgggaataccatatagagtacaaatgaggaatagaacaactagatgaattcgcctactaggagctattgaataaggccttggcttcctcttctggatatggctctggttttggcctgtaatttgatgcccctccaacttcttctgcaagtacaactcgaagagattaagttggatgtaggtttaaggagaccttatcttccacgactaagaatttgacaccttctactctgatcagataatttccttctttatctcccgtatttccttaattgtagggtaccatcccgtatactattagggtggtgtttggatgagaggtgactaattttagtccctgtcatatgcgctaactaggagtattaaacatagactaataataaaactaattgcataaatgagagttaattcatgaaacgattttttaagcctaattgatacataattagtacatgtttactgtagcatcatatatatatatatatatgctaatcatgg

SEQ ID NO: 45697 - DNA, 4983 bp, Oryza sativa
acgatcgatatcgatggagttaatgattagtagtgttgatgacgatgattaaaggcgtactagtgattgatcgagatgatggatcgagtgtagtacgggtactggtactagtcaatgtgagagcaagtttaataatatcacccgctgttagctgcaatttctttccatgtcatctgtagccaacatacatactaatatatacaatagggttagctatgtatttatcctccttttactgtagcaaatgatatttaattgcgttgcgccaagcatctcctctcccgcgcaaaacggacgcacttttttcttggagtacgcatatcggcgggcgactatttagtcgccggcctgtactctctctcatctgcgctcccggccaagtcatcaacagaacttacgtggcttgtttatcgccggcttttctacccctattgaacctgctctgatgcaatgcaaaatggtgtgttatatcatttattaattgcaggaatatgatggagcaggacataacgtgtatactccctccgttaaaaaaaaagacacacctagatttccgtgtccagcgtttgatcgtctgtcttgtttggaaaaattataaaaaaaatttaaaaagacaagtcatacataaaatattaatcatgttttatcatctaccaacaataaaaatactaattataaaaggatttcatataagacggacagtcaaacattggagaaacccatagtttgtctttttgtaggacggaggatacgatcaatgaaaagacgctccatcaaacatactagtatacgtatacacgacacgacgggatcggcctgccctacatcattattttgctgctttctcaaatcattataaagacaacttttcatgatgaaaaagaaaatccattttactccactacactatttaaatgatcacttaatcacacttgaactatttttttctcagtttacccttaaactattaaatatggtttactttacatattaataatgtttctcttttcttgctcttcatatacgttgtattttaagtttattttttagagctatagatgacatcattattaaagttcaaaattattttcaaaattttcttggttgtttgcttcaactttgaaattttaatatttaaattaaccttaagtgctttcgaactacataaatagttagacaaatttacaaagatgttcagacataagttccgaatgcatatgcattctaccgaattttcagtgcaaaatatgatttgtacagagtgaaacaaaaaaaaagagaaatagtgttatgggagttaactgaaccgttttcaataccgataaatagtttaggggcttaagtgatttggtggaatagttcggaagagtaaaaataaactttttcctttcatagaactacatagtttcatttctaccagcgggccataaaaaaggttctacctatattttgctttctcaaatcattataaattaaagatggcttttcctgacacgtaggtttaatttctaacatcggaccataaaagaatgattttcgtagcggtgattatttttcttaagtagccatgaaaatttatgaaagggtcatcatgaaaccttatggacgacctctctctctctctctatatatatatatatatatatatatctcttttcttgcttatatagttggtacccactatatcatttattgctataaagtttacaccatgttgtgccacatcattgtttattatgagccgttggattgttctacgaatcctcagatcaacgatatcgctaagttgggccggtattggctcagctcccgttggactttttagcccagcccacatcacgcatgcttctactgtgatggagaaaaaaaaccaaaacacatctgcatcatcagcgatgcttgcgagggagaaatttgtgatgaaccaggatgagtacggcatgggagtggggacgcgagcggcctgttgcatggtccctattggctttccccctcattggcccgattaattggatgtcactccatgtcttgccttagtttatgtctcttctttttccttggaaactgccttaaaaattcaccggatgaaatccgccacctttccctcttcccctctcattttgttaataaaaaaattgataatttattggaggatatacttttagtccaagtagagtgagaaaattttcaaatagatgagaatcgaatgtctctgggcgaccacatgcttctaacatagtgttggaataagaatttaaaaattatgcaactctaaatcttccatcactatcccaaatatgttacttgcatgcattatatttcatcttcactctaatactaagttagaagacatctttggtcttagggatatttttgtcttttaaacaaattcttatccaattaggttgaaaatgacctgtaacaaattatcttttttaggtgtcctttatccgcgacacttttttacaacgtctactagcaaattacataaacttaatttgatcatcctatagcaaaatttacctcactttacgcatgcctaaaataacttatatatgcttgtttgatcaaaaaaaagagtgagagacaaactagggagggaacgtacgtgttgtgccaaaagataatcattttccccaggccctagaaagctaattataagcttaactaatttcagcgtcaagtcggtcatgatcagtaccaatgattaattagccatcatatcaatatttagcgcagctagcgtaattcacataattaagctaataagatgtgtttgcctatcccttctaattaagctaacgtagtaatcatatatatgatccacgacatgtaggcccagttcttcccttgggattaatattttagctcatgaatgattaattatatcaggcatggccgcattagcagtcaatgatatatgaagtatgatccaaagctagactagaggatgattgtgagcatgctaatttggacaaactatgatacacacgcacatgtacacgtagtactaaagcttacgatcatatcaggtccctaactaataattaatctatttgtgctgtttgtccgtacccgtaatatatacactataaccatcatatgctgtttccataaaaaaaaactatatttagttgcgactatgaagaatctctcgtgctaactaaaatgcatgattttttttcattaattatttgttagatgaatcgtataattaccaatacaattaaatagataatagaaaaaccagtacgaattcatgggttaccgatcgagatgggtaaaatttgatctaatcaacaaatgagtgatgacatacccctctgtttcataatatagcaaccgatcgagtacaaatatatcacgtcctatattatattgctatattataaaatggaggtagtatacgcatgtgttggaccatctcactagcaccaactgaattttggttctcagtcaggcagaatcagtacgtatattggcatcgattgagactgtcctaattgaggtttgactggtccaacttccatcttagctagcttgtccctccacgattgatagtactattacatatatgtacatagatcgtttggtacagatcatgcatgcatgtacgtactcacaaattaattgatcgctagcatagctccaactaatttgattgagctagttagctagctaaatagacacacatagctgaaatataattcatttctttttagctcgaggtagcatggaaattgacacgtacacgacttgtatatatttttcttagatatacaatgtatatatatggctcaactcgcatgcatgcatgcatgaatctgcaattcatgtaagttaagttgcatgcatgatgcatggtgctgagattagccaccatattacacatagctaatatatatagtcctctccgtcccacaatattataatttcttgtatctatgtacatagccacaaagttgttacatttgagatgaaggtaggtgcactaacatgtatgtccaacaacgaacaaggacagatccaaatttgatgaggagggggcttattttcttctttctcctacaactccttgttattctttccttccttatgtcctctctatgacgatgatctaacagggtaggaggggcttattactggagatcgtgtggttgtaacgcagaaaatccgaaggtgccaaaaccatgtgagtcatgttctagtagctaataaggctcaaatggagccccttacgaagttctggctatagaaagcaattgtaatttcatcttacaacttgttggtgaggactctttagttaagtaatatacttatgcttttctccacaaaaaagcagggtgggaggggcttgagctccccggcatccatgttcgatccactacccctactgacaaaataggtaaaatagatgttaccagtctcatattaaaacttaaatatgtaactcctccatatctataaaccttaatttcccaagcagcgtaggtatagatttaagtatgggcaaaggatatagccctacttacaagttacaactataattagttatgctaactacccaggtggcgaaggacgacgatgagaatgagatatatacaagcaacaacctatttcctttatgacaaagtattagctagctgctgctgattaatcattacgttttttttatgatatatatacatgcaacaagctaacaagcgaggcaaacgtagacatcgatcgttctgttgcgcttgatttgatcgtgtgagtgtgtactgatctattcttgcccgaaatgggcctaatttgtttgggccctaagactacagataccagatccttgaaaagaaagccttgggccgcttccccttacctctctatattgggccatgaaagcgataccaaagatatttggaaaaagtacaccgaaggtccctcaacttgtcatcgggataaaaaacgtcctcgaaccgtaaaaccagataccgcgggtcc

SEQ ID NO: 45698 - DNA, 667 bp, Oryza sativa
tgacaaaaacgctcatatcttcaagggtgacttctatgctgccaacaacttgctgcaactgctcttgtaaactatggccactgatcctgaagaaccggacactcttagcaggattgaacttggattgcgcgaaagagttactcacctggtgatcttttgcatcatcttcttcatggccacggcatctgaatctgtcaagagcgtaataccctctgaacatctccttcctcagtatattcagttgcagcagcatgcgttggtttgtgatgagccggtcctctgcctcctccacgatgatctgggcacggagcagcagccgttgcagtctctcctccatgtttgatgctgtcggtttcgagcacttgttgatcaggaaagatatggatttagtggcaagatcactcagaatcacagacaaaaatgtctccataagtgaagtatgtaatctgaagttctgtagatcactcaatggatcaacaagaactgggagctgagagaaaactatgtagcctggaaatttttcagtgtgaactgttttgagttcaaagtgtcagtttctctctacagtttgcattaatataacggtacgaggctgaccacgtggtggagacaacgaaagcaagagaattgtacagattcagtgatcagtcagcaccatctacaatgg

SEQ ID NO: 45699 - DNA, 1214 bp, Oryza sativa
gttttaatctatatctcttctcaactattataacatgaagattgtttttgccggtattttgatacgtcatccgtgtatgagtcggtttttaagttcgtctgtttttggaaatataaattaaagatgtttccgcggtccgttattcgtgtttgagtcggttataaaaattgaagatgtttccacggttcgtcatccgtgtttgagtgggttttaattttatgttttggttttaatctatatctcttatctatctctatctctactattataaaaattaaagatgtttttgccggtattttggtacgtcatccgtgtatgagtcggtttttaagttcgtttgcttttggaaatataaattgaagatgtttccgcggtccgtcatccgtgtttgagtcggttataaaaattgaagatgtttccacggttcgtcatccgtgtttgagtcggttttaattttatgttttggttttaatctatatctcttctctactattataaaaattgaagatgtttttgccggtattttggtacgtcatccgtgtatgagtcggtttttaagttcgtctgtttttggaaatataaattgaagatgtttccgcggtccgttattcgtgtttgagtcggttataaaaattgaagatgtttccacggttcgtcatccgtgtttgagtgggtttaattttatgttttggttttaatctatatctcttatctatctctatctctactattataaaaattaaagatgtttttgccggtattttggtacgtcatccgtgtatgagtcggtttttaagttcgtttgtttttggaaatataaattgaagatgtttccgcggtccgtcatccgtgtttgagtcggttataaaaattgaagatgtttccgcggttcgtcatccgtgtttgagtcggttttaattttatgttttggttttaatctatatctcttctctactattataaaaattgaagatgtttttgccagtattttggtacgtcatccgtgtatgagtcgatttttaagttcgtttgcttttggaaatataaattgaagatgttttcgcggtccgttatccgtgtttgagtcggttataaaaattgaaaatgtttccgtggttcgtcatccgtgtttgagtcggtttaattttatgtttctgtctcaatccatattcctcctctatctctatctctaccattataaaaattgaagatgt

SEQ ID NO: 45700 - DNA, 570 bp, Oryza sativa
cctgcagccccgatacttttaatgttaccgttgcccatcaaataggaacggataataattaagaggaacaattaaagaagcaacgatgaggacgacgacgaggaccggcagctaaagcgaaacaagacattcggtcaatcggctgctaatttcctcctgtaggtcgatcgatcatggggaagaagagaactgtgcatcgaccatgacaacaaacctatctaatatcgatcgatcgatcgacaaaattatcggatttatttatactacacatggtggttcgccatttttctgttgatcacacctgcaggtgtagtgtgcacacgtcagcattcgatcgggtggccgcagcaaattaccccgctctctctgtccccttcttccggaagatctcgtccgtccgatcagcagcggacggcccggatgacttgatggagtgagtccgggtggggcccacaagggggtagtggtgggcccgcgagagagagagagcggcggctttggctgcgcggcgacagcggtggggcccaccggagtatcaacggtcgggaacgcgacgacgagagccacttg

SEQ ID NO: 45701 - DNA, 2044 bp, Oryza sativa
acgaatccaagggagagaggcagggaaaaatggggggaaagggagaggggatcacggggagtgattgcccccagtttattgcacgcggggacgacgggaggcggcgggattcgtggcggcggcggcgctagggcacgggcgaggcggcgggagcagcgggaggtcggggatgacgggtgggccccacccgtcagcgagggtggcgagcgggcacgctcgtcagcggcgcgcgcgcggggagaggccggatgggccgcggggaggggagagagagagagggggaggggagattttagggtttttctttttataaaatcattttaactttgtttatttcttaataattattatttatgctctgaaaattccactaaaatttatttacacattttaggcttttaggaaatatacaaaaatcctctaagccttaattgacttttaactttgcacattttaattgttggaggctttcacacggtttttaattattctaggcataatttagaggatgtattttagagtcgttttgggacgtgacattgtgtaggtctatttcatcaagattgaagcaatggggaaactacccttaaccctaaagattgaaatagaccgatttgagagcaatgcacaagagggagagggatttaccggttgaaggagttgaatcacaccaagaaactaccctctattggtgcaaatcgatgaacacctcttccttcacctagggttccatgccatggatcacaaactcaataaaaactcaaatcaatccatggaatagagagaggaagaggaggggattcacttacggagtaaccggagtgattttgacggttgaaccggacggatttggtggagggaggtggctagggtttgggagaggagagagcagaagaaatttcgagttggagaagtgaagagatgagatgggatgaggacgggtcgggtagaaggaggaggaggaagaaaggacaaagtcctgggccctccatccctggccagtcagaccgccagggtgcagccggtcagaccgggccctagaggccggtcagaccgccgccaccaggccggtcagaccgcgcatatagcgctggtcagaccgcctggcccccagccgactgtgcactgcccttgcatagttcggctacccccacacaataaaattcaataaaaatttgaattttggagcaattttgaaatgtgtgagttgaaatattgccaaccattcataatatttgaaatttatgaagatttgcaacaaaactcacttgagtgctaggaggtgaccatttatggtctataggggtttttgggcgaatttgattttcaaacaacttttaaaatatttggattttgaatatgatttgaataccaaaaacatttcaaatcttcttctctaccaactttgttttgaaacttttctcaaattccttctcaatctcattttggggttgaatttcattttggccaaaaacaagattctagtttcttcaaaagagggccaaaatggcattttcattaaaaaaacatttttcttgcaaagtgaaggttggaaaacatatagggaaccttttgaaacattttccaagagatagttttcaaattacattaattttgcaaaaattttgacttatgttgacttgggcattttgaaaacactactagcacttttagttgatttgctcacatataaaaggaagtggagcacatgcaagagtgcaaacctcccccttaatgtgacatgctccattttcgcaatgaagaaccaaatggcaataaatctaaagcataagagcaaaaaaggagcaaataaacaatatggaaaagaagcaaccatggtgcaccatctcaagccacattagagaagtctatgatatttaactcattcctcaacttgcaaaagcgggtttcatcaagaggcttggtaaagatgtcggctagttgatcctcggttcttatgtggctaatgactatgtcacacttggcaacatggtctcttaggaagtgacggcgtatgtcaatatgcttggttctagaatgttgg

SEQ ID NO: 45702 - DNA, 1421 bp, Oryza sativa
aaatacttggacattaaaaatatttaatacaattttatctatatcaacttaatgttcaaaattttcatagattttattcacacacttactttaattattaagtaatttctaaaaattcctttttcacaacgatttataatttagcgattttcagggtgtgacatgtgatatctcgcagcacctatcataaacagttgagcaaatcggtcgatctgcattatcctttagtttgtgccacagccaacagggaaagcggtggtaaaccatttgcatgacaagtggaactgtggaccagtctatttttttcttacccaaaatttttacttcaaaaataaaaagtttgacccaagcccgtacacttgtgaaaaatggacatgtgaagtgacagatcgcttcgcttatcctaacactactggagaaaccctcaaaccgggagagaatccgagactaaatatgtgtgtgtatgtatgtacgtacatacgtacgtacgtatgcatgcatgtatgtgtgtgtttaaatacatattatatggatgtatctacacagctagtggtagctggtttgtctaaaacagctaccactctatctataatagggaccatccacctatacttcaaatacaattttctcttaaactactcatccgattttcgatccgattacaccgttgtgttcacaacaattaaatctttacaacaagatctcacatgattatattttgatgaaaaatcacaaattacttttatgatatgtctaaattacttttagatttcactaagttacttcttaaatataaaaaagtaatttacatatattatagaagtaacttagaacaaaacgaaggtaactttagcatgtcatttgaagtaaatccgttttagagataaaaacatgactctatctagaaattaaattaatcagcacaaattatggaattaactaaaaaaataataaaagtaatcacctcagagcattatgaatgtataggaagtattttaataaaatctgaaagtaaattatatatatatatatatatatatatatatatattgaatctattctacaccctctcccatgggtcaaacccaccaccccaccctcccttgggcccaaaacccctctcccacctcggtcaaagcgtcctcccgccggtcaaacccgctcaccactccttcccccacccaccactttgctgctctcgtcttgcaggaattgtgcaataaagaacggtcatcgtgcagtaacaagacaatattatcgcagtaacaacgtcaaaaagtagtcatgatggatctagtttcgttaagcgtttttttatgaacttcatgttgcaaacggattggaaatacaagatatgatgtgagagatattgctctctaatgattgagatttatctcttttttagtccttgtctcacagga

SEQ ID NO: 45703 - DNA, 1518 bp, Oryza sativa
gggtgtagaatagttattctaagggaggggtgtataatagagctactcgtatatgtatgtatgtatgtacatatatgtatacatatatatacatacatgtatacatatatacatacatacatatatacatacacacacacacacacacacacacacacacacacacatatatatatatatatatatatatatatatatatatatatatatatatagagagagagagagagaaaaactattctacacctgggtatagattagctattctataccccctcctctcccaagggccaaacccacctcccacctcagtcaaaggtcggttaaaagcatcccagttagtcaaaccacggtcaaaccacctgctaactcctcccaccacccacctcttctcagctttgtctcgcggaacgatgcagtaacgcgacggtcaacgtgcagtaacactacgtcttatgcatagtaacagcgctcaaatattgttaaaatatagtcatgatggatctagttttgataagcgtttttttctagcatcatggtgcaaacgattttaaaaaatagtacatcatgtgagagataatgttcttcaaatgttggcttttctagaatttgactctccacaagtagtaatgctataacattacttgttactattgtcagttgcacgttactacaatcccatcgcatcgttactttaagagtgcagtaaaaattataagtttttgcagtaactgtgttttactacattttttcgatagtgttactgcataaacatatggtaacgtgtacctgcctttgtagtaacattccacttttgtgtagtaacaaatatatttagcatgtgagacattaacccatatatccttcacatgcagtaacactatagcatcctgtgaaaacggttttaaaaataatacatatcttgtgagatattgctttttaaatattggtattttgaactttaacactccatatgcagtaatagaatatgtaatttgcagtaacatgggtatatacatgcagtaacatggttttaccaaatgtataaaattgttcaaaacacttgtacatcaatcagacctcactcaaagccacctacaaactttacctatagcccacctattcgatcttcatctcgtaaaactgacgtagtaaaattacgattatcgtgcagtaacataactacttggaagtggtaacatgcacctattatgtagtaacacttctacttttgtgcagtaacaaatatatggctagcatgtgaggctttaacccatatatttttgttttgattcctggtctactacaattttactacgacgttactacaaaagtgcagtaacgtcctatgtgttctacagtaacgtcacgtgttactatacttttacaacaatgttactactggagcatagtaacatgttatgagtttcggtagtgaaagatattagaattaataatcatattactttctcataaaattcttaaaacaaatagcatcattagatgaattggttagaa

SEQ ID NO: 45704 - DNA, 813 bp, Oryza sativa
aaaacctttttcaatttaaattattttttaaatgcaattccatttattaaaaatacttccttagctcaaataaatcccagaaaaatctaggaattatagaattaagcaaagtatttaatgaaattttatctggccccattttatattggaatttattaattaaaattagatcttctcttctaggcttttaaaataaattctaaaaattccatttaaacaacaatttatatattttgaattttcagggtgtgacaaacctacccccttaaacagaatctcgtcctcgagattcggaagaactggcgaacagatgcggatgagttgacttcaattcatcttctcgttcccaagttgattcttcttccgagtgattactccattgaactttgcaaaaacggataactcgattcctggttcttctctcatctatttccaagatacggattggtttcttgtcgcgaccgggaaaattgccttttcccgaacgccagtgtattaatccccgtcccaggaaaagccggggtacaccatacaaacatgatataaaagacacatctttattatatcgataatatttacattattacaaaggcgcttcaggcctgacaaacaaaaataaacagcagcggactagcgggcctacggctccatcttcacaggcgctcaactggggtataagccaggactccacctaagacatcttctctgaagcttctcttactgaaggggggagaaagatagagcaagaatgagtacaaccacagtactcagcaagtcacaccggcagatgcacgattaatgcaatgggggtac

SEQ ID NO: 45705 - DNA, 746 bp, Oryza sativa
tgtgtgtgtgtgtctatatatatatatatatatatatatatatatatatatatatatatatatatatatatatatatacatgataaatgtatacgtatacatataaatgtatttgtatacatgcatatatatatatatacatatatatatatatatatatatatatagatgtaccaggcccttatgcacccccccatacacctacatgtatacgtatacatttatacatgtatatatatatacgtgtatatatatatatatatatatgtataagactattctacaccccctccctcctgttcccccctctcctccccatcccatcgctccccctccctcctgatctttcttttttctgtttttcgcttcccctccccctccctcctcccatctctctctctttctttttcttttccttttttttctccctgaaatattttttctcttttctagaaaattttttctgtttttcgcttcccctccctcctcccatctctctctctttctttttcttttcctgtttttcgcttcccctccccctccctcctcccatctctctctcttcttttcttttcctgtttttcgcttcccttcccccaccctcctcccatctctctctctttctttttcttttccgttttttttctccctgaaatattttttctcttttctagaaaattttttctgtttttcgcttcccctccctcctcccatctctctctctttcttttcctgggctgcaggaa

SEQ ID NO: 45706 - DNA, 564 bp, Oryza sativa
aaaaccaccgagtcctcgcggacagcgtgccaaacgcttcgcctcacccttactgacatgggcacgaaagtgcggggtgtcccctccgagatgcatcagccttcgacttctccgaatggacccaacaggctggtggttcggtttccgactgcgccaccgcatacggcgattgctgtgcacgcgtatgagcggcctttaccatgggcctcctgcagcagttcggctgcgagcacatcgccgagttccccaagtacgcgaagggggattgggaaatcagtgcgcaagacatttcgcccgcgcttcgtgcatggcgaaaacaattttggcagaaggacggccgctccgccgctaaggcgcgccttttggcgcagctggcgaaagcagaggcggcggacctttgtgaagatgaaggcatggcggccggagggggtggaggcgatgcccgggaccacccagaggtgtgaggctctccgcccttctcttaaattttcatagttttcttttggtgttcgctagatgtggcgaaccattgcatatcagagctggtgggctttgtaggtattg

SEQ ID NO: 45707 - DNA, 672 bp, Oryza sativa
cacgttatcgatgccatcattcagggccgtcagttcgatgttgttactctcatgatgcaagagattgccatctctaaggggaccttcactcagggtatctattatgccccttacatcatgagattaattcaagacaagcttggggctgctgggccaaatttgaagaagcacaagtagtacaagcccgcctacagcttggagctccccgtgctcctaggacggcgccctcctctcatcctagagctagctcatgctctgcacctccgcctcctcatgggtatgatccaaatgccttctttcatcctcagtatgcctattttgggatgcaacccaacgagtacttcaacccggtacttggggctattaataccctaagtgaaagcattcaacgcttgtctaccgggcatgacgctttgcatgaggatgttcgtggcttgcgcacggacgttggagacttgaatgcttccgtggggagattgcacactcgagtgggtacattggactctcgagtccaaatgttggagagctcccaagcattcgtgtatcatcgtcatcgtgatgcttctcatccttccacttcggcgcgtcctcctttttctccacaagagtgaagacctttttggtgcttgatgccaaaagggggagcaaagtgtgttttttgttgggttggga

SEQ ID NO: 45708 - DNA, 553 bp, Oryza sativa
agttttcaaaaaggaccaaaatgtaaaaatttcatacggagggagtatatatcatataggagtactactttggcagttcggcccaaacctcgcgccgcactgccgccgccgccaaagccgcaagccaaaaggggaacacccgccgcaaaacccccaaacctctcgccgttctcttcccccatgtctccctccgcgccgccgtccgccctccgcctccgggggcttcccaaggcttcgctgccggcctcctcctctttcccgccctccgctcgcttcccccaccacctctccatgtccgcctcctcgtctcgccgccctccgcccctcgccgcaacggcggcggccgccgggaccgggagtggcgcctccccatccctcctcgcagccgacccgggccaccgcgacgccgtcctcctcgccgctcgcggcgccatggcgaactgcctcggcgagaccagcctccacctcgccgtccccgggctccggctcgcggccaagggcaaggtgagcaaaaaaaaaaaaaaaaaccattggcctgtgttgccccactgat

SEQ ID NO: 45709 - DNA, 1234 bp, Oryza sativa
agacaacgtggtagccaacccgatgagccaaaaaaaattcgaaaaaaaggagaaaatcggtagcactagggcttttattaattgatgatgtagctaagaaagtacatcaccgatcaaatggcagcatatgcgggcagcacacagtcctatggtgacctatgtagctacggtgggggggtcgtcaatagcatatcaggagatagtaccgtcgcagaatgatgaaccacttcaaataactcagccgacacaagactacgggcacattgacttcagcggcgttggagagacacacaggtctgtccacgatcaacgttcaactgaaagattattgttgtcaggacgcagacctccagcaggggctagaagaaatgcaaggtaaagaacactagcacatcaaggaatttcgatgaggagaatgatcagtaccatgattatatatttcttatgtctgatgtatggcttacttcaaacaaatctgtgtgttaaactatctaacgtgtgtgatacatttaaaataaaaaacttttaaatattaaactgtcttttctacatctaaatggacacttataaatatttacctgcagcacgataacaaagttttccacaacctttatacattacttcagtgggtttgaaagtttcatgaattcacgaccttgacttatggtaagaccccaatactcaccataatcaccgtgtactcagttcataccacaagatagagcctgtgaattcatgaaactttctaacctattgaagtttacaccatgagtacaccaacaataaactcaagagtaagagtgatccactctactgaagtctgtcttctttcccttcgtaaggttccttttataaacagtccgtgagtaggctatccaaactttcaacagtataggacaacaaacttttgacgctacttcactgctacagcatgtgcataatgctaagacaaggcgagagaaactactcttttctatggacatacgtgacggcgacattgttgtgtgcgacaaaataattgctacagcatgtgaataaagctaagacggacgagagaaattactattttctctgttatgcgtgaccatgacattgttgtgtgcgacaaagtttcagcgtggactatttggatcaaatcggtcgcatgccacggtattgcgagtttcaaacgctaccgcacgacatgcatgcggggagagggcgatactgcacaacgggcatgtaggagcgcaga

SEQ ID NO: 45710 - DNA, 1406 bp, Oryza sativa
tggcgatgtgtcttctttgccttaaacatcccccctccccacaatgcaaaagatatttttggtgactggctaaggggagtgcctagacccacaaaaaaaatgattttgtttggagctagtgctttatgttggtcaatttggcgttgccgtaatgatatagtttttaaccataaaaaaatgcctaacatcatgcaggttatcttcatttgttccaattggctccactcttggtgtatgatgctttcacaggaacaacagtatactatgcgcaatggtgctacacgcttagaattagtagccaaggaaattttattccagtttggatggcgtagtacctacagaatttcgtgatagaatctacgtgattttgaaaaaaaatattattttagtagatcatatcatcggcagaagttaggggtttgtcccatctcgccttttttaacttttctgttcacgtctgaattttttgactgtgtgcctacgggcagaggccggagatgtaacccatttccattatctaaaaaagcacatatctatatagtcagagtataaaagacttccttatggagccacctctttataatactgactttgatcaaagtcaagctactttaagtttgactaagtttatagacaaatagagtaatatttatattaccaaattaattttattaaattaataattaaatatattttataataaatttatcttgtgccgaaaatattactatttttttcataaactttatcaaacttgaaacagtttgactttaaccaaagttaagacatcttataacctaaaacggagggagtagtaatttgatggagcttgtgaaatggtatttgagtgaagtctctttctacaatgacaaccccaaaattctcttgacctgtgtagggacttctgcagttgcaggcttgcagcttgccttacagaactggtaaagaaaaagaaacaaagtgaacaatgtgttggtataatgtttggacttgcccttcaatttctatacattacagtacatgacacatatgagcatcagagcatctctgctagatgccgtggtggttaccactcgatgccgtagtggtcaccactcacatgggcggagctaccatgattcccgggaatacccaacttttttatcgaaaaacaagtatatttctaatatatacatatgtacacatattagtgcacctaaatcctcaattattcgatccaaacatagccctatacacatgtacatatattagtgcacctaaatcctcaattcttcgatccaaacacagcccaaccggcctatatgacccatcagacatcagttgatccacttagccaccactcttccagacggccccctctcgctctcccttcatgacccatccctccctggctcgggtccctcgcg

SEQ ID NO: 45711 - DNA, 3829 bp, Oryza sativa
caaacatgtaagaaaaaatcaacggcgtcatctattaaaaaacggagggagtattggttaatggtataatgtttaatggactttaatttggtactagtatataaattatgggtagttttagtcaatactacaaattataattttagcacggctagccccttgctccttttagcatgttcatcagaccattgaaatggattattttcattttatccacgttttgaaaaatatgttttcttaaaaaaaatcttcatttttattgcttgcatgtaccactttagactttttgttaatttttaaggatttccttatccctataatcaaatcaataagccgctataataatccaaatcaaactatgctagctagatagttcttttagcgagtgagggattttttcctctatgggtaatagactatattagaagacctatttactccctaaaaatatagcaatttttgccgcatttatatttgttcaaaaacattgcaattttccttatatcttatttaatttcttgacagctttctctgttctctccttaaatccttatgaaactatataaagtgtttatgttttgggatgaggctagtagatcaatttagttggacatttaactattgtcccgcttttaagagtgacatttaacaatctgtcaataacatgtgagctgtgtctataacatgtaaattcagtgacaaattattaaacatcacattacatttaagagtgtcaaatactcctacgtcccaatataagtgccacatacccccttcgtccaaaaaaaaccaagtcctgtatacaaacctgacatatgcgtgtccaagttcgttattagtttatctttttttgatacatgagtcattaatacggatgtgatatattctataactatgaatatggagagctgtctgttcagattcaaatcctatgatatatgaaatatgtactatgttgtatatgttgtatttatactgggataagatatgtaattaaatatctcctatatttagctgctggatgtggatggaccacgtacctgccggatctgctgtttctgcccgaccgtaccgtatggatctacgcaccgtaagcgactagagtacacgcaccagggggccgcacaactgcgcaagcgtagctagcgcgtacaccagcggcacgccggcatatacgtgtgtactgaatgtttctttgaaaagtcgcctctgcacgagttgctatttccctcgtgactagctagtgaccaataagagtgggaaaagaaaaatagaaacacgtacgggggggcaaactaaagggcgtacgtgcatacaggctacagcagcaaggtaccgtgtcgaagaattgatgtgcatacggcaagcgacgtacgaacggacggaaacgtgcatgctgatgcatgcatggagccagcccggaggcaggcaggtgcatgcgcagcggcgcagagcagggcgagctagctagccggccggccgcgcggcccggggcggcacgatcaggtggcggtgccaggagggggacaagggaggaagagaacaaaagcgcggcacaaacacggcccctcccattggcaaacggcgctcgcaggcgacgacgacgacgcatgcatgcatgctagctagccacgaccatgtcgcgctgcgctgcgattgctgcgtaatgcatgcatggcagcgccatcgcaggtcggtcggtgtgggggagaaagaggtagtagcagcgtagcagccatgcatccgatccgccgatccatgtacacagcggttggcgacgggtgcgggccggtgcgtgcgtgcatggttgccgcgccacacggcactgggctcgagctgcagcctgcagggcgcatgcaggggctggggcagggcatgcagccggccgtcagcctcgtcacgtgctgcgcctgcctacctgtggtggccatgccgtctcgggcgtattaggcatggctttagttcccaaaagttttcccaaaaatataatctttaacatatgtatggagcattaaaatacagattaaaaaaattgcacggttagggaggaaatcgcgagacaaatcttttgagtctaattagtctatgattagtcataagtgctacagtaacccacatgtgctaatgatagattaattaggctcaaaagatccatctcgcggtttccaggttatgaaattagttttttcattcatgtccgaaagccccttctaatatccgatcaaacatccgatgtgacaactaaaaattttcttttcgcggactaaacaggcccttagacatttgtgatctttgcatttatatatatgatcctaaaccagtgtgaatagataagttattagtatctgatctcaacgtataagctaggagtaggagccagccaagaaacctcgaatgacaatgttactggaacagtgacattgacttttctctctgtttttttttaaagttgtttggacactgctttccttcgtggtatatatgaagcaaaataatggcgctcgaaagttaatttggccaacacccagacatgtcgggttgtacgcggtcttgtgcatgcatgcgctcgcttgtacatgcggccacagccggccagcagggtcccatctaattaaggggcttagggctcgatcgatgatcagtgtaatagttcatcacgttacgtggtttttggtggtgtgggtcatttgagttgatgtttcttgtgtcagcaacagggcgcaaaacgttagccgacgtgactagcccttcggctccctccatgtccacgcgatcgaatgcacacccctctgatcatcacatgcgtggggttacgtgtacacacacccactgcaactttcgaatccaaaccttaacaatggatggatggatgtaccccgtgtacagtacctgcgtggtcgatcgtgtgcctcgtctaatcgatggctcatttttcgattttaccgttgcagggtgttgtcgcctggcgtatggtgcttaccggcccctgggtgccatgaatgtagctagtcgtgcgagtcgaccggccggactacttgcccgtgcatggccgatcgacgacgagcgcggactggctggcccggctccgtccgtgtgatctggccattttccaggactgcgaaacgcacgaccggcgcccatccccttccctttccccctccagctacagaggtcatcatgttcagaaccacccaaagtgagacagagagagagaggtgcagtaaagaagaggacaaaaccatcggtatgcctgtattatggggatggtgcagtaaagtacgttacgtacgtgtggccatgaaggggggccaatgcggcccctgcaacgctgcagcgcgcccatgggctcacgaaagaaaggaggttcaccaccaccagcagctatagctgtacccgagaggccgagacctgcctgcccaacgtccgttcgttcgtttcgttggcatgcgctaagctttagcctgtatcacctgtaggtatgggcgtcgcaggtaggggtggaaaaaaaaaagctcgggctcgtgagctcagctcgggcttggctcaagcttggttggcttggctcgactcgtaagcccaacgagccaagcccaagctttctttttagctcgttgctgaaatgagccgagccgagctagctcgcgagcagcttgttttggctcgcaagcctaggctatcgtgcgtttatattgattattttactttatattacgttattatttgtcaacttgaaatttattattaagattttgaagtattgaatatataaacttatttaaattttacatgttgatgatttaggggatcttttttaaaattacaaaataat

SEQ ID NO: 45712 - DNA, 2257 bp, Oryza sativa
agctgtacccgaaaggccaaggcttcctgcccaacctccggtccttcctttcggtggccttcccctaactttaaccctgtttaacctgtaggtttggccgtccaaggtaggggtgaaaaaaaaaaacctcggcctcgtaagctaagctcggccttggttcaactgggttggctgggctcaactcgaaaccccaacaacccaaccccaaccttttttttaacttcgtggttaaaataacccgacccaacttactcgcgagcagcttgttttggctcgcaagcctaggctatcgtgcgtttatattgattattttactttatattacgttattatttgtcaacttgaaatttattattaagattttgaagtattgaatatataaacttatttaaattttacatgttgatgatttattcttacttttttaaataattacaaaataatatgaagatgtgttttaataggaaggcttgcaaggcagctcgagctaggaaacgagccgagccgagctcaagttttagcttgtctccctaaccaagccgagccaagccaaacctaatttattgtgggccactgcaagccaagccgagctgttcagctcggctcgtttccacccctagtagcaggctccggtcgcttctgtagccgatctgtacgcccgaaccatgcagggcgtacgtgcttttccgtgtgtagctccgctgtctcggccgtgtatgcatggggagtgatttgaacctgcccgcatcggtgctctctcgatcgggggacgtacggaggcgaggaaagtgggggtgtgaagacagtgacaagacgataggaggtagggccggccgggatttccattttgcaggctttgttttcgctcaaaaacccttggagtattattcgcctggtcaatggttatgaccgatcacgggaccaaacccattaccagtactttttttttatataaaaatctttttgcgcctccgatccaccatgcatggacatgcattactgcattaattgcagacttcatagtctaaaaaatgcattacctagcaccgcaaggtgagcagggtccatgattccattcgaatttcatcacctgaatttcggagatttcccaagcagctcgtttgtgttgaattccgttctagttccatcaaatttcatgaaaccatcatctccctagcgcggcccgcatttcaacacgaaaacaaaattgcaaatcgtttctgagtagccttagggtcaaattatatatagggatctttaaatgcatgagtttcaacttttgaacaattttttacccagctagaatcaggtgaaagaccgtacatttcgaccaatttttagtattttaaaacataaaactaaacgagccaaaacaagccaaaataggattatctaagctaagagcatcaccgacaacatcctaaaatttcttttttagaaccctaaacatattaggtgtgaaaatattaaactctccaaaaagttacctaaaattgatttttccaaaactacgaacaaatgaggccctataaaaactttccaacaaaaatatgttttttttcactcttttcatggtgattgcaatcaaccttgatgcctcccatcgccatcacacgaatgcgcacacacctcccatccctgatgccactctccccgtgagatgggttgggagcggaacctcttccctataagcataaacaatctggacttaggattttgacctattaagagcaatatagaatatgttggaatttttttaccaaaatttcctaaatttccagatatggaaatatgtatatttagatgctagctgttgttgatgctctaatcctttagtctagcccttgaaggttagaaactaccattagtcggaaaaaaatgagaaaattatgccactctcattatgatatgtcggagtttatagccatgtaaatcagttgcatctgtatgctacgaaatatagatatatttttagaaatagaaataaggatcataaatattaagctttgcgttcaactaagatcttcagccgaatgaggaaaatttgattggaccgcacactagtttccaggactatatatatatcggttgacaaaaaattccacctctcatctttaaaattttggaccatcggatatgctttaatattcatgcagaggcattaactctaactctcatcctcttgttcccctcccctcgcgcattccaccgccaccactcccattgtgcattctgccgtgacctcccgatacccccc

SEQ ID NO: 45713 - DNA, 3810 bp, Oryza sativa
tgctgtcttaatcaagtcattatttcctccaagcaatcgaatgcatgcacgtcccaagcgcgctctctcgtgcggaactacgaaatactagtactccacttttgaacttttgatgggtcatggactcatggtactgtacgtagtaaggtatgtactcgaggagagcgttaaaagtaggatgacagcgtgtgtgatagcattgccatacacgagaaatttacgtgccattttggctcttttttttactacttccgttccaaaatattattgtctaaaataagatttaacctatcgtagaacaataaatgtgaacacagtaaatcctgattcattgtctttgaatttagatagtaatatttgggacaggaaagtactgtatttaaataataaaacaagctaaaacgaaataaataatacttaatattttcaactaatgcttaattgagcagcatcttatgatatttaaaaaaccgaggtgtcgaccgtgtcgtacatatattgttacggcgtacggatcagtcagtcagtttgtcccttgtcgtgtattgtacatgtgttccaccattcaaagtttttctttttttttctctttcgttattatgctcgatcgtttaatttcttttatttttcttctcccggtgtctcttggctcctttggcgagggcatgatcgctgaaacggaggcacgggcgggagggagcacggcgacagggagcacctgttagctttgttgccatcagttcgataggctggtgacaagatgacaagtgacaagcgagcgcgagatgggaagccaacaacacatgcaattgactaatcatatgattcctggcctggagcaacacgatcagctataggctagctcgtccatggccgtgtcaccatcttctctactgctcctctttactcccgtgcaagcgtgcaacccagttccgagcaagagtactcccgtgcaacttaaatccaaacaggcaccgtatattcactagcagtgacgagggctcgctctctctctctctctctctctctctctctctctctctctctctctctctctctctctctaacaaatcatatgccacgtccgatcccctgccatcactggctcatataggattccatttttgtttcttttttgattttttttctcctacgaaaaaaatgacgtgttggtaaccccctgtagtcccggttttctaatcgggagtaagaatccgggactaaagatcgatcagctattttctactattataaaaactgaatatgtttttaccggtactttgatacattatccgtgtataaatcggtttttaagttcgtttacttttagaaatagagaaggagtcgtataaaaaatctctttaaaaaactcgcatgctaacttaatatgattagagttctaattgcatctcatgattttctaaaaaaatactcattccgtcccaaaataagtgcagttttgtactattcacgttcaacatttgatcgttcgtctaatttgaaaaatttttatgattagtatttttattgctattagatgacaaaacatgaatagtactttatgtgtgactaaatatttttaattttttcataaattttttaaataagacggacggtcaaacgttgggcacggatatccacagctgcacttattttgggacggaggtagtatatctaagcaaattctcacagtgaatttcatcttaactaaaccgtataataataagataaaatagacttcacccgttgcaatgcatgggtattttttctagtttagaaaaaaactcgcatttgcatggaacagtgcaaatatccttgaaccacatgacactccgttgtattttatccgaaaaatccccgctttatatctaggagtaaagtaatactcaatcgtcaacatttacttatagctctagcaaatcttaatcattttaattacatggcttaccttcattaattatatcctaacaatatttttcaatgtaaacattaaaattctttgtgaggagtatgcgctagtactaatatttcttcattggtggtggataaaaaaacgcacgtctaacagctctttgaaatgttagaacgataattattttgataaccaaaaattttgaatgataggacaacaagaaattgaaatggaggcgataacattttagagagaaaatatagtacgtaggcttcatagatcgtagtgcttgtagaagatcgatcttaacttcttctatagcttactccctccccccttccaaaattcttcgacattttaggcttggaatcgaaggatactaattgttgaagttttgggctccgcccgatcatcttggacttgtttgccgaattagggataattaattgctgaatttgacgcatgatcattgaatgcttcgaccaaattactccctccgtttcaggttataagactttctagcattgtctacatacatatatatatagtttcattaacatctaaatgaatatggacaatgctagaaagtattacattgtgaaacggaggaagtagatattaataaacctagtcacacatataaggcagattcattcattcattcatatatatatatatatgacactcatatggggcaccatggtgcccgggcaccatggtatcaaatgcacaaaatcactcaaattcaaaattttcaaattgtgagtatatacctagttataataattcgattcatacctatacctatcaacaaaacaactcaaatttaactttatttcacaatccatgattacatacctaactaattatatgtatggatatgctatatacctagaatcaaaatctaacaaaaacaagttcaaattcagttcaaacttgctttgaactagttagtaaagtagttaatgttaatacctaagtaattgaaaaagtttcatactcatttgaattgggtatatactctattttaacaatggtgcccgggcaccatggagcaccaaacaaattatatatatatatatatatatatatatatatatatatatatatatatatatatatatatatatctgtgtgtgtgtgtgtgtgtgtgtgtgtgtgtgtgtgtgtggggggggggataatgatagaaagtcttataatataaaacagagaaaatacttttctttaaaattaaatccacatgaccgtaattaatttaaataaccaattgaaaataaaaagtaagtttagaccccatttgtatttcatactgaggcccaaatttctgtagacggtcctgcgaatggagtatgacacaaatcctctagaacaaagctacttagcaccttgcataaggtggaagaggatgttctaacttagttttctttaactttgggctacataagagtaactaagtaggagtacatctatctattatatactaaaagtccattaaactttttacaaacgctctcaagccgccatgtggcactcctaaaaacactcctaggccgccacgtggcgatttgataaatcctaaaaattctaaagaaaagcaaaacatctagccgtttattttcatttaatctggtggacccattattttcaaccattagatctatcttacaaaattgccaaatcaacaaccattagatctatcttagtacaaaattagcaaatcaattatctctcttaaaatatccttcggtccgtgtacctgtacagcatgtacgtttgtacgtacatatgatcctaccatacttctttttcttttttttctcatttagattagatggaaaacgaaaacaaataattcaagtccatatcacaaccattgattttcctttaaacatggt

SEQ ID NO: 45714 - DNA, 4679 bp, Oryza sativa
tagctagatagtacgtagaaggagttaagaataatgcatatagagagagtggaagaaggcacaatgtgcttagcttcgccttacctttttagcaatagggaatattaaataggagcagcaagaggaccatatagccacaaacaatatatatactagaatgtgaaaaaaaattgaaagaatttatttggttgttggaacacaaagactttctagggtctctttttaaaattttatggcaattggatcggatatgcattgtgggcttcacataaagcattatgtaatttaaattttattaattcataccaagtgaaggccagctaaaaaaatagagagtgattggtttcgatcacacaattcctaatatttcataagaaattttatagaaatatttaaatcatggaagcattagtaatacattacattccaaaaaacaatattgcatgcatgtattgttatatttaattagccatcaaatcatattcacaatggttgagtagagccacagacactatatatgaaacgttcccaaataaattatctatcatataatgcaaatatattggagtatacaagcccgtgaatttaccgtagccgtatgtccatacaattcatttattaataaacaatgagaatctataccaatcttacttccttatggataaaaaacttttaaaaaaattgacgcacagggtgtaatgctgtcactatttatgatatcataaatttgaactcaaaataatttttgtataaaataaaacaaaagtgtaaattgaaccaattgtagaaaatcttataatttcttagaaccattgtggttcttaatttcccttaaattgagacaaccatacataaccactgcatgatttttaagtgactacatatcaatagacttccctctattctatgccatagcagaagatagctggttttaaatattatatttcttactagtaaatttgggttttaacactcaagttgactaaatgtatttaaaaatatatataagtcacacataatataggaagcaaggtctagaatatatctactctatttttgttaattcatatgtaagtacgtataacaaattatatcaaatgtgaaccaactaaaagaaggaataaaacacatttattagaaataaccttttttgagattcgttaaaaataagagcccaaaacatttaattaaaaagaaaaacaacaccttacttttgatttagacttaaagacctacgtcttcttaaatgatgaagaagaataactttatagattgttgcttatatagatgaattaaatattacatattataaactaacaaatatcttaaaagaaatatttaagctatgaatgcgcgaatgcgcgggctaccatcatagttatcttttaaaaaaagagttaagtagtatagagaattttatccagctagggtagtagcttggctgtgacatgggggcaactagaaattatggcaatgatgaggaagagcgaatgaagacaaggcaggatgtctttatgccatgcatcgagaatagagtttgtgggggcactgaaatctgccacggcccctgtttgtgcacgagtaaataattactggtcggtctaccactgtatcatcactgtacttgtctctactccattctctttttaccgtgcaaaacattgctgtcaaattgtcataggagattaacgctgcctcgagatggccttgatcctccttcacaaataggagtacatgtttctaggttatttaacgggattaaaatttagaataaaagatcttggtgtccctcgtttgaagtattgctacaagggattgatagcgtgaaaaggtggttagcaatagagatagaaaaagaaataagagtactacatatttaaagttgatgtaccataaactacaaattgaacgataaatttatcataaaactatactatgttttaggttaaatatcataaaactatatatttaataataaatttatcacaaaactacaaaattgggggtttaagcactaatattatgtttgaattataaatgttcaagttttatatctaaattgatactaaacctgtagtttttttatagctttgttataaaatttatagttttacgatacttcgccttaaatctgtagttctatgattaatttaatattaaatatgtgatatatcaccttgaatatattgttttattataatttgaccaaagtatctgtaattttataaaatttactaaaaaattaaactatattccattcatcctaaaataacaacttagaaccggattagagagatcctattaaacacgtcttgcctaatactaagaacatcgcaatatagagaattggataaaatgtaactatctaggaataggatcggatgtgtctaatccaatcttaaattgttatattttaaagcagatggataataatagatgattgatggacaaatactattttagaacgcctatatgtctagacaaactttaaagggtaattttatcttttctaatgtaaaatttgatacatctaggtaataagaatctcaaggtattaaacattataatgtaaaatttagttaccttaatgtactttctcaacgattgtaaaatttttcaactttaaatgcttgaaatacttataattatgaacacggagagagtatcaaatttgaggtgaaatctaaatgagagatggttgtgattggataagataatacaataaataaaagataaatgagatattgtttgtggttggttgagataagcatctaggtcaaaaaataaaagagaaattagtgtggttaatttagatgatgaaataggcgaggaaagaactactatattttagaaaaaatgctaaagatactcttatcctatctaaaatgtaataatttatagcgttcaatattgcttatttctaaaatataataacttccctcccaaccctcattttaactgaccacgatcatttctcatttcatctttccatctactttcgcatctcagctgatcagaagcaccctcttatttagttccaactactatctttttccaaactctataaattccagggttggatctacggtataagggccgatgtcaggcgacacggatgatttgttatgatgccaacaaatagattttctggatccgccactaattaaatcctcatattttgtgacggtgggaatagctcataggagtactttctaacgggggagtagtgcatctggtgatctgtactgaaacattcgcaaatgcaggattagatagacgacgcacatgcgtcgttgctcattatcctctgcccattgttctgtctctggaaatgtgttctgaagatctctgcacagaaagacgaggataaaacaaaagaagcagacacctattgacatattactattgagcactcgataggtttgctcctggaacacagcactataatgtgatatctgaccattcattacacttgcttggagtactccagcagtccagctcgccaaatgcttgtttagatcgggagcaacttgctcttgctgcataatgattccggagattattgctactgtggcgccactttgtttgtagacaaaacgtacgggtgttgccttttcttatctcgcttcgacgttgagggcatggagagttggagacatttggtcagcgcactattctgccgttgtgaagaagttgtttgctctcacatgctcttgttttctttgtagggtcatcgagataaaaaggtgtggtacgagtaatttttactatttcgttgtgacgtactcctagttgaatttcacctaactaatgcatagtgcagaaatgcactagaagctccagaagatctcaagcagaagcaagtatagcggatcattgatgatttggaggttagagttgataggggtaagtgatgaattcgacatcacagagagcagagtttcctataactccgaagcaaatattacccgagagtatcaagctaggtcagatggatatggagttcttctctacagctgaaaccctgcttgaaaggtagcagatcagaccgacattctgctgaagtagtgattttgaactaatcacaacatttttttttacctccattgtgcttaaagcagtaactgcgaaatgcaaactgctacaaaagtaaaaggtattctcaagctcctgttgctcccaataatgtctcagagagttacagtacatgtgtttgattctgtcattcgcagctcacactacaacatggagtttgttctcgatctgactaaaggaaccaaagtcccaaacaagtaggagtacacattacagcaaagcccagttaatttgagcccataaagaccgatgtctattggaccactagtcatactggtatggaaaaagtatacttttcactccctcaactattgtccgagtatgattcatgtcctccaaccacaaaaccgggtatcctccaattatcaataccggagtaaacaatatccctcggtggttttggagatagttttagctgacatggcgcctacgtggcggtgtcctacgtggcattagaataaaaaattaaaaaatatgtgggacccatatgtcattaaaaaaaggattatgggacccactgacatatgggacccacatgtcatcatccctctccttcccttcttcctcctcctctctttccttct

SEQ ID NO: 45715 - DNA, 579 bp, Oryza sativa
ttgggtattggtactgacctgtccaatccaatactttggtaaaagttaattagttattttctttcattgtaatccacattaaaatttcatgggatgcactgtactctgtcttcagggcatctgcaatattaattcagttttataaaacagcctatgcttatgtaataagtaactggtatgatgcattttctgtggaaccatggaaagtaataagtaatgtacaagggccgaatccaccatggggtctacgggggtctcaaccccaactactaggcttcgagccccactacttgccgtgtaacccggggagccccccactaatttttttttgtcatacattcaataaaaaaaggggctatagttttgtatagtttggttagcctctccttttatccggtccttggatccgccctggttatgtaagcttttgcatattcacatattttcatggctttttcttgcagtggtaattttgcaaaactactgaaaaccgctctgttttttttcctattgggtccaaaacatgtgttgaattatattctttttcctttttatacaaaaagaaagggatagcttttc

SEQ ID NO: 45716 - DNA, 1147 bp, Oryza sativa
ccagcgccagcgccgtcgtcctcaacctcgcgccggcggcggcgtgaggagtacgagaagcaaagcggcgcgagcagcagcggccagccggcggtctggagaaggctggagagccacttgcggttgccgccgcggaggaagtaggcgcggaggaggagcggcccgcacgccgagccgaccaccatgaggacgaagttgacgacgaggagcgggctcctgaacagtctaccggtgctcagctgctgctgctgctgctgctgctgcttggtggtgatcgcgttcttgcatggctgtcgctgcgtcgtcgccgcttccacctccatgatcaacaaagtgagcccgagaatgagatattgcgaggatgatgagtgtgcacggcgacacggcggtttatatggaaaactcaattcattccctggggatatccctcatttatacatgtcattttaaaagttattaaattttttttaaaaaaattagtatgatagatcaatattcctatgtgatatgtcactttacaaacatgtaaattcaaattcaatttatacaagtatataaaaaataacaaatttaactatgaatagaatacgtaattcacggtcaaatttgtttttttttcgaattgtataagtcaaattttaactcgcatatttgcgaaaagatataccatatatggatctatcttgacaattttttttatttttttatatctttgtaaacgacatgcacagaaacaagaggatgtctctttgagggacaaaaatccacttccggtttatatggcatacgggtgcaccgtgctgtgtaccgtgtacgtcccgtgcaaaaatgatttcggcagctgaggttgtcacgacacacgaacctgacagctgaggttgtcagcttccggcgacgtccgctcggtcacctctcggtgatggtacactgccaccaccaccaccgcaacagcccatgtcgagaacactaacgcgcgcccaggtgaccaggtccagttgcacctagctaggctcgtagcgcgaatgtgccttttctcattgtcaaggcccaattaatggcttggcacaaatcgttctaccatctcggtgcccgagagattgcttggcacaagagattcgattgagacccatgcatttgagagctatcc

SEQ ID NO: 45717 - DNA, 3075 bp, Oryza sativa
  unsure (1)..(3075): unsure at all n locations
taagctcattttaccgtttttcgctgtccgagtggatcgcaagttgtattgcgtgggttgcgtcccctgaggcgcgtcgggaagctgtgacatgtctatctcctcggcgtctggtacgacgtagtcctcatcctcctcgtcctcatcgtcatcgtcgtcgctaggtggagccggcgccttcccctttcccctcccttgcttaatgcgtgacgacgacaagccaccaactccttcacgctcttctatcctgatagagtgtcgagcagtacttggacgcccggattgaggtagtggtggtggtagtctccccggttggtacacgtcgtccaatctaaccgacctgcaacctaatcttgctgcaagtttctggcacctttgacgaactttctgcatttcaaaaaaaaaagaagtttgttaggcataactcaagtaatgcaaagtgctaaataaattttacctttaaaacattgcggagcgtgttctccgtgtcctcaccacccctcggagcttggagggcatgccccatttccattcacactcctgaggagctctctctactgaaagcgtgaaaagatatacgttagggtctagggtgcaaatggaagtaactttgacaaatgcaagtgtggctggcgccgccacggtggcacgggcacggcgccagtgtggctggcnccgncatgtgggggtacggcgccaggcactctggctcccgaaaaaggactaagtcgggtttaagggggggcacgggtctatttgtgaaataaggtttgaaaaaggaccgcactctaaaagattgagctccttccgtcccataaaaaccaacctactaccgaatatatgaatctaaacatacatatgttagattcatagtactcatccagttttagattcgctttttatataacatagggagtaggaaatgaatacaatgatatacaatgaaaaacatttagaaaatgaaaatccatgaaaggcatacctgaaaattctctaaatttatgagaaaaataataacgatataggcaaggaatacattcatatttgctctgttcagaagctggatactgcagctggactgcagcagcttgaacagtgtttctattattgatttacagagcaacggctgcagctgtgatgcagcgttgccgaacacaaccattaaatctcaatttcaaactcaactttgccgaacacaaccattaaatctcaatttcaaactcaactttatttgataggacaaaaatataaaattaacactattcacccaaattttatattttgtttacttccaaataaaatttagtttaaagtttagagtaagaatgtattttcgtgccaacatctatatttaacattttcttttaatttataaaacttttagaaccggttttcattggttttccttttatcacatatgtccctaagtatctatacttatctatgtactatttaggtgtccgtgttttacagtaagaatttagccacctttttacataatttagctctagcctctgtttgaattattacctaaatctaaatactagatattatataacatcaattctttaaactagacaaatcatcccccttactaaatccggtgcgttttgatcttacatgccagttcaatcaaccaaaaaacaataggccccacctgtaagtgattcccctcccctctcttcctccgtcgtcgctcttcgcctcctgctgcatcccagctcgcccagcgctgccgcctctaagaccgagtttccaaatctacgttcatctgtgccattacaggcaaatttgggaggggagagacaagtgctcgcacccagcatgcaacgacggcgaggagggctcactcgcctccactcctcttcaatcttccccttttccaccagattgatttcggcaggcgaaacaagttttagtaagacgagtcagccgccgccacttatcttcccctcttccatcagatcaaactcgagagacagtagagactccgacgaggtgacttatgcatgagacaggaaggtaggctcaaggtgctcaccaagtgtggctacttccacggttccaggagaccgagctcgagctcaagcaactacactatgctcatgaaagcaacgatggtatctagaagacggcgatggcggtgaatctggagctcgaacttaagcttcacatcatcgtgctcactcctcttgctagtttcctcaacatccgtcatgctgcctgagggactgcttggttatcgcccgctaccaaacgttgtccgtccgactccctttgctccatttcgtgcttgcggctgaggcccccctcgatgtcgtcttcgttgcgatgttgcctactagggtcaagctggggaggggataaatataagaaaagcactggcgatcgggtcccacggattttttttctaactagactgtcacgtgtgtgccacctagaaccaaaaccgatttagattgagtgaaggggataatttatctgggctgaagagtttaggatttaaaatttctggttttgtagcttaggagggtgatccggtcaaacataatagtttaaagggtaattctaactttttccttattagattcgcataaaaagatacttttgtatacttataattttattatgttacataattgatatattagaaaaacaaacgtcaattaattaacgttttaggtaacagaactaaatatgtccaatattttgaaatggagtgaaatagaggaagtagtattattcgaccccgaaatttagctcaggaaaaccgtggagcgaacacgtggcaactggcaacaaaataatcaccaatcaccacacgcgaatgggagctagatttcgttaggaaaaatctcaacccacccaccccccaacgaaatctcccatcgaaaccccgtcgaccgcaggccgcaacccgcgacgcggacggcctggaaacgtcgcgccaccagcccacccaaggtcgcgtgatttcaccgcacgcccatcagggccaccacccgacacaattactaacgccgacctgcttccacaccccccgtgctctccaagaagagacgcgacgcgaacgca

SEQ ID NO: 45718 - DNA, 1232 bp, Oryza sativa
ctatatggtcctcttgctgctccgatttaatattccctattgctaaaaagggaaggcgaaacttaacacaattggccctttttcactctctctatatgccataatccttaactccttctacgtcctatcaacctacttttttttaatccatcacccctttttgcccaaaaaaaaattggggttccaaagtttaaaaaagttttttacaattggttctaaaagtaaatcgaatgattgaaaataattggccaaatattttacttttttctttgaatttctaaggtttttttctaattttttagacatggtgattattattattggttgacatgtaaaggatatgggctatgttcaactgatgtagtttaattttttataaagacaaatatggttaatcttgaattatttgtttcattataaataaaacaatagttaaaaattaaagtcatatataacttttacaattataatcatttagctatctaattattgattgttttatattatgttgttgttttggaaatagaaaaattagagaggaggaaattggataggagaggagatatgtgcatctacgtatgacaaggggagaggatgatagtttttgttctttcatagagatccaattaattggttcattggtccgagttatctatatttaaacataaatataatattagcaaacaaaataatgtatttcttttactacttattattttaatcttattatttaattctttgtgtttcatattattctaatataagctacgtgttgttaataaggtgtttaaatatatatatatgatattcccttaaaaatgtgtctcaagtgaccaatagctagtccaaagtaatatttttgtacttgttaaatatagttaatttgagccttcaatatacgacaaaatctaatgtacatatgcggataaaaaataattataagattcagatcagatagttatgtttgtgtctaatacatcatagagagagggaaccgaatgggtggagggacaaatatatacatgtaagtacgtacgtatgtacatatggaagggagggacttggctcacgggggcctttcaatttttttaataacaaaaataaatctaattggtccaccatgtttaaaggaaaatcaatggttgtgatatggacttgaattatttgttttcgttttccatctaatctaaatgagaaaaaaaagaaaaagaagtatggtaggatcatatgta

SEQ ID NO: 45719 - DNA, 815 bp, Oryza sativa
ccaaattcctggaaatggttggcttggttgtctacattatgcacaattgcacatccttgaatgtatcacttatatcttaatgtctcttttgaaggtattgagctataaatgaatcctgaaaagcgtttaaacaaattcaaattcccatggaactattatttgtaaatattgcagatcagtatacaattccagacttgatatctccacttcctgttttactccatgtcaaggcttaggtcttttggtccaacaattccacgcttccccttcttatgtgattccatcttatctatatttattggttaatatatcagaaatatttagtttagtgcagttttttttatcatgactttgcaagttatgttgtgtggcatcaatctaagatcgttaataatatctatgttatctgttctataaccaatgtgctacttcagtaattccctttttttggttgcagtaccttcaagtgccagatatctcactggagacaaggccataaagatgaatgccatccaccaagagttgatgccaggcctgacaatataacagtagtttctagtgttaaaaagggtgttggaatgtacaattcatttgaacaaagtgtgaaatccagcgtagaaccagcggttgaagtcaacaagtcagttgctgctgtgcctgaattgtctgaggcaaaccttgtctccgatggtgtagataatgaaagaaagaagatgagaggtcagaaggcatctattactgcaaaggtttctgaggatgtccttgacaacaataggattagatctgttgatagttctagcctcccaacttctggt

SEQ ID NO: 45720 - DNA, 1446 bp, Oryza sativa
ttggagtagcatcccagttaaaacaaaaaaaaatagaaacctagcatttcgttaaacaatactagatgtaaacagaactccagaacacggtaccatatttattaggattatatattagtctataggctgtttgacattttgacagtggtctagattataggaattgataagctggggtctagatcacatataatatacccaacagaacaattttatgtaatctatgtgcatatttattttcctaatctgaagaagacatattaacaggttatctgaaaataaggtaattctctgaaagcagcgccaatgctcaaaatccattgagccaaagttgattgtacaacaattctaattggctgatatacttactcagaatcaaacaataatatcctcatacagaggaaattatagcttatctggtatttacatataacacactccatacataacatcaccacatagcaaaatcttgctttttccaaaaaaaaaaaaaactaaatattaccagttagaactaataaaggatttttgtggtcattagttctcatactgaatattacacataatggatactttaaattcctagaagcactgttaattgccatactttaggatttactcctatttctggcacatcttcttcacagtcccacacttccacaggcgctaatgctaccactgcttagcacaactgtgcaactgtgccagaatacatgtcttgcaagtgctgtccgtgaccattattccactagcatatcatttgattgaatttatcattttatattagaagcttcagaaataattgtcagaggtaatgcaggttctagcatgtcggtgttgagcaaatcatgtgttgaagtgttatgcagtttctggtactccaagttctataaagttctatgcaacaaatatttgggaaagggaaaacacgctcaagctcaacacaaagaacaggtgcagtggtactctattaacatttatgaaccattcaaatcagtggcgtagcagcgcccttgttttttaggaaagccaaactattttttatgccatttgcacaatgccacatcataatcaacatgaattgcacgggaaacaactcgacatgaattgcacgggaaacaactctaggaggatggtaagtcactgaccagtatttgacccctttgcagcgcttgcatctaaacgtggttggccttcggcacaccacgcacacccctttcaccgccgccgccgccgccgctgcctccgcctgacgggccgccggcatttccaactccaccgccgcggcctcctcctcctcctcctcctcttcgtcctcccgcggcgaagccacctcgggcaccgtccacagcggcgcacccgccacgccgcccctcccccgcgcgtagcagtacgcctcgcgctccgcgacctcggtctccaccgccgcgagcctggcgaggcgcc

SEQ ID NO: 45721 - DNA, 3010 bp, Oryza sativa
catcctttaataaaaagaatgctgtttttttgggttcctttttcaaaataataaggtcaactagtataattttctagtgatactgtatcatgcaagattacggcctatgcgacttctcgtgactcggtatcattaggtgcttgatactctcccccaaaaaaagaaacttgatagtactcttttcttttgctttactttaacagtttaactataattttgttttggggccactttgataaactttctggaggaaagaaatgaggtcaccaagttaaggcgtgtgcatgcatgcaggggtgagactttgctccaagcatatctccaagcatgtcagcaaagtgcttagaaaattgaatattgataacccaccaggttcctggccacatgtcattgttgttcgtggtgcaactttttggttgtttgacacatttgtgaagcttgaggtctttttcacgtggggataggttgggaatttggatgccacggttataagtttatcgcataggccacttttttcatcatcgttgtcgacgttcttgtgaaaagtgctcaaaggtcgttagtaagtatcagttgatatagatgggtagttggacataagcatttgtttcttcatatgattataaatgtcaaaatatgctcacaaaagacgtgcaattggatattaaatcatgagatatgtatcttccctggttcactattaatttcaaggctctttatttcactctcaccttagtgtaatgtatgcattctcgatttaatccacggtattaaaaaaatcttgatttgataatacacttagatctttttttctaatggatattgactattattggaactttaaagtttgtattaattggtatctccatctaatcaagagtaacatagcattgggcatgtgcgtatttgtggattgactttaccttctcataataagtctactcacttcttgtccaacagaactcaacgattctataacctttttttttctgagaaacacaccccttcggaagattgggcgggcacaacgtacgcacactcacccctatgagcatgccactaaaagaataattagccataaatgcgagcacccgtgtcaaatctaggatttgcactcacccctatgagcatgccactaaaagaataattagccataaatgcgagcacccgtgtcaaatctaggatttgaacccggtgggctggttccaccacaaggaacctagccagttgagctatgctcacttcataacgattctataactctcaattcttgtcaaatactccatccgtttcacaatgtaagtcattctagtatttcccatatttatattgatgtcaatgaatctagtcatatatgaatgtagaaaatgctaaaatgacttacatcgtgaaatggtggaagtagaactcaactattccataaactctactagctatattattctttgttttcatcaactattaccacttctcacaataagtgtttctactatgtattgttacttctgccacctagcgattgatctacctccaaggcaagttaggtgttcgcttaggatccgacacttcgtatccaccgccgattgctaatttgctatgccgaccgatgttaatatttgaaacaaagctatcagtcattggaaaactctgttagtcaccaagactcaattgtgacattggctctgtcatcagcatacctaaggtacgtttgaatcttctaaagataaagatgaagataaagattaagtgtttcacgtaaaacgatatgataataatatgtgattaattaagttttaattattacaaacttcaaaaatggactaatttgatattttagaacaactttcatatagaaagttttcgcacaaaacgtatcgtttagcagtttgaaaagcgtgccacgataatccaaaattttatcatctactagtatggaatttcaccatgacagttctacaatgaccttacaaataagtaccaccagtgtaatacttatattgaatatattgtatacatgaacgaatactttgcactgccgcttacaacatgcatgtgctgcaaccttctccttttcatgacgccataggccaaaataacttttcaattagtatccttttccatcaccatcagcaaaattctgatagagacaaacttaattcattgttaattaatggaatcttattgtagatccttttaggtagttgtgctttcttccttttcgtgttctccgatccgctgaacattcaagaagaattagttgtgattagctgatatttgttggcatactactttgcgcagttaataattaactatggctgttgattctcaactagatgaaatacatgccaggtatccgttatttaggtgagaaatgtaactattgaatgtatcattttatcttttgcctaaagttgtttcattattttaagagagattataactctctggtttggtgctggcttatcaacacacactgtcaaaatttaaatcataaaacacaattgtagagttggtttttggccttttcattacatatagtcgttttttcagctctggtttttaaaccattaacaacaaaaatataaaagttttagctataaattatcttcattgttacgtttatttttctatgccttacccatcgtaactccagcaataagtgctaagattttatttattgctttttgtttcattctatgattacagaaaaaaatctaagttaacattttataagttaaatgagttggttaatttgagaaaatcataatgtgtattgttttgagcggtctatttatgaaacccaattttaaagttgaaacggtacgaaaaaaaagtgtactatataacccgcagattttagggtaaattaaatcatgtcattgtaaatgtgcctattcagaaatgttatgataattcgtctattcgtagcccatgtgtcgaggagtgatcctctctagcgggaggacgtgaagcccccctttgtgagtttgcccgggggaatagggcgcga

SEQ ID NO: 45722 - DNA, 1256 bp, Oryza sativa
aagagaagctaaagctatagcggcacaagcaagtgaagatagtagaagggaaagcgaaaaaggatgtcaccaaatttcttgcaagatgagttattccccgaagttcaaattcttgaggggattctagtctccgttgaggagctcacaaagagcctggactttgattactctttcctcaagaggttgcacaaagcattcatcctttcactattggaatctcttccctttcggaggtgagacccaaccttcacaaacttcttccgaccaaccacacttatatcggtggctcaagacctagtagtctaggagtcctcaatctccaagagtaaaagattaagcaagaatgtcttagggatgaaacaagtgctcaacaaatcttcacaaagtcgaccacaagcactcacacgaactcaaatccacaactctctgacacacaaagtccgagctcggtggagaggagaaatgagggagcaaggctcaaagtggatcttaaatacaaagcaagctaagggcaaagtattcaatagcaccagcaaccttgccttgtggaatgaggagcgtatttatagcaacaccctcagaaatgccattggtgggtaaagataccctttttcggaaatttccaaaccaagttcagaaacttctgaaaatcaccactaccgaaatccaacgtgaaaagaacattctggatatttccgaagcaccttcggaaaaatccgaaatcactagtactgatatgtgcttcaactcatagcttcggaaatttccgaaaaacaccagtaccgaaatcaacaggttcaacacagttcgaaattttccgaaactctccgaaaaagaccagtatagatttttgcaagttcacagcacttcggaaatttccgaaacagctttcgaaaaaatccaaaaaacaacaataccatttttcaaaagcaaatacactttggaaaactccaaaaaacaccggtacacaaatctaaggaagaagccaacttcagcaaatattactttagcacttttctcattcctagatatcaatacaacatcccctttatagtacggctttcctattgaccgagtaaatgaagatttacaatttaccaatagtttcattattactttccatcaaaagtccatacaaaatgatgtcgcatcgaacatcatctcatgacggactaatgtccttcacacattctcaatagtaagcattagtccttgctaatcagatcgtcattaaccaccaaaacaattagggccta

SEQ ID NO: 45723 - DNA, 601 bp, Oryza sativa
acacctaattcatcaaataaaatactccattcagcccagtaaacaaatcgatttttaaaacaccattagtaataaataaataaatcaaattttaaaacaccaaatcttagcgtggatgcgtgattaacactgaggatgtcggagtaaatgcaacgacgacgacgacgaccacgcagttcttctcagacaccgcgcgaccccgccggtcgcgccagccaccgccacctatctacagtttcccgctgttcctccccccacatcggccgcccgccgccgccgccgccgcgtgccttgcctgtgtgactagtctcgcgcgcggtgacgcgccgccgggagagagagggaaaaaaaagaagaggaagaagaaagaaacagccgttactaccgcgcattcgggggcggctgctctctccctctcctctcacgttttccaccccccaccgcctcgcgggctcgccctcgcgtcactccttggcgcggcctcctccgcggctgctgccttccggagtgttccgctgctggcgttaccactcgcggtggacgacaaaagggagggggggtggtggtggagcggagcgggggtggagcgaaccctaaatct

SEQ ID NO: 45724 - DNA, 755 bp, Oryza sativa
tgactgctgtaccttaggaggcggcgtcttcatggcgctgagaaagaccttgcagctcaagaggtcgtgattctttgtcttgtgaatagaacaatagacatcacgagttggagaggtacgctgaatttcacgctctttgcaggcacgaatttcagcatggacgttgagaaagactcagcaggcttgcaggaagtgtttcctggttttgtggataggacaccaggaccttgtcacctcggaagtaatcctcgtcggctcgtgattcctattggaaaaacaaggcttggccgcactaggatccttctcgggctcggatgtcgtcgacgttccgatctccgcttcggcgggaggatccttcgacatggagtcgccccgggttgtagccactgcgttctcgtttccggctattggcggaccagctaagatcggcactgtggtgtaaaccggaaagacaatttcgccgacttgagtccacaccagtgttgttgaagtaggaactccttagttgaggttggtgttgacgctgttgtcgacgaagctggatgtcatagtagtagaaccttgagcaccaagtgcccctacctagcgcgccactgtcgatgggggatacccgtaaaccggatatagagggtattggggtacgctggtacgaggatctacatagtacgacatcaagcaaacaggaaacatggattatactggttcaggccccttggtacgtaatagccctaatccagttgatatgggattatatg

SEQ ID NO: 45725 - DNA, 675 bp, Oryza sativa
aaagaaattatttaatttaatttagttggggtagggttaatggccagtcatgatcactttggtaatcacttttagctgcctcaggtccgatggctttttgtcacaaatatgaacacatgttgtgcagagtactgaaaagaggtctttaaaagcttctttttttcaatttttatgaaagatatatatgacttcctaattaattaattaattaatacgtcataattaattaatacgtcatcagtttaagtgaaaatcgatggaaaaatattttttattaaaaatagtatactttttagtacatatttgaccgtacgtcttataaaaaaactttcatgaaatatgtaaaattatatgtatacatataagtatatttaacaatgaatcaaatgataggaaaagaattaataattacttaaatattttgaataagacaaacggtcaaacatatttaaaaaaatcaacggcgtcaaatatttagaaacggagggagtataaattagttaatatagatcataaattgataattaatggtataaaatgtagttgtgtaacctttattttaaaccgtgtgtttttaaaaataatggttctaaataaaattatgttatattgttaatataatgggtaaaataataaatcccaaaaaaattttatttccaaagattatggatctaa

SEQ ID NO: 45726 - DNA, 703 bp, Oryza sativa
ccaaatggtagccaacgttctaatcgttaaaaagtccgggtccggaaaatggcactggaggctgaaagcaatggaccattaaagatttgcaaatagcggactccacctagcctattattgaggatttatttatttgtagggaaacatatggataattcagaggattccaatcttataggaaaaattgtaaggaaaatcattgaaacctttttttaaaagaaaaattctatgaaatggataattctataaagattttgaagaaaagttagcaagtgttacaatctcctaaaattttttttgtttgaatctattgctatcatctaattcctgaggttttttccccaatggtctatttaaacaaccagtgttttatactcatctgttttacaattgtattatgtaaaaattttatatttttatatttctcctttttttaataatgggtttcaaatgagccttaatcgtactccctccctcgacctatttcattctttggtttttttccaaaagtctaagtcttatttgtagttatcatgtactaaactaaattgttgatcggaatctaagaagtcatcttagtacttattggttacatgtccattgattttatcacatggtgaataaattaattgctccttagtcttggtgcagtaagaaatactccctccttcccaaattgatcatcatataatgaaaattaaat

SEQ ID NO: 45727 - DNA, 592 bp, Oryza sativa
gctctctgatgcaaagatggacatgtttatgagtagattttgggatttctccctgatgtgcaatcatgccaaagatgtctaaattgaatcctaatcatttaagattgatcgtaaatattaattagtttctcccattacaaagctcgggcacatttgctagttccagtctaatttatctttctttactcttctaaaaagaggagttgaggtgattggtgtgttctcacccccacattataagatctttagtggttgcatatacgtggtaacaggatatttatacgttctttgcattttttttatgtgaaaaaaaggcattccatggacgtatgcgctaattggttttatgtaaccatgtaaacaatcttgaggtccgaggtatttttttttgtatgtgtgtaatcttatgtggccactgcacatgccattttctgcaactagttgaggaatcctatacttattgttaatttatgttgctgcacttttgcagtttgatgttacgttcccagctcttccttgttcacttgttgctgttgatacaatggatgtcagtggagagcagcactatgatatagtatgtacgacagttttc

SEQ ID NO: 45728 - DNA, 1821 bp, Oryza sativa
ccccccccccccccccccccccggttcccccgccctgtcgccgccgcctcctcctctcgttccagcgcgcgagccagagagagagagacgggccacggaaacgggtagtaaaccacgaatcattccgcccgcgaaaaaaacgattggcgacaccgggtgggcaggcaggcaggcaggcaggcaggcgaccggatgattgatcgtgtggttgattgattgatttcagcgaccgagacgaagggaggggaatgtgttgatgttgctgggtgtcgtgtccaggaaaggcccggacaggaggaatattaagcgcgaaaaggcagccgctttgattcaccaacactttgattccagcgacccatgatctgtcactctgccggacaaactgctcactcctcccgggtaataaggctagcctacactctattactcctagtgtgtgtattcttttttgagattatacttggcgtaggtgaactgtcccggtcggaccattcaatggggattctttcattggcaaaaaaggacgtcttctctcaacagtgatagactgatagtactatacgagtacagagtatgtatacaagcagtaatgtggtagtatcaagtagagtatatactttgaaaaggttgtgtgaccactccggctgattgcttgagcttggtgcatctcatggaaagtgagtttatgtattaaaatggctattgttcgaaggcgaaaagcaacagacgaaattgtcacgaggatatgatgtgttttttttatcagctactactcttcagataatggttttcctgtataacgaaaactcttcggataatggtgataagctctaaacaaacgagagtgcatgcatgcacgcaggaatcgtggtagttacagagcgttaaatcggtacggtttggttccttaaactattttatagcccgtctcgtacaaggttatgggtcatgactgtgaaatgctccggctcgagaaattcagagatggggcatagcatcttcagtgcggctgtctctgctccacaaagcctgaagccgatatagtacagagaaaagatgtgctctttctctttgatggaagcatctggtgttttaataacatccgatggtacgcgagatttcgtctggtgatactgctttaggagctcggaggttaattaagttgaggcaggccccgggaattgccatcgtgggccatgttcttgtccccgttagtggacaagatggttacatcgatattctgtcaatgctggtgttccagagtccaatcctttagtaagtactgtagacaagttgtgatcaactgatcaggacaggttcagagacaactatgcaggaattatcctctctttattggatttatttataacctgatattggtagatatttaatcctttcttttttaggggcaataatgttagtggacgaaaatatgtcaagcatttttctagtcatttgtcccttttgacaagttaaagatctcaactttatggaaaacagaaacattcttattttttttataaagttcatgatcttagcaagagaagaaaattaaagggtatattcgcaacagatcaaagagcaatgactaggaaatcagtcagatcttcccccatatctccttctagatacaaagttttcaggatcattcaggttcctaccatctttcaggtgcaaaatacctttctattgtgatcacaagcaaaatatgcattctgcacaaagtcacagcaagccccagcagattcttttctctttccattggtgatatcaagaagcaaagcgtttcctaccctgtaaacctaaggactcttgaaaccg

SEQ ID NO: 45729 - DNA, 1002 bp, Oryza sativa
ggcccgtgtaggcttgcaccgcctccgcgatcccttgcgccgccatttagggcttggggcgagagagggaggagggagcaagaagagactagagcctgcctgagttcggagtaaggagggtaggtaggtaggtcgcccacgcgatgaacacgtcggctttagcggaaagggccggggaagaaaaggtgggcgcggcggccaacacggcagagtagcagacgggctccgcgtgcggagaagagtggctcgccccggggcgtgtgcgtgcgggcgagtcgacaccgaccaccaccaccacagtaccacaccactcggtcgcgggcgtttattgggccagcaaacacggtattgggcttggtgcgtgccaccgagttgtgggcttgtgatctgtaggccttggcgtggctgtgggtttcggccttttcgggtcgcccgaaggccggagtggagcggatcggatcgtgatggaagagcacggcccctttggtgaggagagccaatgacatcgtcgtcgttgcggtttgttagtgtttggggttctggccggcgccctcgccttaggaaattctggtgagcttcattcttcgccgtcgatcaatccgaggagggaattctggtgagcttcattcttcttcggtatgttgtgtgattttggatttgcccttctgttgctgtgttttgatttgagatttgatgtgttctctcattcatatttcgttcaatactctacttttctctctttttttgagatggttaaatattgtgcctatgttctactttgctctctttttttgagatggttaaatattgtacctatgttgtgtaccgcagtaccggatagagcttttggtttttctacgatgtattctgctatgcctgttcatctttctttaattctttacaacaaggtttactatttcggcacgaggttaaccatgtggtcatagtgttgtaaatcattaggttctgcctgaacataagaaacaagttaatatcgtcagt

SEQ ID NO: 45730 - DNA, 635 bp, Oryza sativa
ggaaagcagcaaccgtcgttgcgcaacggcggcgacgacggcgacgacgctcgtgaggcaccgaccgagcgagcaaatgaggagtgggaaggtgacgggatgctcgaccccctctcgtcacgctgcacccactggagggcgcgggtgcgagccaggttcggtgcaggtaacgtaacccaaacacgcccttatccgcgcgcctcatcgcctcgccaagacgccaaccaaacacacaccccttatccgcgccccgcccgcccaggaaatcccgcgcggccaatcacagcacgcccgcccgtgatcgcgagatccgacgccccacccgtgatcgcgatcccactcccctccacccgcgcgggtacccccccacgtcgcctactcgcctcgtctccccgtcatcgccaacgtgtcgcggctttccgccaccaaatcgatacggaacccggcgcgcatccggtcctctcgtcgaggcgagaggaacctatacattcgccacactcccctgcttcgcttgcttgccctcctcttgcgtagggaaaaggaagaacacaagagcaagcgagagcccagaaatcctatcctcgactggaggtttttgtgtattgtatagtggtagatttgggtaccgagctcga

SEQ ID NO: 45731 - DNA, 599 bp, Oryza sativa
ttaaaaaataaaatttatttttaaattttataataattactcaattaggcatgctatatgttaatggttcaccttatatggtgtgccgccttaaatcccaacccatcctccgctccgagtcaactgaagtttgtttgttgaccaacttcatggcggtttctgtttatttgacccatattttatccatgtggaagaatcatcaattttgacattacgtaattctttgggccctgagtccctcgtggtttatctgaaattttctggtcgatctgttccaatcactgaaagattaaccatgatatctaatctactttgccttcatatttcaaggaagggaataaacactactacaaaataggttttttctggcattacatcttttttctccaatggataaaatttgaaacgcttgtaaaaaataaccgaaggcttatggttaatgaccgcttatgaaaatctattatcactagcacttgtttttaaaacaaccgtcggtaaaaatagccctaatttcattagtggcctttttggacaactgtttctgaaaataaatttcgcaaatgttctcctgcatagccacttggaaaagaaatactttg

SEQ ID NO: 45732 - DNA, 784 bp, Oryza sativa
caataatttgacatcttcagaaacttaatcttgattacaaggaaaaacttacacttgactaccatcaagcaaactgcaaacagcatgctcttttggcaacaaatgaaccactgatcaatgcttaacttgactattgagttccaatgcgctgtggagatgtattatagttgtttgtcagacattttaaatttaatgaaaagggtatcagacgatttgcctactgctttaatgttcaggcattcagggctcacttcataatattaatccgttaaacgagtgtttcagtgacacaagtaggattggtatttggctattagagaaatggtcaaataaattcctcaaaatgatgtcataaacctgactggggtaagcagagacagatgccacttacttagaaggaaaaaaaaaaactgggccataacttatggagtaaaaaccaaagcaggctacagtacagattggtacgcaagctagtgaaaaatttaattaacaatcatgcttgcactattgtacagctcaatagccccatttcgtatttgcgccaagctcttatttgtggtgtgcctcatttccagtagtaataattagtaaaggaccctaatcacatgaatccagcaattccatctacacgaattacttctgcaaacgctcgctcaagttcggtttaaagagacagggaggtgttcgaatcaatgatctcccagcgtactagaccatgataaactagtgatgccgcaatctgccaatccatgagatcaagaagcacacacgagtactacactgc

SEQ ID NO: 45733 - DNA, 6483 bp, Oryza sativa
ctccgcaagacctaagacataaacccggggctcaccagtacaaaatcaactactttcccaattcccaaccacggccaccaaagtctcctcccgctcccggaatgcggcaaccccgacaggttcctccccccgaaacttcaaaaccctaccccgcctaccacgattcgatgatcccgccagagcgagcgcagaaatcccgctcgatcggcgcccaaattggagccagaaaaaaaaaagcaaagaggggaacgctcgcacgtcacgtaccctggggtccttccgggatcaggaggatgaggaggaagacgaggagaggaagctccccaccctggctcaggctgcctttggcctgggctgtggggattcggaggaggcgactcgaggaagctttaaaccgaggagaaagagagcgagagatggagagaggctacgggaacgggagagaagaaaccttcggtccaaaggcaaatgtggagtacgactacgagtgtatgactgactcggttcggctgcttgctgtcacgcggacgcggcgcacgacacgttagcaaactttcgtgggctgtgccgtgaccgtgaagacgaaagcccacgaagaaattcgcccccccacaagcgaagtgtatccaggccgcccggccctagcctcgtcgcagctctccgcaggcggcagggatcgcctcccgcccgacccggcgcggcggtgatgatgtggcgggcgggtggcgcgtcggggtcgtcgtcatcgagaggcacttcctcgtggatttgtatcaggtgcagttggtactatcactataacttacgcagtccactgccacatgttagatccgaatctaacggttcacatgcacccggatactgtagaacactgtagcaagaaatgttcagtattttttgcgtcagtactgtagctgaagatctggtccattcatcaccaaaatgaacggttgtaatcgcatgcattagtttaacttgcagtcgctattcctactgcaagtgatcccaatcccttcctcgtccgcaaccgctgctcaagatgacaaagatgtgttgaccaagacgagaaaaatgtttttctatgaacaacacattcttgcatttagagaaaaatgttttatctctaaataaaaaatgttttgaataactaaaataatgaaagatagtggaatcaaagattaaaacatttttgtttcacacatggaacataaagtttacaccgtttgaacatcgacagattctcaaagaatagatgataaaaatgtaaaacaccattaaaatacacattgcaatatttcaatttaactcaaataaacattaagataaaatagactgaaatatcaaaaatcacaaaatttacaggtatagatttggcttatttctcttctccggtggccaaatctagacccacgtcggaatggttaagcgatgtggtgtgcgggcgtccaacgcgaagagtttttgatataatacgggcctgtttaggtcttctggcaaaattttacaccatgtcagatcgaatgtttggacatatgcatggtgtattaaatataaacgaaaaaataactaattacacaaattacgagacgaatcttttaagtctaaatgcgccatgatttgacaatgtggtgctacagtaaatatttgctaatgatggattaattaggcttaataaattcgtctcgcggtttacagacggattctgtaatttgttttgttattagactatgtttaatgctttcaaatatgtgtctgtatatccgatgtgacacgccaaaaatttacacccctgatataaacacaccctacttcagtacttgtatatattaggcatgagtaggccgtactatgtactcacatttgttttccatcaccatttgactcacaaaacatcatcactcatgcatctttacctcccattacaaaaggacgatgtactggagatctggaatgcaattaataatattatataaaaatcactccccgtaccgtaataagttttctttttagtttctttcatttgtaccaaagtaagttcatttataaagtagtcattgcatgaagtttgtgaaactagaaaataattgtattgggagtattgataggccatgtttagttccctaaaacttttcccgaaaacatcacatcaaatctttggacacatgtatggagtattaaatatagatacattaaaaaactaattgcacagttagggaggaaaatcgcgagacgaatcttttgagcctaattagtccatggttagccataagtgctacagtaacccacatgtactaatgacggattaattaggctctaaagattcgtcttgcggtttccaggcgagttatgaaattagttttttcattcgtgtccgaaaaccccttctgacatctggtcaaacgtccgacgcgacacccaaaaattttcttttcgcgaactaaacaggccctgatatttttataaagtaggtatattctatttatgtttgtttgtattgttacatgggttagatgaaaaataaacttattttgagatgggcggattatgtatagagtaaggccaagttcaaacacacatgaacaagaaaaattgcaataattggagtagtatgtttttcaattctacaggaattgaaaaacacatgaaacaaaagatgacctttttgattaaaccataggaaaagctgaaccaataaagtttccaagaggtttaatctcttgcttattttcctttggaattggcactatgaacacaatttctatggaaagtttcatatcttcttcatgtgaatcagaggggtttattgggaaaaaaatacaagggaaatgaatcctccaaaaatcttttgccaatccttcctctaggatttgtttcctatagattattttttttgatacaaaaattttcatatgattgtaatctgctgacctgttccatgggaaaataagcaagaagttagacttcttggaaactttgtttgatttattttttcgtgtgatgcaatcaaacagcatctttcctgttttttgtgttcttcaattctggtagaattgaagaaacacaacaattaagtctctacatttttttttcttcttatatttttcttatcatgtgttttaaagggtccttacatttaccatgcatgtcaatgccttttcaaatactatcggagtatcgaactatataatttaatgtgctaaaaagaagccattcttgcgactgaggtagaaatttccaccgtcatatcatattgtcacttgcgaaaaggattcctgctaatagaaaaaaagataagaaaaaaaaaaggaggattcctgcttggtgagtgcgcatagtacgaacgttggaacttgaagtctccaccaccttgctcttttatttttgcatcccagctgcttatcatcatctagtagtatcattctactatcaaggtctccaataaggagttcatgtagcccccaaaagattaagcatattattagccacttgcagtataatgtccccagaaaatcatttacaagtacagtctcttcgctccgttcatagtctttgccccttttggaataaagggcagtgtgtggaactagctagcttatgcacacagcaacaagtactggtgctaaacgattagtggaaccgatccttttttagtgacacaattttgtagtaatatcagccgttagtgcacaactgcacatcaatgatgcattcatggaactgagtagcttggacgtacaattatcatcatctttaaatggtgcagttctttctgaaccttccattgtgacaactgtcatttgagttgatcgagcagctaatccacgcattagagagctgtggggtcattcggccggccgcttagtttgtattgtagttttacagggttttgtcttatatcagctaatcctgcaatgttaagtttgatagtaacctgcattcatcactcgagtggacgaagaagaaatcggcacagtaagttgtcgacgggtttgtacatcacatgaacttgtccctctaataatattggtggacgcaggattttgagagtgtgggtattcaagatttacactatgaaattgaaacaataaacgcttgtgttactaacggaaatatgtgtgttttttttaattaggtagataataaagtacagaaaaatatagtagaagatgaattatcttgttagcttaccatgattttaagacatgatagatgtatttttcaaaaaaaaattgtcttgcaaaagaaaaaggaaaataggagaaaacaatcactgtaaaaaaaagcaaggcgttgctgagaatctaagggcctgtttagggagttttaaattctgagaagcagctgtttaatagccagcttctgagaatctagaaaaactctgaaacccagcttctggcttcttatttcatttttcaaaatctgtaactatagattctcagaaactatggactgtttagggtagcttctaacataagcagtttttgggaaaagctgcagctagaacaagcttcccaaacaggaactaaggcttcaccactagctaagattcacgggttaactaaccgggcaacaacaactacaagttcagcaagtcagtagtatagctaaacttttaagaaatatatgtgggtattcacttgaatacctatgattaggatgtactccctccgtcccataaaaaaccaatctagaactggatgtgatacatcctagtactacgaatctaaacatatctctatccagatttgttgtaatagaatatgtcacatcctggtttagatttattttttgtgggacagaagaagtaggcctatgctctctgacgcatggggccatactgtaggggtggacatctcacctgttagggacttatatctctctgattatatgtcgaggagttgcttcaagttgtttggtttgaggtttgaacgttaatccattggctatcatcgaaagtaaagtaatacctctgtctaaaatataataacttttaacacctagaatttgtctcaaaatataacaatttcttcatcaacattcatttctcaaccaatcacaaccctccaccattcacttttcttacctaccttcacttctcaaccaatcacaaccccttcctatttaattcttcctacttttataataatcgtgtccaactctaaaactctttatattctgggacggagggagtagcaattattatcatacataaaaagatgtaattgggatgaagcatatggtttctcggcacaaacaaaactaaggggtgtttagattaggggtgtaaagttttggcgtgtcacatcgggtattatataaggtgtcacatgggatgttcagacactaataaaaaaactaattatagaatccgtcagtaaatagcgagacaaatttattaaatctaattaatccatcattagcaaatgtgtactgtagcaccacattgtctaatcatggagcaattaggcttaaaatattcgtctcgcaaattagttataatctgtacaattagttatttttagcctatatttaatactttatgcaaatatttaaacgttcgatatgacagggtgtaaaatttttgggtgggaactaaacatggcctagcaatctgaattttgcgtccgcctcatgcgcctcggtaaaaaaaagtattgtcatcctctacgatgttattgctagtagtaaatagtaatatatatttttttataccgcactaggtatgattggtttttttttgggtagtatacatatttggagtggaagaagtaggctattagagaatacgaatccaatgataagattatttaagttcactattggcttttttgttttcaaaagccatgtcgtaaggacaaaaagaaaaacttttactgataaattattatctgcctagttttgatgatttatcaaactgttatcatgaccactatgtgcaaatgtactatgcatgtaaaccatttcatacccattgtttcgctcgcctatagctgattatccctaaatcttattaacaacaatagtaatttatggataaaacttttaaatatgtgttttttgacttgtaagtagatattggaaaacaaattatactgaacaaactattaagataattgaagttttaatattgaaaattttgactacggctgataagttgatgatctaatttgcacacaaccatattagccgctagtgtgtccctttaacaaacacacgataaatgtggcgaacaataaatttgtcaacctccctaaatccaattgaaaactaaattctggcaacctagcaaaatgcgtgttagtgattgatgtactccctccgtcccataatataagggattttgagtttttgcttgtaacgtttgaccactcgtcttattcaaaattttttgaaattattattgtcggtgacatggggccgggggtatcgtgactagaggcttgggtagccgcggtcacccacgtggcctgaccccctcggggg

SEQ ID NO: 45734 - DNA, 654 bp, Oryza sativa
cctatagttattaaccagaggaaaagagagaaattttcctttgtgcaagatgcaacagaggacaagacggaacaccatttgattggacagaactgtatcgtccgtgcatcgccagacgtcctctcataaccacttcagagcgaggccaatcacgcagagacaacgaaataaaacaaaaggctagggggtgtttagatgggactaaaactttttagcccatgtcacataggatgtttggacgctaattaagagtattaaatatagactaataaaaaaactaattttataaatgagagctaatccgtgagacgaattttttaagcctaattaatctataattatcaaaagtttactgtagcatcacattgtcaaaatcatgtcgtaattagacctaaaaaaatcgtctcgagaattagtccaagcttatggaatgagttttgtaattagtggatgtttaatactctaaattagtgtccaaacatccgatgtgacaggggcttggaataaatccctgtaaaccaaacagcgagcgtacgggggtgtttcagttgaaggcaggcagttatagtttctgaatgcttgatctgctagcacacctaccatctgttgccatttctttttctcaagcttgcatcatcatgctagaaaaagaat

SEQ ID NO: 45735 - DNA, 625 bp, Oryza sativa
atgttatcaatatataataggctgcttgggctcatatgttcacacttttggctagcagctacaaggttgcttctatcactttgtccgctgggataatatcacgagtaaagcagcaccatcaatgcccagtacaagcctacaaggtaattttatcgtcaatacaagtgtcagaaaccatataatgctcaccaatttgtggtttatccttttagacaaactgacgttttggtttcttaccgcataaatggagcagaccaatgtcctctgcaaattttattcacaatctgcctattctatataattctatatcactgttcattcattcttcttactgcacaataatcattttgtacaaataaatatgtagtagctttttgatgttcctgcaatatttgaatagatgagtgtaaaggaatatgtttattctttgcagcaggcagctaaccactgttacatcttgattagtaaaaaaatattgctttatttgcatttcgcattttttgaaacccctatgagccatttattaggtttttgggcagcacatgcttttcatgttagatttcagagcaaaatagatggaatgctacaggttggaaaataaatatcaatgccctcagctaaggtc

SEQ ID NO: 45736 - DNA, 1004 bp, Oryza sativa
  unsure (1)..(1004): unsure at all n locations
agtccaagatgctctctcagcaaagacaagccctataggtgtataaaactatgttctactatacatgactgtgctggggaggagtgggtttgagctgtccattagtgtagcttagttaaattaattagtgaggtattgaccattnacatcgggcgacggaagagtgtccatgcatgtcttgggcatggttttggatggactaaatgaaaagatggtgcttgtgtcccttgaataggggaccctgccccaaaactggcctcagaaagagcaattaggtgtctccatctgcagcagtgtatcataattatcattattgcttgttttttttgtaaatctacccttcccaaacataacatgttcacaatcatagtcaacaaaggtagataatttgccttgttaattgtttgatgttctaaaataggacaaagcaagggtgtgtatgtgcaaattaatagcattagtcctcagtatagactgaggtggaattatttggttatttggactttgcacgtgggagtcagggggaacaacggaattaaacctctaattccaacttgctccaaatcccaatctctccattcttcttctattccctgcgatgctcccttactttatctcaccattctttactgatttatatatctgatctttggtgcatagtactattggcattggttactttacttctcccaattagggatctactgctatatagctagatagctagctaggcaaatttgaaacaagttactgacttttgtatgctctctctgatcttgaaaattttgacaggctaggcagttcgtcattgtcaacccaaaaaatcttgcaatccaaattgtatttcatcagtagatagtgactggttaattgtgtgttttgatcaaattttgtttgaaatcatattaatattattccagaaataccttcaaaagttctgcctcccacatcaaatcctcgctttccaatttttgagaatattgcatttgaaattcgtgatagat

SEQ ID NO: 45737 - DNA, 4933 bp, Oryza sativa
aaaatattaatttgatactaaataaagttcgagtcgaattttaagttgctaaataaactcatgtgaaaaggttgtcaaaagcaaagttgtacaactcattgagacctaccatttttcttttggtcattttgccatccgagtttgatttaactatataaaatttgaattttcaaatataataaattcaaataattttccgggtagtaaatgatttgaaatgaaaaaaattgtcaacaaaaaagttgaatagctcatcaagatctacaacttttgttttggtcatttttctatatgactttgtttcgacagtttgaatttggatttcaaactatgacaactccaaacaacattttttaaatattaaatgatttcaaatagaaaattcatcaataactcatcgagatctataactttttttttcgtcatttcttcatccgacaaagtgatttgtaaaattgtttataaaatgtacatatctcttatatagttttataaactataagagagatgctaccatcactttgttggataaagaaatgatcaaaatagaagttatagattttcatgagttatacaactttgttattgataactttttcagctgaaatcatttagtatttgaaaatattgtttgaagttttgaaattcaattttttgattgataaaacaaagtcaccagaaaaaatggtcaaaataatagcaggaagaacacaatgatataatagagcatgattttagaaacatttaggaaaaagaatcatccaatttagagttcgtatgagtgagatatactagtttcaaattttttaaatttatttttgcatacggctccttaagactcccgtatggaaaaatcaatttttccatgcgggcgcttaagtgagccatatgcaaaaatgtttttgcatgcggacctcttaagaggcccgtatgggaaaatcgattttttcatatgggcatattaagaagccatatgcgaaaatgcctctcgatttttgtagacgccactagttatggtccgtttgcaaaaatgaatgggtatcatacagaaaaatcacttttgaagtaatgtgatgcaattattatcatcgtagatgacgtagttgatgccgtcgacggtgcattgccgttgtagaggacacgatcgatgtcgtcgaagaagcgtattgcaaatgtatctgttagaggatgcgaggtgttcatctatgtggataagtcggtggcggcaagttgatgaagaccactggtgttataggatcggtgaagacgatcgcgtagtcgtacaggctatagatgcagcggctggcccgatctggtgtcacagttgcagcgcacgtcgttggcgaccacgtgtgggagttcggtgaagacgttcgtcgcagctgtagattggctttggttgattatgcacgtatacattggacatgcacatgtcttgccgtagaggtggtgatgatcgctagatgacgtcgacgttgatcttgaagcagatcagtagatgtacatgcactttagtttttttttgaccggatacatgcacttaagttgattggatgaatagctccatgccaccggggccacgctgctgcttctagtgcttggccggttggtggcgtggtgtggtcggcttgttgcagattgatctccgcgacagtgttttggaaaacggccgtatatacttaaacggtagtaaaattgttccgttaacgtgggtatacatttattgttcgtcaacgtcaaatctccgtttttagtgattagttggtcgttttccgtttaatcacacgaataatcatccgtatgttctattagatgatgctttagagtagtttttaatttaatttagaattatttattacttaatttagaattgtttatgttttacttatataatgcaaccaattctaccaccaccatgtgatgtataaatacggttttagaagatttaatgtttcacttatctgtttaattagaaaaacaacatgaacatatttgacttacatagttgtacccatctaaatcttcaaataagtacataatattataaaatttgtacatatatttgcaaacgttaaactttcgcataatttattaattgtctgcatttcgattaatcggtgaacggtatcttcttcgtccgacaaccgtattccgtcttccacaacactgttccgtgatgagaagttgatcggcgagctcccgctgctctggctctgcgtgctcccgcgctgcagcagcttgcacccacgcgcgcggcgagcacgttgatggcctcgtctgtgcagattggtggacgccggtgtattgatctgctaggtgagattaattcctgcattgctttctttttctcctgtttgctcatactggcgtggcttccgctgcttctcttctctcgaggatcatagggcttttatgtagctaacgaaggaattgatctgatgctaattgttagctaatctacagatttttgttgtgggtgactaagcgccggtgccctaggaagattatggagatctcatctccccgagacaacgcgcgtgcggaaggtaggaatggatcaaatgacgttggtgataccatgtgaaaattctaattgttgtattatgatgtattacatcggaaactgcctatctatttggtgatttctaaaaaaaaacacttagattttttctacccttagatttatatccaacggactatacaaaagaaaataacaaaaacatatttacttacacaacatttttatcaaaattacagtgcacttacatgttatatcaactgaatttacaaagtataattttagttatataggactgtaattttatattttaaataaaataactaacacatgtttacttatcaaaattacagtgtacttacatgtcatatcaactgattttacaaacgtaattttagttatatagaactatagttttatattttatattttatattttattttagtttcaaatgtcttaatttttcaaccgttaaagaaatcaatttttatttagaaaagaaccgggcctaagcatccaatgcatggccttatccacgcatgcagcctccaccaccaattcttgcacaaatcttagcgcacatatcgtgcggccaaaaaaaaggtggaatagctagaaaaaaaatcacgcgacagatatctagcaaaaagttacatcgaccctcttatagggtatatacaggagtgcataggagatagagacttgtagtacaatataagtaagagtagatttacctctaggattctatctttagaactctattttatctctaggattgtatcttatctctatattcgtatttaattcttatctctaactaacatatgtgtacttttaacaagaataaggtaaaagcacttcataaaaaaagaagacaagtaaaagtctacctaaatttattcttaaaaaaacgaactttaaatttgaatactggtttggattttacgtagtccatagaaaattaagcaagctggaccggagagatagaaaataaaaagagcgaggcagttttaactcagacagtggtgaacaaagcagggagccacaacaatcagataattaggcccatgggtatcccctaccccaatcacataattacgcccaacgatcatatcaagtatccaagattagcccactagcccagtacgtgcagctgccggctgccggagcgtggcttccgattctttgcctgcaggcagcagcaagagtgagccctttttttttttttgtttaattggatctatatcaccctagacggtaaaactaactggagagcgctcttcaattagtcttaaccagagacacccacgtgctagtactttagaaattttggttgctataatatatccaatagtgcatatcttgtttttcttcttataaaattctctcttaaactagtaatccaatctacaatctgattacaccattacgttcgttgcaattaaatctttacaacaagatcttacatgattatattacgatgaaaaataggggtgcctacggctcgggcgcccgacgatttcgagaaaaatcgggcgctgacgtcagcgtccgatttacatgcaaaactactttaaactgatttttcttctaaattacttatccaaatcatgatccgattgcaccattaaattcattgcaattaaatcttcaaaacaagaccacacatgaatatattccgacgaaaaaaaatagcttattattaaaatatttttaaatattgtgcgatgttccactaggtatatcggaattgtttcactattcagttcactgcaacattatatctatacgtagtgaaacattatgagtacactaggtaaaatatttttcggtggaacaaaaaataaaccaaattcccttaatagggggtttccaaaatatgtgggtttttttgttgcaatggattatttcagttcactgcaacattagatctatacatagtgaaacattgtaagtacactaggtgaaacaacttttgtggaataaggggagggataagtgggtgggtctagatggggagaggggagcgcgcgcatgggggaggggggagcgaccgatttttcccacctccctccggtcgcccgattttaatcaattttcaaaaatatttatatttataaattacttttattatatacgtaagttacttttatcttatatataagttacttttagatttgactaaattacttctatacattcataatgctctaagttgattatttttattattgtttttagttaattctatattttgtggactttataaatcttattcagctcactccaatataattatttctactatagagagttacttctattgcataactaagttacttctgttgtatataattatttctactacagaaagttacttctattgcataactaagttacttctacaatttaaa

SEQ ID NO: 45738 - DNA, 602 bp, Oryza sativa
tctccgtatctccttaagtaccatatatatatgatatatcctcttacaaaatatgtatcgtgcatgcgtgacacaaaacaaatcatataacacaagctagcttagtaatattgtgccaaaaaatattaaaaatctgtaaggtatcaatagcaatctggccaccaaatatttccggattcaacaaaattgcacaagatagactcctgtaactgacagaaaagggtggctagtaaagggtagcagctaagatgtcaatttcctagtacgacattggccaacacatataacttccaggcaaatgagcatgcacatgcgcatatttagcttaattatattaaaaaaaacctatattaaataacactaaataaattaataatcagcctgtcaccacgaaccacaccaagtctagtttgcactcctttatatgtttaattatgtgctaattaattagctctgattgagaatacaatactaccaaatggccaatctccccaaaataatgtctaacggttctaccagagtcgctctaacggttccaaacggcaaactcgtgagatttggcttgaagccataaactgttgaagattttcaccaatctgggt

SEQ ID NO: 45739 - DNA, 751 bp, Oryza sativa
catgatttatattttatatgcaaaatgtttttaataagaggaattgttaaacatgtgtcaaaaatcaacggtgttatttgttaaaaaaaacagacggagtagtatgcttatagcttagttgtttctttaagcacctatttaaagcgtctagcatttgaatactcgtgcctgtattgtggcacactggacgccgagctggcatgagtactgaagatgatcagtaaacacccgtacgcagatgtttacagaagtatcctgtgaagttacatggcaaacatgtgcaataaacttgtaacaaaaaacttttagctgcatgcctgctcctcctgagttgtaaaactatatctaagctgacagtttaattttatgattttaattgatgacatgacggccagagcccaaatttgaccactcaaatctcagtaataaagctatatatatctgaatatcaggacagaaacacccaatacatatgaaattgtttagatgtgtacatccctattgctgtagaggcctggttttaaatcaaatattaaaaaaaagaacatatgaaattattgatactcatatgtaccactattagccgtacgtaattttttttaacggaagacacaacgtgtccattcattgaatatagaagcagtgttatttacaggtaaaacaaaacaaggagatatttacagacaaagcagccttctatggcaacatctcatctaggcgtttggctcccgctagtgcccaagatcttgac

SEQ ID NO: 45740 - DNA, 513 bp, Oryza sativa
cagggtcacacatcctctgcacttgtatttgcatgcatccaactgctcctagaatatacggaggacatgaagtcatcaagtgaaggaccaaatatattttcatggaacatgttgccattttaagggattaaaaatgtacagtaaccacacaaagtggtgcgaagttcatgcagccactgcatgagacaaaacaagaatatatgagcccaccgttgcagcagcaggcaagaggaggtttcgttgtcagggcagcctatgtatcttctcacattctcaatcatgcaactgccctaaaaccccaacaataatcttcatggatgttcaacatgtcatgtcattcagtgtgaagcttgtcgcggatttttttttttttttagtttcaagatattgcatcttgaagcgtcgatttggatgattgttggagcaggatggtagtgtgaaccctctgttgataccggattatgattctctaccataacttctttccttacgtgatcacttatatgtgaacct

SEQ ID NO: 45741 - DNA, 2368 bp, Oryza sativa
cgccggcggcggcggcggcaccgcctcgtcgttgcagaggcttccactgcagtatctggggtgcgaggcagccgacctgctcaggttctccaagtagagagattatccctccatgcatgcatggatcacttgaactaagctagcttaattagctgccaccgataaatgagcagttgatgatggtgatgatgatctgaatgatcagctcatgtttttttggttagactggttaatttgatcttccttttggtatggagcttaatgcttccaagtgtatatacactctatgctatgctatgctatgttttcccatgtgcatgcatgcaaatgtggctttgaaacctaattatacatgcatgagaatacttaattaatatttctgattttcccatgcatttttggatttaagtgttgcttcttaattaggatgcttcataattgctggctgatgaatgagaaccgatattaatttaccatgtgctttgcttgctagagttcattaatcaagaactgtcattatatattgcacatatatggattattgctcatgttgtgtttaaacctttatgcaatattatgttgggttaaacattgaggtaagctcttgataataattgatagaaccaaggaactgcatggattatattatttatcttgctctggattatgcttttatttttatggaggtaggtgtcactttccctctttgttcgtgcatgaatggtttggacgtttggtgtctattcctctactgaaatgaatgaatatgttccccttcagattaaggataaaccatgtcaaattcgtgttgaattattgtcacatctacttcttcattgttggttgttagacctgattgaagaagaaatcgttagaccttataagagaaaaaccaaaagacttaatttctttttttctcttagatgtgcactactcttccacaaggtatcttaaactcagaatcatatcactaatatgcatggtttaaatttcatattgactctatacatatcaaccatttcatcaatcaaggaggagctagtttagttatttaatgaaataagacgatatatagggagaggactacagtcgggtgtctgacgttttgtacgtcggacagtgttgcatgacattgattccaagtgtttcacatgtttcatcttttgatgggaaaatattcaacaaaatatggagaaaaaatgtttcatcgtatgaaaacaatgtttcaactgttgaaaaaacatgtttcgacataaaaaaaatatgtttcaacaattttaaattatgaaacacaatcaaaacaatactgaaacattttcttacaacacatgaaacatcaattttgaaacatccaaatgcttcgggaaaacaatgaaacacacaaaaaaaaaccactgcaacattttagtctaaactaatgaaacatccaaatattaagctaaaacataaaaagagaaaaaagcggtctagatctatttcttcctcttctccagtgataggtaggccaccatgttaatgttgggatacctatactccatgaagactctctattaccttctcctattgctgacgaagataaggcagagcttggcgccgcgccgctgtcaagcaagctaacactgagttgctcccctcattgatagtgtccactcccctggatctagtgccccttagctcaacgtatactggagacggtgccaatgagacaccgatgggtggtggacgtcaggacgcccccctactgcgtgccagcaatgtggcggagtgcgagatgagtcgctcttgcttgccgtcggtgcaggtctctccatagctagccgttccggtgaatatggggagagaagagaggaaaataaatggttgggaatgaggttaagattgactgttgagcagaaaaggatgaaaagagtggttaggtaggactcactaggtaagcgtcagatatttaatcacactccggacgtacgagttaaagcatttccgaagttatggtgtccaattttcttcttgagcaggttgaagcattttccaatatataggggacataattaaatatagcttcattccaatccaactggcctttaatttctctgtaaagctaatcttcatattgtgtagtccgttagggaaaaagcagattaatttccaatacattgcgtaggtgttcgcatgatatatagatattttgttgtttgttatgacttttttatacttcttgattattacccctccggttttaaatagattgcgccgttgattttctatcacatttaaccattcattttatttaaatgcaaatatgtgaaaatgcaagttatgctaaagaaacatttaatatatgataaaccaagtcataacaaaataaata

SEQ ID NO: 45742 - DNA, 1146 bp, Oryza sativa
tgaaattgaccatgccaaaagtaactgaatcagactctgaaatgaagaaactatatgatcccctataccaaacataactggctattactgactgtaagtatggaccatgttcactaacattcaactttgggaatgaaagttattgttttttttcagatgtggatgtatatgcaagcaaaggattaagacatgaaaacaaaaaaaaaaaaagaaaggaaggaaggaaagacaaaagcccagacagatatcctgctcacttcaccaatgaataaataaataaataataaaaagataaattgaagttacacttcaccaaatatgcaatataggaaaggggccttagcagaaaattttagtaagtgttccatgagtcatatgtatcatgactattcatgttacaagttataacagccttgtaaatatgctaactagaacagtatcacctaccaattttataaacagaaaaacattgagcagcaatgggaactaggaaaagttagatcaaactggtctgactgaatgggagtatctctgccaacacagtcataaactacaaatatcaaatcagtgaagagtttaatccttcataatgatgaagttctcatgctcccatgttctttttagataaaatggttatctaaaattgagttttgcaatacttttgcacattgcaaaaggactggttaacaaacctatcagattttagattaaaattaggagacgcaggcaggataggccattgtcaatattaagatattagtttaaaaggcaccaaattatgtgttcacatcatgttcccggaagaggcaatgatgatgcacaatatatattcccctatcattcttcaatatctagttgaatagttgatgtaagaagttatgagattaaattaagtatttccatctccttttggcatagtataaaaaaccggtccggactggcggttgaaccggagaaaaccggaaccaggcctctcaccggtttggttcaatagaaagaccgctcgtgcatttgacccggtaagaaccgggtgaaccggccggtttttgttgaaaaccggtgaaccgggctcataagaaccggcggttcattgcaagttgggctggacttgtaaggcccatcatcgcccatttacattttatgcaa

SEQ ID NO: 45743 - DNA, 585 bp, Oryza sativa
agggaattggggaggcattaataggagcatttcagcaaatctagcaatccaaatatacagcctactgcctacagcttaattagatatataaaacaggggaacccttatatgatgccaaagctccagaagaatgcgcactacagtaagccacataattgggggcacttagtacgatcaataagctggccagtactagttagtgactacataactgaaagatagaagagagatgtacaagacaatagaaaagcatcaaagcccaccatacctgagcatcatacattacgattgctgcgaacaccactgacataccaaaaatggagtctgcaaagcccctgcatactaaacacaataatcaagaaagacgtaaaaccacagaatctagggactaaacaagaatagaaatttaatgacctgttcactttaatgccattttcaactttaccaaattttggtaaaattgccaaaaagtggctacatttagtttgctgccaaattttggtaactatataagaaatcgtaccaaaattttggcaagttgccaaaatttttggcaactatgccacaattttagcattgcaaaaa

SEQ ID NO: 45744 - DNA, 1949 bp, Oryza sativa
tagcaactaggtaataagcctctttgtttgaccatggaatctcaactatttcaggatgcacgacttgatggtcaatagtcaggaatcgcaagtcagggtttcatgggccctgtgtatagtagtcctttcactgtcataactttttcaaccaattttgccttcttgtttatgcaattgttaactatcgacattgttattacaatgtcaccccaaaactccacacattaggtgccatgcatcccctcaactattttcctttaattgaatccatatttcgttgaactacatatatgaatgtataataactgcttatacatcttatttgattatatatatgacgtttacaacaagatttgatcgaatttttgaaacttcaaccactaattttatattaaaatatgtttaaaaaatcgggcgagttattatgattttactagttttctaagtaaacctgtacaccactgctctggagtggctgccgaggcactcgtcagcacgaggttagggcagccgaggaacagctataaacaatcaaaacttaaagtatcaattactatcaaattggttcttagtacgacgaagatcattccataattatttagatgatgaccggttttaaatttctcaaagataaattttgttaaaggacatcgtgacttcacagttttacctgtaggacccctatatcgtatgacattaggacccaaggacataaacaccacatttttagtgaattaggagtatggtttagcttagctattttatcctttggaacaaaagaatatattttaaaggaaatactctctccgcttccgcttcatattattataagtcgtttgacttttttcttcgttaaatttctttaagtttgaccagattaatagaaaaaatatactaacattttcaataaaaaaatactatcaaaatatattcaatattagatttaataaaactaatttggtattgtagatgttgctaattttttctataagctttatcaaacttaaagaagggagtataatatggaatgaagggagtataaaaaatcatgagaaaaatggctacatgaattattttacaactaaaaagtatagaaaattcaaatatacataactaattcattttaacaccaaatgaggtgaaccaagttttgttaggtttattgtaatattttatttaataccatattgacaaaacgtgtatcactattatgaaaaatgtcaccaactcattaggggaatatcagggtttacaatttcgaaatgggcatttctaccgtggggtccagaatctcaaaagtttcaaatgaacttattattaaatttgaagaaattgtgattgaatttgactaaattttttaaaagattgaaaattccacccagcataatttttttcgtgggatgggggtttgaaattccaaaaatttcaaaaattttgaactgaaatttgaaacaatagggagtatataaattctgtacctagacttttaccagcaatatctgtagcattctaccttcagtaattgtaattcgtttcctgaattcatctcaaatcaatgtctacacactttataagccctcgtgaatgttagagcatttgaatttaatttggtatccattttctaccaggtttaatttttaaaaaacgttgagctcgaccattgacgtgagcaaaaagtcaggtatataaggaaccaccagaaaaaagcaaaatccttttcttttataaatttcatctgatagtgtgaaatgtttgtttaaatttgggttggtacaattatcatatttgttgcattacttaccttgaatatttatatcctttaattgttgttgctaaacttataatgagttgtgttctggttcagtgctagcatggatacattcaagctactaatatttctacttgctttgccaaataataacaaataaaatttgtggatcactcatttt

SEQ ID NO: 45745 - DNA, 659 bp, Oryza sativa
ctcgatctgcactgcaatatgcaaaattaactccaacgattagccgcagcagcagcatgacgatcgaattgatcatgcaataatgcagtttccttcatgtcgacgcagcggctgaccaacctcatcatcatcagatatatgtatgcactgctccaatcgatatataccaataatctcatctcgatctgcagccaacaatatatcacgacagcaatgtgagagaccgacgacgcttgctgctgaagcatcggcgtgtcgtgcatcggtatgctgcgccggcaggccggccggccacctgcgcaagctctcctcggcatccgtgccggcgccattaatgcctcccgcccatgcgcctcgtagtcaggcgcagctagggttttactagagggacctgtcagtgatgctgtcttgagaacaaagcaacatgccattgccatgctatagcttagctccatctatatatatcttcgtctggatcgatgcaactattagctatatgcaagaggatgctatatggctaattgtaaacgagagagagtgatcttcacttctcctgctttgtgttgatgagtgacgattggtgtgcgagattttatctgatgccgacagatcgagtagctggagatgagtaaccacttgtagacaagacaatgttccct

SEQ ID NO: 45746 - DNA, 922 bp, Oryza sativa
attaatgtgttgtacttcttttaattttcattttagtttgttttctattatttaagattagctttcactgtattttccttctcaactattttataaaaccttctttagcaaataaactaaatttctatatattctttctttcccacacaaattttatctcttatcaacttacaactaaatttggagacaaaaagtgtgcaaaacatagctccaaatgtaatatgacaaaaaaacattggaggatgaaattgctaaccttttaggcacatccgatttgtatataatcaccaaaataaattcactagaaattttagcatgacctcccctcttttttgaagaaattttaaagcttgctcgggcagctggaggaggaagaagacatatatatataggggtgggactttagtcccggttggtgggatctttagccccgcttcataacaccaaccgggactaaagttacgatcttaccaaccgggactaaagttacgatcttaccaaccgggactaaagatcccggggggcctgacaaaccctggaagtatttgaaccgggactaaagatcaaatatgcccgttaccctttttaaccgggactaaagatcatctttagccccgatttttattgcaaccgggactactgtggaattcggccgaccgacgaaagatggtttctccacgagtaaaagtacatgagttttttaaaaaagaactgtggtcaataaacgagatgaaagggaaaaaaacatttccccttaaaaaatgaacccaagagctgtcgcatcgatcttgttcgtgtcaaccataggtcaaccaaatagggacgagatcgaagtgacgaagaaattaggtttggagacgaatcaatcagcagggttgttggttcatgcgacgtacgtacgtacacgcatatatatcctccc

SEQ ID NO: 45747 - DNA, 1100 bp, Oryza sativa
tgtaaagatacattctttttggacggaggtagtatatatcagtatctgaaatgatatattacattgatttgggggcccaaagtccgtataaaggtacgtgtacagtattcttctttaatttgctaccttataccacaccaactatgtatttacactggctggcgctatcacagtataaccctgtttattttagatcattgagcgaattattccgtggactataggataaactatttaagaaataaacataataaataacttaacaagtgatacaaataatgtaatagaagaaatgtattttaaagcatggaacaaataatctatttcaataatcggataaataatctgaaaagaacttgcatgtgatttctaagtgcttaaaacaatgagctcaaacggccgggtactttagggacttttggacaaatatctaactagatgggctaatctttgatgattcttgaacatttaatgatttactaatatttaacaacaacataaatataaaaaaaatccatgccaatgccaagtgctctacatggtcacaaattccatgacattaatttgtgcgcgtgcagctagtgagaatcgaactcagaaatctctggacggtcatatatatggcgagaaccccgatttgaagagaaaaaaaaaatcaggatccctactactgcatgtatgcaagatgagtactaactaatcttttttctcatcagtttaaatatttttctcctaaattatttatccgatttacgatccaatcgtaccattgaatttgttgcaattaaatctttacaattaaacattatatgattatattttgataaaagaaaaatatatgtttcagaccgttaaaacttaatgtttcctatatgatagcgacatatttcaaagtgtgcattcatagtgtttcgtaaaatttatttaactacttgccctaactctctctctcctagcaacttcaaaataattttttctcctaaattacttatctaatctataattcgataacactattgtattcattatattaaatctcacaataagatattgcataatcatgttctaatgaaaaaaaagtttttcaatccgttaatact

SEQ ID NO: 45748 - DNA, 537 bp, Oryza sativa
cacgttcccctcctggttcccctccgcatccctctccatgttcccttcctcgttcaggtactggtttggatcctcgttcccctcttcttcgttccagtactggctgcttccctccgtgattgtatcgtacagtatctgttccttatcgcgatcagccatctgttcatacaagaaatatttgctaagtctgtaggtcatatttgctttaacaatcttatatgctaacaatcatatatgctaagtctaagtgtcgtatattagaaccctagataatcattaaaactgtactaatcttgtattagaaccctagacaatcatatatgctaagtctaattacaaatctaataatcctatattaaaactcaaataatcttgtattaaaactctaataatcttatattaaaactcaaatatcatatatgctaagtctaattgtcgtatattagaaccctagacaatcatatatgctaagtctaattacaaatctaataatcttatattaaaactcaaataatcttgtattaaaactctaataat

SEQ ID NO: 45749 - DNA, 2081 bp, Oryza sativa
  unsure (1)..(2081): unsure at all n locations
aatacttgtctctgcatccatccatttttaagtctcgtgcgctaccccttttattattgtcgaattcatgtttcgatagttgcaccaatagtagaattagagcaccttgattagaatagtaaaataatcacagagcatgtactgctgaagctgaaacatatctagctgcactttcgtgccgcgtcgactcgaggtgtttctcatgtggaggtcaagaaggattctacgattcagggctgtctatatgggattcgcataattttttagactttcatcatgcagtgtttcaataagtagatcgaaaatgtatcttttaaaaaaaagttggaacacaatcaaatcaccccttaaaacattttgctacaacgtataaaacaacggttccgaatatattgaaacatgaaacaaatttgagtacatcgagaaaaagtctatataagattcgcatgatttttaggcttccataatatagattttgaagtaatcgggcattgttttaccaagtatatcgaaaatatttcaatcttttaaaaagctgaaatacaatcaaatcacctcatatgaaacattttgctacaacgtatgaaacaacggttctaaatatacgaaacatgaatgatttagctatgaaagatcattcaacagccatttagcctttctgttatttttttatacaacgtgcacgagataatgtgatgtttcgtatttgatatagcagtaaaaaaaatgcaaccacaccacacacgtctagaactgtaacctgctactgcagagcaaaacacctagatgaatggatcttcaaactacacctctagggaggatacgatgctgagagtgttcctgccgcccgtcagggagagaagacagattccgcgacaatgcccaaggaggaggaggatgaggtgtgtaatacaccgtatattaaaatatatttaggtttttttaagtttgggttggctttttaaaataaatatatcaacagaaataaataaaagaaaaatatctttagacgtgtgctaacataacaaggcctataaacccaacccattagttctcccctaaaacctaaagagaggggaaccgaatctcacctcccctcatggtgccgccacccctctccctagccggcgcctccttcctcccctcctcctgtgttcgcatctctcgtctctacaacaaattgctctctctagatctcctccttcatagcttggattaaaaagcgaagtagaaaaacggaacgaggaggaggacaggagtagaaggaggggttagaccggagtctctcctattgtctcctcacaagttctctaaagaaaccttaggtgagacttattcccttattatatcagttgttctagcatggctttagtgctttaattcgcggatagggaagactagagaaggagtttgggtagttgcggttcggtttgttgcagttctacatgtgggtagatttgcagtgcttcagtgtttcgatgtttcggagctctaaatgttattttatgcaaaagtgtattactaggaagttgtagataatgtttggatctatcttcttaccaaagggagcgattttatctcaagtggtttaggagatatagtttttttagtatgactgttgtttntgtgtcataatctgtatagcagtagattgaactgtttttggaggggttaaacagtggaatcagccaggctgcctatagaagaagttgtagaggttttccttagctttccatattggtaaagtacaccctgattgggcaagtagaactctagttatggttgtttagtgtggacagtctaaaattctggacagattctgaaacctgctttcaagcgcaaattagaccatttttatggcagaataaaaatatgctttctacatcaaagttgtaggtattgttctgtaaattttcaaaatgtatatattttcagtcatagccttttcatattcaagatataaaggtttgaagcagcagtcttgtatatagtccaagcggcgttccttgttattgagttttgatgggatggggcaataggttcacctttttcattattttatacgcctgtttgaatgtgtt

SEQ ID NO: 45750 - DNA, 590 bp, Oryza sativa
catggaactagtgcattaggttaggctacgaggtgcagtggcacagtgcacacataatgactagtttatctaccaatgcagttcactcacctatgcaggttatctaccaattgactccttttaccggaaggtcggtatactaacgcattagccaaggttcttttatcccacattaggtggtttagcaaccataggcttagttatagagatgttttaacacaatatgcaatagaggaggtccctgtggtactctttttctttttttctttttttttccatgtggttatgtttttggccaagtgcaagatggtgcaaaagtcagacgctttcatttgcttaatgaaatcaccattatctttaaaatggtggttggtttactactttaatgttgctctagtgattttgatcagattgctatttgaataaaagccaatttttttgtcaatgcacaacagcttctattttctatttcccataatactcagtagttagtactacctacagtgcctcagcataggtataattattctagactagccatgtgccattttcaatgcatttgaacaaacatttaatttttctatgccctt

SEQ ID NO: 45751 - DNA, 681 bp, Oryza sativa
cataaaaaacggcatctttttctctgaatcagctgatggtgtatttgaacaaatgttcattcctagcttacatttgccatcagaactgtcatccagactggccttttctggagctacactgtcttttggcaattctcattgtcagaggtcttttcacaattcaaatgatttataagagcaccattttcacttttctctatgtcaccaaggcttgaatttccattcataacagttgaattggtagtctcagcttgtggtgcagaactctgcttattagatgcccaaatagtatccggatataatttcaagaaatagcacttaggtgagcatttggggcatatgaaatcctcgtagagtggctccccttcctcatctcgtggtatctgcaaggtaaaaaaaaaaagcaattatgaaattacgatgtgcaataaagtacataagtaaattgaagatgccacatgtataccatggacaaaagttggtttgactaaacgaaaagaatgaggctacaacaagtaggtatcaaattcacagcaaaatgtgctacatcaatatatatgcttcgatggccaggaaaaaatgctaggtttgaagtatcataattatcacatgggcaattgtcttctgaagaacaaaatttatatgaacaatacttgaaggcattgatcatgcaatgcattt

SEQ ID NO: 45752 - DNA, 821 bp, Oryza sativa
ctaatattcatactagctagtgtatatgggtttcatggtttgcgatcaccagaatacacgagcaacggtaatcggtgattagggaggatattgaatcaaggtgaattagggtgacgtcatttgggattttctttaaaaaaattaagataatggaagatgaataatatatctccacggcctcttcacctacgtacccgcatatatatgtatagatcaatcggttttaataatgcaatttcgccggcaatattctaaatattcgtcattaaataacagttaatatgagaccgatacgatcgatctggtattgaaaaagcggtagaaaagtacaacaaaaggacaagaaaaagagcacgattcgaccaggaaatgcaaaggacgggcgtcagcttggtctcttttgttgacctggataattatatattactaatacttacatgtagaagtaattaattaatatcttctttacgcacgttctctgaataaattacttgcacacgtgctctcttctctagaactatatatgtcactgttgatcgatctgtgtctcctagctagttcttggttaacgctgataagatcgatgagatgctaccatagtggaagctgcattgaaatgcatgagctaagctacttgggtcaacagtttcaagtgttcaacacctaccaattttattcaaacgcattcgtcgattttcacggttgcttgcatcggtcgtctgcatgcgtatcctgcggagagcgatgcgaattaaatatcgtcgaagaacaaatatggattagtactgtgctatgttattagcaaatcagggctgcaggaa

SEQ ID NO: 45753 - DNA, 555 bp, Oryza sativa
tgaaataagaatcatatcagaagtactaccaatctatttctccatcatgacttatggtcaatacgttgattcaagcaattatttttttcaccaccattaatttgcatatgcacgagttatttggttcatcacaaatacaagccttacccaaaaaaaaatgtaaactatatattaaggcttggtttgttgtcaaaaattaaacttttgaagaagatcttagttgggtttggttaccaaaattttgttgttgccaattttttgggtgaataaccaacatgatccttaaactttcgcttaaggattaatttagtccctgacatttcgtattatcgaaacaagtaccttaagttcattgtgattcaatatgctcctttgaccctctaaacatgttatgcgtacatgccacatcatctatgcatgcaaatttaatatttaaatgtacattccacccttacgttttcatagaaaataaagaaaaactattgaggaaaaaaatattttggccattggcaaaaagatgtagcattggtaactaaaaaaattggcattttcctt

SEQ ID NO: 45754 - DNA, 995 bp, Oryza sativa
catgcattttcaatcaccaatgtctgccgcacatatcaggccttttctgttagtgctgccgctgcttattctcacctcttccattttattattattattccattttgctcctactatactagttcgtactctcaaatgcagttatctcaattttatttactcctacatattacgaaatatactgcttaaaagacaatcaacttttcttcaggtaaaccttgaacgaggaggataaggagttcctgttttatattaaagagattaaaggagttgatatattttttagaaaccagactccaaaaccttcgaaatgcacggtcaattaaaacaaaaccagcaatcaactttggtcccgtcagatatataaacaaaacttttctttttcgttttgccaaaatttaaatggaatcgatggattatttgtttgtgtggggacagagacaactactagtatgcatatagattatagagatatatatacatatgcacagcaccaaaaggcaacagtagtacgtatgacaacaattttaggccacaattaacggaacatataccgcacccccaaaaattaacaacctgctgcaaataattaatgatcccaagcacacaccgatttaattagctgtataaacaaccagatccaaaacctgataaagttacagcttttgatctgtgattttgccatcccatcacaagtatgtacaaaacagaaacagaaatggagcacaccacatggcaaagtggacaacaacaacaacaagataaagaaaaagagaagattataaaacaaaaaaagaaacaagaaaaaagaaagctaatctgtcaagcaacaccacacacactagatcaaagatctgctagctctatagactatagagtatagtattaagtgtttgatatgatatgatatgatcctacatcacctcagctaattaaacaaagctgttgttgtttgccttctaacagggtcactgactgactgcttcatcttccct

SEQ ID NO: 45755 - DNA, 1503 bp, Oryza sativa
cgagcgtgcgttgcttttcggctctcgcttgattcctcgcgtggtcgtgtgccgcccgcccgataccacccacaggcagccagagtgtgttgttgtgttgtgtcccatgcatccatgatcggtatggacaggcaggaaagcaggggttggacgacaagggtgattggagacaatgtgtgcgtcgatttccacgttgattaaggccttgttcactttgttatcaatttcgcagtgcgagcttgcgatcgacctcaggatactcaaaagtttaaaagtttttcaccatataaacttttgaatgatatattggtaatcccaaataaaaaagagaacgcagtcaacagtaagacgtccatggtaacttcgtcaatctcaagatatgctaatccaaccttctgaaaaatgctcatatggtataggaaaaataaagatagtcttcattgtccatgctagcccacgaaaccataatctctacgcccttaaatatcagggtagtagtgtggcgttttcccctttcttggtgttttcccctctctctccccactcaaccaacgctccctcctctctcccccctcaaccaatcgacgcgctctcctccttctaccgcggcgcggaaggtacgaagcggtagcaaagccaagcgaagcaacaacagaatattaatttgtcccgcacctcaaacaaaatactgtctagcttctagattttctgtatatatttaaatatgtacttactacatatatactccctccttccctaaatatttgacgccgttgacttttttaaacatgtttgaccgtgttcaaaaacttttatgaatgtgtaaaactatatgtatacataaaactatatttaacaataaatcaaatgatagaaaaagaattaataattatttaattttttttaataagatgaacggtcaaacatttttttttaaagtcaacggcgtcaaatattttggaaaacattttgggatggagggagtatacacataccggccggtagtctaacgtgttgggtagagatcgatataacatgaagcataataaccaagctgcacgtgaacacacacgcgaattgttgatcgaatgctgtcaacaattatatccgtgtgcgcgcgtcttaatctgtcctgaacccgatactgcggatgcgtgtatgtacgtgtacagaccacataatgcgaaaaaaaataaaatacatcctttttattatcaccaattttacatgaatatatatatatatatatatatatatatatatatatatatatatatatatatatatatatatatatatatatatatatatatattctataaatattaaaatattagaataatatttggtcaaaggccgttaaaaccgtttcagatgcttatttagttgtttaattggtatacaaaactaagggtgtgtcggcaccccttttcccaacccctctctcgttttctacacacacgttttttaaactgtttaacggtgcgtttttttgcaaaaagt

SEQ ID NO: 45756 - DNA, 1365 bp, Oryza sativa
catgataatgataacatgatttgtgaaattaggaaagaaaactaaacacttgttttagaccggggcggacggtggatttggtggtatccgggaaaggctagtaccgtccccggtcaattaaggaccgagccatgaagttaagtacgaaacgaccccgtacaaccacacttctcgaatggggatagacctagcggagtaaatagccgagcggaggcagtatccatgcatagtggtttctcatgtgtaaggcaggggctctacaatggtgtcgctattgttaggactgccatgtgatgagttgaacctaattataacttaatacgtgggtgtgaatttttccttcccgggtgcgccagaactcctctcactgctagaaactgtgtacgcatagagtgcatgaggatgcaaagttcatggagcgggtactgccaatgcgaggctatcgaaaagctttgccgtgacgtgtctcatgtgttgagacaaggctcatgtgttgggcagtcacggagtgtgggtaaagtgtacatccactgcagtgtgagtaaaccaaatctattcgaatagtcgtgctcgcggttattgagcaccgggacatgtattacacttggctagactctaaattcttaacttgtgtgggatgggttattgcataatgaatttttatgctgttggagccacttcctgtaagggggaaggtgggcatcctcagaaaatcataacgactcaatggcgggaagctatccttgggatcacaatggatggtggacagaaccgtcgttgtttaaaaacaaacactgctactaaaatttgatcagtcaatgctaggtcttagcttgtgaaaagaattacaaaatttgctttgcgcaaaagaaccatagccatcctttgaaatacccctatcatatgcattgttgatgtggtggcttgctgagtatggttggtactcacccttgcaaatataaacttaatcagaggcgggagatgaagcttcggaggatccctatgcctactaccaggagggagatgaagacgatggcgctcagtaggtcttagtacggtcgttgcgtgtggcaatggcatgccgctgccttaattccgctgccttatctatttctgcttttggatgtattccggaccgctcggtccgatgatttaagacaactaggaaggtagcccgtgcattcgcgcgggcatgcatcataggatgcattgcttatataaatttttatcctatttgtgaactttatgccatataatatttaattgtcctttaagaaattttctataatcttcttcatcatctaaaataagacaaatttagtatatttagaaaacatatctacaatttaaatgcaatttaaaagg

SEQ ID NO: 45757 - DNA, 1080 bp, Oryza sativa
cttgcttgtgtttgcaataatatgcgaagaaattcataatactatggcatacgatagagaaaaaaatcattaatctaagcacttaattaaaaaattgatgcgatgcaagaaaaatcattaatatctaagacaaaagaatgaagcaaaataagttataagattgcaccaattagttcaattcatgtagatcaaattggcatttatttttctattttatgttttgttttatacaagtcaacacgaatgcgcggccatgcatcgtaggttggatttgagaagcttataaggatagaatatcaccggagaaaatttacgacactttaaaagtatgatatattcacaattttttttgttagtattgcttatatattttaacctattagttacctttataccatatcatattcaaacaatttctataagcaattatttataatcttcttcatcatctaaatagaaggtagacttattttatttagaaaacatgcctaccaaattaaatgtaaagtaagcaaggtgcttttttgtcttttaattggattactgatgttagctaggtcgcccattgtttattgagtattgggtacaacatgaggctacactacattcatgggtttgtaatatgattgcatagtttgagagataatccatctgtgaacatttcatttagagtgtgtgcgagactccacatagcctattatgaatacgattagatggttaaatataattgtgtaataattattttttgaatgcgatgtatcataaatacatggttgtataatatatgtaggaggaggacccgtaagatataatatgacataatagtaaagcgaatagccaacatggtcttgaattgttgatttgattaaaaaaaaactaaagctgctcaagtgtatcttaaattaaacgtatagatcgtctaaaaataattgtttatttacagcccaagatcactcctattgtaaatccctagcgcttgcacgttcacacctaaatcagtctccgtgagaaatagatctaataatttatgatgataaattatggtacatgtatatcgtgtatttagaaaaaaaaatcagg

SEQ ID NO: 45758 - DNA, 817 bp, Oryza sativa
ttcatcgttaaatatactttcatgtacacatatagttttacatatttcacaaatttttttaataagacgaacggtcaaacatatacttaaaaagtcaacggtgtcaaacattttgaaacggagggagtatatacgtatttgaattgaagggctacatggatgcacattgctcaaggtcacattgggaacaaaagcaacgtagagacacagtcacagcagctatatagaaaggaagacatgaaaatttccacgtacgcatgcatgaatcagattcgagatctgccttgtgttcacgcaacatcaatggtctaatgtacgacgtagtgtgctttaattaattgatcgctctacatcgcaaacgaaaaataatctctctaaatatatctgaactgatgaacatcaattttcttgattacacatacagcatagagggagagagatgtatatgcagtagcattattctcttattgtatcgcaaaaacagaaatttaatacatattattgcttttttaaaatcctttacaagcaaattgacccaaaatttaatcctgcttttgagatgcattgttttgtagtgctgttttaatttagatgatcgtgctttatcaagacataattatataacatactgtatatatggagcgtcctttttttccgaacgcgcgaaacgattgcacgccaatataaagagagtagagttttggttacacaatgcaatcggtcagaaatgccatcgccaaggtacaagaaaaaaatggaaagggaaaaactgtgaaagaagaaaaaaaaatctctttaaggaaaagaaaaaaatctc

SEQ ID NO: 45759 - DNA, 799 bp, Oryza sativa
attgtgcatgtgacagaaaatctcacatttttgttttttatagttcattatcatgcaagaatacgacgtgattaattgctgcaataaattcaatcaacaaaggggtgccgcgctggtgaccatcgcagccaccatcctcgatggcatgttctacatcacgcaggagttccatatcgaggaacaatgagggcctcgttatcaccttgccccacatcaaagccatgataatcactaccttcgccatcctagcctctgctatgttttttttttttggggggggggggtatctatcctcattgatggttttagcattgccattgttgtcatgctcatctttatctacatctcttgaatggtacaactggagatacgttggatcggcacattgccgcagttcatctgacggcatgctcctatcatacttcatgatcttcaccatgacgcttgcattgtagtacaactaacatgtcatgctcggcgtggcatggtatccatgcttgctcgttcgcaagggttggatgaaggaggccagagctaccctcgatatgcttcttgcttggaaggacatctcttgtgtgatgacactcatcattgtgagcctcggggctagcatgacactgtgatcgtgcactatgtcattcatctatccaatggcaacactaacttgaatgaacagctaatgaacatagtcatgttgtatagtcacgttgtatgggccggagtagggcctctgctgggtcactcctagaattttcactgatgataattgaagtaggtgcttgtattcataactttgggg

SEQ ID NO: 45760 - DNA, 526 bp, Oryza sativa
actgtaattcccagtaaaatccatgtgagattgtatggaaattcctgaattgaatgtctggggtaagactacctatgtagtttggactttggacaattattcctgcaaagttcttttgaattacgtgcttagattatgcctataaaataccaatggatttttttttcaaggaaggaaaccaaatgaacagtggtggacttatggtgatggtttcatatatgattattctgtaaatattctactattaatatgatcgccactagtataattagttcttttgggatgatgttaatttttaagttctactataacttaaaaaaaatattctactgttatagtagttaatatataagattcattaaattagaaaatatgatcgtccagttcgatataaaatcaggagagaccattatcaaacaccttttcatatatttatttttttattcatagtatactagctaggtccagctctcttatgtacactgtgtacctttactttacataaacactggtggataaagcgttt

SEQ ID NO: 45761 - DNA, 708 bp, Oryza sativa
attcctgcagcccttttagaaactccgtcccaacactgccttcccccatgagacacctttcccacacacagacaagaaagtccccatggcgaacctaaactcctatcatctagccacctgggctgacagtgccaagactcggaatccctactgggccaggttcttcccatgagacatgtggttgcatgttaggctcaaatccataacttatgaagtgaagtccttaattgaccaaggcaacttgccaaactacaatagcacacagctcaacagtaggctcacacagagaccatacccggcaacgatcacacagatacattaccacctaaccaggttcacacagaaccacccatcaccccggtcaaaaatgttttatctgcccgtttttttacacggtgcaacacatgctaccgaaaagatagcacacagccacacagttcatataaaagtgattataagtatatgattaatcaaaattatattttgcttgtaaaacaaccttgagcaggctaagcataactactctaccatgagttgagcccaatgttcaactcacaaagactagggtgacatggaatcatgggcaatcaataattatgaaaggtaggataataataacaattaggtcacgctacccatcgatagtttataaacaaaacaatgcatgtattcaaaacaaaacatttcacaaatgggttcaatatgttc

SEQ ID NO: 45762 - DNA, 654 bp, Oryza sativa
cagagagtcctaggaagcagacagaggaggtgggggtcaggtagccatgaaatccggcaggaaacactatggatttacgtgctctccaatgcagcgcgagatcacgggaagacaggattaagctagagcttaaattagcttcctagctaaccatagaggaatcaaaatagaaccatgaatcatcacaagcaaacagtacacacaatagcccccaaaaagggccatctggtccatttgtctgatccatgcttatatatgcatagccaaaacatgtggccagcgacgtgtgaagaccaaacactagcaaattcagctatactactagtacctaactagacactaaagcatatatattatgctctggacttacatggacaaggcgagctaaactacaagtaattaatcaggctaattgtattaatgctaaactttaacatgcatgctttgtacatgttcagactaattcagaggatatctatatatatgttcttcacctaatccccacgcatggatcaacagaagcaatggaacactgacactgtatatataaatgacttcaactagcagatcagatcaaattatatatcgtttactcgttttgcaggtttaaaccagacttcctaggccgtctcgagagcacaaaccgttcagttt

SEQ ID NO: 45763 - DNA, 1390 bp, Oryza sativa
ccagtttaactacaatgtaattacactatcgttacattataagtctctatataagttagatataaagttgcatatattattttaatacttatatgtaagttatattatagttatagtatagatatagtgaaattatgttataattatgctatagttagatttgaaagtttttcctaaaaaacttgtggcaattttttagatagtacctctatatttgagcgccatcaatgcgtagcctcccgtgccagcgcctcgccgccagctagccatcaagtagaagcgcaacatctggtgcactcaactccatccacgtataattgggttagagatggagagggtcagaaagaagagtggatcccctctcccctacgctagcttgctaacgtggtcatcttgtggcggtaaggcaccgcaacaagaagaataacatttggaaagagtctgccatagacctacgccgatggcagcaccgccacctcggttagactacccacgtagtcgccgccttaggccaactgtccgcctcgcccagttgcctcatgttgtcatcgaatctccctgcaacaatgccatgggccacagaccaatagcctacaaaactgccatcccagctggcgtcaccccgtcgttgttgcgctgggcttcggcctcctatcggcctccacctaccgccaccgtggacggcttactcctatgtcgcgtcgggtttatgctgtcgccggcctcggcctcccatcaatctcctactattgtcgtccacatcacgccaaccagggggcgcaccacctcgcctccatggccacactacattgcctcacctcgccttcatgccgcaccccgctccttctggttctagcagcctcacctccatcgctgcaccacgtcacctctccttgcactaatcatttcattgtgctcatgatctagttcatctgagacttaggtggtaaggatactattgaaaataagaaaactattggtgtagattaattgagtattcattattataaacttgaaaattggatttatctgatattttaaagcaacttctatatgaaaagcttccgtacaaaatacattatttaacaacattatttaatattttgaaaagcgtgttaaccaaaaccagctatcttaacttgaaaagaacggggccttggtagagggatccggatcctatcttcttatatagttggtacccactaagaggcatttactcctataaagtaagacatgcaagaagccacatcattaacaattttaagacatcagatcatatgagtacaaagataacaacagttggatcaagaaactacttattcatccaattaaatcatttattattagttatccattcacctccttttgctccatctcatagtcacacgta

SEQ ID NO: 45764 - DNA, 527 bp, Oryza sativa
tgattatattctgatgaaaaaaaaatatgtttcagtttattaatactcaatgtttcatacgtgatagcaacatgtttcgacgtgtgtctttactgtgtttcagaaaaaaaaaaagttaatgtttcagtgactaaattttttcaccgtgtataacttaatgtttcactggtggtcaactacaacattttgaccgaccgattttttttacagaagcaggtgcccgattcggaggttcctccgtcatatggatcggagttcggtgcaaagcccactttctatgtgagctaacaagcctctttttatgatatgtattactccctccgttcccttttaatcgtcgtattgtaaaaaaatgataattccattttgaaagtcgcattacggtggggaggcagtgaaaatcctgggaaggacgttaatgacacttcctaccgaacacttgttggcgaaaaaatcgaacacaccggcctaggagatctgcttagctccagtgcaggtccaaaggttggtgagatgtgggcgtgcca

SEQ ID NO: 45765 - DNA, 717 bp, Oryza sativa
cgcgccccctccccccccacatgtatatttggacccacctatttcttcctctattttttccataaaagatgtttcaactagtgtatttacaatgtttcactatttatatatctaatgttgcagtgaattaaaaatactcttttgcaacaaaaaacccacatattttggaaactctctattaagggaatttggtttattttttattccacaaaaaatgtttcacctaatgtactcataatgattcactatgtatagatctaatgttgcactgaatgaaacattccattgcaacaaaaaaacccacatattttggaaactctctgttaagggaatttggtttattttttattccaccaaaaatgtttcacctaatgtactcacaatgtttcactatgtatagatctaatgttgcactgaactgaaacattcatttgctatttgctgaaacattgtttttatataaggtaaaacaacactcgatttaaacgagtaaaacatttttgatctacttagtgaaacaattcgtggaacatcgtgcaacatttaaaaataattcaataataagctaaaattttttttcgtcggaatatatccatgtgtggtcttgttttgaagatttaattgtaacgaatttaatggtgcaaccggatcatgatttggataagtaatttaagagataaatcagtttaaaataattttacacgtaaaatgggcgct

SEQ ID NO: 45766 - DNA, 5207 bp, Oryza sativa
agtcctacacactcgaaatccaacaaatccgacacacgcattctcgaaatccatcaaatcctaaaccctcgaaatccatcaaatccgacacacgcatcctcgaaatccacagaaatcacacccgcattctcgaaatcaacagaaatcagggggaagcagcgttggaaacacagagatcagatttgttgcggagttgtgtacctgggccttgcgcgcctccaggctcttgctgtggtcccggtcccgcttctcccgggatgttgatcgccttggcgccctcgcaccaggcggggtggctcacggcgtcctcgtaggtgaaccgatcgaaggtgtcgcacctatggcgccctgcggcgttcggcgagcatggctgcggcacccgcaccctccccaccaccgcggccatcggcttccccgccgcctcacgcactcacactcctctcgtagatgttttttttttcttcttttccttctctttgtaaaatgtaatctgattttgctggttgcctagtcgtcccctgtttatataggcacgggtaactctctggtttatataggcacgggtaactctctggctagaacctactagaaattacaaatggttttaacccttctgagagtttttaactttttttaaaatcaaccgtgtaccatgcaattttttttacacgtccaacaaatcaacccgttttgagtggataaaattctttctactaagctgccctaataaaattcttacaacccgtttagatgtagggaaatttaactatttaccactcttgtgatatggcaattaacgatttgccactcactatctatgacatgtgggccctcatatgtctatgatatgtaggtctagtggcaaatcgttaaacaccattctaagagtggcaaatatttgtgaccatgggttagaaaaacctgcggtaatttaggaccaattcaaacgtgcgttggattaagattaaagtacgtgcactaaacaaaaaaagtgattagacaatgattaattgagttttaattattttaaacttgaaaaaaattgatttatatgatattttatactatctttcacaaaatgcaccgtctaacgggttgaaaagcatacgaacgaaaaccgagaagctagaagctagaagcaaaaaagcaagggcctagaagctagaagttggtgactgctgatagaactggaccgatctgaatattttaaagtaaaaatgtctagttcttttaattcgtgtattttcaatcaaatcacaggcaactactaaccgttttgaaagactatttttctctttacacatattagtttttcagaaactttagttgataggtagggtataagttacctaaaacccttgcatatttgccattatattcatcattatgattatgaataaaaataagtaatagccgatggataaaagagctacacaaaagttaattatatgtgggtccatctttgagctggtcttcatgttgtgttgctttcatatttggcaaatttttgttgagttggttaaaagttttatgaagtgaaaggaagtttatttgaaaatactggacggctgatctgtggttgtgcgactgtttcgtgccgtccgatctacgagttctacgacgaacggcccagatcaaagcaacggctagccctagccgccaccccccgccgccggcgtgcctcctcgccgttcttctcgttctcttctctttcgctgacctggccgccgccgccgccgccgccgccgccggcgatccgagcgggggtcgccgtccgctcttcttcctacttagtcctctccatcttttcccgagatcccgacacgtcccctctctgttcgcttcttaatcccacctctccctccgccgtgtgtttggttggttctccgctactgctacacggaggtggaggtggaggtggaggtggaggtggcggtgtcggtggagagttgaggttgtggcagcgatgtagtggctgtcgcggtggcgagcggacgcgccgctgggagtggtctccgccgagaccgaaacctgcgaagaggagatcgccgtcacatcctggaaacacctgccggcgctcggttgccatggtcgtcgcacgatctcaccatcctctcacatatcaggccaagaaggcagcgatagagagtcctaaggtacaataatttcaaagcaggtgagaaattacaacgctctgttgtttcatgctgctccttctgagctagttggtctgaaaaccttcctcgtgtgctttaggtgtttcgatcagatccaacaagtagatctgtttctcttgtaatttcggtggttggaatgtgcgttaatgagaacaccttttgaatgttgccatgtacgtttgtaagtgtataatgccttcaattctgctagatcttcaggatttagtctgttgcttatgttatttcagaatggatggggaccgattctgttgttacggccatgttgtaatgtaaagttagtctgtaacctattctgcgcaaatttggaagggcaagaatttgggggtgattgctgtggctgttgtgcatctgcagccaatctcagttgcagctgcggcggtggctacaacagcaagcgcaaccgatcaccccctttgttttcttcccactgttgtccatgaggacacatgttaggttgcatatgtggcaaagtaatatgctgcaggcctacatctttggttttcagcagctaacaaagcacactcttcctagtttcttgatgtacctacgtagtgatgctggtcttgacttagaaattagcatctgataaccacattggtttttcgcgattggtggatagttctgtcactgatcttattctcggtttctgatgaaggattttggctgtaaacatttggatatgtctacaatattagagtatatataacatgtgcaggctaaaccttactttgtttacttatacatatcagcctctatatttgattcaatgtgtgcaatctccaatgatgcttgaagatgcatgttttctttgcagtgttgtgtaggaaagtttgttagtaaagaagtgcttccaactgctcgaatgtgctcttgatttaggttgcaataatacctagttccatgtttgggtcgccaactcgccatattacataccacatgtacttatttgtgtttttggtttattcatgcttctgaatattcaaatttggttacttctgtaacaagttctctggactgtttacacttggccatttttcctctattctttcccttcagtattttttcctatgattatcaagggtaaacatgacccatcctacgatgttctctatttacaatagagagggagaaaaaacaaacgatgttttgaaaatacagtgtatctgtgtatggtttagagatactgatcctaatgtgtgtgtatggtttagagatactgatcctaactagttaggtgcccatgcgttgctatgggggaaatatagatcaaccttatcaaagctcaatatggttgtgttgtggaaaacaaaattagttggtgcatcaggaagcagtcaaggacatgacaacatgaaaaactgaatttacatcattaaatgtaaggataaaaaacttaacttatatgatcaaacccaattcattaaagacatgaacggatacaagtaaatttctggataatacactaatgctcatagccatctcttaagagcttctcaatacatcgagttgtaagtttgcataaatatggtgagcttgatgaaacatgaacgaatcaccattaattaggtactgtagcaagctgacattgtctgtttgctgtgaatcaggcgtcaaaaatcttcaaaaatcacagcactgttcacctctgacattattgcaactaaaacaagaggatccttgtccaggtgattgtctctgtatggtaggattgccattaatctgtccaattctcaaaccctttatacccgtatctgcatcaagctgaacaaaacaatcaactttgcactcttcaatttttttgctagtagcctttctataaacaagaggacgaaaaatcaaatatgcaaatgcaaactttccggatttagtgtaaacttatagagcccaattgcattcaattattagcgacaacaatgctgataagtcactgaaaggaaaagacacaccataatgactatacaacaaatgtctgtgtagaatcacttgaattgcttatatagaaagtatgttgatgacaacaatatacagtaaaatcagagaccgctacatagttcatgcactacaacatatttattcttatcctacactaattttgattattcagaagtgttttagcaatggaattttctttgcaagcacatgacatgggttaagttttttaatgaacatacaattgcttgatatgagggagttcacagttaacacaaagccatgaggactcacctgtttcgctaccttgcactgttatccacaaaaacatgcacctaaagctgtaaaaataagatggaagagaccgagagagaatgattagcttgtcacaagacatttggttggcatacatgagtgcctaatcctgagaaagggcagtgcatgttagtagaggaattgtccatgatgagtacctgaattagttcaaaaggtaaaaaagtttcagagaacatattttccaagtatttatctgattccttagttcagttgtcaaaaaaaaaatcagatatatagactacaaacatagtggacgggaattaaaagttttataggtctgtcaaatatgatgacaaatattttgttgatccttgaagcaaaatcctgcataggcaaaggattttataattgtaagtagcagaatccttcaagcgaaaccccacataggtaaaggattatatttggcaagatttacatgttaagtatcaaatagagaaaagattagtgccacaaatagattataattgtgaaatataatttactttacaattaacatcttatctttgagtagcacacatctttaggactacttatatactatcttttgctgcaaaatagcttgacaaattgataaaattggtgcaattctgcttgactatattagaaaattaactaatcagaaatatcgatcagaaaactaacaaatggttgtacgatgagttgattcatagcggatcccaggctatatatcttcctgaaaattcctataagctttctgattacttttgccattaggattttcaa

SEQ ID NO: 45767 - DNA, 3240 bp, Oryza sativa
catggcccgatggacgcccaaaagatgttcaacctcaacacccacctacgagaggaggcccacaaacccacattggattggctgactacctagtaagatgtaacaggttaaccgtttagcttataactggtaaaccataaagcagtttattagcaacaaaaaataataattaatgaacaaaacacttatatatatatatatatatattcttagcgatttaaaagctaatgttgaaaaataaactataataaaaaaaaaactcatcaaatataaaagttttaaaatttaaatttttgttgcgcctcataagtgccgttgtattcttactaatcaatcgagttcgatttgattttacaggttctatagggtgcctacgtgactttttatgttaaaaaaagttctccaaaagtgactggccggtcaaactctgatgaactccaagaacagacttgatatgttccagggcccacatgtcatgcacggctagaaaatgacagcagctgaagacaagaaaaacaagaactagtgtctgatgacaggcgcctcctccttttcatttgcctcctgaaacgattcctcagagcccatcattcctacgcatgaacagttgagaaagagagcttcaaaagccatcttgcttgcaaagttgcagtgcatttgtaacctagtagaaagcaactaagctatctagacatgttggctcattgtccatccaatctggagcacacaaaagaagaggttgtaatctctccaatcacaaaaacattttgtcttggacattgacgcggtcagtgacatacaaatttgataattaatttctattatagaatatatgaagatctgataaaattacaaattatagaagtattttgaaacaaacgtatacatatgatttccacacatccgatctaaacaactaaaatatataaatgttcaaagtttttctgtgaccagagagtggttagcatgacacctcacaatacaacttaagcttttctgtttttttttccattttttttttgctcagagattacttgacacatgaaaggggacagagttggaggcttggagcaacaactactcatggttttcttaggccatctccctttcttttcctctctggctttctcaatgatgcattcttgcttgctccaaacacttatccaggcatgaagccatgcatgcttgctttccaaccttttttttttctctgctcaatgctatgctgtgtctgtggcttgctccccatgattgcccctcaagagggccatcagtgagagacaactgcaattaggcaggatctatgtcgtctaatgagacaaaggcccaaccaaagccacacaagctaataaggctgaattaatatgtccattagggctgcagcttcctgcaagcttctacatatgtttcttgttccaaacaagagtgcttgtgcttggagccaagaaagggttagtgtagttaaattggattttgtgtctacggtgcacaagtaggacaagtgtaaccgtgtcaagttaagtgaataaataatagtgtaatcaagttggaagtatatatatctcccttaattgccttggcctgcaagacgtgttcagacattctttgcatgctctgtatgaaatgtgattttgccgtctagtgaatgtcaggtccagctagctaggtcacataatcatattaataggatctacaactcaagataatctacttgattgtcttcttcagccatctcttgaccatgatatcactttcaccagcttcaagactcttcctctctttttttttcttcttctatggcaacattgagagcctgtttcgaacgcagaattgtcacagaaatttctgaagctcaaaatgtttaaatgttgatttcattttagaggtctcgtcagcgtcttaaataacagcatggccttccaatatctgataggcctgtcctgtgactataaagaatcttggaactagaccgggcaactacaggcaaaacatgccaaatttatggccaacatagacaatacttgtaccacactgttccagctcttcaatataaggagccttcttgtcaaaaaatatatatatttggataagcaaaagagggagaagaaaaagaaaattaattaagcagcaggtgtgatggaaccagcttgtctctagccattaaataaggtgagctcatgcacatcatacaaaacaaaacattgcttgtgtcatcctaactaacacccaaacagtgtctctgcatatcgtgtgtaattgcaagatatagggcaaatggcaggattaggtatgtgttctgtcactagccaagtgtagatgccatgttaggattagctttcagggggacacagaaacatataaactttcactgaagcaatcctgtaagctgccggacatacatattgcatttgatacctacgttgccaataagcattgggaagtttggggaggaatttgatgtctggcacgtacaatttgaaaacactggaatcaatttaacaaaacatgttgtttggatactccatatataggaattattgcttaaattttagagggaaaaaactattatctccatcccaaattatagtaacatctggctatgtatctagacagtctaaaatatagtactccatatgtcctaatataagagattttggagggatgtgatacattttggtactacgaatctggacatgctccaaaatactttacaaaagtttctcaattttccacttaagttatggtttccacgtacatttctccatataaatgagaaattcttatcgggttcgaatcctacggaaatactttataaacagaattgctaaataacatttgatagaaatttagagccaaaatgttacatatttatgacattatattcttcgcgattcatgctaggcctccttctcctctaactccggtaaccctgacgaattccaatgaccggtagtagcccaatgatatgatttagagtttaaggttgaggtaggattagggtagcaagagggaagacggaagaggggctgttatctaggcttagagtgatatttatgggaggtggggcgcatcaatggtggtcagcgaaacgggtaggcggtggcggcagtgtcgaagtcgtgggggtcagtgagtagtgggctagtattggtactggaggcaaaacacaacaagtggttaggagggagtggtgtctccagcgacggagaaccaccaaagaatagaaagacagtaggttag

SEQ ID NO: 45768 - DNA, 683 bp, Oryza sativa
gagtaataatctcactaacatgagttagtgggttttgatattattatggatctaataatttttagatactttttaatacttatatcgtaaccctgcactatattaaagaaaatgtaaagataagctatatcaaagaatactcacggcgtgtgtcacgtggttgttatagatctaatttagcaatgcatgttggtgagcaaatggttgtcaatactatttgctacgtgagaaggacatgcaaaagtatataatgtgacattttttattagaatataggctatttcactaagaaaggctataataaaatatttcgacaacgaatattacgcacatgtaggtgcactttcaataggattatataaacgtgtgttagaaggtgcatttgcggagatgtgagtgtgaagttgcgtatgtggtggtgtgtgtgtgcgcgtgtttgtctactttataaaataaataaatacattatttcatatgtgaacattttttaattaaaatgtagttagtataaaaatatagttaatataggatgcaatatattttcttctgttttatattgaagatagatcctattttaaatagtgaattatggtttaaataatcactatggtagaaaataaagagagtaaaagaaaccatagaggagggtgcggatcatgaactgatcatgtgtatatatacaa

SEQ ID NO: 45769 - DNA, 3070 bp, Oryza sativa
atcgttttgttttcagtcacgtgcatttgtacgtagggaaagacaagaagtagcgtttgcatcgtgtagcgcttgtatgttaacatgagaaaattatttttttaataatagatctaatctaatggtgtaaaataacaggtccaccaatttaaatgaaaatcaacgataagattatatagtgccatgtggcgacttaggagtgtttgtaggggtacacgtggcggcttgagagcgtttgtaggaagtttaatggacttttagtatataataactaggaaggcagcccgtgcatatgcgcgggcatcttatttaatgtgcatgaaactttattacgaatgtcatgtgtgggtggctttctatcaaaaatattcttttactttatcctaaactaaaattgaacttatttaatgtactttgaatattggttatgatttttcttctaattacccttgcaacatataaattgtgaactaaaattactttaaaccgtgtagtttttaatttatgataaaattttgtgtcgaaacaatagatgtgtttactgtgaatgtccattttttttgttagattctgtttgaaattttagatatattcattttattagtcctatcaaaatgtttgaatatttctatttaagatgggttttaagcccagcaaaaaaatttagaattagataaattttgttcaattttaatttcatttcttttcatctttatcttttatttttttgggggagaattccactctatgaggcatccttaaaatgctttgatatctacaattcgggatgaaaatataagtgagttgatcctgcaacctggcatggggtaaaggcatctattctaaattatatctctctaattaagtaaaaaaaaattaaaatagaggtcgtagtatttttttggcaaattaccactaaattggagtgtcatgtaacaaaaacatgtttattgttctatgctagatgtcaggaattcacgatgtatcggagtaagttttaccaaaaagaaataaatatacatgatcttttaattactgtctaaaattgccctttatattcctaaggcaacatcatggttgtttcactgttaagattccaccgacgttcttagtacgatcggtatgttcaactgaccacgtgacttcatagagaacatatataatttagatgctatgatcattttaagattatttatttatctctaaaaagacaatttattgataaaagcatcaatatcaaattgtatggatgaataactcctatatacatgttgagagaaaaaaataattaagtcgatagaaagtcgttagatgtctaacaggatataagtaatgggtctaccaattttgtgaaaaattaaggtgcgatattttttatttttagtgagaaattttagtattttcttatatttagtggaggcctcaatatggatgcgggttgcagaatgtaacttttttgttagcatttaaatatagtcaatatggttattaaattattgatttcacttaaaaaataatgtgtagttcaaacagatcataagagacatatggtggctatacctaataggtgaaggttcgtttgtggtcttctctttgcccactaagataattttaattttaattatcaagaaataaaaaaaatatagaaaagtaacacaccgcgcacgggggatgggaatggagggagggttgggatgttttttttcttaaaaaaaagcttgatctaatgacctaaaataatgtgttcatgtttaagtcaaaaccgatggtcgaatgttttatttttttctcagatttattaggattttctataatttaagcgggacaaatagcaacttaccatagcgtttatgtgctttaatgcctatagggatggagtggaagggaagaaggtttgtgatgtttttttaaagaaaaaaaaatctaataacgacgtaaataatgtgtccattgatttaagtggataccagtgattgaatgtatctctaatttaagagtgacacacaacggtttagaaatatttatagaatgtttaatggattttaatgcgtatgatgtctatttgtgggttttggaaaatttaagagtgacacacaacggtttagaaatatttatagaatgtttaatggattttaatgcgtatgatgtctatttgtgggttttttccaaagaagataattttaattttaattgtgataagctttcacatggaaaactgtatgtattataaagaagatgaaaggatcagattaaattcatttagaaatggtagttttaatcttggcctgggtagttaatagccttaaattcattatttaagatgaagagcaggaaccgtaggatggatatatatatatatatatatatcaggttgaatgctccatcaagcgaccattgatgatcctattcattgttaatttttcttccagttatattctgatttgcattcttggtctgggctatgatcaagtaacggtagtagcgtattggccgctggtgccgaaggaaccgatatcagatgcgagattatttaattctctccaaggacgaacataccctttctaattgattttcagactgttaagcaccttctaatcttagactctcatctttaaaattcgtgcagtttttttagtggaagagcgaagcgcatctcgatatgaaaacagagaaacggcataaaaatcactacgtgcggggacagtgggaggttttggttttctaaaatagatctaacgatcttaaataatgggtccaccgatttaagtaaaaatcaatggttagatttctctattttattaaagtgccacgtggcgacttgagagtatttatagtagcccgcgcattcacgcgggcatgcgtcgaacgctaagtttgagacacatttgccatgatttctccataatttttttcatcggtattaattaattatttttataagtttctaacctattagctttatattatatcatatttaagtaatatttataagcaattatttacaatcttcttcatcatttgaaaagaaggtagacttactttcttctttagaaaacatgtcaacgaaagt

SEQ ID NO: 45770 - DNA, 658 bp, Oryza sativa
gaagatactcccacatcttcttagcagaagaaagatcaataaaattcattctaatggggacctcagcgctcatgcacaagaaggccatcacacgctcatcattacgtcgccaagctgcaattttcttctcatcttccttctcatgaggtggatcatcattcaagtgagaggccacaccatacgacctgagttgcatacgagcagaggaagcccactcacggtaattttgtccattgagttttatatccaaaggcaaaagaatgacattcccaagtggatctgatgccatggttgcaatctgaaaggctgagctgctgctgcacttgaaacgctgctactgcactgctgcactgggctgccgctgctgcaattagtggctgcaattaggtattgtaatcagcagcaggagatccaacacatggcagatttgttggaaagagtcctggcggcaagtgcgacagcaaaggatggaggctgcgggtcctgcagactgcagctagccgacaccactgcagctagcacaattggataatgcaacctcgagcaggagaaaaagaagcaggagaaaaagcagtcaagcagatccagcaggagaaaaagatgctccagccagaagagaagagggtcgatccccaaaatcaagtgaccacgaaaaaca

SEQ ID NO: 45771 - DNA, 591 bp, Oryza sativa
tgctaaaatcagtactgtgtattccaggagagcactagcatatacaatggtatatgggccaacagtaaaataagtctaagactacatcgctatacacatatctaacaatggcatggccaatatgtcacgtgccatccgagcaaccgttggataggtcaggttatgttccttccaccagtgaagaacatcacgctcacctccagagaggcatggctcttgcaagtactgatcaagctcagtcatcggtcgctcacaaattggatatccataacgacggtaatatttcaaccgatcatcatctctgctcacattgatttcatttctagtctccttagtacagttagaatcttccaccttgccagaatattcatcaaagagcctgagcaatatatcatccatacaacgaatataatctgtgtcagtgtgcaggtcaacatgaagtttgatgttttccagacgatatgaaggatcaacgatcatggccatatagaaatgtaagcaacaaagtttccagcatttcttgaacttctcttgcatcttctttaccacagtagcaaatgcatcatccctggggttatcaactctgcgttg

SEQ ID NO: 45772 - DNA, 749 bp, Oryza sativa
ccgccacgtggcaatctaaaaacgctcctaagccacctcgtggcaaaaagtccattaaacttcctacaaacgctcttaggccgccacgtggcaatctaaaaacgctcctaagccacctcgtggcagaaatacatccaacccttaattttcattaaaattggtggacccattattgtggaccattagattagattaaaaaaatcccaccccttctcttccgcctatgtatgacaggtgcgagggtattgtgccggtcaaaaatgtcatcagcagatatacgtcaaagaaaatacgtatatatgcactgttcaccggacgaaagtagaaaataaacatacatattacctctgtacgcgtgtacgattaggaaaaaaatgttaatccttccgtcctaatatggaatacgaggttacttattattatgcacatgtttcgatgctaagtattaattagctttttcttaaaaaaaaataaggccatgtttcgatgctgtaaaagtttggcaattttttttagatatacagacacacatttgaagtattaaacgtagattaataacaaaagaaattacagattccgactgtaaactgcgagacaaatcttctgagcctaattacgtcatgattagctataagtgctacagtaacccacatgtgctaatgacggattaattatttctttaaatgtaatctcgtgatttacagtcggactgtgcaattagtttttctttttgtcacatttgatgctcc

SEQ ID NO: 45773 - DNA, 1063 bp, Oryza sativa
ttccgttagtacgcttttcaaactgctagacggtgtgtttcataaaaaaaactttatataaagaagttgcttaaaaaatccaacaaatttattcatcaaaatgttataaactaatactgaattaatcatgtgctaatcacatttctcattttacgtgcgggtaatcagcccatccaaacctccaggaagagtggctctccactgtggccccaaattacgttggacctgctataggtccaacataaatcatcatttgaagtcataagactacacaacctaaaatattagtttttaaaatacagaatatcgccttccccccaaaaataatttttaatataaaactattaacaagctcccctatcacatcaacccatataactatagacacttgtttcgagccaagcctaataatctgtgctgagcccatgtgaccctagaaacttgttatcatagctcctcctatgtgatccatagaaattgttttggaatactaaacatgggttctaataccacttattagagtgcgtagttcgacccaccaaccgtgggtcatctagatcatattgggtcttttaccacacaggtctaactagagctacaacttttaagtcctagtttacacacacactaatcttttgggtgagtgctatccccataagttgtgctccccactattatagaccctagcttgtctttttcacttttccacttgctggttagggctcgattttctcctacttaatccagtgttttttccccttccctttaatcctccctaactacgtcagcacattgcagttataaacatcttttctttttctaatatattgacttgcaaggtttttgcacattcgaaatagaaatgtgggagtaaatccaacatggtgctgcagtgttagttggtacagttctcctgggacatattcattcagatatgctcaaatctcaatcagcattccacttgtaggatatcagttaacatgcctccagcgagcggatgcggcttccctgtcccgatacgctggttcctttcctgttcctggcgacgtgtcatcttcttatt

SEQ ID NO: 45774 - DNA, 2078 bp, Oryza sativa
agaggagtgtggccgctaacttgtgcttcgtgccggtgagcgtgagctggctcgttgcgcgaattcggattcggaaatggagcgtagggcgtgcggtgcagttcgtcacacgtcgttcggctgaacatgttagcccggcccactggaataggccctggattccttgctgccttcaactttgttgcatgaggctggcccagtataaatatacaacttgggaagcttcgtcagacagaagctgaggcccaactcacgaacacagctcagccaggacatgttgcctcttttctgagttttgctgatatctctcgaacgaacattccccggttgtttttatattattcaattagctataaaatttttaaaaaataaatatatattaacatgtgatatatcattcataaacatgtaaattaaaattcaatttgtacaagttgaaacaaaaaaataaataaactatagctagctaacgtatatctatagttaaatttgttttttttttgcaacttgtcaaagctaaatttcaatattgcatgtttgtagagtagtctatatcacatattttatctatcttgttaatttttttcataatcatttacgtaacatgcaaacaacgggaggatgttctcttgagagttttgaatagtttctgataagcccggtaaataggctacaatattagtagtcgaactttgctatactccacatatacttggacctgcagctttgagctatggctgtgtttacttcagcgtaaagtttggattttggttgaaattggaaatgatgtgactgaaaagttgtgtgtgtatgacaggttgatatgatgaaaaagacttaagtttggatccaaactttagatttaaacacagcctagattctgataggcaggcaaatgatctgcaaagaaaatttagtagcaacagaggtacagatatggtcacctactgcccaactcgaaccaatctccattattaatttacatctgcgtatagcctttctgtacgtctttgagtgtcggaggtagagatgacattactagctacagtaggctagcacatccactaaacctgacacctaccgctgctattgtgtattaatgagagatcaaatcttctatctatgtatctattatatactaaaagtctattaaacttcctacaaacgttcctaagccgtcatatggcatcctataaacactcatgtgatgccacatgacaaacaaaacatctaactgttgattttcatttaatttggtggacccatcattatcttttatttttagccattagattaataatccttaaaaggaaaaacaaatgccatctacctccacctccctcccctacgtccgtacatacatactccaaagtcatgtacgtacagtcactatacgcacatcttccctctatctctccccttctcacatcttcctatttaaaaagctagatgtaaatattgcctaaaaattaaatggaaattatattatttaatttataataaaccaaaaatttaatatcaatattgctcacttaaacatatcaatattattttatttaaatttaaataggtggacccattatctaaaatagaaagagctccattaaaaaaatccctccgtcccacctccgtgtgggatgcgcacgtacatatgacattgaaagcacgtatatgcacctccgatccttttgttttaggtaaattttgctacaggacactgctattgcgtggttttagccgtgggacactaccaaactcacttttgggggaaaatactccataaacgtgctaatttgccaatggacaccgcgccgattaaaataatgatttccggttgaggaggagagagaaatcacgtgaaatgtcaaaaatgcccttaggcccactgtcgacgagtggtactcgcggaccggaagaatatggtattggggtatgttggaacagggatctacgtagtacgacatcaaaacagacaaaagacgaggattatactggtccaggccccttatcaggtaatagccctagttacttctagtaatggtctactactaatagatatggactgtgtttaggtggtg

SEQ ID NO: 45775 - DNA, 884 bp, Oryza sativa
cccaaaaactcaagctcaacatgtagcattttacgtagctgagaatggttatcatgggatatggatataaaataagatgtaaattcaattttgatttagaagtatttggatggttaccggtaaaatcccttcaaatattggatttgatcaccccaacccactcactaacatatgtttgactagtttgtcactgctactccattcgtcccaaaatataaaaatctagaattggacgagacatgtctaaaatatactccctccgttccataatataatggattttgagtttttcttgcaccgttttaccactcgtcttattaagaaaaattgtgtaaatataaaaaacgaaaatttatgcttaaagtacttttgataataaagtaagtcaaaaaaaataattttaaaattttttgaataagatgagtggtcaaacagtgcaagtaaaaactcaaaatctcttatattatattatgtgacggagggagtaagaacttagacgtactgtatatccagatttatgtgacggagagagtaagaacttagacgtactgtatatactggaaaatattttgtgacagaggaagtacacggtattatggcatgtgtaccgagccggcgagagcgagaccaaaacccatatacaccgccgccgcgccaccactttcaccccttgatcgatcacgccaattaccgggtgcagctgcaagcctgcaacggccaaaatgtcctggaggctggagttacggttttacctctccgctccgctgcgcgcgtccagccgcggcccgcccgaccaccttttcacctccggatcaccaccgcaatggctcgccgcaccacgcgactattttacggctccccaggcagccgcctaaccacagccc

SEQ ID NO: 45776 - DNA, 2555 bp, Oryza sativa
cattttagtggtccagacaacacacacgagacgaggagtcgacgggggccaaaggtaaggtcttgtcgtcatttctgtggccaagtgtttttccagttgttcgatttgcctaagattcctgcacgagattaattatgcatgcccctgcatcagttcatcacatgtccactggtccatttcttaatcaccagtaaaataattcaccgagccatatgcatgcgatcttgttttttaatttgtttttgtggcatatggtcgtgtttgcacaagccgcgtgttctacgcttaatcacaaccgtagaaacgacctatgatgaagtactcttctaggttttctctcgtttggtgtcatgtgctaatgcatgctagtcaaagtggctcgttcgatcgtggatttaatcttgtttcctctcggtcgtggggcccctgactgtttggtctctccgacaggcagatctggtgccgagacagtgatagattttggaccatgttttgacgcagcacttgccgatgtcaagaaccccctttaaggggcttttacctactgatcgatacgtgtgctttctgttcaggtcacggcgttacgcagcactttcacagtccagtacgtttaccgatttgacttaaagcgttgcattgccctgcataatgcgatctttggtaagttttggttgctgaaatgaaggagcaagatgccacatcacgtcttgctggaacgaattcgcaaagctttgctcttttgcaagctttcttcggtgagccaccctaatcaaacacatgcatacgtagtactactccctccgttttacaatgttagtcattctatcatttctcacatttatagtgatattaattaatctagacatatatatctatctaatatatctatatagattcattaatatcaatatgaatgtgaaaaatgctaaaataatttacattgtgaaatggatggaggaagtagtaaacatagtatagctagctagcgtagcatgcactgcagatagcagcatggaggggcaaaacctagctaggcttgcttcacttctgcatccatcacatcaagtgacctgccatttcatcagctaaactggccgtggctccatttttcggaccgaccacaaggatattggcctgatcaaccccatggaggcagctactacctgatcaatggccaaataattggccagctccaggatgatcagggaggaagaagaagaagacggagatcgacctgaaacaaaccaaaacctcaaaacccttcgatgtgaaatagatgcagccggctatagtacgtacgtacagcagcagagctgcaggctcgtcagtctctcagccatgtcgccgtacgttctcagggcatcccgatgcagtcactgacctgtcccttcaccggccatgccctgcagcacggagcttcttctcccgtaaaaaccaccactcctccatcgatctttgaattgagctcccactgcatgcagagagacgacgacgcctcgcctgcgtgcatgccggtgactagaccacttgcgtgactgcgtcgatcgagccgcgcgcccgcgtcgccgtcgatctgatagatgctgcctcagcagcaaacggtagagactagctagcgcgtatgggaaactgttttaggtggtgtttgggaaaaagggacttaccaaacaccaccttagactagcagaacgtccacctatttctaacatgtcatctaaatggttataaaatttttttaaaaaaattaacatgataggttatatatgtaatatattacttcacaaacatacaagttcaaattcgacttctataagttgtaacaaaaacaacaaatttaactatatatataggcaacatatcctatgcacacaggccctcacgtgtacacacatgcacaccaactaaaaaatatcaccaaaaaatctagaaaaattcatacacgtactttcaattgtattacacctagggttaaaatcttaacatatatatatatatatatatatatatatatatatatatatatatatatatatagtcaaatttgttatttttgttacaacttgtagaattcgaatttgaatttgtatttttatgaagtgatatagtattaaatattaatctatcttgtattttctttaaaaaaattataatcatttagttgacatgtaagaaacacgtggacgtccacccgagagattaaaatccatcttctagcgcgtatagctcttgccttcttggcgcattggtcggctcgggcatctcggcatctcgttacctcttatctgaaaccctctcaactctgaagctagagaccatgcatatgcatgggcaagacatttgatccggccgcgcgcggctagcccgaccgatcgtgccgtctcgcgggagcagtaaaattccggttagtaacagcgcgaattgaacactggtggagaaaccatctttactcggttagacaaaatccacaatagtcccggttgcaataaaaaccaggattaaagattatctttagtcccggttcaaaagtttagagctgctttttaatctttattccc

SEQ ID NO: 45777 - DNA, 670 bp, Oryza sativa
tattgaccaaattattgtaaaactatagatgtaagatggtatatcacaaaactacaaacttaacaataaatttatcataaaactacagttttattgtcttgtagttttattgtccatatattttattataaaattatcttaaaatatattttggggttgaaatttttagcattaacgttatctttgagttataatgtccaaactttgtgattgaattgatataaaacctgtagatatccttttgtaataatccaccttatatttgtacttatgtgataaatttagtgttataaatttgtagtttgtgatacatcatattaaatttgtagttttgtgatgatttaactaaagtacctgtagtattatgaaatttactcaaaatcttaatacaaagatacatacaacttatacatattctccaaaatcagttaacccggtgaaaataaccaaatcatcacgttatgctaataattcgatacaatgaaataacctgcgttttttcttcttctcaaacatacccctccttaaaaaaatatattctagcaacgaacctacatgtatgtatccagaatcgtagccagagttagctatcactgtaaccacgcatgaaaggcgcaacaatagactttcaacgagacaaatagctggttagcacggtacatgagacaca

SEQ ID NO: 45778 - DNA, 629 bp, Oryza sativa
ggaaaaaatgttgatgataaaatctgccaaggacaaatttgaacatctccaaaatcagtatgtaaatttgatatcagaaaacaatgctctccaaactgaaatcgaggagctgaagtccagaatcatagagctgcagaaaactcaagagattgtcatggttcaacatgtagaagaatgccaagttgctgaagataagatcagaagattggagtctgaagcagaaatttctgcctccaacattagtcagctagaaaaggtagcttctgacctagaagggagggttcaaaaacttctggaggattctagatctgctgaaaatcacaaggtttgtgtcctagcctgttcagtgacaaaacatattgctatttaacctgtaagattcatgaggtttgaattttgcagcaagagttgcttcagaagattctgaagctagaatcagataatcaggagcttctaggtcgagtgcaatctgttttgaatgagaagtctaatgatacggaatctctgcaaggagagatagctaagcgtgaccaacaggttgagacacttgagaaccaggtcaatcagctttgcagtattattgatgagaaagaacaactacacacttgtgctgtagaaagagagaagaa

SEQ ID NO: 45779 - DNA, 922 bp, Oryza sativa
ggtccccacctacccgcattaatggcgaccggagcggtcccgccacgccacatttaatgcggtgtgcagtgcactcaaccgttctgtgaccggtccaatgactgatgggacccaggatgtcagacgcaccatcgcgtgtgtcaggcgatgtgcagcccgacatatcccatcaaataatgatggtgagaggttctcatcctcttatcccagccggagtcagtcttcccgctctggtcaaagcaatgctcccgtttctcggtgtaataggagcccagaagtcttcacccattaaatggtgactgacaggggcaccccccgtgtcaggcggtaagatttgacaggccccatcatcaagacgacgtgcgcttagcttcccaagtcaagatacaagacatgcatttaatgcaaagattataatacttctccaccagagctaggttaggttgttgggcccatgtggtaaccccttgaggtataaaaggaggtccaggcctagtggtggaggaggggggacttccgagcgaactggcgcttgagtctcgcagccccagacacttgtgttctacactcgaccataattccaaacacaggagtagggtattatgcttcttagcggcccgaacctatataaaccccttttgtctcatcgtctttgggggattgaatcccctcaagatcacacagcttcgctcaccgaatcctcgaatctcacccgctgcccccggccgaactcacaaaggggggcctcacggttccctggtggaggagttcattctccgacagattgctacactaccaatttataggtagtgttaaattttaggtaagttttggcactaccaatattttggtagagatttctattgatttggcaagttttagcatccatccaaacatcacacaagtactatttagattaaaa

SEQ ID NO: 45780 - DNA, 989 bp, Oryza sativa
atagtgatgaaagtttgactctcaaaatttacaggaacatatttttacagagacttttcactgcaccccttttactttatgtaaaaaaatataccatctcaaaactgctgcaaaaccaaatggaacatcaaaattatattagaatagatgtgtaagtcctacggccataaagttgtgtcaaatacattctctgcagctctgctcaaatatcagatgacatttttgacttattaaatcttaagagaaccatgaaatcaaccagtaaagtccaaataccatttacattaacaatgtatattgatgaaatatgatagatcatactttgatgtcatgttttgtgcctagtgcaaattaaataaaagacaggcaaggagagcattacctaaagcaccttcaaagaaactttgcaacacatataactaccaagtgggtgttttggacaaagcatattaaaagcacacgtagaaagaccttgagtaacctttttaggttactaatcctctgtagcggaatgcagcatagcagaacatgaacatccacaatgcaattatgtatccatgctatcaacaccttgttcaaatactagagctaacatttccaatggaaactggcgcatgtggctccacttggctcagttttttcccttaaaaactgcagcttttttcaattttaggatttgatgtgagcattaattttaaaggttattattcacttttattgcctagctctcttttcatgattgctaccaagacaaataaacaaacttcaacctaaaataattattaataatcattttcagatttcaaaattagcattgttatcataactaattgtaaacttcacttttttttttcaaaacagcttaactttaatggacagatccaaccagtaccacctaccattgagccatgctcctcctttagacacatcaaatacctctcagaatcttgcctgttttctgaaatcttttcattgcatttgttttccat

SEQ ID NO: 45781 - DNA, 512 bp, Oryza sativa
atgtggttcgttcacccttcaaagttcagagtagtagacagtgcgcattagcatcggattgatttgtcaattgtcatagcaaagaagccacggatgttaggcaatgtcctcatatcaaataattagaagaggtcaagctgtgaacccaagtcgtctagcccaccaccctgtggagctagccggaaaacccctgggcatttctcatcaattgtcatagccacagcttgactcatgcatgagtgtttcccgagtaaggatgatttgtctgatgaaaaaactttgtttacgagaaatcttatttgacgcgttttatacaaccatcgttttatttatgatgattaaattacaggccgaagggtaaacgatactagtgttaaactcgtcgtactccggtcgaagttagccaagaaacgcaagccatccaacaagggggaagaaaatcatgtcttggacattttgttcaatagtgttgatagctggatatatatgtcgcatcagacatcttgtaccat

SEQ ID NO: 45782 - DNA, 726 bp, Oryza sativa
tttgttttttgtttttgggcatatagggatacttttatagaattgaaatattttctgtgtactatatcattttctgaattatgatctgtactatgtgatatattcaggaatgcctgttctcatagatgtttctgttgtaagaacatttgtagttgacttactactttgatggtacagcatacatttattagatagtgttgactcagttttattctctcgctaaatgactgaaaatttgtgattgctcatgtggtggaattcgatcagagtctatccgaaaacatgcatccagaatattggttttcccagatgcttttgctcaacttttgttaacatttacgcttcttcactctccaggttgttgctggatcccatccccaccctgcaaacattggtgaattgttttctgagggctcgttgaatccatatgccgaagatccttatgcatttggctagaaggtaatatagtttccctttttttacttattgtattttctaatagtaattatatgtctgcatgaataatccatcaaggactgcatgcaatgttctaaaatgctagagtagtgcttcagcgacttttacttttggtgaatagcattctcagttgtcagacctgaaacttgaactcctctagcaccatactgcaactttcgtatgcttgccgtccttgacttgttgtatgtcaaatgtacctgctttgcagtgtttggaaatgttgatctt

SEQ ID NO: 45783 - DNA, 680 bp, Oryza sativa
cacagttcattggttttacctactgctggtttcagtagtccacaaaatcatgataggattccctgacagaattgggaatagaaaactacccctatgttacagtggagaatccaaaacaaaatttaccggggtctcaaacatactaattatttaattatttaccgattatactaattatcatgacataaattagctagaattagataatctacccggggtcctaggacccctctagactacacataggtacacccctgcctatgtatgtatcatgccgccaggattatataactgaaacagccctactaacataaacaactttgcaagtttgacattgatcaatcagaagacagtttttctgctattaggcattataaccacaattccacaaaggcagtgccagatatatcctaatatccagaaatcgaaactgtgacaggagcacaagacaaccgaactatataccccatccagtaaaatttccataaataatggtaaacgctgaaaaatataccgtcatttctagatcagtcttcactgaagcctgctccttaaccagcttttctgtgatcaagcaataaaattgagggaaaaatcagtgaacgcacgaagtagccagcctccctctaaggaaacaaggggaaaatgaaaccaaaacctgctgtgatcttaagattggc

SEQ ID NO: 45784 - DNA, 546 bp, Oryza sativa
tcatgcagcttttcctaaaagctgccccaaacagtccacagcttctgagaatctgtagttacagattctgaaaaatgagctaagaagccagaagctggagaagctgggtttcagagcttttccagattcgcagaagctggctaccaaacagctgcttctcagaatctaaagctcccccaaacaggcccttaatctcttcatcaattccttgccacatcataaaaaatattgacatggcactctatttagtgagaatgaaactcccattgggagtggccttgggcggctaaccatccatgtgggctcctttagctgctaatttaatgtcctactgtctaacatttatatgtaatatgctggctaattgcttggatttcacaagtcatgttggacctagatgctagctaagtgacgcctagggcgcgccctgctgaccctctagtgcctagcgccttcttgaaccatgatggcaaaacacataaatacaagtggccaatatgcaacctcttctgacttctttggtaattaatttccctttttcataaa

SEQ ID NO: 45785 - DNA, 544 bp, Oryza sativa
agtagttgttcgctttgttcggcggccgtttccgtgtgtagctgtgtatgccagccagccaagggggatagagggaggaatctgtatgggccggatgggctcggcccacttgaagcagcccatcattgatcagggaactgggggaaatttgcatcctcaagttccaatcgcatcccttaaccgcaaaaccgcgtacgaggcatccctagtcctaagggcatcagcaatgtttgctatccacatcggtattagcgtgggcccagatgacaggcggtaatagagggagacgtgctccacattgcttatatctgtgagttggcagtaaggtggggtccatggggtaataaaaatcgtagcaaggacagagcatgcatgcaacggttgggagaagcaatgcttttgctgtcagaaaacactgtgtacatgcatattctatttccttgcttccggcagtaggggtatgacccggttgtagttatgtactagccccacaatgcttaataccaggtagtaagagtgtatttattgcttactacccggtttg

SEQ ID NO: 45786 - DNA, 548 bp, Oryza sativa
gcttggggcagcctacaaaagctaatggatggtttcaatcagaactgtggttcttcaacttctcgttctcatcaaacttgtttgggaaaagaaatatcaaatagaggatctagcgagaaaaaacagctatctattcggaaaattcgaacttcaagatgttcaaaatataaaaacacatcactttctgatattggatatttagcaggtgaattgaatggccaaccgacctgttcagtgaggattgatactaatgtttcttctgatgcattgttcaattctccgaatggtgctcacaaagctgcacagtgtgttgaaggtaatcatactctaaaattaacatctagcctgactgacacacaacagtttggcttggagaatgttactcaagaaacatgccctgggtacatccatggagagtgtggtacttcaacttctgaacgttctctaaataatataggtgggttttcaccagactctgttttggatatagcttctgttacatgtgaaagcaacacttctgcaacccttgatgttatagtgcatgaaaa

SEQ ID NO: 45787 - DNA, 796 bp, Oryza sativa
aaaggtgcttcttgcatgttaaatgtgcccatgttcaatatttcatattagtatttcctgtgcaaacagagtctgttcaattctacagtgtaactacagatatctattgcattccattccttaaaatattagtatttcatgggcctttttcatttatgctcatactttccacgggattcatgtagactattaatgtatatatgtagaagcatatcgtttgacttgagaggtgatgtcatggcatttgtcttgcataatactttcataacagacagtttccatgtactatattgtaatgaaaaacatgggcaatattgcattggagactgaaaagtgaaaaattgacctgtgtttgtgaagtttgagagggcaaagattaaccttattaccaacatgtggctccgctacattgaaaatatatattttaattcttccatttggtttaatattattgatctttttgatgtagatgtcatttcagatgtgtttgcctactcattatgaattttttctttatctgttgaatggttaataaattacaactcattttcctttcttgtttatacaaaggacttgtaaggaaaacgaagataagacatttgccaattgctctataccacaagagaagacagatgatgagatcaatgcaaagcttgggctttcagatgcttctgctgatgaagctaatggcgatggatcaaactctaaaggtttgaatttttgactctatacattctggtcagaaaatgcaaaattttcttttggtgctctctatcatatctgatttgtgacaaac

SEQ ID NO: 45788 - DNA, 674 bp, Oryza sativa
ctgcaggtcgactctagaggatccccaaatacaaatttatagagtaaattttatttttatccatgtacatggataaaaattacatgaatttaacatgactaatgacagctagagctagctatacaagagctcacctgctgataaaggtggagacaatttgcctatgtaggaactaccgaactagaaagaagaatcatgttctgatggagtgacttagttatctttgttaagaaaaaaatggaaccttaattgcgtaaaacatacgttcacatcatcatcacgagtttcaattctttgtggctagctaaacaaatgaagagaaatagaaggtgatccactctgctttggggggctccgcctccgtcgaaggacatattcaattcttcatgttagttgtatataaggtgtcctttgaaacacgggagttataaaaattttataggattagttcaattctttaaaaagattttttttcagaaactttgtattccaaataagcgctaacatgcttatataaaaatgtcagatccaaaggtgcatgtcaagattcatgactccatcatgttccaaacttacaactcctgtatatatttataacagaaggtgtacaaaaatattggaggagatgctgtcgatcacaccgggagagaatacccctatgcagagtaccgaac

SEQ ID NO: 45789 - DNA, 574 bp, Oryza sativa
tcccaaaatcaaaagatcaaaccccaaagtttcccgaaacaaatccaagtgaaaaaggcatgtgcatatgaaaaggggttcagagggctcttaggttttccagttggcttgtcctacggtcaaggtcggctctgataccaacttgtcacgcccagaaattcacgaaccagaatttctaagctgaatgtgcattaaacccctgtccaggaccagccagggtacacaaacgacaattgttgacatacagatccacgtcttacaaaaatagaaaagattacaaatgcagcggaaaaagataaaagcgagctaagcctgaaggcttgacttctgcagcgggcgactccattccacaggcatccttgacggcagcgacgaaaccaacctcttcgagacatcttcaactgagaaggacttcaattctggtgagggggaaaagagcaagactgagtactacccacggtactcagcaagtcataccggaagaggaggtatgatgcaagatatatccaagggaggctaaaggttcttttgcataaagccggcatttcaaagcagtagttaaagcagtaaaaca

SEQ ID NO: 45790 - DNA, 636 bp, Oryza sativa
ttcataagaaaatagtattactggaagggtagatataaagggtattaaaaaaatacaactcctcgtgctaggattatgtaaggaagtaaaatggaacttattttgggataaattatagaggctaagggctctccttaaatcgtcggaatggaaaaataggaatagaaaaacacagtattatgttaggaatataagtgcaaaacatagaattacaaaacacggaaatgactgtttgattggatagtaggaaaaaaaatatgagagagatagactcaaaagaaaattttcaagaggttcgagctcttgctaaattttctccaaaatctttataggatttatcaatcattccataggaatttcaatgtaggataggattcaatcatttgtttcaaaaatctttatagaaaattttcctatagaattgaatcttctaaaattcttatatttttcctccaaatcaaaaggcccctagaaaatgaatttattttagaaagaagcatgtaaattgcagcttaaactcctgttattcttttttccacgaaaaatggattgatgggcctaaagcagcaccgaccagatatttgaagtgccccgagcggtactgcggtagcttttgataagttcaacgtcatgttt

SEQ ID NO: 45791 - DNA, 648 bp, Oryza sativa
cacgcccagaaattcacgaaccagaatttctaagctgaatgtgcattaaacccctgtccaggaccagccagggtacacaaacgacaattgttgacatacagatccacgtcttacaaaaatagaaaagattacaaatgcagcggaaaaagataaaagcgagctaagcctgaaggcttgacttctgcagcgggcgactccattccacaggcatccttgacggcagcgacgaaaccaacctcttcgagacatcttcaactgagaaggacttcaattctggtgagggggaaaagagcaagactgagtactacccacggtactcagcaagtcataccggaagaggaggtatgatgcaagatatatccaagggaggctaaaggttcttttgcataaagccggcatttcaaagcagtagttgaaagcagtaaaacagttgtatattttgttattcttccaatactaaaattgagtctaaaagaaatactaaactgtggttgctatctcgagctttgccagcggaacgttagttggttcgtgcccgaagctctgattaggagaagaacaggctgtattttcctaggtgtctagaagcattccgggctacgttctttaagccccagcttccagtttttaccgggtaccgagctcgaa

SEQ ID NO: 45792 - DNA, 2979 bp, Oryza sativa
ggggcggcgcggagctcctcgtcgactcctcgtgctcgcaagctccccaacacgcacgacggcagaggagggcgagaacgacgacgaacggcgaggcggcagtggtgtgatggaggaggggaagcgagaggtatgggagggggtgtgggttttataggtggcgatgtcggtttgagagaaccgaccttggggcggtcaaggagatgaggcgggtggcgcgagcggtcaagcggggcagaggtggtgacgccggcggtggtcggggaaagggaaaaaaagaagggggggggaaaaagggggttggtcctttgccatattgaggagaggggaagcagctgcttctcccattcttggacgatgcggcgtggagtggcaggggccatggatgacgtcggcgatgacggcggcggtcggtttgtcatggagcgggggcaaggcggcagctcgtggcgtcggcggcgcaagggctgatggcggcggcgttcggccggtcggccacctcgcgagcgagcgcgcgcgcgcgatgcgggggtgcggccggatttcgaacggcggcggcgggaaatcggcgccgaggagagggagaaaggaagcagagggagagagcgaggaaagagagaggaagaagagaggcgatgcctctctctctctcggcgcatgcagcgcacgtgcggggaggaggtgaagcgggctgagaggagatgggccggggaagaagagtcggcccaccgagccagagggaggtaaaatagactttcacagagaaggcgatttggagagaattggagtttggatttggattcaaattcgatattcgaactcgagggttcagggaggaatcaaggaaggctcaagatagggtttggtatttttcggaattgggagcgagtgtttagcgaggattcaaaggatgcgactgaatttcggaatttgatttggagacttgaatcggaagagtaatttgaggtggaggattttgatttcgatgtgagggaacaacgggatttgagatgagatcttggcacgacttagactcgcacacaaagaacgaaaattttcgcaattaggattttgccgaattagtttttaacgcctcacgaaaagcggagcgttacatatatggactctaaacatatctttcaatatttgttatgtttctgtttcgaattttagttatttctaaatgctctagagtcttcttccaatagttattttttaatttttaattttagttagttctaaactgtatttctataatgactctaacatccacttttattttcttttattttttagtttcaaaattcaattagttctaaattgtataccgatatggactctagtctactcttcaatattccttaaaaaatatcaaattttagctattttgaaattgtatttctatatgaactctattttttttctttttctccgattaatatgagaatttctaagccgtgagagcaaacgtggaggctttttttttctattactttaataagttaatatatttgattgcaaccacattgaaaagaaggatttgattcttgtctgtcacaccttgttataggtttctaccaagtgtgatgtgcttcctagctagcgtagtggcaagggcatgttgtttcaaccctaaagactcatgttcaactcgctcacactttcttcttaactacttggcgccatgcttctcttagttgcccaacgttttatttggatatcatgtgacgctagatatacaagctactccatataaaacacttatagctgcatatttacttgcaatacatacttcttccgaatatggtttacaagtaaacgcttataattcactactacaaaagtgatttttctgtacgagacctcataatttttgcaaacggaccataactagtggcgcctgcaaaaatcgcgcggcattttcacaaacggctccttaagaagcccgtatagaaaaatcgattttcccatacgggtctcttaagatgtccgcatgcaaaaatgatgtcatttttgcatgcggctcacttaagcgcccgcatggaaaaatcgatttttccatgcggctcacttaagcgcccgcatgcgaaaataaaatttgaaaaatttgaaaatttgaaactagtgtatctcactcatacgaactccaaattggatgattttttttcctaaatgtttctaaaatcatgctctatcatgttattgtgttcttactgttattatttaggccattttttcttgtgactttattttatcaatttaaaatttaaatttcaaatcttcaaataatattatgaagcaataaacgatttcagctgaaaaagtcaacaacaacaaagttgtataactcatcaagatctataatttctattttggtcatttcttcatttgacaaagtgatactaacattttcacaaaatttacatctctctcttatagtttataaaactatataatagatatgtacattctgtgaataatcttacaaatcactttgtcggatgaataaatgaccaaaataaaagttatagatattaatgagttacaccaatttgttattgacgactttttcagttgaaatcatttagtatctgaaaatattgtttaaagttgttataatttgaaattcaaattcagactgttcaaacaaagtcatatagaaaaatgaccaatacaaaagttgtagatcttgataagttatacaactttgtttttgataacttttccatttgaaatcatttactacctaaaaaactatttgaatttcttatattttaaaatttaaattttatatagttcaatcaaactcggatggagaaatgaccaaaagaaaattggtagatctcaacgacttctacaactttatttttggcaactttttcatatgagtttatttatgaccataaaatttgattcgaagttctcacatttttaattaattttttaatgattatttttacatgcggaccacttaaggag

SEQ ID NO: 45793 - DNA, 3306 bp, Oryza sativa
cggcgggcgcggcggctcggcttcctcggctcggcggccgacaacgacgatggccgcggtgggagcggcgacggcgggcggcgggagcggctacggcggcggcggcggctcggcggccgacaatgacgacggccgcggcgggggtgacggatctgatgccgccgccgacggatccggcaccggtgacgatgatgggtggcgggggcgatggatccaccgccgacgacggccgcggtgggagcaacgacggcgggcggcgggagcggctacggcggcggcgggctcgcagcggggtcgcggcggcggcttggcaacctcggctcggcggccgacaacgacgacggccgcggcaggggcgacggatccgatgccgccgccgacggatccggcatcggtgacgacgatgggtggcgggggcgatggatccgccgccggcgatgacgctgggcgacgggggtgacggatccgccgccgacgacgacgccgagcggtgggggtgacggatccggtgccgctgccgacggatccggcgccggcgacggcggggggtggcgggagcgatggatccgccgccggcgacggcgtgcggcatggatgtggcgctccggtggcgggctagggtttggtttggggttttttcgattttattttttttgtttgctcaatttattttcgcatgcggccggtataagcaaccgcatgcgaaaataagattttcgcatgcggttgcgccggccgcatgcaaaaaggatgatttttacagacgatttcgtccatgcggttggcacaaccgcatggaaagatggttctcagccgtatggaaaaaccatatctgtagtagtgattaattggaagtgcatctaggaccctattgtaggttattagcttctgcatttaattttaaattagtctattcacccggtcaaaccccccccccccctaggcctaagtgatcctttcattaataatcagggaaacaccattagtttggtgttgaaattatgtatgtaactctaactaccaggattcaaatcctagtgttcataaatatagttgcatgcatcttagttggtgcagggaccaaaagttacactttatttgtaaaagaaatctagtaataatgcctataaaatacatggaatggcttgttaaatatgctttttagtcttttgtgatataggtcggataactgtttttttttccaaacatagttacattttatcgactttgaaatcatcaattagtcacgaagctatgtgttgcacgggcttatattattttttagcataaatattaaaagtttaatcatgtaataaatatgttgttggctgtttttctttttttgaaatgcagtaagttagataaaaaaaggtccacatatgttacatcttgctaactgttatatatttttgaaattaaattaacaaaaccctaaattatgaggccttaaaagtccatgatataaaaattgcatatatatatatatatatatatatatatatacacttcatataactaattcttaaaatgatatagtgctctacgacaaagacgatctatttaatcaacatcatatttttatgattcctcggcgtgcataattagttggtatagtacaccgttagttaacccagaaaataaatatgttttcgatgtaaatgtgaacatgtaccttttaattatgaccaacagagatcatagctcattctagcaccatcccttttaggtagtatatagaagtagatatatagatactggtattggtccatttgcactaatcatgcgtaccaccatatgcattgaaactaattgatgatgaatgtcttttctcaacctcatggtacatggaggaattggcgccattatcctcgctctacgacagtcaaatcaccgacaaaatctcaatttaaactcgcgcgtgccgatttactcatttttaatttaaaaaaattgagagtgaaagtgcgaatatatgtatagtaataattacttggctagattaacatgtgcactatgtgtaatcacaagttcacaaaaaaaaaacatgtgacgcaaatgctgcttaccctaaatagaaaaccaatgcaattttttttcatacaataagtatatatgacgcggttatacaaattgaaggaaaatggttttgactgtgaacagcttgcacacgtacaagaccccttaagaagttaagaaaagcttatatgttaatgtgtacagttagtataatcatcaattgaagctgcaaacttaattgtaggaagtatttgcataatctctcttctggaaccatccaatctatagtttctagtaccctatatgtaaatgtgagaaaaaaactctgtaaagttttaccttggacatataccctctccctgcctctcgggtgcaccaggacatcgtgacggtgtacattatactatcagttattgcatgtatggatgtggtggatatatatgttatggctttaatagatgagagcatagcattatgatacaaaatctgcatcaccaattaattaagtaaaaatgtagtactagctagattcagagaagttctatcgtgcttagtttggaggtatcggctagctatatccatttttatgaaatacacatcaaaggttaggatgttttacacacacacacacacatgcttgaaattaagggttttagaggtaaacttcactttaaaattaaacgttgtcggttgatatatgttttaggccctatttgaaacatattttgcgtgcattatttagacagactgcttacttagttaacttgataaattatatttttagaaataaactttacaatatcttaaaataactggtctaaacaatgcagcagaagaattttatttttaaaaaaatattttaagaagcatggaggaaataatccgtgacaaaaaaaaatctggaaaaaaaagctgaaaagtacacggctttaagcactgtaaaacatatcgtattattagagttgttaaactacagtaatacacttctagctactctttgcacgctccaaggataatatgatcgagtacatgaagatcagtagatcacccacatcacaatgctaaaaatagttctagggatctcttaattaagaaaagttttatgccaggccagatgaacaaagagtgtggccttgtattgattgctgagagatgccatgcagatatacagcaccaagattcacacacacaaagcagtactagtataaaatcaatgggagagaaaactaaaattaaagaaatggaaaacggttgtacttggggaacatgtgatccataatctagctagct

SEQ ID NO: 45794 - DNA, 547 bp, Oryza sativa
atcattctctgacatgttcctcgctttcgcaccaaatgaggaccggggattccaccaacaagaacaagcagcagcgacagcagcagcagctcgacgtcggcctgaatagctagaatcaatctcctccaggctccacctcgctgcaatggagagcataattaaagatccatatgggtcctagtagagagataattagtaaccaagattatgagtttaaatctccatagtaacgaattttagattagattggttgcggagctaagttcctaatttaaatgaccgcatatatccggttatatatagaggccggtaaaaaatacccttcttaaaaaaaaatagagagaaaactgaactttaaccccgttcctcgcgcgctcagcatcgcggcagcagctactccggatctggagtcgattttcaaggtccgtggccgggaggttggatggagtggtccggggcggcgcggcgagcgttcattgacgggcccgcaacctacgagtgacggtgtgactcggactctataatgagtaatgaattaggcccatat

SEQ ID NO: 45795 - DNA, 638 bp, Oryza sativa
cgtgctcatccaagctgagctgagccgtagtcaagctaggcaggaaacacattacacatagatggatggatagacggtggatggagtgctccttccattccaaaataaatataagtatttttagcgcagtgataagtcaaatattttcaactttaactattaataaaaaaataaaaaaatcaatcacgtaaaattgatgtcactagatttattattaaataaactatcataatatataactcttttatttaaaatatcttacttttatatagattttgttggtcaaaatagtatatcagaaactatgttagagtctaattttatgactgagggagtacctgatttgtcgtcgcccgagcggtgagggcgatggtgaggcgacgaatgaaggtacgtgccatggttaggagggagcaagacagtgttgacatgcatgcatcgcctactctcaaactctgttttgatttgatctgtttccttatggttttcgttcagcgcccttcgaattgcctcacgaattaatcctcaggcagccaggcgatgcttactttgaacctggcactatgacaagggggctactacttgctccctccgttttatattgtgcatcatatatttttttttaaaaaaagcaaact

SEQ ID NO: 45796 - DNA, 1531 bp, Oryza sativa
ttttggattgataccaaaatatgccctaccaatttattagtaccttaaatagtaatcatataggtttggattgaagccaaattgttagtcatacctatgattaatttgtcactaatctagaaccttcttctctatatcatcaatacttgtcatcatattggtagcaatccaaacatatataatgaatctctacccaaccaaaaaattgatagtaccaaaacatgtcaagaatttggcactaccaatgatttggtaaggtagagatctaaacagcctcttaaagtcgtgtgactttatcgctgatatgtgaacctaataaatactacatccgttttttaatagatgacgccgttgatttttctcacatgtttgaccattcgtcttattaaaaaattttatgcaaatgtataagatataaatcacacttaaagtactatgagtgataaaagaactcataacaaaataaattataattacgtaaatttttttgaataagacgaatgatcaaacatgtgagaaaaagtcaacagcgttatctattaaaaaatggagagagtattggattcatatgtcagtgacttgtgactttgaaggtggggtatcttgatcaatccccacctcaccaactgcagggcgggcaagcaggttgaaaaagaaaaatacaaagagaacccaagtaatcaagtggtaatataaccgtggtctgagtcctctgataggtaattaggtagatatctgatgctaccggaaatcaatctgcaatctggcatgcggagcggacctcatcattttctcagttaagtggctaattaacgcctgatcttttccgggcatttttatctgaatccgatcgataatacgcacgatgcaattttcacaggtactccacagtgtccgtcgatcggcatgcacgtacgcatgaatcaacacggcagcttttcgatgggtagcatgttaattaccaccatggccaaccgacgttaatttgcatcaaaaggggttaattagctgccagagtgacacgtcgaccactgaagctgtgaagactgaagaatcatcccgctccatgatttgccgcgcccatcgaagcttttaaacgtacgatcgacaaggctttgctttttttttgggtagcgatacttcaacgagagagaacaatacttccatcgttttgttttcccacatgatgatgttttgcacaggtattcagaaatgatgcagagcaagtgcagaatatacaatataatgcactcttggatactttggtgggtgtagccttgtatatatatgttcagaaaataatggttgatacttacctccaggcataatcaggaccatgggttaaactattcctagggcttggtaaacaaaaccatgacagatgtacgggttagaagagatgtctttaggccttgctttgacagtttgactgcatatcaagttatgaaccctatagctaagctagctagctaaacctgcaatgcatttgcactgtatatcttcttctataaaaggcctacaacccccaaca

SEQ ID NO: 45797 - DNA, 943 bp, Oryza sativa
tttttttctcgtatctgtatggaaattcctttaaattcagccttaaatatatgtaaaaccgacctaaactttttttagaaatcgcagtgtgaatttaaaaccaggagtttttaatccaacgcgaaaatcctgagtgcaactctctgtctcgaatatcaaatcggaagttccgttatgagttcatgtttgtccataaattttggacttaatgttcataaattttgggtgctaaattttgatctacgtgatatgaaaaaaaaatatagaaagacaaaaggacttcatctatagaaaaaaacatcatcttattccgataaaaagatggaaaagtttccacaaggaaactttcaactgtaataaaaactttctataataaaacttatttataaagaaactttaataacgacatttttcatcgtagattatatattacgaattattgggcctaactaactataaataaacctacttccaaatggcgcacaatagagaaatggcgcacaatagagaaaaaaataaatatgtcatgcacgtacgtaaaaataccgcgtaaaacaaaaaaaaattaacatatttctttacttacaaggaagatatacacaccacactcacatgtctaacgattatgttcctaacgtacgcttaaatagacgataccattagcctcataaatagagaaatgtatccacgagacatctctaattgtagcgcccgttccgtcgtggcgcctagcgggaaaactatctcttaaaaaccctatttgcaaaatccgtttctttgcttgttgtctagtgtccgtgccatctcagatctcaaatcctcgatctatcgtcgagttcaatcccgaatccaaatccttcccaaatcaaatccctccgcaaaagtctattttgcctccctcgggttcgatgggccgaactcctctcggcccatctccccctcc

SEQ ID NO: 45798 - DNA, 1310 bp, Oryza sativa
aataggttattgtcacggattatttcctcaacatctttagaaatgtggttttgtgttaaacaaatgtcttctacaattctactactacattgcttaagcacttgttttaagctattcatttttatatttctaaaaattatataatttatttctataattaaatacttccttcgtctgtccagatcgatccgttgtcctagtaaaggtcaaaatcccattgtaggtgacaatattttgagacgaagaaaatagataaaccataccaataacctaaagaaaaatttgttctgtacagcgtggagtcgctgagagaggaatggactgagcgtactgtggaggcacatgagagatgatgagatgctgtgtggttaaagttgcgtgaagcaacaacccccccgtgttgtgtgcgtgcttgcagttgcaggtgaggtcggtacggtgctagcttggcctctccgtgtttttctttcttttttcttttttttttctggcagcgtggcgcatgccgaattccccgagaggaggcaggttgggtttgggcgtttggctaagggattacctattcatttatcgataaatcttctcttaaaacggttcaaaaatcaacaaattccgaggaagaaatttgccaacagatttatagcaaaatagtttgggcaaaatatgacgatcaccaaccgagcgcaaagagtgtttatgggcgaaaaaaggtttgtaagcgagcttagaagcttactctatctgttcacgtagtattaaaatatggccctgtttggatcctatcttaaaattttttatccgtcacatcgaatgtttgaacatctgcatgaagtattaaatataggcttaaaaaaataactaattgcacagattgcaactaatttgcgagacgaatcttttaagcctaattgcttcatgatttgataatgtggtgctatagtaaacatttgctaacgacggattaattaggcttaataaattcgtctcgtggtttaccaacggattttataattagttttttcattagtacccgaacaccccatgcaatactctatataatacctgatgtgaatgggggtgttattataccctatataacacccccatatatcacatctcgtattaatttttttttgttttgtgatggaaggagcacacgagccaaggtaggcgccgacagtaaacactttacagcacaggtacgtgtctgtaggtagccaggtgggtacaccggtacaacctattccctccgtcctaaaataatacaaaccctgtgtttccgtgtacaacgtttgaccgtccgtcttatt

SEQ ID NO: 45799 - DNA, 649 bp, Oryza sativa
gaagccaaagcacaaaatactattggatcatatatggttggttcgggttgggattagaatccgacatcaatagaacttctcatgttagtatacattttttggttgctttgcatcattgcatggtttcaatccattttgttcccttctgatgatattctagctgattagtttagtggctcaggaaatacattaagaccttcaatattgtggacacttactaatgggttgttgagtcgccctaggtccaatagcggtttcagaatatcacaaccattctgtgattatgttagcggttgttgaggagcagtagacaaatgtggcaactctatgcaatgtggaaatatatgtaatataagcaagaaacttcctcaactttgacagcttcatatcagccaaatgagtaaaacaataatgagatgacgtccatttagaagaatagccactggaacaaggcatcttggattggagtttaatgttttgtacactttacacccctgttctttagaagcaacttacaatgtcttttgtggacagttagtattttttactactgtttggcctgctcttgtcttgatatgtttgttggacatgtagatcctagttactgcaattgagtatcctaattacagatcaacagaagcactccaca

SEQ ID NO: 45800 - DNA, 1321 bp, Oryza sativa
  unsure (1)..(1321): unsure at all n locations
ccccggggtagatgggccgagagagattcggcccatcgaccccgggggaggcaaaatagacttttgcggagggatttgatttggaaggatttggattcgggattgaactcgacgatagatcggggattcgagatctgagatggcacggacactagacaacaagcaaagaaacaaattcgcaattagggtttttaagagataattttcccgctaggcgccacgacggaacgggcgctacaggttgataggtatgattcggttctttagccaccagtaccccacttacccatgggtaaaaaaaaggtgtgcctaaggtaatagctctaatccagtttatatgagattgatatggaaaaccatatagtacaaagacaacagatgaatccggcgttactgacgagatccttgtcgagatggttagacgagatctcccgacgaatctggcttcgtaaactatggtgggtatgttagcgctataattcgatgatctgaaccccttagggggtgtgtcttttataacgtgagttgccttagtctccaagtagatcttggagagaatgaaccctacacgatatagaatagacccaattctctccgagtaggactctgttaatcaccggcctatgaggatattttctataatatcttatagatttccttatcacctacggtcgtatgaccgatggtataccatactcgtatattccgtaagtcataggatatgaggtatgccttatccgtaaccagtcgtatatgacataattcttacatgattttttacttgcttttgaatgttaatgttaaaactaaggttgcctaatatgatgttggtgcttgccatcgtcatcatcggattattgtaaaaaatttaagtgctctaaattagtgtagtggtatggatatccattacctgtatgggtatggtttggggagaattttgcacccgcggttagatgtgggtattagagcgcgaacttttaatcataagtttgagtatgaggtaagaaaacttgcagtagaattatagttcatgtggatcaatttatttgtgtactgaagagaagagagttgtaccaaaggtaacctagtaaccagattatttgagcaggcgaccaggcatgaggcatccactgtctagctttagtagtactactattgatcaagtcaatgtaacaatatgtttggtagcatatgatgtattcttgatcannnnnnnnnnnnnnnnnnnnnncaagccgatgcatatcaaagaaatgaatacaatgagttccacttaccatcttgggaccacaaatatcttttaatctctctgaaccagaga

SEQ ID NO: 45801 - DNA, 6338 bp, Oryza sativa
gtcatctattaaaaaacggaggtagtattatattaagacaaattttgccatagaaaatcgcgccttcgtggttttagcagtaggacaccgtacgaagtgagttttggtgaacactttataaacgcggtaatttactagcagacaccacgctgattgtttcagtgtattttgtgctgacgttgtgagagggacctacttttatagtcggcatgaccaagatgcccatatgtgttttggttacagtggcagacgagaatgctagatagcgatcagtcgcgcgcctccctccccgcgcgactggacacgtgtcgtgcgcggagagggggcggccgacgcgtcgcgagggaggaccggaggagcgagttttctttttttttttccgtttctgttcagttgttttttctttctccggttttttcgtttctgttcggcctggttttttttcagtttatcttctgtttggttcttttttcggtttttttaaagatatataaatacaaagtttgtattcatatgtatactaagtttgtattcgtacgtatagaaagtttatatacgcgtatacacttgtatagaaagtttatatacgtgtttgtatacgcgtatacaaactttctatatgcatatacaaagtttctatatgcaatacaaactttgtatatgtgtatatattttttatgcattaaaatatattcataaaaattatatatatacgtatgtatatactatatagtatgtatacatacgtatatacatacgatgtatatagtacttacatacgagagagactagggggcgactgatcgcacgcgcgcggaggcgcgcggctgatcgcgtaccagcgcccccctgttcctggcccggcccagcagtgagcgcaaacgaagcggtggaaggccagcgacgcgaacagatcacatgcgcgggtgcgtaaagagaatagaacaagaacagatcgtgagagtgccgccgtctgccgccaacgtcctctcctcccggcgaaatcgcgcgcaaccaggccaccagggtagcccgcatcgtcgcgtgtcgcgccagcgccgacgcaattctgcggtgccgctgcttcttccttgttgcaatttgcttgccgccggctgccctcgagtactggacgaggaggacgggacagtcaccgatgactgattcaggtgagtgcaacaccaatacaactttgctattgctaatttgtcattgccagatgaaaaattgaagttctggaacattgtgatttcatctgtaatctgatctgctggcttttaaattcagatttgttattttgtagtgtaatttatataggataaaccactataataatgttattttttgattattaggctatgtagtcgagaaagtatgcatcaggtagcaataaaatgaattaaatggtttggcaactttatgcatcgagaagaaattattggataaaaaatgataccattatcaatgacttcgcatctagaaatataagaatttttttaggtaacatgtacaatgttttgtatataaatattatttttgaatgcaatttaaatgtttataatttaataagggcctctatgtcaagtttcgcaccaagaccctgaaaagtcaggaccggccctgcgtacggagcaagggagcggcgacgcgtggccctcagcgaacccagccgtgcatggactgctgcggtgcacagagggaggtagcaacgcgcgcatcccttggcgaacccggtggcgcacggagaactcgatggcggcgagcaagcccttgtcggctttccatccccttcctgctaccgccggattccctaatcaattcttcggctttccctctcccttcttgccgccgttggtttcccctcccacaccggtgacgacctcgacaacagtgctctgcaccgagctctccatgatttgaagtcacgacgtgccaggggcaatttgtcatgatgagtcaaaaagtgcccactcttgcctagtcagcaccaaaacactaaataaatgggtgtggtgtctactggcaaataaccaagattacatagtttcttccttcaaaagtgatttcgtgcggtatcccacagctaaaacatgaagttatgatgtcctgtagcaaaatctgcctattattagtgagaatattttggtcttttcttcttctcttcgtaactccttagaattttagaggatgattttttttatacatagaatatcgtgtagttcacatgagtgttcaatgatgcacaaaacaccatcgtgtcccggttcttatcataggtgaagtcgctgtgacgtttcaagaggttgttcaacatggagcccaagaggcagatgtgggaagcgctcgcgcgccacgatccagctacaccgagtggatcattcagcaagcacaacaactagagcctccgcgaagtggtcaccagcttcctcctcgcgagcgttatacacgtcgtcggtgttgacctggttctctagttgttgtccgaccggtctgacatgtagccgtggaggacaagattgtagtgagatccaagtggtgtgtagcgcatcgagtgccgaagacccaaacggcgcgacatacaccacctcatgggcatcatcgagttcctatgccacgttcgtgggtaaagggtggctggtgatctactacgcctatgccatgaggtatgtggaggacatcaggggctcagactgcgaggagttcaggttggagcagtggatgaacaaagccggcgtgttttagccgaaaagctcattcaagacttcgagtaccccatcttctacattggacaaaggatgtgcctcggcaaggagatgacgtatatacatggattcggattcactgcattagagaagctaatgcaaagggtggcattagctataatccttccatccatcaccatccaatggttgtggctagtcttcatctttcttatctccgttgctagaacgaatgtcctgtttcatgtttgattcgctgaatcaataccaagctcttcataaattttgatagggaagagaattgttgcaaagtctaaatgttcatggttctttgctcgtttgtagtactgacttgtggcaaaagccaaactaaagcttcataataacaattagttcataacaaggttgattgagggacaaagtacaaaaggcatttcacaaaggaaaataaaactataaccctgattaagtacaaaaggtatcttagggaggaagataacactataatccataaaccaaaatatgcagagtagcatcaagtccacctctcagatgagtgaaatgtcattacttttcaccaaatagactacctgcactggaatcattctgcacaatgtagcaataagtatatatcaatcatgaacaaaatatagttttctagataaaaattaagtataagttccagattaccataagtaattatgggtacgaagtaaagacgtcgaagttttcaaatacttcttcactttttgtggagcttttttgttcttgtccttgaaattgagacacatgggtaagatcttcttcctgtgaacaattctttttttaaaaaaaaaacattgaggcatctagagaaattatataagacattgcattgtttgatatttctaaactttgtctgcaggcacctttttttgtgtcatgctctttttcttgtgaaacttgtcaacccaacctggtgtctgctttgctcctcgtctccagacctcctttttctccgaatgttctttcatcctcatattcaaatgcgcgggcactaaattcaccaagtatatttggtctatcactcttggtaagtgtcaaaggctagcttgaccgcactttacatgatgtgaaaagtacaaagcccatgccaagttccatgaaatactataactatagcctttttcatagccgtaccttgatctgttagatggcttttggatgcttttgattatgagctgccaaaaatgtttcaaaaagtcatttgaaggagtcgaatgtttcatcatacaagagagcacctcaaaatatatactctttctccgtaatggttaaatccaacaaacacactaagtgatctatgatctctatttgttccaaaggtggtatcaaaagtaatgacatcaaaaaaatatgttagcaatcctcatcaatctaagtgtactacatagtgaaacgaaggattctctacacatttatattgaaagtattttagcatacttccagtttcaccataaatccaaaggttacttgagccaccagcttccttactagctaactcatatccagctttaggtctgattccataatcatctaccatgtcaatttgaaaaccttgcacatgtgaaattttctgtggtgatggcatttaggtggcatgtttttggcaactaaaggatgtggtagcgttcagtcaccaaatcatatacttcataatttccttcaactttgtttaattttattcccatatgaacattgtagtcagttcttgtctgtgctcggggattcttggttagataatctcttttatcttttcctcgatgaccagcacttgagcaaacaaacctactagaagtaaacaacccatctacaacacttttgttgttatgctgctttctaacatcaaaaccaatcttaccaccatagctaacccaaaatttccaagcctcatctacactgctaaactttattccagtatccactttacaaatattgggctatattattggaatacaagtatgtccatctatgacatacttatgtttgattggaatatgcccccaaaaactgctagtggaaaccaatgaaataataaggataaattcaagcaacaaccttcacttctctgcatttttgttgatcctgctttcctttgtagcgttgactcatatttgtggaagcatatttggtgatgagagaaattgggagataagtatggtatgagagatagaaatgtgttactagaagccaagaaaaccataaaaaaaaatgcaagcaacgatcttcacttacctctctaaattttggttgatcatacttccatctcgtgtttatttatcttcatggaatcacttcaatgctaagagaattggaagaggtatgtcatgagagagagaatgaaaagacttatagaagaagcccgaagaaattggagggaaaaggaggagtcctgtagggttttggtgcctaaaatcgacctggacctatggtgcttcctctaagacctgtctcatctttgccttatgtaatagaaaattatctacaaccgttagatggagatggatggccaagattagagctaatgccaccctctgcattagcttctgtaatgcagaggatctggatccgacatactccctttgtccccaaaagacttaaattttagagataaatatagacacatgttaaggtaatatttttttagtgaatcttctgatgaatgagataacttttgttttattatcaacgaggaaatggattttatatcttaaagtgtattcgctgaactcatcaaatctcactcatatctgaaatcagtccggaaaacctaatgcgcgaggcgaacacatttttccttttctgttcaccccgcggcctgcatgctcccacgctgaaaatgggcctatgggcctatgggcaaatatgatatttgttattgggagtacctatacatctttcgaaagatttttatgatcgtatcacacagatttttaatctttagattaaaatccgatagatataataaaaagcaaaaagcaattaagaaacaccataatggacactaaattaccatatcctcaagaaaaagaccaaatccaatacaaaatttaaaatttacatgtgaagattcaaaaattacagtgtaacttacaaaagttacagtgtaagtttcataaattacactgtaacttacaagaaaatgcactgtaaatttgagtgagaaaatcgagtgagagataagaaaaaatctttcgtgtgagatatagcaaaatcgtttgttatttgggagtacctatacatctttcgaaagatttttataatcgtatcacacagatttttaatctttgtattaaaatccgatagatataataaaaagaaaaaagcaattaagaaataccataatgaacattaaattaccatatcctcaagaaaaagaccaaatcaaatacaaaatttaaaatttacatgtgaagattcaaaaattacagtgtaacttacaaaagttacagtgtaagtttcataaattacactgtaacttacaagaaaatacactgtaaatttgagtgagaaaatcgagtgagagataagaaaaaatctttcgagtgagatatagcaaaatcgttgttatttttatct

SEQ ID NO: 45802 - DNA, 1376 bp, Oryza sativa
cttttctatgagaggaatgatcaaattaatatatgtacagaaatcagaattaatagatattgatttgggggaagaaactaagaaaatgaatactttttctttctttttggcgttggaaacttaggtgcacatttggaataaaagtctactagatagttatgatgtgatatattctaatactacgaatctatgaatcgggataagaattatataaatttataatactaagatatatcacattatgtgatgattttttttacgaaagaagtagtatatttttcaaggttcagaaagttgaaatattccaatatacagtggaaacgtatggtttacgtggttcttttgttacctcgccacgtaattttcagtacctatcagctttgtcattcttttttggcatagtccaattggtaaataacctagcaacctccactacgtgcgattcgaacttgtaatttttttagtagtcttgcatacgcactggacacacctcgtcatcagttgtcacgttgctagctagctagaccttttttgacacggaagcgcatacggatgggtgttaacgttgcgcacgtatatacgaaatcacacacgtacgtgacattgtgacaaccaatctgtggtacacatgcatcattcatgacatcaggtttacaaaactgacaataaccatatacagagttactatggtactcacgtttataccattaagacatgataaattttagagccgcggtaaccacactaaaattttaatagtaatttaatttttttaaaattgtacacggtttcttacggttttaacacgattacccgtccgtgacatacttcgtcctcatatactacaccaaccgtcgtacgtcatgacacatagcgataggtgtgtgcgtttgatcgatcgatcgatctctctcgcgcgcgcgggcaatagacttgagtactcgacccgatccgtcctttaattcttccgatcgccgggacaaagatgtgtactcatgtaaggcagtttcctctctacatctgatcgatcgcgtacgaactaccagccattgatctgtttgttgcccgcctaattaaggaactgttcctgcacggccaccaccaccattattcaccaacctacaccgctacaccttagatgtactagctactgctgtagaattgaagctagctagattgggaggacaccaacaatcttaatttcctttgtggaccaagcaattaatccaaaagaaaaggaaagaaagaaaaaggcaaaaaaaaaggggagggtaagagtggtgtggtacactacttagagcaagtttaatagtgtagccaattattggctccaaaacaactatagctaatgtaatagcccattcatacaatactta

SEQ ID NO: 45803 - DNA, 751 bp, Oryza sativa
gcttccctggtcgttgtagaagcaacagcagcaaaccacccaccagcagcagcagctgcaacaaaagttggagcccaacgcacagcagccaaagaatcagcaggccacgcattagcaggagcagcagcaggaaacgcagcagcagggaaagtagcagcagctcaccaagaacagatcaaattggcagcgaaggacgacgagggctgcggcaaccggcgacggctgcaccggcagcggtggcgcagaggcggctggggcgcaggagtggtggcggctggggcgcaggacccttttttttttttctgttggttatatagagagaggttaaagaaaatcgaacagcccacattaattcgatcaccggaaataccttgggactccgattaccacaaacttagtctattttgcactattcagcgagctctatgcatccacggtccctgatcgcctattcaaacaacggtttaaaagttgaacttttgcgcgtttgttttaatatatcccgaaatacactaattcgaaactcggggtattacaaagaacatttcaaaaatcaaggaatccaacttaatgtacaaaatttaaacttatggaataaaagtgaaacgtcaacggagaaaccaagaaaatgttcgtgacaagcaatcttcgatttccgtaaaatcaataagatgcaaccaaatggagacgtctagcccgcaaccaacatatttttttcgataaacaaggagacaaatctctacaacttagt

SEQ ID NO: 45804 - DNA, 1401 bp, Oryza sativa
acaccccaaaagagaggaagataaaaaaaaaataagaaggaagaaacaaaccaatctcacaaaacacaatgctagaaaaagaaaaaaaaaaggtttctgatgagcaaaggcgaaattgtgtgacgagtgacgaccagtctgtctcaccaaacgcacataggtacagaacacagcacgaacaccgaacaagaccaccactactagagactctgctacagagcagtacaaggctaactgaaaccacaagttttttttttccttcttttttttacacggcggagcagagcagagcagagcagagaccgacaggtatgcaaaacgcagcaagctttactagacgaagcaaaggatctctcttcttttttttctttttctgttcccttctctgtcacgaaaggggagcgaggggatcgacgacgggcgaaatcagcggcctttgcaccgatctcggcgtcggcggcggaagaactctgacgcaggctttaactgcgcgcatcagatggtgtcgccatggggagtagtaaacgggagcagtaagacagtagcagtaggaggagaagaagacgacgactttgagaaaattttataatctttttttgttgctcttgccgttggcgaatggaagatgaaactctaatcaaccaaaccgctgatgtaaaaaaattccacaatccgtctcatcagttcataccgaaattcatcaaaagaatcgataagggaaaaaaacagcagagaaaaaacaggggaacacgaacacgaacaagatagccactctagcagccatcagccgccatgggcggcgaaggaaaacaaccaacaccgagaaaaccaaaaccaaaccaagaaaacgacgagacgaggaagaagaagatgaaaaaggagaaggatcaagaactgacctgagttcacttctctctctttctctccctccccggatagcaccggcaattcacttcacttcaccgcgtcgagcgaaaaaaaaaagtttccgggagaatcgccgggagcagcgggaggccaggccggcgaggagaggaggagtgggatcgcgtccgcggcgagcccgagaaccaaaaaaattctcgaaatatattaaaaaggatttcccgggcggagggtggagactttaataagcggcatgaagaggcagctcagtgcaataaattttcatggggcgtttttacagaaaggggcatgtgatttccccatatttgcagatgcatccctctaggtagcaacaaacaatgcccctttggatggagttttgtgggactattttcatcctagtgccttcgtttacaattctgagggctgttcagattgatgttatttttaattattttatttttgggtaaagttatcaaaaaaaatctacatttagtttattgctaaatttggtaa

SEQ ID NO: 45805 - DNA, 838 bp, Oryza sativa
aaaatttgacaggatatattttaaaattttggaaagggagagaccggatagtcagatagattttaaaattttgctcgtgttgccaaccgccaaacgcagctgcagaactaacttaagcccagcccccaactgcccaatagtgtggccgtgtgggctataacgcccattcgccgctcggagaaaaacaagaacatcaatcagggcaagttttataaaaaaggtgaatgttgcatctaatcttgaccacatcatcaactaataaatgtagaggtaacatgtacaatatatcacatctatactaattctaatacactagccccaatatttgtttgcccaatctactcttcctctctctccttttgtcttgaattttgtgtagtggttacctcttgcataagaggtggctcattttctctctcatctcatctctccacctatagatggccatgtgggccgcccggcacggcaaggcccagcccagccgtgcctgggccgaggattgtcaggccggcacggcccgaccgacgcaccgggccgtgccgtgccagcccacgtgccgcactcgcggcccaggcatggcccaacacgtctcgggccgtgccgggccggcccaaaggcatgatgggccatcgtgcgtttcctcagaataagtctaattttcctccctcctattgggttatgagtatatatatatatatatatatatatatatatatatatatatatatatatatatatatgtaccatatactaaaatgctattaaataccgtctaataaagtaatttaaatgttacatagaatatattctagagcacttatgtagaagatcgtttggc

SEQ ID NO: 45806 - DNA, 628 bp, Oryza sativa
caatatgattgtcattgggttttctggtcaattaaaaggatggtggaataattatttaaatgaaactcaaagacaggagattctttgcgcagttaaaagggatgatcaaggaaggccattgcccgatagagatggtaatgggaatccaaccggtaacatttctgatgccttagccactttaatctataacataatttctcactttgccggaaactatcatgatatctataaaaaaaatagagagcaattgataaatttaaaatgtaaaacaatgtcagattttagatggtataaagatactttcttgtcaaaactatataccctaccagaacctaatcaagacttttggaaagaaaaatatatttctggtttacctcctttatttgctgaaaaggttagaaattccctaagaaaagaagggggagggagtataaattatcactatctagatattggaaaaatcacacaaaagatacaattagtaggggctgagctttgcaatgacctaaaaatcaaagatcaactcaaaaaacaaaggattcttggtaaaagagaaatgggagattttttgctatcagtttggttttcaagatccttatgtctatagaaaaagaaaaacccattccaa

SEQ ID NO: 45807 - DNA, 548 bp, Oryza sativa
ggtttgcgtttggttgaagttaactttgagatgcatttagtagtacacgcgacattctcgtcggtttaatcaataatcaggagttgcatttggtcatttggtaatcgcgcaaagcatggtggaaaaagaaatgcagctcgaattcaggatccccaaaatctccgcctcttctgtttccgattgactcagaattcaaaaagtaaatctgcatcacggggggagagaccatgttcatcttctgcacgaatcgcgaggcaaactgcccctgttgccgatgtggctttccgctgactctgttgtgatctgttgccgcagccgcgcggaggtgcgaggcggcgcgatggctgcggcagatggaggcggcggcggcggagtccctgccggagaggccgtcggaggaggagttctgcgtggcgctgcgcaacgggctcgtcctctgcaacgtcctcaaccacgtcaacccgggcgccgtccccaaggtgcgttgcttaagagttcaagacccaaacaaaaaatcgatcggattggaagtcatttttttttttgaa

SEQ ID NO: 45808 - DNA, 568 bp, Oryza sativa
gccgtccactggataactcacggacgtctggggaaataactaaccccccgtgccgcctaaacaacggctaacgtccaccccaatccacgcgacgctatacctcgcggttctcccacttctccttcctcctccataaaccgcgaaagaaaatggaagctctcgctatcggatccgcacctccccgcccgccgggcctcgcactcccacccctcacccgtcaccaccacctcctcctccaccgctccaaaaccctagcccctcgccgtttcgtcgccgccgcgcccatggacgccgccgccgccgccgccggccggggcggccccgcccctccccgctgcgcccgcgccgagacggtaattaagctacgatcccctcctccttgccgcctcggagctggatgccactcggagaaaatctgtgagagggttattaatttgtgtggcttagcttatcgttgcaggattcggcaggatgcggtccgcgacgacaagctcgccgcactccgccgaggccgcgggcgcggcggagcaggggcaacggggccccggccccggtggcggatgccgcc

SEQ ID NO: 45809 - DNA, 809 bp, Oryza sativa
aactatacttgatgtctaagtgatgagacttttttccaaaaaatttttgaaaaggagacctttttacaatggaatgagcaaaagagaacctggttacttctgctgtcatttctctttcatttcagttgtactgtcatttttactcatttgcaaacacggattcttttggctgtgactgactcaaccatcttactgcatcataaaggtggaacataactgtgatagagacaaagctgtcttgttggttaagtaaggggttgttggtattattgaaagaacgtaataaataacaacccaaaacgttaattttgggatgaaattgacaatcttcctaccaaacatatcaaggttcaacaaatcaaatcatttattttgggtcacaatcaagtcaatttgatgaatgagaatttaaatgaaatggatggataatgcagccgtcagtagtcagtactgatccatatcatacctatcaataaagacatctgtcacagcaagtcactgaacgaatacatttttcatttacaaaacaagatttcataaaatgaatcatctactaattcttatgagggcattaatctccacaagtccaaattcacctcagaacatatcccaacgccatagtgtgagataatgcaactgtaaagactagaagctacaccgtagaaataagatcagctctttaaagccgcacaaactgtgtatcatctttaatcttctgttgatgaatgatgaatagtaatgttacgttcaaagcaaaccaatctctggaatatcctacaaaccaagcaatcaccgtgcttaatttctac

SEQ ID NO: 45810 - DNA, 946 bp, Oryza sativa
cacactaacatgcatagctggtcatattgcaattgcaaacgacgacgactcatcctcatcatgtgagatgtgtccacaccgggtgtggtcatatgcgtgaaaatatcgtgaaatatcttggggtggtacggtgcaccgtgcatctagataagatgcatgaacttaattaagtgttctgctatcggtagggcgcgcggtaggccttcagctattataagccacggctaaatttaagtattttaatattattaaggtagagggtttattcgccgcttctttgttagtgattttactccctatgacttaaaaaagggcagcctacgagaggatgtgacatctcctatatttagattcgttgtactaggaggcctcgatcctatgtcgactctttttttttaaggacagatcgaggaacaaagaagcggctaaaagtagaagtataaaagtttgacgttaaaaagaacattttttactactgctttcgtttataaatagtagctcaaccaatttgatattttttactgtataaaaatttggacattaatagcaacatggatgcatgcatcagagctgtttagcgctggcggcttagtagccggaatttatggccaacatacatcgagaaaaggagtctacactctaaccctgctagtttcctgggaagtttgaaacgaacgaaacaaaaaaaaaatcatttcaacacaaagagctctcgacgaaaataggtctcctagctatatgatcaaagaggaaggaaagctttggctcttgctggggcaaagcacctttctaagttaattaaccttcttacatatgtatagtttttttttctagtttcaccctagcataggggatataaaactcttctatattatattcaatgaaattggtatagtctcgcgccggttcgtttaaaaaaattgacactcttttacttggaaattca

SEQ ID NO: 45811 - DNA, 736 bp, Oryza sativa
aagttttaaagtccaaataacatgtcaaaagtatgaatacaagagaacattcgaaaataaagatatccaacaaaaagcataaaattttaaatgaaatgcgtaaaataaagcgtcaagggagaaacctagaaacgtttgatacaaggaaactgtgattgaacgtgcaacaaactataaggatccaactcataacaaagttagttgttttcaataaactgggagactcaactctacaactcaattaaaagatcaatattaatgacagagcaaaacaaatcggtcagggcataaagcaaaagaataatttgtttttataaactagaaaacaaagttcaaacaaacttaagatgaaccgtgacaacaacaaaaattggaaactccaaaagggatatttgaagaattgatgaagaagaatgtttcaaaataaaggaatccaattaaaagtacaaaatataaatttctcaatgaaaaatgaagcctcaacggagaaaccaagatattgtttggtacaaccaaactacgattttcataaaatcaataagatgcgaccgaataaagacatccagctcggaaccaaaatattttttcgataaaaaaggaggcataactctagaatttaaatataaggccaaaattaaaacgtcagagcacaaaaaaaactgcaaggtttaaattcacacaagtatgttcttgtcaaaaactattaagcataagttcaaacaaaatttaggaaact

SEQ ID NO: 45812 - DNA, 530 bp, Oryza sativa
ccaaatcaacactcaaaaatgaaactgagcatattattggtgttccaattatccagtacaattggatccagcaaacaaaattagtgaaggaattgaaattgcaatgtaaaatttaagtcgaacttcctagcagacatgaagccaagtctgccttgaatatgcagataagcaatatcgtcgattatatctcatatggagaaaaggagctagtggcataaaagcttcattccacacgctactagtcacatctgacaaaaactaactgaatctgatgttttttttttagtatgtcaaactccacattcctaattttagaaaaagtgtgatcatatgctgcatgacatggcccaaacatgtctgctagatactgctaagatcaaatgctggaaattaaagagaacaagaacaagaggtatctgattctggctgatgaatttcaggggtattagtaataagtaactacttgcaaactcacatgtttcctgacaccgtccatgaacaggaagaagtcttcatttttgcaggattag

SEQ ID NO: 45813 - DNA, 730 bp, Oryza sativa
acaacttactcatctatctctgatcgaaaagagaatgagttcaaccattagatgtcacgtgcaagagccatgggccctagaactaggccacatgggtactctcatgcatttttcctttttcaggaatctggttcataatgaacaatacttccaatcttctccaaacaaatactctctttcaagtaaaattaaatcatggccattgcattttatataagcaaagtatgacaatttgtatagtaaaaacccttctacactggttctcgatttaccatgtccacagaacaactttggttgctacttggagcctcaaattatttagtgcatatgcaataatcagcgaaaatgggaaaatgcttgatccaacgcaaccatatgctgctatgctaaggaagctcaattggcaactcagctctcgcctcaaaatctatcagcatagcatactccattttgatttgcagacaaagtggaaatggccctgatggtgtaatccattacctcctcaacgacgtcttgacagtcatgttgcaaatgtacgggaagtcaagcggcggcgtgggcgtgggcggggcaccgggcgcgcccaccgcgtccagcgacacctccgccgtgcacgccatctccccgtagtcgtcgtcgtcctcgttgccctcgccctcctcctcatccccgtctcccgtggcggcggggcggtagtaccccacgagcacggcggcgtgcggggcgaggc

SEQ ID NO: 45814 - DNA, 749 bp, Oryza sativa
catcgatagagtgactgacgagatctggttatggcgcgcagctggggcaaagggtatccaatgcttaatgccaagcaacaatagaagtgcaaccgacaatatgtaatcaatctagtcataaaacccgacgtctctctttgtagctacacctcaccttgcccaccttccttttttcctctttttgtaaaatcctagcctatccggctattgtacagtgtttctctcttctttaatacaaatacaccccgcggggtttaaaaaaaaattagtggtttgatgcgtggaagtcgtacgggtgtatcagttaggattagagctagctaacatcaaaactaaggtggtgcattaccattgattggaaacctaggaaacttcaatctaacattgtgcattccaatgcttttaaagtgagaattcttggctttagataggctcctgtgcaccatataagttgaacgtgactttgcaattgttcctcggtctaacctaggatcaggcgaaacgtgttactacaaatttaaatataggactttttagattattagtagtaagatatatgtctcatccaataaagggggtactatattatgggatggatgaagtaattagttgtacgaaataccatgcagtatgctattagcatatgattaataaattattatttagtgtaaacttttaaaatatatttatttgatttttttaaggaaacattttaaccatataaaattttagcataaaacgtactcacg

SEQ ID NO: 45815 - DNA, 664 bp, Oryza sativa
aacagtcgccaacatgcacccaggtgttttgttgcaccttgaagattgttttttttttatcaatccggagggagtagcagacatgatatctgaaaggattgtttgtctatttattataaattttgtttttggtactcatacatattataagactagcaataatgtccgtgcgttgcaacgggttctaaataatattcattgacataaattaaaatcctaaactatatattatagttggacataaatgatgaaggaaataaaaacgtataaataacaatatgaaactacaaataactttgtccggaacgataattcaatattagaaaagttataagttagctaaatataagttacaataatttttagtggatcaaatagtgctaaaactaataatgtaaatgaaaaaacaactgaaattagttaagaattgaaaaaacttttttagcccacatatgaaaatctgattcattaatcctaaatggatgtctgtttcattgatataaattagaatttttcatgttatagtaatgttataaatgccattatatttatcgattttgattgcacatgttttctctgttcacacctagtcgatgagaatcacggatgcatgcacgaatggaaaatcgcctcaaacatttatggattatcgataaatgctttt

SEQ ID NO: 45816 - DNA, 555 bp, Oryza sativa
taggaggtgaggcgcaagacatccacctcaatgtggccaatctcgacatcgatgtcgcagccgatggctacatcaaccttgggacggagatgctccttgtcgcccttgcggacagctgtgacgacggggtattggggcagccaagatgatctagaagacatggaatcatcgaaggtggtgttgttccagacatagaccagcgggatgagcaggtccccctcgtctatgatggcttggtggaaggcgtcgggcgtcaagtaagatggggataacgctccacgctgaagctcgtcgttatcgctccacttcgtcagtggaaggcgtcgctggagaccactcctcgcttcgcgccaccgtctcaagggcaagacgtgttgtggctccgccttgaggacgacgagaggtagctccgcctcgatgccgcgttgtcgccgctccgtctcaaggcggcgcccgccctcctgctcgctgcgtcgctctggccctcagccaactgcctcggcgtgcagacaaggagaaagaggagagaaagagagagagaagtgagagaaaggg

SEQ ID NO: 45817 - DNA, 649 bp, Oryza sativa
atgtaaaactatattatacataaaagtatatttaacaattaatcgaatgatagaaaaagaattaataattacttaaattttttgaataagacgaacggtcaaacatgtttaaaaaagtcaacggcgtcaaacatttagggatggagggagtataaaacagaggtagtatattttaagttaagaagagtactgaattgctgctagtattcttttcaaattcctgaaagagttgttctattagggttccagattgggagagaggaaattctgtttatgccagttgataattttaataaaatcaattaaaagttttatgtgatacatataattcatttgattaaactaaaataaatcatctggcattaccaaatgctaacagcatcacagtaacattgtaggtagtagcaccaaccgaaaggctgtcacctagctgttacaactcagtcaatttgcgtgtctgtaccacaagcaaatgccactgtacacagtaatttccaagttgctccaaatctttctcccctattcaatccctgatctctgtgccaaaaatccgataccttctgcttccccagggatcgttcttgtccagacggtaagacttcaagcaacaccatatccaaggtgggttcctattcgatggagcaccttc

SEQ ID NO: 45818 - DNA, 726 bp, Oryza sativa
caggacacaggtgctgcagtacagttgttcatggagtgctcgcaaagaaagaatccatggctagctgctggccggctccggacacagcatgcattgcatgaaacatgcagtttcttgtgatactattcattgtctcattctattgtgatgcacctgatacactgtccggtaaaagactggctacgtagcaatcgcaagaaaaatccctcccttgatgacccataagtcagaacacgtccagaatcgtataagaacctccaacagcctcgtataagagtcaagaatcgcaaatgaatagtctaatttgcatttcactctaacggactcttttttatgtactatccaatctaaatgtgggtcccacctatcagcctctctactatttaaccccttcttcttcaccctctcctctcttctcttctctgctgagccactagccgaatccgcacgaggttggtggcggtggaggccgcgtggtgccattggtcgctgttgccaccaccgtccttgtcatcttgggcataggtggtggatgccgcatgtggacaggggacggtgacatggattcgagtgaacagcggtgacgcggattagggaagacgacggtggtgtggatttgggcggacggggcttgtgcggcaggggcgacgacggcgttaggccgatgaacaacaatggtggtcattcaaagcgtcacttcttctccggcttctcctgcaaggcgtc

SEQ ID NO: 45819 - DNA, 2693 bp, Oryza sativa
agtaggataggctggtaaagtttggcaaatgagggaaagagtttggccatccgtatggcttggagagtaagatgaagaggctgttggagtcggtcatttaaagttgctaaattttggcttgaagagtgggatggagagactgttggagatgctctaagcacatgaatcttttccttttgtctccctcctattagcgatgtgaggccacaagtgaggtaacctcgcctcctccaacacaactgcctccactacccaacacgctgctcctcagccccattggttgtcctcctccccaagccgtgcggctgtcgaagacgccacgccaccttcgtctcctaactactccgtatctaatgcaccacaatcctccaccgccctactatagccccgcggcttgaatggcgacacaaccgcccaccaccattcgtccaacattaggaaacctcaaatcctaatccataggttctttgcgagagttggggtgtcgccaacatcgaagaagacagggagtttaccggggacagaggagaaggagtccgaacatgaatcttgctgtgcggatacaaatggtggagaaatcataagaaatctccctctgtccacaaatataatggagtttgagggtacaggtttatctgcaattttaaggaattttgagtactacttgcatcactcaaccacccttcatttgatttttatttaattatattcctaattgtttctcatttattgagagacattatatccatttcccttaaccttaatctcctaaaaaaactaaaatgcattatatttgtggttgtaggagtacatttaatatatatccgtaccttttaaattatttgtaacttaattgaaacctatatatagagactgtctttcaaaattaaaattcggctcataaaaatcaacagagctagctagtaagttctaaaaaaaaaactagtgcgtccttactaattagtacttctagttaataaaatggtacggcgcttgattttcgttagtagaacgtctgcttccagaacatgctaggcataattcgatggggatgcgcaccatcactcgacgcagtatcaaaaaactctaattgagaatcgacttgtcaactaaaaccaaaaaggtttctgctttcctccctttcaagacatccatgccatttctttttccttatgagaatatatatatacactttagttaattattagcttctcctgattgaacctgttagcttggatagagtgactagtgaatccaacttgctaagtcaacacagcactatatgcttgacttatttaattaattgatttgtcatatgtgttcacatgatatcatgatagccgttaagcaaaccatgcatatgaatctagctacccggtcccaagtaattaacgaaaaggataaggtaaggcaaaatgtgctcactagctagatttgatctgagcaatcatttaggtatggatgagatgataatgttaattagtatattggtcctttgatcctttaattttttgtgaaaggtgtattaattagcactaatcttgttaagcagaagatgtcagtacgaccttaatttaaacctttctaaaaagagaagatatcacagagctgatctgaaatgttggcaactattactactagtttttattcttttctctctaagtagagtgtttcctatccactttccaaatccaatctggctccacgcactactacatacccattttccagtggtgtctgggaaaatcgcgattttcgcatacgggtgcttatatcacccgcacgtgaaaaacaaaaatccaagaggatggaatagaatttcacaaaaaatgaaaaccctagattggcgcggcgatgccgcggctcccggccgccgccacctcgtcgtcgacgcccgcctcccaccggcctccacgcccgcctcgtcgtcatcaccgcccgccggatcccgcgcctccaccgtcgcgctgtcgtcgctgtcgccgcgccgccgcggtatccgtgcggggacggccgccgcccgccagatcccgtgcctccaccgccgcaccgtcgttgctgtcgccacgccgccaccaccgcaccaccatcgccgtgggccgccgccgccgctgagaggcagtgagtgcagagagaatcggctgagaggagagagagagaaagagagagaagactttgggagctgaagagacttttgggctgagagaatcagccagataaaagagagagaggaccgaggcgcgcggaaaaacggtaaattttgaagtgggtaggaggaaaaagagagagtactatttttaggtgcggctcttttaatagatccgcatgggaaaatcggtttattttcccgtgcggttcatttaagaggaccgcacggaaattttcccgtgcgggcgatagcccggcgccggtccgcctatttttccgtacggttccacttacgaatcacatggaaacaaaagagggtagcgtccaggaaaatcaatccagtagtagtgacggttgaacagtacgatacatactccactaggaccgtactccactggttccaaaatggaaccaacttagtacggataaaacatattctagaaatacaaatctagacatgccacacatatccagattaatagtattagatattctcatttcgtaccagtgttatattttgggacgggatagatatagattgaagc

SEQ ID NO: 45820 - DNA, 735 bp, Oryza sativa
gaaaatggctttgaggctgtctcggtgaaacaagtatatatgcaggaagtggaaacaatgacatgagaggcccgaaatgaacttccaaaacaaaatttctacatttacatcgggattcttacatggacatgtaggttgaaatgtaaacctttcggtgaaataacctatggtctattgagcagtctaaactgcaattctgttgcatcaaaaccaagcgctgtaccacaatgatacatggaccagtggaccacctcgttcccaacatgtgaacaatgcattttccggccacctgcaatagcaagatattactgtcaggcacgttgttgtcaaacatgacaaatctacctagtgctcctgagaaactcgtgtgtttatggcaaatcgtagaccgtttgggaaacataggattaagatagaatcgaagtgtgaaattaatctttgggtaaagtacagaccttcgtaaagtgttggtaacagctgaacagcagaggtgtatactggagtctgacgcaggtcggatggcacatatccttctgcccctcaccagtcaccatgtccactctccatcttcaccttcagttcgtcaaaattttcatcccgtgcagagtaaggtttcacattacggcagtacctatcatatgggatggaagtaagttcattcgtttttttaaaaaaaaacaataaatcaacataattagcaaacaatgacgaaggagcccacataccattagtatt

SEQ ID NO: 45821 - DNA, 649 bp, Oryza sativa
tcacaacactagtactatttaacttcccatagaactgaaatttaagttgatgttgtagagtgaactagtatcttattatgctgccctttcgttcatgttccaaatgtacaggtggaaagtgtaggaaaaaaaatttaatctgacacataaatactccatatgttgatgaacaatagctttccaaagaatcaactgatggtagaaaaatggcacacaaaatgtaactataatggcagttttttaacccccccctccccccccgaaaaaaaatatgaagactgagagagcatactgttgatggccgtctgatgagagttgtgtgctggcattggagggtaaaggaaaatctgctcaggagaatatgctgagagaacaagcacaagtagcactgagagcagcatcattcctagtgtttttcttccgcagggaaatacatcgcttgcatttcgaatgtaatttgggccatggagatttggtggagaattttttcccttagccatgagcatagtagagcttatactgcatcatggtaaaccagtttgcatcatcacctatttgtagaagggaaacgggggcaagaggtgcccaggtatgaaaatttgcaccattgtaaagttgactgatactcctacacttattgggactaccg

SEQ ID NO: 45822 - DNA, 540 bp, Oryza sativa
acatgcatcacaccttttcttacgcaaagtacttaaaaacttttaccataacacatcacacctgtggccaacagacgctataaaaacaaagggttaattagatctatgtcattgcaaatatatcgcactagaaaaataacattactattcatgaatcggttgcatgctactgcaatattttaaagttagaaccgtatcactccctcacgatttctctccatccccatccctcaattgccacctccacttcttcgtctttgatagcacgatgccggtcgactcatcatgctagtcgctagtcgtgtctctaatagcacaacgccggtcaactcatcgtgctagtcgctagtcgtgtctctaacaacaacgaggatgcgtagcgtttcctcctcaaccaagaggaggagcagcagcttagaaggctcttgtccacgagcaatgtcactacaacgatggcggtatcttgatcaagttagactagtgtttggtttatcgccatagttataacatgccatattttcttggcaaaatttgctacag

SEQ ID NO: 45823 - DNA, 743 bp, Oryza sativa
aaatataagggagtcagtccaaattcatattactaggatgcgtcacatctacccaaaatcctttatatttttggacggagggagtattcatgtaggatgtgcataaaacttaaaaaagcgtaaaagatattttataatacaacagtgtcatttccatatagtattgttcttccactgtattctaaactaaaccaaacaaatttccattaacaatcaattaactattctgattaaacattttccagtccacataaccaaaaggaaagtgcaactgtgacccccccccaaaaaaaaaataataataaaataataataaataataataaaataaaataaataaataaatcaacagttcattggagatagtaaatttgttgtttagtgtgttgtttcatgaaaaagctagcaagctagaaatgcatggtaaacaaggctaaattgtaaatgaatatagattaagttgagtggtctgatatgtttactgcagagctttctctggttatcttacaaatgaatttgaatttaaggaggcgtagcaacataaattgaatatcaaattagggaccaataaaacatgggaaacatgtagaagacttactacttcctgagttatcttcatcaagagtacatttccaaagttccctaccagaaagattatgaacctgtagacgattagaaaatattctgatcattccaatatgacaaagaaggtgtttgatacagatacattgctgaacatgcaa

SEQ ID NO: 45824 - DNA, 610 bp, Oryza sativa
  unsure (1)..(610): unsure at all n locations
gtgtagtggtatggatatccattacctgtatgggtatggtttggggagaatttgcacccgcggttagatgtgggtattagagcgcgaacttttaatcataagtttgagtatgaggtaagaaaacttgcagtagaattatagttcatgtggatcaatttatttgtgtactgaagagaagagagttgtaccaaaggtaacctagtaaccagattatttgagcaggcgaccaggcatgaggcatccactgtctagctttagtagtactactattgatcaagtcaatgtaacaatatgtttggtagcatatgatgtattcttgatnnnnnnnnnnnnnnnnnnnnnnnncaagccgatgcatatcaaagaaatgaatacaatgagttccacttaccatcttgggaccaacaaatatcttttaatctctctgaaccagagaccaccattaaattagacgagcttcagaatcttctagttctttcggcgaggggaatggattgaccttaaaggaagtggattgactttgattctctcaacaatctcaaattccagaacatgattacaatgttcgtacacacgagagaatcgattcgtccagccgaacgacttccat

SEQ ID NO: 45825 - DNA, 534 bp, Oryza sativa
gacagagaagaagtgcctcacaacattgtcacttgaatggcatgcttatcacgcatcctatgtcaaagctgacaaggatctacagctccaagtggagatactcgacggcctccaaccaccagagcaacttacatgcctcaacatctgccactacctgggtcgcacaacaccaagttggctgtcaagggaacatgggggcgtcagtaacctgcaattcctcgaactcagggagtgttacaacctggaaactctccctgagatcgccaagctcttcactgaccttcgcaagcttaggctcaatgttcttcccaatctgacaaggctcccaagacttccaggcatgctgaagagcctggaaatcagcggctgcaggcgtttggaggtgacatccatggatgaccaaaggttgtttcctgcatccctagaatgtctccacttgacaggatgcactgtcgaagacactgtcctgcgcgattcattgagaggatgcactgtcctgggtagcctgaaactaagtcaaattgactctttcac

SEQ ID NO: 45826 - DNA, 2266 bp, Oryza sativa
tttttgaaatatttataaattatggtttattcatgcaaaacggagaaaaaatggttattttacaggaaaaaaaagaacatagttggacacaagctcatctgcaagcaactctcccattgtactcaggaacatgttcacaaataatgtgttgctcttccaatgagattgtggtaccaatccatgcaaatgtcccttaccaggctccaattgatcacattgttcttatcatggaacacacaatttcagtatgcaacccaaaaagaggggatctctacccattctggtactagctactccacaacacaagattgcaggccaaacaaacagctgtcctctgaaactgtcccacactcctaccacttgcaaaaaaatgaatcaagcaggcagaaatcatcgagatcgatctggcattcatgattcaagcccaagaaattcagtttctttcctgcgatctttcgcggtggatggtcgatttttcaaacacttttggtggtcaaattttgtggacctagatagctagctctcattgctgaagttaaccaatcaatgaaaataaaatggttgctgaattcattggtacttagtgacaatatactatgcactatatatgtacccccccccccctttttttttctcacatgttgttttcagagaaagtagtactgttttctcacctgttggtggctaagctaactatgatgttgggatgtctcatgcaagcctgtacctacaaggaaatgtcaataggggcgatctttgctggagaggacaatacagtttatcaatattctatatttcttctttgaaaagatgtgcgcaaaccatttttttttcatttctgtttgagaatatagagtaacaattctaaatgttgacaagttaactttacaattggtccggtacttatgatcatatttacttaatgactatgtgtttcaaagcaaaaaaaagaaaaagaaaaagaaacatttacttcattgatttagtaaacaacaatcgtggaatcacatttttgactcacctaccagggatccaatagttctatactttttatgtctactttacatggttttttatgtgctgtgaatatattatttgcattccaaacttgcagaaaattgaaattgcatgaattacaaatgcagataaaaaattgatttttcaatgggccgattaccatatactcgttagggttgaagagaagttacaatacagtttgggatcaggttcctctgacacaaaaagtcatatgaccttgtcattgacatatagacccgaggtaacatgtatccacatgtcagaaaccaattcataatcgtgacttcaatgatctacacctatttagagttgctatattttttacataactctattagagttggcaatggatgcaccatcatctatgatctacacgctatgttgtcccaggtagaatgagatggcaccccaagtacaatacaatgcgctgtatatcttcattatctctgttaatttaccacaacacgcatttcaacagtcattacactgtagtactttgctgaatgaaaggatcatgaactcaaacatttcacactatggtccaggggtattttaataaatgcatccaaccccactaccctggtcctgaggttgcattaatgcccacttctccattaatttttttcagatccaaatttctcacacaatatccactgccatattaattaactacatgggaacccacgtgttgctgctgcagaattgcgtgaaaatatagtagatacaagttctaaaattttctttcttatctactatacgatttttttcatgtatttatatattttttacctttataaattatccaaaggttataatgattggattgtatggtgtgtcttttgaagggatgaaatgcaatttacaccctcaacaaatcatccaaaggctaaaaacaattaaggagatgtgaggagatgcaatttacatccttgataaatcatccaaaggctaaaaacaattaaggtgatgtgaagagatgcaatttacatccttgataaatcatccaaaggctaaaaataattgaggtgatatgcattaactatacttgggggatgggatggactttatagatatatatgatttcttctctctctttttttcacaaaagaaatgtttaatagggtggagagctgagccttgatatatatcacaccttctcccatgttgcactaactaggagagaagaaaatttattagtaccacctcgcttaccaagctagtatcccct

SEQ ID NO: 45827 - DNA, 2173 bp, Oryza sativa
gtcaaggtctcctcctaatccgattaattacttaattaagctcataattaacttgattagcgaataataatctggtgttaattaggaggtatccgaggccacgggagctgtgcgcatgctcgcagtgtggggaggtgttcaacaaggccgacagcttggagcaccaccaagccattcgccatgctggtaattaactaaattttgatgaaaatttctacaaatttcatcaactttacataaaccgtaaacgatattgatatcaaccatctccattctaacgaaaaatgacaaactgaggttcatgttgtgtgaatagtagtcaatgcttttggggtgtagaacaagttaagatagtactcctagctaatccaagttagtaacactaatgaggaggcattgagatctgcgtgtgtgggtactatatattgcccagtcaatatgattggtttactcatgacaaaatgatgatggatatttccacatagacaccaatattgtgataattattattataatcttagtggagtgacagtgttattagtttactagtttcttggcacatcaaaccatgtgagatgagatgagatgagaggagaggagacaaacagaaaggagaaggaagatgctgctcatcaaagctattaaccccatctttcttttcctcttttcctttgtcttttgtgggttacaaggaagctactgtcttgtgcacattaatcatctttggttaattattttagttaagattggatggcaaaaatacatcaaaaggtatctgtgcctagccatcttttgcatgcttgcagtcgcatctgcatctccatttgttgaaggtagatgggtagaagctttctgactactgatggcatctcaatgcatgtaggatactgcatgcacatgattagttattataaagatcattaattaacagcaatgacagtacagtgcctgattaagacaatgcaccagaagcaatagaatcaatgtaggagtactagaaagaactgcagagtgagatcccagtgcttctacaactacagtagttgggcaaagtatccatccaatctgccaatttattatattagttggtagcacacaggatctgcatgcacttttgtgtaccctcacaaacacgaacacactcacaatttgtgaaattagtactctgaaaggaacacaaagtttcagattgttcaggtgtcgtttactccttcggttccattttaagtgtagttatgagtttcgatatccaatatttaactgtttgtcttattttaaaaaaaatataaaaaaattaaaaaaataagtcatgcataaagtaatattcatgttttatcatctaatatcaataaaagtactaataataaaaaaaaactttcaaataagaaggacaatcaaatgttggacgaaaaaactcaaaactgcacttaaaatgagacagagggagtacttgcttgtcctttgatgcctttattttttttatgaagtttctagggcagctatagctccttatagaatttctcagctttcgaaacacatcagattttcacccaagtttaagaatatatagttatagaattcagaaaataaattaaacaccagaagccaggaatcaaactttaaattctcaatagcttgctactcccctcgttcgatatttgtttagaaaatgatcttttttctggtacgaacaagctacttagcagaatctcaagcttccaaatagatgcagaacatgcatagctgattatacagctttaaactgccatgggccatggcagccactaaggttagttaagtgatcgatgtgcttgcatgaacatgtacatcatcctcttgaactgtttaggtcaattgaagtgtcctatcacatgacagtgctgcactatttgcaatgccattattgttgttgatgcggccgagatgaagtactgatctcctgaatttcagtgccttgattgcacactgtctgctatgataactgtgagcttagcttgcacatgctgatgcactcactgcatttaatgcacttagctagctagctgtgcgtggttaatctctccactaattacattacattacggtagatccaattaattagcttgctccctggaggattagcgagtgattaattttggagtgcatgcaatgcatatgcagtgtcggagctggg

SEQ ID NO: 45828 - DNA, 593 bp, Oryza sativa
tttccggtgaaacagagagaaaaaagcattgaaagtaccgtaatgcccttggacattgttcttcttcggcacggtggcgccgccaccgcctccgcctgtgtagtgagagtgaggggagggcagatggggagagtggagaggataaggctattacttaaaattttgtggctcttttagatcttctatgggctacattttgagatttaatatacacccttcggcaccccacgggtgaaatgcctcacctgtcccctccccacaaaaatgcgggcccccggccccacctcccccgcgggtcaaaaactgaacccgcccccgcccccgtaggggacccggccccacgggggaaattgccatccctagctgagacaaatccttgagctccgaaaatcgtggatgttacatgagaaggggttgccattgataatcagcaattactttactatgtcaaaacgcttgtttgttaaacttaaatgggtctcatttagttaatgtgacacgattatcaaagtttgattgctcactaggattagaaagtcaacgtcccgcaatgatgatacttgaaagttgaaattaaccaaacagaaggcaaa

SEQ ID NO: 45829 - DNA, 1128 bp, Oryza sativa
ttaatttgagcaatctcttcatcattatgtggcaactttggaaagccagaaatggctttaagtttcagggtaccttcaaggaaccctctcaagttagctacctggcagatgctctgatttcatctttttcccagatttcttctcaatttgccttgcaggataatgagcaatcagaggcaggcacaaggaggatggacacaattccgaatggaatcagatgctacctggatgcagcctgggacaatggacaaactggcataggaatttttttttttcataatcctcaaaatcataatgccatgtttattcaagcctgttcaaacaaagctcattctgctctgcaagctgaacttcttgctttacaactttctttggaaactgacatgtgtttgaatttttcaggtgtcacttacctatctgacaatactactattgcggacacagcaaagaagaagaatttcatggatgatccaggccactggagtcttagacctttttggacgcaaatcacttcctctgttcctattgacaggatttaggtgcgatggatctcaagataatttaagaagatggcggataaactagcaaaataagctaagtcttctaccagaagagatttagctcacagttgccaaaatattgcgcatatagcctatcctaatagggaatgtcatgccacaagactaaaatacctcttcaggtcttctaattgtaccctcaaatatgtactctgtttctaagattcaatatattcctggttctaaaaaaaaaaactcatagcaatgtcttgtattgtgaatatggaatttttttgagaattaatattatttttatggaaaatcgcaaaagtagtggtcaaccggggaaaatcgcgaaagtaggtccctgtcgaacgggtgcagttcgatagggcgcctatcgaacggtcagagcgcgactggcgaggagatcggaaggctgccgttcgacaggacctgtcgaacagcccccgttcgacaggcagggctgtcgaactgcccctgttcgacaggatatccgtcgaactggcacagttcgacagggtcgcgttctccatttatttgtaataagttattttttttaataatttgtaatttattttagtgtgta

SEQ ID NO: 45830 - DNA, 2111 bp, Oryza sativa
aatataggataattatgctcaaggggaggaataataacttgccttgctccaacgcaaataaatccaagataggcaacctgattatacgattctcgaaataccataggttgccatccaaaagacaatagtctttactgagaaagaggaagaaccaaattcaataaaagccataaaataataagaaaacgataaacgactaagagggctagggtttaaggtataacctatctcttttatagggtatagggattatggggctagtatttgctagtggtaggttttggtagtataatagctagggtttagttatatgggagtcgactgtggagtaggacagtatctcggctaggctctatattttatgtggaggctctcgtggtttggacgataggaaatatactggatagttgatatggttaaataggcatgtggctaatatgggttaaggttggctttgatagaatagtggctaaggtttagttgtttaggccgatatcgaggtaggataaatatcggctagggttttgggtgtttgctagtcgtcgctagagttggacagcatgacgactaggtttggtatcatttctagccgtgtcgatagacaacatatcggctagaagaataggaggtgggtgcaagtttagtggggcggaagtgttactccgacaaccgtgagtggcggcagagcggctaggatcacacagagctcaagagctaactgtgcggcgtgcaatggaggtcgaggggatagtgaagctccgaccgctgtacgcatcaaggcgtggggtgccaggagcagcacttcgaccttaggtttggtttttgccgggctttacaaccaacggtccgacgttgaggtccgtagaccgcgcaaacgtccccatggaaggcgtaaagttccaaccggcggctttttagtggctaacgggcattttggaaataaaagaaaatatttgaaaagcaaatataagtttaaattgtaaattcaattataagattaaatcaaatatttattcaaatggcatttgaataaattaaggaaattcaaataaaatcttaaaatagcaaatttgatatcaaaatgaagagttgaatttagatgaatttaggtccaagtttcactagaatcggatctacggtttaggagatatgtgcttctaaagaataggatttgaattaaatctagaaaatgagaaaagtcactgtgcaggggcccacctgtcagtctttctttttctttttcttctccttcttctttctcccgtcatcttcttcctctcttcttctttttcttgccggctacacaggagagggagagagtgggcgccggctctccggtggacgaaaggcggcgacgtcggcggccacacatgttcccgagcacgacgcacctggggtgggcggtggctggcggagagagtgagggagatggctggaacggcgagtagaagagcttatcttcggcggcaaagagaggtggcggtggtggttgctatggggtgggggagaagggggaaacaggaaaaatggaatcacctcgtcgaggcgaactcgatggcgcgatggtttggcttgcgaagctccggtgagggagatcgggtggtggcggccatggccggacatgggagagaaagagagagagatggagctctgattgtatgtagagaaggggagggatggccggctatttataggggagagaggcggtggtgaaaggcggttgtggaggagatcgagaagtgcacgggcgacaatggcgtgaagattcgaactacggcggccggcttcgtttccttagcggcgaaggaagaggagttggcggcggcgtgagccgtgcacgggaggagggggcggctcggttggggtgtgggctggtttgggccggctcggcttagctgggccggcagctcaagaaggaggaggaaaatagaagataaaagaaaagggattgggccaaaaaggaagaaagaatggagtttcggcccgatgacaaaaagaaagaagcctaatttgaatacttgatttggataactaggttttgcaaagaatttgaatttggaaagaattcacaaaagagatttcctaatttatttgagtgcaatatttagagg

SEQ ID NO: 45831 - DNA, 2153 bp, Oryza sativa
tattgcaaatctccaagtgggtccgttgagcagtattcgatgaacatatcgtccatcgcaaagagtggagcgacatcttctgggagaacattgaggttgctctttggttcaacaggagcctggtgagaacttgcaacctcagggagctcttcatgtgtaagattgaagtgggcttcaaatcttgggttctcagaagattttttgtctttgagggatttttggtacaagagaacaagatatttcgggatgcggcagtctttagcgacatgagtgtcagatccacacctgttgcaatgcttgtttccattgctacgaggttgtggtgccttacccttcccttttcctttctttcgacccttgaatttgcgcctgttgttgttgcgtttgcgctttccagtcagattcttaggattattcgaagaatttcccttgaatcctttcttattctcagcattattatgtacattgaagtgcacctcaggtagtggagcagagcccggggggcgctattgggcattctttaaagaaagctcatggtgtctttctgcctgagtcaatgtatgtataagcagagaatgtttctggaaattgttagcgcgatactgttgagtaagtatcctgtcctccggaagcatagttgatagagttttctctatcttctctgcctccgttggctcttgttcgcaaaacttcaacctggagcaaatgttatgaacagcatggttgtattctgccacagttttacagtcctgtaggcgtaaatgaacccactcataattagcctcaggccaaatgagagttccttttgctgatcataacgctcttttagagctttccaaaggttgagagggctcgtctctaacatgtattcatgtttgagatccttgtgaatgtagagcctcaaaagaaaaagggttgtatttaacttcctgttctcaattggcgggtccccatcattgggttcctcaattgtatttaaaatcccccgagaggcaaaatttattttgatatcgaaagcccagatgggatagttagtcccatcgagggcgagttcgtcgaactcttttgttgccatgtccctacaatcatggttaacattattaatttacagaggtaaattaataaaaacatgatattaaggttgtaatcttaatgcgaaatgtaagacttcatattttgtaatgtttcgaaaagatgtaggtaatagacctgacaatttgagttagaattcgaaattaggtggcacaatgtggataatctccaagtaattaaacagtggagtagatcccttaatagtgggcaagttatacttgctgcctaaaacacggtctccaggcaaatatattctggtgaatataccgcagccaatgtttagaactccactaccttgtgctcaaccatatttcaaataatctcatttttcaaaacatattctcggaaagtaacacatgtgggtaatcatcataagatgtagacctctgtgagatgggcgagatgctcgctgcctaggttatgaccagtgcggccaatttgtaggactccatcgggtaatcatctcaaaatgtagaccacttgatgataggcgagatactcgcggcctaagttatggtcgtgatgaccaaagtgtaggactccatcaacatgtgattaatttccaagtcaaaatgtgaagtggaacattcattaaatcctccattaatcatgttgtacataattaagagaatttgctaaatcaaagtacaaaatttatagaattttgtaaattaataaagcgagaaagtagagtgtgtcttgaaataatatgcaagaggcatgttattaagacaacaaataaatttagtgaagcagggtatttaaataaacacctatgttaagtaacatataacatcagtggtctacaggaccattacatagtaagttgtacaactgatgaactgcttgtactaaattaaataaaacacagggacttagatgaaaattgctgctaaattaaaattaaaactaaatttaaatggtaaattaggtagtgcgccgaaatctaaagaattcggcccaccaccgtgtggcacaggccggcaggctaggggggcggtgggccggcccatccggcccggcagtaaaggggcacggggtggggcgtcgggggagggggg

SEQ ID NO: 45832 - DNA, 585 bp, Oryza sativa
ccgcgcaccgccgtagccgccgtcgctcacccgctgccgccgacccatcgccgcgagctccgccgccaccgccgcaagctcgcccgcccgatctgttcgtcgggtggccaactccgcaggcgcggcctcgtgcccctccgccaccgtcgcggcctccgcgtcgtcgcgcccgtcgctaccagccgcaccctccgtcactggacaagaagctgccgctgtcaccagtcatcgtccggctccaccgtcccccagcaaacgccgacatcctcccaccggcgccgggcaccgccggatgcctccccgccaaatccggcacggatctggcagcctcgtcctccgccgccagcgcctccaaactccgccgccacccccgccaaacgtcgccacccgaacgcagtaccccaccgccggcaaccgccccgccaggtccggccggtcggcacggatctgggcggtgtactcctcccgacgccggcaggacccgctgcccttgtgcggtgagacggagcgaagccccgtcgcagctgtcgctcgcccgctgctgccgacccttcgccgcgagctccgactccaccgccgcaagct

SEQ ID NO: 45833 - DNA, 971 bp, Oryza sativa
caatgatcaaactttattcttcaaccaatgaaccaaagcaacctagcatcttaattaccaactgaactataggtagttgcattacatcacatctaggctgaaactaatacgatgcttgcttcaaaacagaatatacagattatttctgaaatgctgacatgctagtgacaagcatggtatggtaacatgggagagctaatgctagtgagatatacataagatgcttgagctttctggccaaccatgcatgctaccattttgtctggttttccttcctatttttatgagctgaaagcaacagcgaagagggaggagtccgtggtaggtatgaggcatcttcagggtgagctagcagctggtttgcatggcaccaattttctcacaacaaatccccaaccaaaatgcatccaaggaagaaaagggaaaggaaataaaagtaaggaggacatgaaaattgtaccaatggttgttgattatctgatcagcctgctaacctcttctagaaatgggttcagaacctgtacttctgagagggaaaatgacaacaaattccaataattgaattggattgggttatttgttaggacaaatgcatggtgatgtttgcatctgatcagcatctgacatgcttgcactgcacgcactgacttgctctgcaaatgttggcgcagagcagcagcagatctgtgcattaacttgtggagatgtgaggagtaaaggtagtacaggcaggtgatccacatgtatgtgagtaactctgatgatctgatctctgaagcccattgcagtaatatgcagctgttctatggatcacagatccatggatccagccaactgctccatcgtgggctccattaacaagctgtttgcactttgattaccctgaactttattctatccataaaactgagattgtcttcaggaaaaaaaaaggaactaatctaattccagatactacaagacaatgaaaa

SEQ ID NO: 45834 - DNA, 688 bp, Oryza sativa
tgcagtggacgaggatcgtagcaggcagcatcgatgaagcagcaaagaagataatcgatttcctggacgatacgagcaacaacagaagtacggtgatctattttgaggcctgcagaggattggggtcatcggccgtcctcaaagaggtggccaaacgactgagatcgtcgtcaccggagaagctgaagctgaagctgaggttggacaagatcatccacgtcgattgctctctgtggcagagcaagagggccctgcagaaggccatcgcccaggagctggagcttcctcggtcggtgatggccatgtttgatcagcgtgacaaggaggatgatctcgacggcgtggaccacggtgccagaggagtgataccgcacatagatgtgcaggagtgcggtgttcctataaatatgggactctcaggcaaaagggtactgtggacatcccaggtcaggtttgggccttggatgatcacaggcgatgtgcacatggttgccggaccgagcgatgtcgctatgtttgctgatcctatggatgatcaacccctgctgcatgaagaggctgaggaggttgctaggtccactggtgtcccaaaacctggcatgagccctgagattgtcaaggagtgcatcatgtactacaaggtggtgaggctgttagatggaaaccatggcattgactgggccaccca

SEQ ID NO: 45835 - DNA, 1034 bp, Oryza sativa
ggcgaacccaagggccatactgccgtgcttcgtcgtcatctaccgtgttgtccccgagtgaagcagcaaacaacactcaaaatcaattaattgtatcaaccttttgtattagcataatcgtccagcaatttcaacatcatataaatgtataaattaaatgcattttgagggagagatgaacttaatttttgtctagttgctgttccagtgtagtatctgtttgtattgtagtgttgtatatatggacaaataattaagccacttgattagacaaatcttcgatctacacgcttcttcaactaatcattcattcaggttgatgcttcttcattcgatgtacgtttaatcatagattcatactatgtcgtcgtattattccaatttgcaactattatttgccaagatacgtatacgtaatccaataccatttgacgcatcaactaattggtgaaggtataactttgacatcatatgttcatatgtacatgaaatttcttttgtgattgcattagttgggcaatgcacatcaccatcttgtttgcttaactagtcacttaacagtattggtggacctagcttagcttcttctcaactgtgatgcatgatcagatcaatcagacatgtatccatggattcatgcagatcgagagacagatagaatctcacctttgcaagatgtgatgcatgcatgcatatatggatgtgggtacgtttgctgctaacttttgaccaaattttatcatctgtcatatgttaaaaaagtcaaccacacatggttgtcttcaccttttccatgttggatcagatcaatgattgctagaggttaatttttgtggtgacttgacttgcaaatttacttgtacggttagttcattctcactctttcatactaagcatgtgtttcgattctaacttttttcttcaaattaacttccaacttttccgtcacatcaaatgtttggccacatgcatggagtattaaatatggaaaaaaaaactaattgtacagtttgcatgtaaattgcgagacgaat

SEQ ID NO: 45836 - DNA, 1998 bp, Oryza sativa
taatgtcggttcacctgctccttgtccaactcatgatcctgcatgcttttgtcttgccgtacatatatactagtaggacacatgcatcgatcagtatttttaaatacgttctgtaacacaattaatcgtaatgcgtatatggatcagatggatctctaactaatgcaacaaatggctggcaaaactgtgcgaatttgctcaaatcagatcacctagctttcctgtaatctcctagcaagactaggatttgcattgcatcaaccatcacttatgaaagaaaatgcagggtgcagcctacatgttgccaagcttctcgacctgctgcttctactcgtataactaatggcttctctagcaagatccaatgtttcctgcaaagcaaggatgtagaactggatgtaatttgaagcctgttttggatatagttgaatcaaaggaaattgtcccttctgaaactagaaggaaattaaggtgctactgtgtcaccattattttttaagtccaagttctttaatctcctgtatcttgaattaattgtagctacaaaattaggataaacagggaaaaatgaagactggaaatctagtttgaggttttcttgagtaagcactgaattggaaaaaggactgtatttttgctcttgtatttcgctagttatggattgtatttttaataggtgcagctgtctgccaaaatgggcctaatgtgtgtattcatacaggcccagcaaacactaacacctgggatacaccccaaatcttactgcatgccactctccactgcaatattgcagaaggtttcacttcaaaacagagtatcatatcactgcacaagtacaaaacacaattactaatggtgactgctaatttggttgaaatgcatcttaattcattgatcaaatcagtcagacctgaggcttaaaaaaaatcttgtgcttctccctttgcacattttgaagcagagaataaactaacaaaagaaatgcggatttgataaggagtgtttgttaaagaaaatttacacaggcatatcatgtgttgactgtggagtgcagagcaaaatatacaataccttcaaaatgacagagcaactaatacatacatttgcagcatagaaaatatatgtcacactcacaatcatcatcattgtttctgttcatacaagtgaagtaattaggagtacaaactcggtcagtccacatatgctgacaaatcacacgaacacacacacacccacaaacaagtgcacaacagcaactcggctgcacgaggatcacccaatggatcttctcatgccgctgaagctgatgatttattcgtcgacctctaggaagcacaccacaccagaacggtgctagagatcaaagttttcacatatacatgtatgatcatctatccagaaagatgaagcatacgtagtaatccgatggatggatcggtcgaacaagcagatcgactaaccggccaaacggaaagcaagcatgtatggagaaaataacttagcagatagatgcagagctcacacaccagctggcagctgagcatccatttattaattttcacacagaacaaaagaagcagaaatgaacagaatccaagctagtaacaagcagatgacgagcgtctggatgccggccggagatgtacttactcatcatgcattagatattgttgccgttgcaaatgatatgatgaaatgagcgagcactttgaacaccagccccaaataaggacatatataatagagatagagctgaagaacttgatgagccactggatgagggaaagggaatgatacgtagatgattacagtatcaaatatgtagtgtatggacgtatatatcgatcacctgaatttaagaagaaaagaaagcacgccaagtcagacaaaattaaaaaaaaaagggaaaagctcgatcatatatatatatatatatatatgatggagtaactaaagtactgagctatataagtttctacgtatgtatgtatgtgcgcg

SEQ ID NO: 45837 - DNA, 3052 bp, Oryza sativa
ctatttcataaacttcttcggataattactcagtagcatacccttcgaatgaatcatgacaaattatcattcaaatatacaaataatgaaactaaataattcaaatattttaaccaacaaataaatactacaatttctgaccaaacattatcaaaaccctaaatcatatacatataacattacaaaaatattttcctttcttacacactaaaataaattacatattattaaaaaaaataacttattacaaataaatggagaacgcgaccctgtcgaactgcgccagttcggcggatatcctatcgaacaggggcagttcgacagctctgcctgtcgaacgggggctgttcgtaataaatggagaacacgaccctgtcgaactgcgccagttcgacggatatcctgtcgaacaggggcagttcgacagccctgcctgtcgaacgggggctgttcgacaggtcctgtcgaacggcagccttccgatctcctcgccagtcgcgctctggccgttcgataggcgccctatcgaactgcacccgttcgacggggacctactttcgcgattttccccggttgaccactacttttgcgattttccataaaaataatattaattctcaaaaaaattcatacgtacgtgtatttctgagatactagatgcatgagatgatcatatctcatatcgatcggaacacaaattaaaaattcaatggaacattacaaaatctagcatagcagcacaaccctcttgatcgagaatcgttcgtaatatacggggatgatctgaccgagctactgcacaattattacgtactaactcccaattatatatattgcgcggttaattagacttaataataaactaatgaatccaaatcaagttattgcattcgatcgatatatgcttgctgattctgcatttatggtagcatcatatatatacatacataccatggcctcatgcatctccttcctagtagccagtgtgatcgatgtacatacatacgactgtcgatcagtatcaattaatgagatcactagcatgcttgcttgataaggtagtatcatatttggatcgagagagtagtgatcgaggagttctacactagtaacactacacaggccggtgcagactgcagagtagtggtcgtgcagtgcagtggatgagtcagtcctgcacggccgggcatgcttaattgttccaagtttccaactaataatgcaatgcaaaagctaacatcggcagcaaagcatgtatattcccttgatttatatataggggccgatctagctgctatagggagactagttaattagtggggcttaattaagatcgattagctaggagacttaaggagaatgaatcctcagtacgtgagagtgagagcgcaggagagggttggaaaacttactggttaggatccaatggggggtgtgcgtagtcggccatcgccggtgcggccagtgctgccgctgccaacaccagcagcacaaccggcaggcgtggggtggttgccatcgtgcagttgtgctctgctcggcttgtaggtgggtgctggaatagatataccgtgcaactctgcccccctttatatagtggtggcctggtgggtggcttgcttcatcgtgcaagccatacgcatgtgatccatttagaatatatataaagggaagaatatttacaaagagggagagagatagaatttacaaagttattacatcactctgtctatccatgatttccatataggcctttctacttcttttactctaaacatatgtagagtaaaatccaccctgaacctttgtttccaagagtttagattaagttgaacaccatcaaaaaattgtgcatttcttgtcgtccaaatgttccaattaagctgcaattgccaccgcttcaataaagaaagatttctggaaatatgctttagcatacataatcatattcatgaaactgaggtccattctccaatgtattccaaggtaaacccagcaactctttgcaaaggagcaggagaaaaaaagatgggtcgtgtcttcaagggctgcatcactgcacattacacattctggttcaccatgtactgtgaaatgtcttctctgtagcatttctctagtgtttaatctatccatcataagtagccacataaacattttcagtttcatagtacatttactcttccaaattaacgtactaggcaaattaaggaaaaataaccaactgctgctccatcaagctgtaagagatgtgatggagatggctatatatgcatcctccgatcccttatatgtagaaggattgcatcggcagagcttgcattgggtcgttgctagctttttgagccgatcactgtcttgatcgaggctgcaataagccagctagctagctgatatatataggatgggtgggttgcaataagccagctagctagctaactgattgggtgggtttgttgcacctgaaactttcccgggatatatatactcatctgtatgtgcaggtcgatcactgcattaattgcatctatatcgctcaatatggaagagcgcgtcctttttgcatcaacgcgttggggtacggtggtccacggctactgtgcatgcacctccgtcgctctctttcgcgcgtttcttttttgtgttcaccaatgcaagcttgtgcatgcggcagtgtcctgtctcgatcttgtgcaacggccggacctgaggcgtttcctgctcgagtttatttggatcagaggcaacaggctcgatcagctccacccacattccgacgctgcttgtggtcagatcggatggaggagcctcttcggctagactgcacgaaactctcgatcatgtcccacgcctcctccatgacatggaccaagtcgatcgaacgcgaccgagcactgatcgaggaaactagctagctagcaagtacggcgtgcgaagaaacggcagccgagttagctagctagctacgtaccactacgccagatcctcacacctctgacgggatacctgtgacaggcaaacgatttggtcactagtgaccattacctctgac

SEQ ID NO: 45838 - DNA, 2157 bp, Oryza sativa
gccgcatcatcctctcctcctccctctccgccgccatctccgctgccatctctgctgccatctccgccatctccgccgccgccggtcgtcctctccgccgctccgtccatcgacttccccgacctccccgaccccgacctccccgacgccgggatccccgaccaccgccgaccgcctcgaccccttcgccactgcctctccgccgccgccaccaggatccaggacgactacggcctgcgccgccgtctccaagtacgccgcttctccaagtatgccgccaccctcccccattcctcctttttttcgatggatgaattgcattgtttagatgaatgaaatgtgatttgttgtttcgattattggtgctgctgtatagatgaattaaatgtgatttgttgtctgtcgatgttttggatgaatgtaggggctagattttatatacatgattttggtgcagtgaatcttgaatgtggatttaagtgcaactgctgctgtctatgtttgcccttgctgtctatgtttgcccatgctgctgcctatggttgcaactgttagttaagtgcaacttgaatgtggatttaagtgccatttggagggggggtgactggcactgtgatgtttctgtttttcagagggcatggctagcaattcctgaggctagccaatatttagcatttatttttttctggaattaactcatcagtgacggttcggaagaaacatccgtcacaggtaacctcacctgtgacggactcgcaaacgtcggaccgtcacaggtgacccacctgtgacgggcctttactttcgggcccatcacaggtgggtcaccctgtgacggctactatataccggagatcatcacctctgacgggcctttatttaggggctcgtcagagatgagacacctgtgacgggtcctaacaagccctagtctagcttagaccaacacctctgacggccttctattaacttgcccgtcagaggtggatgtcaccactgacagccggccacccgtcaaaggtgactggacttaccagtgaccactgatcattgaccaagcccaaaaccgtcaaaggtgagggtttgggcccgtcacaggtgaccttgaccagtgtagtgtacgtaccttgcattgtcttgttaggtgaataagtaggtgttttttgttctcactgcactcggatcgatcatggagaccaaccggcagcgatcttcagtccgttggatgaagatggatggttgggattgggatcgcgcgaggaggcgcggatcgatgacgtggcatgaggccattttaccaatgaaaaaattcaaatcgaattttatcataataaatgaactcatgtgaaaaagttgtcaaaaataaagttgtagaactcattgagatctaccatttttattttggtcatttttccatccgagtttgattaaactataaaaaatttgaattttaaaatatatgaaattcaaataattttttgggtagtaaatgttttcaaatgaaaaaactatcaacaacaaagttgtaaaacgcatcaagatctacaacttttggtttggtcattttactatatgactttgtttcaacagtttgaatttgaatttcaaatgatgactacttcaaacaacattttcaactaataaatgatttcaactgaaaaagtcatcaataacaaagtggtataactcatcaaaatctataacttttattttggtcacttcttcatctaacaaagtgatttgtaacattgttcataaaatgtacatatctcttatatagttctataaactataagagatatatgtaaattttatgaaaatgttactatcacattgtcagataaagaactgaccaaaatataagttatagatcttgatgagttatacaactttattgttgatgactttttcagttgaaatcatttactacttcaaaatattatttaactgtcatgagttaaaatttaactcataggagtattttaactcattagtgaatctactgttggatggggagggaatggacggttaagattgagatcgcgggaggaggcgtggatcgatgacgtggcattaggcgcggatcggtgatttggcggttggcaggaattaccttggcggctatttcgaaccgccaagaatattattaccttggcg

SEQ ID NO: 45839 - DNA, 1188 bp, Oryza sativa
aaggatttggattcggattcggatttgaactcaacgatggatcggggattgagatcttgagatggcacggacactagatgacaagcgaagaagcaaatttcgcaattagtgtttttaagagataattttacccgctaggcgccacgacggaacgggcgctacaccctccaagccttgtcgtacgatatctcatatccgtactctttctcaacgtcatgcattatggtgaaaggggacaaagatgtttttctaaccacctttgaatataccatttgtgccacaaatgccgctgtcaggtttctgtgcaccagacgggtattctccaacaaacacgtatgttgctcaaccctcgaagctacccataaagtgtcatgttgtggcttgtaaccatgtactctccaaggacatccaccctgtatgcacttcaagtcatacgtcgtcctatttgaaaccttcaccctgaactcacgcttctggacaaatgcccacctcttcaccgcatcttgtaagtgacttttgtcatgaaacatctgtccaactttcacctgcttactatcataacaccagtgggcatctaaaccatcgtttaccttcatacgactcattgatatggtcgtccaatcatcgggtatgttagtttcgttgtcccacagtgttgtatcttctccttccactacaagcgcaaggtattcctcgttttccacttccatctgatccactaccgcctcattctcctccgctgcatcaacacgcataggcgaatccggttcttcatcgtccgagtcgttggcctcacgattagtaccacgaacaatgacctctccttgtgtattaccctctactacttcttcccctcgaccttgctcagtctgccaaacattttcagcttgtccaccttccaacggagtttcttccaccacggcatgacttgactcccccgatcgatcaacacatgttgtcttctgcaccactattgccaagctatagcctttctcccttactttactaacaaacttcctctaactcccagttgacgcaacctccactactctccactgccatccatgttgacccctcactggccacacggcatttatgacaaatttatcgtgcactagatctaccccaaacatattatacaaccaccctaacacgtcgttcaaacccatatgctccggtgcattcaga

SEQ ID NO: 45840 - DNA, 698 bp, Oryza sativa
gatgttttctttccaaaaaatgcatcagccccacggttagcacatgctcagtggtaattaataaagctcatctttaatgaatgaaattagtagacaaaactaatctctcttgactgaaagtttctaacaaaactaatcactgtttgactaaaatgtgcttactgacctaagtactattagtagaaacaaatttaatatgttccaaaactactttctggtataattcaattaaaaaataactagtttagtaggttgtaaaattaactttggtggatgaccaaattaatggctaacaaactaattaagtataaacaaaaaattcatagatgtgttataaacttcaagtagaagcatgcactagaactaaaagattacttctctcaggagcttgcactcaaaacatagtccatcggtgacaaaagcaaaagtcctatctactttgaactatgtgtattgtaacgtaaatcatagagccttcttgaaaaaagcacctactacaagctatcacaaactgcataaaagctaaaattaaaaaaagcacagaatcaataagcttgtcaagtgtcaaaacatattataacataaatcacagagccttcctgaaataatcacctactacaaactatcacaagctgcataaaagctaaaattaaaaaggcacagaatcagtaagcttgtcggcaagcgtcaaaactagg

SEQ ID NO: 45841 - DNA, 767 bp, Oryza sativa
cacaacatatcaataatatgtactaactaagaactaatttaaccgtaaaattacttaaatacctctaccaacatttagcaataacaaatatgtgctaaccatacatactaacatcgaacaatgcgaaacaattaacaactcttaaaccaattttttattaaactttcatatgcattgtacttagggattactaatgtataccttaactttactgctggagggcgtcgccaacccttttctcccgaccggcgcctcctcggcctcctctccggcctgctatcccctcccctcgctccctccggcgctcacggcgacgatgtggcgactctcggcggcggctggcgatgtggtcctcaaacaaatcgaactcgcggccttggtggacggggctttaaaccggcctgtcgaacgcccattgttcgacagggtcggtggagggccccgtcgaacgcccccggttcgacaggcctcgcggcgccgggtggtgggccctgtcgaactccctccgttcgacaggtgagcgtgtcgaacgccagccgttcgacagggctttgtcggctgcccgtcgttcgataggtgccctatcgaattgcatccgttcgacagggacctactttcgcgattttccccggttggccaccacttttgcgattttccataaaaataatattaattctcaaaaaaattccgtacgtactactagctcgatcgtccgattcatgcatcctgtgtaaaataaataattagagaatccactggatggatcg

SEQ ID NO: 45842 - DNA, 679 bp, Oryza sativa
atgttaagagacacattttaaaaataaataagattagctagaatcggaataattaacatatcataattgtagttctattttagaagagagaaggaacctcacactattgtgtaacaaaactgtacaaaataacaagcccccttgagtaatatttaacaaatacagcatgtataccaactcaaaagaggacatgtgtataattaatataacatgatatatatagttgaagacaccatcagaaatgctaagcctagatatatactactctagctaggctctagctagctcatacatatcaattaatataaaaatattatattaaagatatatagttaatttgcaagcatatgcatgacgcaaatggcacgtttaattaatactatttgtcaaaactgcatcaagtggaaacaatagcgcacatgattccatttgaaacttagccatgtcttcatgtttggcagtgctaaccgagaacacgacaatgcatcttctacatatttcacctaatagttaacacactgacaacttcatgaagctttcaccgaaaatatttgagatagatcacgtgtcacaggccggctcaataacatggtacaacttagattgggagtataattaaaatgggcatagctaggaaggcaacagcatagaacattgacaacataatgatcatgcatgt

SEQ ID NO: 45843 - DNA, 1642 bp, Oryza sativa
tacacgagaagaaatagcacaaacatacgtatcccacaggttgaatacaggaacacgagagcgctagccaggccgttcccgctgaacgggcgagcggaaccgcgatggtcctacgggccgaaactgtgaaactgtgacagtcccgcggctcaaaaacgcagcaccaatgcagtcctgcggttccattgcgcggaaccagctctgtgaacagtagtaaacagagttaaacaataactaaataaacaatgttttgaacggtattaaaaactcatgcgtgcttagatgccggtgccgcaccaccggcaccgcaagtggtgccgtgcgaccaatctgcaggaccacgtcggtcccgcggcaccgcccctcctgtccgttccgtgccttcgagctgcactgatggcacggtgccgtgttcctgtaccgcggaaaatgtatatttctgtaaatgcatgtatatatacaaaatagagaaaaataatgtatactttaaaatttaattgccggctgtgatgttctatcactaattgttttggctctgacgttgcagatatgatgaggttgcaatgttagtaggatgtggatgggtaaagttaggagcatctcttagttgcagaggagattccaaatcaagcgcccaattcctccaaacgaatcggacgatcaaatgtttcagtaaaaataaacaacaattaaaacttttaaatcttgtgaaccccctcccgtgtcgacggttccttcaccgccgtcggccgccgctcccttctctacccgctctcccgctccccctaccaccacttcccccgccgccaccgcctccatccaactgccgcacgtcgttcatctcaagttgccatatgttcatctggactctgaaagctggccttggtctgcttcattttggtgttgttgtgtctccatccggagaccagagcccgcactcactgctagttgccatccccaacctgccccaatatttctccaggttttgttgctagctctcgatctgtacacgctgtgggataattgcttgttgacaagtaagatcaaatcctgatggtggaagaatggcaccccattttgtttttgtatcagggctgcatagagtataaaagctttgtccccctatgcttgcactcagagactcttccattgctgtcatcgcatatggtgttgcaacttgcaagtaacactgtcatctcaatgtgcttgcacgggtagcatacatattctcactaactgctcttacactaacaaggatgaatcagactagcagagagagagtgtcgaaactagatttcggcaataataaaagggggtggctatcaagctggaaaagtgtatgggtttggagacaaaggatttatacaggttcaggccttcttataaaagaagtaataccctactcctgtccggggatgaatccgccgagtgtattattgattgtatgatttgggaaaaatcaacatatgcccctagaggcacccggaccccccttatatatggggaggagtccgtgttacaaaagataatctatatccctaacggaatatgcagatacagataaaatacagtcgtaaccgactaagtcccagggtatttccttgatgcacaagttgagaaacaaacccgagatacacataaa

SEQ ID NO: 45844 - DNA, 951 bp, Oryza sativa
acgtccaaacaatatcgttaattaaactttagtactaaaatagtacaatttgatataataagaatcatactttcactcaacatttatgtaatcgaagtttagttcaaaaagaggggaagtgatggagctaatgcagatttccaactgcggcatatcctatttatccaaaatgttcaagaaaaaaatattgtctgatttaacctattggatactcttataaatctgaaaacaacatactatagctttatgtcacaaacaaaagcacaacttcataagcattagtttactagctctcttactagcagtactaataatgtaagaagatgcctaaactcctctggtcaatttaagcacgtcaaagactgaccatatcatggtcacgaaaacatactatttaaagagttgacattgcaaacctaaatggccatgagttgcataaagtaccagtggggctgtttggaaggccagaaactgcggctggccttgtttctgaggcactattcttgctggctgcagcgcaacagcaaatgaagaagccgaacagccccagtgtcgccaatatttttgcacaacacccatttgtttcacagcatccttttgttaatttgtaagtacacagaaagtagcaccctactcttccctagaactcataactaatcttaaacacaaaaaccacccaaaccatgcccaaattgtctttaccagttcttatcgaaactagctcaccagaatcacagatagtcttgctacccaaacacccccattccattccaatatgggaatatctaccagcggatcaagagctcgaactcgccattcttttcaagcaaagaaataaataactctgaaaaggcaagaatcgaaggggtttctcaccggttagccctcctcctccttggcgttggaggcgtggtgctcggcgcgggacgggagggggttggagcccttgac

SEQ ID NO: 45845 - DNA, 670 bp, Oryza sativa
caaatatgacatcggcttagagataaatgatatgtcatcggcaattagccgatcggctatcatttatggatttaacgatggtttctttttctttatttttgttggttgcaggatcaaatcaactggcacgctcacgaacctaaaggcaagattttttggacctgcactgaagttaagcagatcttccaggcctcgtgttttcgcatcaacagctaggccaaacaccgacggactgatcgaggccataggaagtcacaagctgtcgagggtcaatctctgttgacgaagatcaagatcaagatggaatgccgaggattaagaggatgtgatccgttgatgaatatcaagccaaaagtcatagtggcattgatcaaggctaaggtatagttgatttggaactaatgtgcttagaattgtaggtgaatagtcccggtggtaaaatgccattgacgttggcaacccgcaaggtgaagcaagatgatgacgtgatggcatccctagtggtatagcttttctatttgcatttgagtatatgaatgccgtactattaagatagatgcaacgttgatgtgtttgtttttgtctcagtgctcaaagtaacctatgcaagtgctatcttgagggaaacctaagccttaacctaacttatgactggttttagagcttgttt

SEQ ID NO: 45846 - DNA, 1892 bp, Oryza sativa
gtcagaaagtcagatcatcacgatccagctgctcatcagcttcctttcttttcttgacgtactaaaaaaacgaaaccaagtcttaaacaaatatcatcgtgatccagctgcttagcttcctttctttcttttcagaaaccaagtcttaactaaaggaagtcagatcatcacgatccaagtgttcagattccttattaattttcttgactgaaaatcacaagttatgtttttccttttcttcttgactaaaactctgaagtcttttggttaataaattgttgccgttaatcctacaataaattaggtttggttactcgtgttcgatcctacacaatattattgcaagtttttagtttattaagccttcagagtttgtaggatcaacgacaataatttatttacacaatattaacgaacacaagtaaccaagcctactatacaagcgtgaatggtagattacgtccgcggaagtcaaattatcgaactttgagagataaaaacataccataacctcaaaaactaatggaatagtatggtggtctatccaacctactagggttagtttgaccaaggcctggcctatctgactgcaagtcctctcacggtctagccatctgcgtggaaatagcaagacagtacttctataaaaacatgatttctccaataccaaccgttggatcgtgctttaatcttcataaaaaaatagacaaaccaaggaacaactccaccaaacagattttcaaacaaataaacagtttcagtgtttctaataaacagtttaagagaaaacaccctgaaagtcagttgtgttagaatttcagtaaatcttaactaaacctaaaacttaagcaaattcgaatctagcaagagccaatcaataaaaccttctaggtctgatcaatgaattattaaaatggttttagatgcgttaacttgaacaaaattgcagcaaaacaaacaatcacaagtgaatatcaaaaccgaacaataacgtgaaacttacaaaactggaagagatcgtcaatgccttaatgattgtatatgatctttaatgcttaagtatttgttcacagggtgcagccacaacaccctcataagtttctcacaaaaccgtaattcaaatgctctcgactcagtaatctctcaaatttaacttaccctcaagacatagcctccctatctatttatacaaaaacttctgactcaaagtaaaactcctagttaggactcaaacactcaatttccaaactttttacagtttaccaattgtcactctttatttctctatcaaacacgcagccacagccagcaacagaaatcccggctctggatcggacacctctggacgatcgacacatgtccctagcatcttgtttctatttcacatgattagttgctaacgtttcaaaagatttgaaattttagcaccattgagaacatgttggttttcatcatctcactagaattagtggttcggatcatgttcgtggttttcatcacctctgaacgatctttatttggtttgttcatcgtgttgtcatgttaaaatgtttgcttcttcacatgcttctgatacttctgtgatgaagaatacaacaataggtttgttgacggaaaacacggcggcctgggagatctgcttagctcctgtataggtccaaggctgtggggatccctgttggtatttcttaacgacattactagaaatataattttcagcaatggcgcagaaatacttctggtatattatgtttacagagtttatgcgcaagcgcacggatataccattgtagcatttcacccgagagtattccaagggtatcgtatttattttatcccgtgggaagatcatgtagagagaactcaactaataattaaggggatccactagt

SEQ ID NO: 45847 - DNA, 822 bp, Oryza sativa
agcatctcctagataagctagccgtatattcagtataacaagaacataatgtaaagttggtactcatatactcggaaagtatttcaataccagaaatatatttagaagagtattctaataaaagtacaaagcttacaaaagaggaaaggaaagctactagagccatacacgaactcttctgaagacttccggactcctgattcctattctaattctattccaccagctagatactactaaactaaacttgagaggaatgagagagttcttgcttgaggtgtgtgttgaagtgaagagagtgagctccttatatagaggtaggtatgacggttgtagaaggggaattgtccgaagtgccctccaaccgtcattaggatgcaatcttggacgtccacgccaaaaccaggatccaacggcgccaggattggttcggccgaacctggggctggcccaatccaacccaatttcggctagtggcctcctctattgctccactctgcagacttgtgaattttggtccaattcatcgtgtcaattctgagttcttggcccattcatacataagtctggtcctcgacatcgtctgattgatttatcgttgacagctgcccggcgtcgtcgccggcggcggatccatctcccccaccgcccgccgtcgttgcccccaccggatccgtcgtcggctgcaccggaagcgtcgccccaaccgcccggcgtcgtcgcctgcggcggatccgtctcccccgccgcttgccgtcgtgcccccgccagatccatcggcggcagcactggatccgtcgccccagccgcccggcgtcgtcg

SEQ ID NO: 45848 - DNA, 3875 bp, Oryza sativa
gaagcagttgtttcatagagtaaaaaaaatgcattcgttatttttcttccattttcttgtactatcagctagggttgtgtttagttcagcgcaaagtttagattttggttaaaattagagatgatgtgacagaaaaattatgtgtgtatgataggttgatgtgatggaaaagtactgaagtttaatccaaatttgaatctaaacataacctaggttgatctactacgcggtttcgtggtggcctcttgtgggggtttgattaatgactcggtgaacagaactactaataatcgagagtactgaaacttacacgtgggcccatttcagaccagtgtttgtgcgtggggcccactgtcagtggctctacgcggtcgtccctcttgttgaacgagctccggagtccaaactaccagtccaccatggaaaggtcgagctgacgtcgtgtgaattgttctttttttttccctttcaagaattatgatttgtttgaccaacgagttgactgggagaatttttattttttttataggtgagttgggttgtatacgtagaatttgagtaaaggtaggtagctcgaactgtttttctatgttttgatgctattataaacatggattttaattgtacggtttggagtttttacctgtcaatctatatattgctcttttaattctccccccccccctcctaactcctaagtggctttgtttggttaagtgaggtttaaatataaactcataaattgaagcatttctcacatatttatgcccatctcacattacacagatattaagaaatcaggtaaaattaaataaaagaatattgtgattggtcgagaaaatgaagaggtgaagaatttgaatggcaaaatattataattgattaaaaagggaatatgagtggagaaattgttacactttggagtataggacaaattttgaatggtataacattattatattttaggacgtagggagtaggtgattaattaatacatcgccaatctgtatgtaatggccaagcttagaaagcttaatcgataaaaatttcaagattatgctaccaagtatattagaagaagaagaagaagaagaagaagaagaagaagaaagtgaaagaacaataattttgtccaaaagaagtgtactccgtattctctatagaggagggaggtaaggtacatatcaaaatgagatgtattcatcggcagacggcacgcctatagttgctcctattctacctttcaatcttctcccaacaccaaaatagggtgtatttgaaaaagacatatgatttatttttagaaaaagaagataccaacgttattactatttcgtataatggactataccttattgatactactgctttcaataaaaagtttacactgtttagtgataggcatgattagctttaattatttccccagaaatcgacattgcagaaactaggtcagcttattgaataaagatcacttataagatgattattcttccagcagaaatttatttacatgtcaaaatttttatcatagtcaattatcataatcctagattatatatatacttgcaaactcatatgcttgtatgtcacatatcatttaacaatagatattccgatcaaattatcacaaaattatagatttaacgtgtaatttctcacataactatagatttaatatagagtgtcacaaaaataaaaatcaagtagcaaatttatcacataactctaagtttagtgccaatttaatcacaaaactacaattatcatagctccaatatgatggcaatgctatggatttaaactcaatagttttatgataacttcaatataaatagtagtttcgtgatattcggttttgtgataattttaacgttaaatatgtagttttatgacacataaattaaataagtatttttatgatagtttgatcaaaatattaatagttttgtgaaatttactcttaacaatattatatatgctattcaatagcaattgctgaccatacaaaaacataacacttaatttgcagtaaagaaattctctgattaattatacacagctgctaaattctctcctcacttcaatccaccgtgcaatacagctgtttttcaattcgcaacgacccccatcgctgaagatgaaagacaggtacgcatgtactattcttctactacaaatggagcttattgcagctttgtgggacagccaaacggtcagccccggcccggtggttgatctgaagatccattgcatttgcacctgacgcgctcacaacaatttgacaatttgaacctgatagtgcatgtctcaccaaactatatagtactatcaattttacatgcatgttcatcactgaattggagaaacatgcaatgaagagagatcgacatgacatatactagtacatactattccatatgcaactctagatctgaactcaacttgtgaaattgtggcctaaatagtctgtacttcagcagcacacaacactgttgaaactctctgagcttcgatctaggacaggcaaaattaattgaattagcagactggacacaccaatcaatcatcctatccaagtacatgcatcgtcgtcgtcgtcgtcgtcatcgtcatcaaccattgcagttgcagctagagagctgaatatatacacaagttgcagctctttccatgctctatcattcatcaagttgggtttaacttttaattctttctcttcacccttcttgcactggaccaagacctttattctttttcttgcattggggagctgaatccatcgatagattcgtgagagaaaggtaggagtagtaccatgatgcatgaccgaccaagggtccatccatccatccatctcgatctatactgtctactagtcttaaacaaatgaaatgtgtgagctgtttctcgacctgatcagtcgttcttgcaacttttgcaagttgcagcaataaaataacactggattgttgcttagatcacgcaaaatgcagtacaagaattcctaggaaatgaatgaattgctggctaggagtagcaatccagagtcttcttcatcatcgtcttggactgcactttctcggcctccatttgggtagttcatgtggccaggtgagctgaaccttgaatgcatgcttgtgcaatttgccgattgttttagctaaggcgtagtacgagggacggagggtgagatgacctaaagtcctgaagaccagaacgatgaaagaggaaatatgtcggttgctaattcatgcaaattattaatgcttgattaacttttcaatcaaacgcaattaatggttaattgattaattagtcccccacctacatcacttggcctgttttatatagtttgccttatggtgtcgtgtgttggtaatctgtggatcagcagatgccacggtgatctagataggaaaattagttcacagtacttcactcacatctgcatcttgagctatctatatattcatcctagctgcgacttgtgttaagtttatcatataatcgttgtttgattgctctctggttggcttctttttaatttgcagtagctagctatgcacataagaaagctagccatgcatgtatatatgaagaaattactgctattaagtaggagatcaagatttaaagttcatatatattagacaaacaaaaacacttctttttcctaaaaaaattagattaatagttctccacacagacgtggtaatagtcgtctttcaaaagtttatagcttaaaccacaatccctgtttctttttttttaacaagttctcctagcttgtttagcagccggttttctgaatctaatcccatcttgacgccttgacgtgtactagtagaattctagctcggacaccggcggca

SEQ ID NO: 45849 - DNA, 2809 bp, Oryza sativa
aacgtgagttcgatcgattgcccggttaatttactatggccacgtttgatagggttccaactcctaaatttaatttttagagttacgtttagagtaaagttgtagagcaatataaacccggcttcatctggctagttgttttgtgatagcacttcagtccgctccgttttattttacgtggagatcaaactgtttgtttgagttccgtcttcagaagaggtagaaataaagttggagctctcgtgccaaacaggtccggcttcacttgcaatcgagagtcgtagaataaatctcaactgaagatctacttggtgtgttcaatttcctagaaacgactggatcagctccctagcttcaagacctagcttaggggtttgtttgtgaaagcttcggctctagctgcatcacttttggaactgaagctagtctaatcaaacaattttagctctataaaaaagaaatagccgagttgactagagtaacctaaaaaaataaattagatgtgtgagtggagttcgggccgctatatagaactcatctccttagtgatcgctccctgtttttttagccacttcaccatatcattactgtgaattatttgccccatgcctctaaaacaaatttttcttcatatggcattgcttaaaccactttctttaagttatttaatttatgtttattttcaaaaagtatttaatttatcactacgattaattaattagatgatctgataaataatctatttcaaacacataaaactgctgatatgaggtaaccattatttgaagtagagttcatccatcaaatttaattttaaatcttgatgtctataattacacgcatatgtgagattgtgctctcatcagcagagcatgtcttaagagagtgcgcttgcgagtgtgtacgtgagacggatggggtatgtaatcggggaaagaaaattcttaacctgatcaattgttgtatttcgatacgataaaccatcaccatcccaagcattgcaatgcctgcacagcttgcatgcaactctgctaattttcccgacctggaccacgaccatgttgcctagctagtgcttggggagctgaatccaactgctaaataatccaactttctagattatttagcaagtactaatgttagagaaaaatatttctctttagtcaactttagttatcattttttaatttttaaatcatctgattagctcaagatttattaaaatgatgtgtgaatcatgcgaataagtagaaatccttatattataatattaaatttgaatttataactttttgtattattaaacataggaagtattatattacttcttatattacgcaatagtgcgatgaccagaaaaccaacagtgagatacctgtttatcacgctcatcgatcaaatccatctagcgctggcacatgcaacaagttgcccagaggcacaataagagggcaagaatgcaactatgcaagatggcagttgttgctgttaagaaaagtgcaaagagatactgtaatagttaaagatctagtgctactatttcgtttgcatcaaattgcatctatcaaagagagtctgcaggagtactactattcatcaacaacttggacaagatatgtatgttacatttatatatgacccttaaattttagaggtgtccgggtgagctgaacccatgcatggatacatctgcatccaagctaaacaaagtagtataagtacttattttagtgccacgagtgtaactggaccgttttagttgacgacctagtcgtaaacaaacaaaggggatcgatgtacataccgagagggttcatgaatctgaacgttttagacccgataccaaacaaagctttttgccgggtgttttagtttaatttaggcagtcgctttggcacacaaattgtcgtaatctatatattgatatcaataaaagtatatatggcctggtaaagaaaatgaaaagtataaagcagtgaatagagagttctttgaaataacttctttctccctccgatcccttactttttaatcatagaaacactgtgcgtcttgtatatatgtcatgtgtttatacatatctagatagctaccacttaaaacatgagtttcgtcatctatccgtcgtgttaggaaaccggcggctcataaagatccagcttagttatacccattaattggactgatcactaaatatgaaaactatctatagctatgcctctatatagagagaagatgatgctcactattatactccttgaggatgaatgaatgaatgagtgcctcacctttaaatcttgtgtctttcactttcttatagacatctgtcatgtattatgcaaaataaacccacaaataaaacgatttagatggtacccaaggaaagacatgcataaaaaaattattttccgaagtgaatatcttaagagatcctcttgagaaaacgaattatttccacgggcctaaaagaccagccactatacccaacctctccttactctcagccttcttaaaaagtaaagaattatgctctccctcatctcctcatccttatctcctcgagcccctctctcttctctcactcacaaactcaactcctctctcactcacaaactcacctcatctctcactcacggcagcggtggtgcacgcacagaggcaggtccgacggtgtggtgtgcgttgatgacgaccgccctccctcgtggatccaacgaccaagtggtggggaggggcgccagatctggtccaatgggaaagggcaatgacgttgacagtggctaggggcgatggcgtagatccgatgctg

SEQ ID NO: 45850 - DNA, 3761 bp, Oryza sativa
tttaggaggccatcatgtcctaacagaggtaaggtgtgcgcgcgcatttagaaagatacgtgagttagggtttttaggatttttctttttggaatttttatttatttattcaaaaattctttatttttcagtcgggtaaacgtgtcgtgtgtaaaaatcctattttcacgtgtggttgtgttacctgtctgggaaatccctatttctatatacacctgagggcatgcagttgctacatccatctgcagaaatgcattttagccgtttaggaatattgtttatattgtagtgtcttttgcaacgcatagacatattactagtaaagataaagtataagaattggacgagtcaagcattggatgatcgtagataagacgatgaagtcatgggtgcatatctccaatcaacagggtgtttaaatcaataatcacacatgtgtatgcacttttaatagaattttagcggaacgaatttgtgctaattttcgtttcttccaatgtgtggacttctcttatgtgctctctccgtctcaaaatataaacatttttaacaaagtgacaagtcaaatattttaaactttgactattaatagtaaaaaaaattaaaagatcaatcatgtaaaattgatattactagatttatcattaaacaaattatcataatatgcaaatctttttatttaaaacatcttacttttatagatattgttagtcaaagtaacatatcgaaaaccatgtcagagtcaaaaaaaaaaaaaaagcttgtattctgggatagatggagtaattaattaacaaaaaaatatgttttgattgataaattggtatgcataaagatgcttgcactagaattttaacactttggcccttcttacatttactttacaaatgtaaatccatgctgaaacttattttgaaaatgacatatgccaagacttgtttcacaaatgctagctaagcgtgtactcctaggacttttagcctgcaggccgatcggccgctctcgatgccggcgacgtacgagacagccaggttcatggaacgaaaatgagaggtgcccgggcggtatgacttttcagtcagactattattgtagtagtacgagccagtttcaatttctctacagtacgtaatttgtgcagactattattgtagtggtgctttttctgtagcagtaaaattgtgcagtactccctcacagccggaatgagttcatttttgggccgttttggtttgctataaaaactgggccataccaatattttagttatcagaacaataccactgtgagtttggattgtgaccaaatcactggtagtgcctaggtttaatttggtagcaaggcataggctggaattggcagccatccgtcgcccgccggaagtgcccagaagcaggccacacaacttggctaagcacaaactagttcacgcacttccgttaaaaaaaagaagctagggcttcatcttttctctacttcaataaatacccagccactactcccagccactactcgtctcctcggctggccgcctcaccgctctgtttatttgtgcttattctgcagcaaatagtaccaaaactattacaccaaaaaaaaatggtaatccttcattggtaccaatccaaatggaaattgacccataaaaatttggcacaacattggcactaatccaaacactcgtatttactgtgctaccataccaaaattttggtagtgccaaaacttaccaggttttggcactgccaaaattttggtagggtaccaaaccaaataagccctttatttcttcctatatgttctaagataaatttatttttaagtaaacattatatctcaaagtttatgaaagtagtgtggataatacattaggagtagataaaaagaaaaataattgtattgggatttgataaaatgggaatattttagtctatttggttttgtattggtttgtgtgaaatgggtgaaaaaaacttattttgagacggagagattaattgttactattcgttgggtgataaaatatggtataacaatttctagagttaattatgggttattaagaaagcatgtgaaattaaataagagaaaacaataattaaatgaaaaaaaatcattgcaattaggataagttgagagaggaagtggtggataaatttgattgattattattggttgtgataaaaaaagtagatgtaagctgatatattctataataaatttttaaatcttataggtttatttgtctctgaataagtccatttctatgcactcatctacttctattcgagtttcatttcattaataccctttactaatcattatacctatatgaaccacccaaaaatactattatttctattaattgaagacattttgatatgattggcagtacaagtttcccagtccaaattttcccctattgccaaaaaaaagaaaagaaaaaagaaacgcaaacacacacatgcacacccttactcctatacacatctctctggtcccttctactactactactagctaggtccgattcgatcatatcgacgcgatgcaagccgttcactgaacctgcagctaagtatacgtaatacgttggcttggtgggtgcagtgcatgcactgatgactgatcgatccatcgatcgagctatatctctcgacgagacgagatccagtacgtactctttcgtcggatgggtacagtttaattatcgattggtctaggtgcaggcgcattcacgtactacgcgagcaggtgcatcgctgtcgacgatgccggcgacgtacgggacagcgaggtttcagggaagcgatggacacacgatgccgatgcctggcagtgcatgatcacgacttctcagtcaagaccatcaattatcgtccgactagctagaggccgggtccttgtggtgtttttgctggagccgtaaatagtagtgcactccctccgtacttgttgactgaataactttgaataccaagtctgtttagctttaactggttgggttctcttaggccatgtttagttcacatcaaacttttcttcaactcttaactttccatcacatcacatcacatccaaaactttcctacacacataaactcccaactttttttccaaactaccaactttccctaaacttctccccaatttaatgaactaaacacagcctaaggtgaaaccgatcgtttgggtttactggcttctaatttaactcaggtgctcgtatttacggctaagtagatttaggtgcactagcgttcacgtaaattattattttagtggttcgcaagataccaatcgataacgagatacttgagatttcgttaatcccaaaataaaatataccagccatgtctttaggaggtgatcatgtcctaacagaggtaaggtgtgcgcgcgcatttagaaagatacgtgagttagggtttttaggatttttctttttggaatttttatttatttattcaaaaattctttatttttcagtcgggtaaacgtgtcgtgtgtaaaaatcctattttcacgtgtggttgtgttacctgtctgggaaatccctatttctatatacacctgagggcatgcagttgctacatccatctgcagaaatgcattttagccgtttaggaatattgtttatattgtagtgtcttttgcaacgcatagacatattactagtaaagataaagtataagaattggacgagtcaagcattggatgatcgtagataagacgatgaactcatgggtgcatatctccaa

SEQ ID NO: 45851 - DNA, 742 bp, Oryza sativa
aaccaaattattactagtatagtgaattaccacgttgatcataagaaataatatatactggactgtcttcataacagtgtggattatttatatattgtgttgtgaactaaccaacgttatacttttcgagacggagggaatatatagttgtattagaaaatacaacagaaaacctagacaacggtatcctgatagaacgaaatatgtctatcatgttgcaacgagattccgttttatagcagccctcaaaatacaaatatattcttgataatcccatacaatttggtggaaaattcgaccagtttatccgaaacagaaggcgtgaacacaagtcatcagcatcagcaaggcataaagcggacaacttgaaacactttattgaatcagctaaacttgcggctcgcttcttcttttcttttcttttttcttcccttcactttcttggacctgtgacttttagttggccgtccaggggatctgaatccatctactgtagaccatttgtacaatcaattgttacaaaatggaccacttaatctacccctaaatgctaaagcaatgactaattatgagctactcctagctgctatattcagctcagctcttgcaagttgccaggcaaaagggctactaaaaaccaatattaatttctagcaaattgctctagcaggctcttcatcttcttggaccatggcttggcgtttgtgtcccggtgagctgaaccatggataagaatgcggtt

SEQ ID NO: 45852 - DNA, 672 bp, Oryza sativa
ccccgtttttgtaagcttcatcggacaaaacaaatgatcgttttcaggaagttcaccactaaatctaagaaacactcaatgcagtcctgtaaaccaaggttacacaggtggatcgtgctcaatccgaatggcaaaccctgtatggtacccactatcgaaatgaaaaacgtcaccccatcgttacaagttaaccaatttttttaaccgataatcagcagtaaaaaaaacttccattcgaaatacctttctaaaattttttgtagcgggccagcagttagttccaccttttcagtgctgatttgaattttttggcccgctccgatataagggtgttacacgtacgtttgcttgtgcacataataatcgttagtaattcattcgtttgcacatggatgtacagctatctagcgagttgcgctgttgcgttccactgtcacgcaaattggcaaccaggcaaaattcggggatcgaatcaaataggacgtgtgtgcttcatgccttcatccaatggtggctgccctgctggttggtggtacagtgaagcgcgctggtgcatgattttaggatgtgagcattatgcagtgcataattaattaagtactccctccatcaactcttgatagtcatatatcatcttggcacaatgaggtgtgttcggcaccctctttttct

SEQ ID NO: 45853 - DNA, 687 bp, Oryza sativa
atttttttataagactagagaaaatgcatgtgcgacgcaacgggtgaaggctattctaatcttataattattataaggtttagttcaggtaaaactcaccgttagaattcgcttggatatattattttagaaaatcatgagttgttattaggagtccaatcgtctcaagttagcatgcgagttttttttaagagatttctatgcgactcctttggtatttctaaaatcgaacgaacttaaaaaccgactcatatacggatgacgtaccaaagttctggcaaaaacatcttcagtttttataatagtagagatataaatgggagaagttgttctgatatcgtgcaaaaaataattgtgtgaattaatgtgccatttggaaaattgagccaatgtggaattaatatatgtgtatatatgggtattacccaaattttggtaaaattgtttggcatatgtatatactccctctccgttttatattagaagtcattttgatattttactactaaatttatagaaaaaattatcaacatctaaaataccaaattttagattcattaaatctataatatgtttgttttgggttgaaaatgctactaatttttatataatcttattagtttgactaagaaaaaaaatcaaagctaaacttttattcagaaacagagggagtacaactttagcaaa

SEQ ID NO: 45854 - DNA, 1528 bp, Oryza sativa
caagatcttccagtgatgcttaattagtttcctggattttcttacagtggcacctggttgagaattttactgaagctgaccgccttactcttcaaacccttctgagaatgaaatccgtgcaaaattccaccgtgtttagttccaaaatatttcttcaaacttctaactttttcatcacatcaaaacttccctatacacataaacttccaacttttccatcacatcgttccaatttcaaccaaactttcaattctgacgtgaaaacacagccttcatgtgaaactcctacaaattctatgcatcctaaatgagccgttcaaaagattagaacccccataaaatacacatgaaattcgtgtattccaaacgacccaatgtttgaaagataaagacctggaaattccacgtgaaattcctatatttcaaaggagccatcattcgaaagatcctttgttccaaacgagctgcttcaagccggacaatcttggagggggtctctgtctgaaccaacttttccagagcatgaagtttcgctgccggattcgtcgtcctctcaaaattccaaagaaaatttttgctggtctttgctaaaactctggtcgtctagttcatctcacccttcctacctatgggctggcacatctccaaccctgcactcaccattgggttaaatgcatgcacttggcttttgattcccaacgctaacccactacgtcactggcgtgacgaaaccaccatttcgtctcttggaataataaaaaggactctgattttggtctgcattggaattattattaccaggcttcctctcttgaccttctttttggagaggctggacaggttcatctgaacctgggggaagagagagagagagagagagggagagagaagcaaagcaaccttttgggaaaggtttggagatagatttgcagtttttgagtgggaattagtttgaaggtaaatgatgcattggattagtttctgggtgacgtggccatggagaggagaggtagaaatttattactgcctccggttttgtaatggatgacgtcgttaacttttggatatacgtttgactatctattgtatttaaaaaatagtaattattctgctgtgagttattttatcactaaaagtatttaaaatataatttgtatcttatatatttacataaattttttttaatgaggtaaatgatcaaacatgtatttaaaaattattgatatcgtctattaaaaaatgaagggagtcctactactcccccgtcgcaaaatataagaatctagaaccgaatgagatattttttagtattacgaatctgagtttttatattttgggacgaaggaagtacaatttaacagccactaatttgattatggattggaaggattagttaaaggcttcttttaccgttctgtgtacctggctacccgccttgaatgatgtgacacaaaagataggatttttttttccatggttgcagtatgttgagtggcaattagattatatgataaaagatgcatgggat

SEQ ID NO: 45855 - DNA, 1253 bp, Oryza sativa
aagcgtgcacgacagcacgagagatatagctagaattcattttaattatattaatacatacttcctctgttttttttaataaaactttttagcattacctaaatacatataatgaatttaaacacatacatatgtctagattcattatcatttaaataaatgtgtgcaatgctaaaaagtcttacattgtgaaacggaggaagtaatatactaggtatactcacgcaaacgcacgcgattaacctagctagctagcactgacaattaataaaacagttagagcaagttggcacaggcactactgtttaattgtattttatacggctaaattagttggacgaggtgtattgcgtgagtgatatctgcttccagcttcccagcaattcgccagcacgtacgtttttatataagccatggctttagaaaagattatctatatgtgcgcatctacaattattaaattaagcacattcaatttagttagagcgaaaaaattcagtggtcctgtaggcatatgctaaaatgttggaatttttttttcatatcatgatttacgcatattagatatccatccgcagaatagacgtacacgtaactgaataaataaaacttacattatatatatatacctaaaattgtttttaagtgtttttggtaaatatacatttaagttaattttattgaactagacatatgatgggatcgatctaacttcgattttaatctattcactgtggtactgcctgcatggtactgcctgcattccatattactactccataagccttttttaagtttatcccaagtcaaactttttctctaaggtataaccaagtttttttaaaaaaaaggaatatttttaatataaaataaatatactataaagacgtatttaataaaacttattaatttgatcttatagacgttactacgccttttataaaactcattctaaacgtgaagaagtttaatttaggacatacctaaaacaatttttatgatacggaatggaacaatttttagctgcactgtaggtgctctctccagtcaaagacaacagtgtttcagttgacacttgatcactggtggagaaaccatatttcgtcggtcgggctaattccacaatagtcccggttgcaacaaaaaccgggactaaagatgatctttagtcctgattaaaaagggtaacgggcatatttgatctttagtcccggttcaaatgctgttagggcctgtcaggcctccccgggatc

SEQ ID NO: 45856 - DNA, 1274 bp, Oryza sativa
agagtgtgtcctagttgcggactgaacacataaagaatttgcaaaagttaacaatcgttttctccatattgcatcacgatatcacatcactaattcactatttgttggtggtttgtactacgcatttgcaaacaccacgtagctagctagatcaagctagatataacaccaaatctgagttctatcctgaagactagctagtaatcaatcgacttaattaggatataacgtgaaaatcgatctttggctgccgtttgtgtcaagttaaccattcattagcttaagtgaatggttttacttttcttttcagaaacgatactgtcatcaggtgaaactgcaactaatattgatggtgaagtctgaactctgaaatggatggtgaaatactgaaattaatggaagagtgaatagtttacctgacaaccagatgaggtcggcgaggtcgagacccttgctctggatataatctattaatcaagcagtatataatctattaatcatgtatccgtagaatagctctcgaggtgtggtcccgagaatagcagtcgagtatccgtagaaaaccaaacggcatattgcaatcatgtatctgatatttagatgcattggtgtattggattagaggaaaatattgtctctagattaaagccagctaacagtttgtctagtgcagtcttctccatatatactatttgctagtgtctggatataatcagtggacattaaatagttctttcttatgtatattggtgacagactttattttattcaatttaattgtcttaatatcgttagttgctaaggacttaaatagagaatggttgccgggcatactttttctttagtgcgttgtggtgccatggggcacacgtgcttgcagtgctgcactgcagaaaagaaactagatatatattttactgttattcctcttctgtagagaaggaactcggcttgtttgagcattcagagcttgcactaattagaaaaaaatagaatacctattttcttgaatctatacagtcagttaacacatggaactgtctttttcccttgtgttactgtaagcaggcggatgtactgtgactcgctagctagacacaatctcgaaagatgtgaatttaattttcaattcttagttttctgagccatgttataagtagtgtcaacttttaaactgcaacaggaaaagctgacatctaggccacaggataaggtagggtctgcaattattatgggaggattcattgacatggtcatatatatgggtaaacttt

SEQ ID NO: 45857 - DNA, 1801 bp, Oryza sativa
aaaaaacggaaggaaaaaaccgaagaaataccgaaaagatacaaagaaaaccgaaaaaaatcccacgcgcggcgcggcttctgccgccctcctcatccgcgcggacgtcggcgaattagcaatttcgggtatttttgctagtaattaataataggtatactatatatatataatctcctagggcttagggttttaccttaatttccttctccaactcgatcgatatatatatatatacacaccctaagccccggcctgcaacaaactacaccgatcgaccaggcgggcagcgagagatgatgcgcccctccggcctcctcatcagcggcggctccgtagtcgtgcggccggcaaccatggctgcgcgcgccccctcgcggcttccgtccgtcgtcgtccacctcccgaggtgcaccgccacaggagggccgccgcactgcaggctgacagcggaggcatcgtccgtcctccccaacatgtccgtagcgtccccatgggtcaacgatgacgacctcaccgaggtgatcgatcgatctcatcttcgatcatgatctcttaattctttccttcgatcatgcaatacaaatacaatatagaaaatccatattgattattctctaaattaatttgttgtttaatttcttttgctgccgatcgattactcgattaaattagttaggcacctgctgatccatcttgctaacttcataacttaaactaaaattgttgcattttgttttcgatgttccgttgaaacaactaatatttctatttattattagtttaatagtatatccttcatcccaatttgatcatcccctaaataaaaggtgcaaagacaaggacaataaaattttcatgtttttaaattaattatcaccaatcaaggtgctccatatatccagtggatattgcatcacactttaaatgttgcatggaattgcactaacagtcgtagcatgcatatggcttcatgcatgcattccattcagcgatgcccaattaccctttgcataataaataaataaagagacacttattattatatgataattattttaggaagacctcaaaatcgttaggtgatgatcaaattgggatggagagaatatctttagatctaatttatttatttgcttgtgtgatatattttcattattaaaaaaaatctgatttactcatatagagtcgtatcaattgtatgatatctatcgaatattatttattaattactccctacgtccctaaatatttgacgtcgttgacttttttaaatatgtttgaccgtttgtcttattcaaaaaatttaagtaattattaattattttcctatcatttgattcattgttaaatatacttttatgtatacatatagtcttattacatatttcacaaaaatttttaaataagacgaatggtcaaacatattttaaaaagtcaactgcgtcaaatattttgggacggagggagtagttaattatgagcataatatttacgtttttggcagatttccatctacgaggtaattgcgtggtctgcagaagaagccatggaactcatcaagcagactccacctccaccacctcctcctcctcctcctccctctcctccggcgacgcacgacgtgggccagccacctcctcctccctcccttgcagcgccgccgccggcgcagcacgacatgggcaagctactccgcatgtacgcgcggctgctccgccgcctggagtcgcaggccatcgacatgtacgccggcagcaggaggctggtggagtaccacgtcatggcgtggggcgcctac

SEQ ID NO: 45858 - DNA, 775 bp, Oryza sativa
aggtgggcggcggcggcggcggcggcggcggcggagagcgaagtagagtagtagactaggcggagtagggaggaggaagcaagtagtagacgacccccgatgacgatggctcgtgtcctgggccggaatgggctgccatctcgaggcggcccaactagggtttgcttcgttactaaggtttatcatgtaatttttttataggaaaaaaatatcaaaccctcttgtttattttatccatggaagaattattatatatccattcagataggataatgttttaaaaaaaggatatatgtatttaatattaaattccatggatgaaacgtggaaaagatatcttagtatttaaaagaaacaaaggatatatattccgcgtgctgaaattaatgttaggtacgttctctcatattaaggttgttttgaattgaagccaacacgtgtcctactgaatttttggtaacttcaatagttaggaaaaagctagatgtgtcaacattttcttgctaaattcttaattattaatattgatgggtcatgctatgggtgtatttagatttttataacttacatcttgatgaaattattgtcaaagggggagaaatatacaaaatgcatacttcttgaaaaggggagaattgaagttctagactcagtgaggagttgaggtccagacggtcaaggataccgggtgacgaagttggatacgagatggcatacggtggatggataccgtgtgggtgaaatctttgcaacgggcttcacgaggtgtgcgtgc

SEQ ID NO: 45859 - DNA, 529 bp, Oryza sativa
cgtactccctccgtccaagaaaaagttagaccatagatttccgtgtccaactttaactgtctgtcttatataaactttttttataattcgtatttttattgttgttagatgataaaatatgattaatattttatgcgtaacttgtctttttaaattttttttataaatttttcaaataagacggacggtcaaacgttgggcacggaaatcagggtttgtattttttttaggacggaggaagtagtagccaagatctcgtccgtcgtgtccctctccgcaagggcgacgtccgtagtcgcgcgggcgcgcgcgtagtacgtagagtatcgacgacttgcgcatgcgcgttgtttcggtcgggccaggttcgtgccacctgcaggcttgcagcccacagccacacatggagggaggcaacacgggggcgcgtacgcttgtcgcagataccgcccggtgcgcacgcgcgtgcacgtgcgccggccgttgactagctggaaaaaaaaggttaaaaatatagtagtattatttt

SEQ ID NO: 45860 - DNA, 627 bp, Oryza sativa
tgaaaaaaaatcgccgaaagctttacatattttctttaattaggtatatgatatagaccatttgctataagtatattggtatggatgcatgctttgatacgtccaaaagtgcgacggaaattaaaaggaaaaatataaagcataccatgggacccaccatatgctggatgcaccacaaaaatctcccatcaatggtcatgccctgtcctctatcccattccgtttctcctctctctttctctgcgatacgatcgctccttctcaggcttgtgacgtgcacctgcatcccgcagtcctggcaccttttgcatctttgagtctggtgttaatagagatggcaatggttaattcaccgtcggggtcatgcccgtgtccccgtcaccacggtgaaaatatgtcactgtccccgcccccgtcaactacaacggggctataatttctctagccccgatcaccacgcggtgaatttttctccatggtgaacacgtccccggttaaacaacatattcacaatcacattatatcaaatatatccaaaatactccactcaacaaatcagcaaattatagatcacaatcacagtaaggatcattatcatttgtcattacttcattaggcaaaacacaa

SEQ ID NO: 45861 - DNA, 579 bp, Oryza sativa
tggctaccatcacggccggtcgatgtcagagcagcgagatgaattgtttgtactcgtacttgaccagattaataacaaagataatttagctacaatcatggatagagaatcttgtttaacaaaatatgataggcgaccagtagatgtacactgcagcccatagcaattcaaaaatctccgtttaattgacgagcgtgcgagcgtgggaggggaccggtggtctccaggccgttggttggttggttggttatggttgatgagcgatcgggccaaccccaacatggagacgctggactgcacgagcgtcgcagtggacggtgtggtgccgcaacgaggggatcgaacgaatcaacgaatgatcgaaatcctctcggaatcggtagcatctctttaaaagcgacgctctatcggttagtaattaaacatatttatcatttaaactactaggtattgatattaatatgatgcagaaagaattaaaaaaacagattttaaaaatagtctaaaacggtacaccttatacgaaaacgacgctcggtcaatcaggaatttcatcttaaacgaaccatatgtaagcca

SEQ ID NO: 45862 - DNA, 1254 bp, Oryza sativa
taactaatgactcactataatttaatgatggcttaatgatagttcacgatggttaatcgtgattagttaattaattaatgtgctaactaaaacctgataatggtgggttgtgagcacatggttttgttggtcgtgctcatgacaattaaggaccggttcacgagtttcggttgtgaaacattaaccgtgccaaccacaagctagcgtgggcaacggctttatcttttgtatagcatggttcattgcagagcaccaggttgagaagtggcggagataagcccacgggggtcgctggggagtccattacctctggttttgagggggagattatgatccaggaacggtgcactgtagtggattgtgttgtgcgagaggtaatgtcacagctcctttccgaggtaccgtggtggtactaaggcacatggtgacatgatgtggggctgtgtcttgtgggtacagtggtacacctctgatcagagtaaaactattcgaatagccgtgcccgcggttatgggcgggtctaacaatgtttttcgtgattagtctcacatttctcaccatagtaaatgatgctttatttggttataatttgtttagctcctggtttggaatggttaattcctggtttgaagattagatctgttcagccgggaatggttgttcagaatggttgggcctatacaacagggtatgttgtatagcgttggtttaatattgtttaatacttcactgttttattaaattctcaaatgtttactaaatgctgcttttgcaaaataaaaccctattatgccatcttcgggtatccttgtgcacttgcatatttgctgcgtgacttgctgagtatgtcatatactcaccttgcaatcattcatcagaggaagagttctacaatgaggctgatggtgtggaggattaggtgtagccttggtcaagctgcctgtggagtggagccgtccgcgccgtttattttattttccgctgcttagatctttattgattgagaggaactatctacctctgtaataatattttattcgtttaaattagagtattaattgtactctattatcaatttgttattgtgtgcctcggctgattcctggacgagggttcacacacatgtaagcgtttggaattttggatagaaattccgggcgtgacaagttggtatcagagcttccttgaccctaggttatgccaaatggttacccatagaagccctctaaaaatgttggaaaaatagaactgttc

SEQ ID NO: 45863 - DNA, 696 bp, Oryza sativa
ccccggttcataacaccaaccgggcctaagtcccacccctatatatatatatgtcttcttcctcctccagcccgagcaagcttcacaatttctttaaaaaagaggggaggtcatgccaaaatttctagtgaatttattttggtgattatatacaaatcggaggtgcctaaaaggttagcaacttcatactaaaatgttttttttttcatattacatttggagctatgttttgcacacttttttgtctccaaaattttgttgttagttgataagagagaaaatttgtgtggagaagaaagaatatatagaaatttagtttatttgctaaagaatgttttataaaatagttgagaaggaaaatatagtgaaagttaatattgaatgatagaaaacaaagtaaaatgaaaaattaaaataagtacaacacattaatattagtttaaaactttataaatagtaaatatataattattcggtgtaatatttcataatatttgtatgaataatgatatgtcattattgtgtgagtgttgaaagagtttgtaattattttataattattgtatgactgtcattattgtacgaataattatgtgtgtatgattttttttcatatcatgtagatggatcggcaatggatgtacgctgaccggcggtccaaagagtttattgacggcgtgcattattttttgagag

SEQ ID NO: 45864 - DNA, 2928 bp, Oryza sativa
gaatatgtatgtcgtcgaggtcgatcggctttagcttgcgtggcacgctcgcaagcttgctttacaccggagattgcgcgacgggcaccggagattgcgcgacgggcataggctgtgtgtccgtctagcctggtgcatgaactcggtccaccggcgccgtcgatacatgctagcaatacgtactcctacgtcaccttcgtttctgtttttttttctgtacccacgcgggtgacgaaaaaacaagagagaaacggatcggatcagtgcatatcacacacattaaatacggcgcgcgaagggttgcccaagcaatgggatactttttcttttcaaaaattcgaacagccagcgtactttgtgcatcgtgtggaggaagaataaagcgatgcaaaaatcttctatgcgcgcatatatatggtgccaaaagtgcctaaaaatgcaatcaacattttaatttgaaccgcgatcatacagccattaagtgcttacaatattacttccttggtctagggcgtgtagcaattaagggatagaaaaagtctacaagtctaatagtagttactaatgaccacattgccctaacaaacgattgcgaaacttttgaagacgatgttgtttttccagcaatatgcatgtcgaaagcaggatgatcacagggaaaaccgagagatgtgtagctcgttatctggtgagaactcccaaggctggagctgccaccgatcagaaagggtttttcagatgggcggagaggattttcacatgcggttggctggcccgacgaggaaatgagttcaccactaatcagaaaactaataaacatcacagcaaacataaatttcataagcctgctagtgttaaaacaagtaccttgaacaatttattatttataacaagaatggacttgctttgcttgtgaggaaatatgtgcaaagcttattgcatcataaaggcctcttggaggagaaattagaactttatgctgattgaaacaaatatacattcagcaaacttgatgcacaaatcaagcatatatttcatcacattctcgatgctggaaaacagatagtaagatctagcatcctgatttttcattttttaaaaaaaaactttcacaagttagcaggaaatcatattgttagagtatatggtagttatagttatattagaataggatttatttgtgtggactccttccatatctgtaatccttctttatctcaccctatgtactcctatatataccggtccctaaggctcaatgcaattgatccacgttacgcaatatacctctctccctatactatccaatatggtatcagagcgagcgacctagaaccgctgctcacgcttccgtcaccgtcgccccgggagggctccgatctcccgggggcggccaactttttttttctctcttcgcgtcgtcaagtcatcatcctaagagatccatctctcaggcgtttgtgttgtcatcaatcaagcagcagcagcagcgtctccgatcgtcgtcgatctcaccgaccacctggcgcactgcccccgcccgtggccatccacgagcaaccgttgacgtgtggatctccgtcggccatgctaggcctgcctcgccgctgccgctggggggggaggaaggggaggggggacggccacctcttcacctcggccggcgtcatcgggccccgtccgccgctgaggacgcccgcctgctggtggtgctcggcgctgccccgcagccatctaccctagcgtgacggggcttgcctcttcgccgcgctgaggaagccacctccatcaaccacgccgccgtccccgcactcctctacgccgctggccaccgttgacgccacctccgccagccttgccatcgatctcttgctgcccatctctctctcttatctgtatacacatgcgttcatggataggatttgggaaggtagtaattgacacacaagagggcgttgtggaataggattgatttgtgtggattccttccatatctgtaatccttccttatctcctctccatatactcctatatataccggccccctgaggttcaatacaatagatccatgttacgcaatatacctctctccatatactatccaacacatatgatggagcttgataacaatgtaattatccaaaattaacactgcatacctcaacttcacaacgatatgctgaacacattttatcaatatttatacagtccatcacagcgaaaaaaaaatcctttgctctttccgtgacatttggagcaaacttttattagaaggtgtcatatcactactacagaaaacatttttccgaacgaggacatctttaggttacgggtgaaccgtaactagtcgtgcctgcaaacatcggtctacattttcgcatacggctacttaaaagatctgcatgcaaaaatcaatttcattccagttcagcgaaaacccaccgcatgttctagttcaccacccatcacattcccattcggcgattggtctagttcgatgatgccagctgccactcagctcttgtcttgccggttaattatcgcccttctccctattgctgaccgctcgctaccacctggagggaagcctggaaaagatggggacgagagagtaagaggagggaggagtaggaaaaccgacccgttcacatgtagcgtccatgtggtcaccttgactcaatgacacgtcagctaaaaccggacataatattatcatgtgaatttagtagtatttcagtattgtaagttaaagacgtgttatatctcgtatcatgatttatggatgtgatttaaactcgaagcaaatacgagggattaaagtgaacttattccgaatgaaacaaaacacatggagcaatctgaactgcgtttggaaagtgaactgtgacaccaacggtcggcgtttggaaacatgggatcgtgcgtcca

SEQ ID NO: 45865 - DNA, 2360 bp, Oryza sativa
ggaggaggacggctccgccgccgccgccgccgcccggtgggtgtggcgcgtggccatcgatctcgagcaggtgctgccatggccggtcgggaataccaagggcaaggagcgggcgtgcttggccgcagttgccgaggaccccaacgtcatcttcgtcggcacggaagaagacggcgtcttcgccgtcgagctcgattcgctgcgcatcaagaaagtgtgcgaattgggcaaatcacaaggccgtttcttccccttcgtcagctactgcgccgagtcatttctggtatccatctcatatttctcatctgttcatgcaagtttggttgctgatttaaaatgacatggtttggtggtttttattttattctatttttatttttacagctgagcctagcaaccagcaaattgccagcaccagcggcaaattaatccaccatcttgcagtctgatcgatgttcttcggtgatttgtttcttctgcggaaagttcagggagacaagcagtttagttcgatcacttgggtcagttagcatagttcctgacgatttttttgttgtggtgttcttcttatcaaattgtgaccatggatcatcacttaagtttcaatcgatcagtttcagcatacgcgagtcattttgtttcagtcattgcctgacaccaaccatcaagtgtcctgaaaaaatgaaccgttgttgttcagtctcagtcggattcagacaaaattaccaaagcatcaagtaattgggggataattcggctcattgaattcactgtgatcatgatttgagacattcttcattttacacatttttcttttttgacatagttgagttcagagtctgtttgccccatcctgtttgaagttttcggtgttttctgaagaatggtctgtgtttcagcttaaacataaaactctaggttatctcattatcttctgaagatttgttccgaaatgctcccatgaccgtggaattgtcgcattgacacttttaatcattcagtttcagcatatacgggtcatttttttcctcatggatcgaacactaagtttcaattctgtttcagcatgtccactaaaaattcagtttcaattcagttttgcacctgagcatgaattgtcctgaaaaatgaatcgttgtgattcagtctcagtctgattcagacacaattgccaaagcatcaagtgattgtggacaattcggggatctgattgaatgcatcgtaatcatgattttagtcttccattttttatatacatttcgacatagttgggatattgttcaggtctgtttgcccccatcaatttggagccttcggtatttttcagaagaactagtctgtttcagcttaaacataaaacaagaagcagtggtctcagctcttcgagtacatccatagaaggcagctggaacttaaaaatgtacccgtttcccatattttcgttgtatgctatcgtatcctacctgtaactttacggtatgcttttgcatggacttatttttcttaatcctttctctagttcaattccaatcccaccacatttgctcaagataaattaagacgcagaacagcggggagtattcagcaaattctgctgactggaccacaatggttgctatcccgagttccacgacaatagccatgtcaaagaatgcaagcttgcatcagttacaactgtcctaacattgaagtattggcctttttctctttttttttcttaaacaaaatacaaacgcagacgctcacagtacaaatgatcatacatgcagtgagggaggcagctctcgggtaggttgggtgacggtccgggctctaccgttgccgcctccattacctactagcgtcaatgtgtataaaaattgattcatcggctgtgtttagattccaaaaaattttggctaaaaatatcacatcaattatttggacatatgcatggagctttaaatgtgaacggaaaaaaaccaattacacagtttgcatgtaaattgcgagacgaattttttgagcctaattgcgccatgatttgataatataatactacagtaaacatttgctaatgacagattaattaggcttaataaattcgtctcgcaatttacaggtggattatgtaatttgttttgttattagtctatatttaatacttcaaatatgtgtccgtatacgttaaaaaaaattggccaacgaactaaacacagccatcatcatggaatgttattaatcgcccaagactcacacgatgatgtcgactccgccactgcatacataactctacgcgagcaataatcatactccatccgtttctaaatactttgacaccattgactttttaagcacatgtttgaccgttcgtctttttt

SEQ ID NO: 45866 - DNA, 1303 bp, Oryza sativa
aaagaaaaggaaaaaggacttgttaaggtggagcagatggttagctgtgaataataaaattaaccggaaataacgctacataacggtcaggatggccgagtggtctaaggcgccagactcaagttctggtcctctaacgagggcgtgggttcaaatcccacttctgacattttgttttttgttatccgtatttattttatttagtcgagagtttcatacaaaccaaaattctccgaaacgaattcatatcgacagctcaaaaattttcaggagatttgtgcgacatttcttcatttcttttttgccctaatgggccgtaatccgaccaaacgaagcccaatcgaggcccatctttcacctgtgttgctgttgacgctctgtgagactgacctctccaatataggctgctgcttttccctccctaaaaataattcacgttgatatttttacttcctttttttcctggtatttcccttttttaaaaatcgatgaaatttgatgtgaaatcattatgacaccacaagttgacaacactagctcaaccaaaaatctgtatagttggacatgaaaattgatgataacacctatgccgcgcctcccatccatgcaacatttgccattttaaattatagagtccaatttctgatggaatctataaacgtgtcgggcctgttcactttaatgctattttcaacttttttttgttgtgataaagttgccaaaaaagtggttacatttagtttgctaccaaattttggtaactatatactaaaatttggtaaggttttttttatctaagtgaacacgtccgtcattttcaaagttcaaaaaatgccctatgaatttgcatgcacctctcaagaacaccaccaagataatgagaaggtactgtagaattctatggcgtgagctgagttggcaaaattgacgagtgacgacattgggtgggggagaaagttggagttgatcattcaagatccagaaagtccgtagaaataatcacgcaatataatacataaaagcatgctaattgctttcgtagaagtgctgcttttctctagctgaagatcttgcaaacaggtcacactaaccaaacgattgttacagaggacggatgggtacgtcactaatatttttttaaaaaatacgttgagaacactcccttaaccgcacgcttcaagagcctaagatgtgtttacgttagaataggctaatgtgttgtcaaaattcactggaacattataaatgtttggtaattaactaaatccatctgtatatttattattttttaaaatatagtatg

SEQ ID NO: 45867 - DNA, 2208 bp, Oryza sativa
gcattgccacatcagcgctatggagcgggttagaacccgtttggacctacatgacacaaacaagtttagagacctaaaaaatatattttagtagtttggagatctagatgacacactggcacaagtttcgggatcgcccatgtgcttcactctattctatatggataacaaatgtcttgattgattgtgcgtttgtgcgtcaagtgttatagcggctgcgataaccagcccagccgagcaggtccaaattggatgctattagaaaaaaaaagtgtaaaacgcttttgggtaaatcctacaatgaaatttatattcatgaaattcatatttgtttgaaaattcggtcggtctcaaattattgatacttttatgtgcatatatgaattcatcaccaagccagtccatctgaaatacataaattgcagcatagaagatacaaagggtcatacaagaaaccactctcactagaaaagaatagaaacatgggaggtagtagtagtaaataaaaccaataaaactagaatttcgtatttaatttaaatctgtgttcccagcattcagaacctgatgagacagagtggaattctgtggaaagctggaaataatacccctgtggaccaggtcatcagtcatcaccaggacagtttttgttttccttctttcattccccttgttttcacttgcaacacctgtaaatcctactgctggtgttatccggcacggcacgatgaattattggggggatgtctccctcttcttgctacctttgacatgaggtcagataagacggtcacccaatgttatgtctgcaaaagatttatgcttttcccccctcttttacaagtgaatggaggccaaggttatgatgaaaatactttttttaaaaaaaaatcttggatcaaattccaaattaattgaggccaagaagtaagattcagtgactgcttggcagcagggcaggtaggacaacatatgcaggctctcctgatgcttttactttgctaccagttgctttaaatgatctagtttgcctctcatttctgcagccagtatggtttttgctccaactagtaaataaaagaaaaaaaaaggcaaggtcctcgaatttgtttatgattttattacaacctctatactttcagaaaaaaaaaacaggttagagctcttactcttgctaggtgtatcatataaagcagttcaaaaaagggaggaaaaaacaataaaaaccgtttaaaaaaactaagagaaaaaaccattccaaaaaacacagaaaaatacgggggagaaaagattgaactatgtccatcagatctggttctgttgaaatgtacagtcctgtgactagtgtactggtctaaactattaactattgtaagtattattgagcggatcagcaccttacaaggtactccctccgtttcacaatgtaaatcattctcgcatttcccatattcatattgttgttaatgtatggaaaatgctaaaatgacttacattatgaaacgcaggaagtattagactttcacaagcttctcccatcaatcagaccaaatctccctagaaaaacctaaattatgtcacgttttggatcccattaattccatcgtcgtcatcacgtcggatccaatgatcgttaattgcatcagctagcttaaccaaatgaatattatttgtccagccaaatggcccttgtacctgccggaaactgctgtcctatgtagcggtttcgcgtgcaatttgcaacgaaaaaggacgcccatttggcgatgtaagctgacatcgatgcccccaaaagagcccaataggaagctaatggaggattaattaatgaaaaaaaatccttgaattcatgtttgcctctctttttttaattcaaattatacatgtatgacgtatagagcagcatgcatgatgtaggtgtactgttagctgcaactggaattatccaattccagttaaagtggaaccctaacccaattatttgagatctaggacaagcaaaccgcacttttgccactctttttctttttttcatgccgctgctagctaatggagaacacatccataatcagtatctaaaatgggtgaggtacatctatatatcctttaggataataagattttttttctaattatttctataaaactttaaaagcaaagtcgatctccttccatcccctcctcacaccacgtgtgtataaccactgg

SEQ ID NO: 45868 - DNA, 644 bp, Oryza sativa
tgtaaccagtgctaggagaagctggatcgggaacaaagatctgattggcacggagcagggggaccggcgctaggagatgtagtaccaattggatcaggaataaagatcgaattagaaatggtaataaaattggtcgctagcatgcacacattctccgatgttgcattaattgtattccgatgaaatccgcgtccataaagttatatgatgatcaatttgagaaattttagatttcattatataatgatcaatttgggaaggagagagtacagtactctttagctagttggagccactttttaaataaatggttcaaagctaataagaacgtgaattacataatactttaaagaaattggaactgctagagaatttatagtccgggttgcaacccctttagtcctaggttgcaaaccaggaatacgaatctgggtttgtgaagggagctatctatttttgatttcctattttttttcagcgtcattatgtcaggtgagatgataaaaacactacaaatattttaaaagactataaaaagtgcccgtgcgttgcaagggaagaaaaaacgagaaaattgaggaacaattgagaaagatttacattttgtagttaattaaattataaatttcctgagatatctaggt

SEQ ID NO: 45869 - DNA, 611 bp, Oryza sativa
tgtgaagttgccttgaaaaggatacaaattttgaagtaagaaattcatttggagctgtattgacagtgtacaaatcccgagtatccagctggttttgcacgttgtcttgtgcccgtatggctttctcacttctcagtcaccagttggcagtttttgtttctcgaatagagacgggccggtgcagctttggttgggtgcgttgcatgccagcatccagcgacgaccagcttggcccaattctccggacatccgacacgtacgtgcagctaaaaagtaaaactacacgcatttattactccatattttttttgtttgaaatacctgtcaatggttatactattctctttttaactttgatataagtattttcttaaaaaactgtgtagccaccgtaataatgtgattgtgtcatactgtaaatataatcatacaactatcattaataataaattaggaagaagtttgtttttctttcacgaaacaatacataattaataataataatacttgtctagatttatataaaagtaaaacttttctagagaggtagtaattatatttttcttaaaacacagtacatatatgcgctcacaacgtgtgcattctcacgt

SEQ ID NO: 45870 - DNA, 3434 bp, Oryza sativa
taaattcaatagaaattttggcatgacctcccctcttttttgaagaaattttgaagcttgctcgggcagctggaggagaaagaagacatatatataggggtgggactttagtcccggttggtagcaccaaccggggctaaagatcaccgggatcattagtcccggttggtattactaaccgggactaaagttaagatctttagtctcggttggtagcaccaaccggggctaaagatcaccgggatctttagtcccggttggtattaaagttaagatctttagtcccggttggtgctaccaatcgggactaaagatcccgggggggcctgacaggtcctgacagcattcgaaccgggactaaagatgatctttagtcccggttggtaacacaaaccgggactaaagatcaaatatgcccgttacccttttgaaccgggactaaagatcatctttagccccggtttttattgcatccgggactattgtggaaatcggccgaccgacgaaagatggtttctccaccagtgagcatttcccacgttcatattaatgttaatgaatctagacatcattaacatcaatatgaatgtggaaaacgctataatgacttacattgtgaaacggaggaagtatgttatactccaacgccatgccgatcgatcgatccccctgtgatgatgcaagcatatatatctaagcattatatatagtcaaaagtggctacatgatgatgcgagcatatatatctatagctcagttgctaattaatatagatatacagaacaccatgactggtcaatcaagatcagatcagttggcttaaaacgaccagtgagctgaaattagctatctgatcaggcacattgaaaaactacgtacccaacagctagcatatgttctagtgcatatatatttcacagaaatttaacttccacagaaactagctgtcattgtgttatttgtggtgtagtactagtctgcgttcgttccatatacaatgagatagaaagtgcatcgttttccgcacacacgcttcccaaactactaaacggtgtgttttttgcaaaaattttctatagaaaagttgttttaaaaaatcatattaattcatttttaaaatttaaaatagtttatactcaattaatcatacgctaatggctcacctcgttttgcgtatctttccaatcttctcaatccctatccctcaaactcacccctagtatagtagcatctagtaagtacattggcagttttccttgatctcgatcccttcagcttcccaacagcaccgaatccggacgtcctgtgaagtttcttggaattgattaaccatatgcacccctctttctttaccacaaggctatatacaagaactagtctataacaaggacaacaagagctagaaaatttaattaagcaaccaataatagtagcctcagtacatcaagaagtgtactattttacctatggttcccatggaatatttgtcagctactacatttggaatccctaaacccatgtcgtgggcatgcttgtcggcgctgcccatgtatccagatgtgcatatcgagtaactaattctatatatatatgatcttttttaatgatatggccggctagcttgatctatgggtcatgaagatttgattaactatttgatgattattcctaattaataaatatgcggtaaaccattttcattatttaaaaaataataaatatgctaccttgctgtatcttgtatcaaggaccgtaaaatttccttgtatatatataatcccgtgcactagaacttttacgtatggacatacaatatataagtgatataacggtttagattaattcgtcctctaactcaagtataatatattgaattatgtaattaaaaggggtaattttgtttttctatactattagatggtagcaattcaataaattcgtaacatatagtaaaacaatactaagtgttttccctactcgcgctcccattcctcattcctcatcatacttcaccatggcaaagcatcgccagtcatcacaagtccacataaatcaccaccacccaccacaacaagttaattatgtaggattaaaacacaagtaactaagtctaccggaggaggggagcgagggtgtgaatgctacaatcaccaaaaaccaaaccttttcgtggaagaaagagaaacccttcaaccttgatgaagtccccactccaccatcgtttatacgctggtctgaccgcccactgtcgtatctttgctggtccgaccgtctttgccgcctatttcccagccgtcggtcccactactagagaaaccatctttgctgggttggccaaaaatcacattagttccggttcgaataagaaccgggactaaagagatctttagcccggttcaaaagcagcccgacaatttatgatctttagtcccgggactaaagattatttttagtcccggttcaaaacgtggtctggccgtgtcaggacccatactatctttagtcttaccaaccgggactaaaaatgcatatttagtcccagttgtttataccaaccaggaccaaaattgaaaacaaaaattaaactacagccgcagcacacacgcgacacacgccccccgtccttatctactcgcgcggtcgcgcccctcctcctccacttatctcggcctctcctcctctccacctcccctgatctactcctcctcccttgcctgtcccctctcctcgatcccctcctcccctcgattcactcctcctcccctgatctactcctcctcccccggccctcccctcccctcgatcccgtcctccccttcctagccctctccgtggtgggcagcacgcggcggcaggcggaggtgggcggtggtgcgcggatgggagggaggcggcgagcgaagggtggtggcgggaggtggtggctggcgacgccctcccctctgccggatgggaggtgggaggcggcagtggcagcaccgttttttttctttttcttttttttgtagaatttgtgattcattggatctgagatgtataatccgtgatgtatttgatttgtgatgtatttcttttagaatttgtgatgcatttttttgtgaatttgtgatgtgaatctatgatttgtgatgttactttgatttggggatatgtagggagcaactcgatttggaaaaatcaaaatgcaagtagcaaagaaacaatgaaaaaaaagaaaaaaaatggtgaccaaccgggactgctgctaccatttttagtcccggtttcccagattcgtagtcccgatttgcaacccgggactaaagggggttgcaaaccgggactatagaagggttttccagcggtgttcgtctaactcattccattcggtcacaccgcttgcatgtctgaccgaccgcgcctccagtaccggtccaaccatcaagacttagaaa

SEQ ID NO: 45871 - DNA, 1819 bp, Oryza sativa
gccgagcgcgggagggagtggggcgacggcccaagaagataaaaggggaggaaaaagaaaaaggaaaaatgagaggatttttcatgtgattaaatattgcacttgctcattttaaattagttaaaattattttcaaggctctgaaaattctactaaaaatgcatgcggaactcaagaaaaattccaccatgtcattttcgattattaattgcatttattaattagggattagctctaggttaattaatcaatttcttcggacaatttatttaacaaatttttaaagaaaaaaaagggaaacttcagggtgtgacaggagatggcggagacgatgcgatggtgccgctagccacgaaggccaggacgtcgcacgcggagagacaacgcccgtgaggtctgtgtgctcacttgctatcccctcttcccattcacaatttgattcggttcgattttatttactactagctcatagtgatctctgttcaatcccaaatcttatctatccaattcaatctgatttgtacctatccaatggaagcagagcctctctgtatctgtctctatttctccctctcttcaacttaattaatggataaagaacattttcttgagtgattggagtttgaggatgatgcgtgcgggtccggaggatgaacaggaccacaggagacgagatggggaagaaaggggcattaggtccaaataatttagaaaatagagtgaaggagtaagtagtggtatatgtgaaataaccaaaaagttgtaatggcatgtctctaaatagatgaatagtaatgacatatttcaaaacagtgaaagttataatggcatggatccaattaaacctattattatagtcggttttttattgaacatgcacctataattaattaaaggtgttggtttttttattttcagccagtggaagtggggaaaacactctagctgttggttttagctcttctggcacctattgtgccgatctatatgtgtgtttttaagtagtgaaaagggcgatgcgctcgatgttgtggtatggtttactgtcaagaaaataaatgcacaacaaaaacacaaatttttacataaaaaactcttacatgaaaacaccatgaacatcgattggcaataatcagtttagaagatataatgacaacgtaggggatacagtagaccgtcgcactattcgcgtatagccgacaagagtatataaagaagaaaaatagagtcctaataggataaggaaactaattcaaactctaatagattaataggaaactactcaaaatatactggtaagtgaatctcagataacatatttaacatctacaacgatagcaatggcttgtacgtcaccagtttctagcgtcgtcggctggggacaagatccacagactggaaagggcgggtgtgctcatccaaatacggtgtgtttgtgtggaagaatctgtatatttgctctcttttatggtactccatagctcggtggtaatggcaaagaaaatattgcacattgtttgtctttatttgtcttatctaagtaaaaaaaatatatactcctcctcttgattaatacttccggtcctgaaatagttatctttataggttacttagcatatatcaagaacaacggacaagagagccacttatcaaataaacaatttattttcggcagcagaaggggaaattttgataggggtgattgatgaggcaagtccaaattacatctaaaatttttggagtgggcctaaaatagggtgagctaaatttctatttatttttcaactaaaaatactagtaatatgcccgtgctaaacac

SEQ ID NO: 45872 - DNA, 558 bp, Oryza sativa
ggatcatcgcgtcatccaccagaaggccgagggcgatgatcaatgcgcccagcgacacgcgctgcatgggatgccgctgtattccatgaacacgaacaccagcgccagcaccaacggaatcgagcacgccactaccaacccggcgcgcatgccgaggctgataaagctcaccaccagcacgatgatcaccgcctcgaacaacgcgctggtaaacccgccgacggcttcttccaccacttcggcctggtcggacaccttgtgcacgccgacgcccaccggcaggtcggcggtcagctcgtccatgcgcccgtgcagggccttgccgaacgactggatattgccgcccttctgcatggcgatggccaagccaatcgctggcttgccgttgaagcgaaacatcggccgcgccgggtccacatagccacggctgatgtcggcaatatccgccagccggtagaaacggtcattgaggcgcaggttgacgttggccaggtctttctccgaggcgaactgcccggaggtgcgcaccgaaatccgctccggcccagcctcgatcac

SEQ ID NO: 45873 - DNA, 1330 bp, Oryza sativa
tgaatcttcttgtatggcatgccaagactgtgcacaagctttttagacctatggtaatttttggggagtttatttccagcctcatctcctaaactatcatgtagtagattcattatttcattatagcaggcttctgacatgttattttgtgttttgatactcattagacgtgccacaattgacaaacgtgtttgtcttgtattctcatgcactggtgtgtctacttcctctagcaatctgtatagttctgcagctgtaggtgttggttcctcactcggattaacatcatgtgcagcaattgcatcagttaacatttcattcatttgatctaccagacctatatgttgttctgcttcatcttcctcaagtatttctggctcaccatgactagtccacctttcatatcctaattggaagccataacggcatagatggagtgtcatttcctctcttgtgcgtttgtggcagcaaacacacttactacatggacaataagatttcccatcaacagtaacttcaggcaatgaaaaagcatggtctagaaatttttctaacccctgcctccaagctgtactaatggacctgccctttttttcagagtacatccaaccacggtcttcctccattagcaggttgcctgagtgtatcattcaaaattttatatactatattgtggaagttaaaaatgagtatatatgggagttttctacattcaatagacaagcgcatgattgtgcagagaagaatgacagtatatagattcctaaaaaaaaatggacaatctgcagtggaagtaaactaaaggacaatagtacatgtcttgaagaattctacggtgccaacaggtgtgcatgtaatattggaatactgtgaaatgaagggcaggttcgctacatcccagtggatttggagatttgagaagaggagtattttcagaatttttatgacagagccagcactaggccacctaggcgaatagtagaggccacagcgcagcatccactacagatctttgataattatctgaatttagcacatagttgttcatccactacagatcattgctagaaaattgcactcaacaaaaatcgaaaatcagaataatggagagaataaggccattgcaggaagaaaactttgagggagggagagcaggagggagggatgaccataccttgacgtggagtggtgccctcgcgtgtgcccggcgaagcaaattccgccggtagggagaggagggaccggcgatgacgtacggagagaagggaattcacagattcaatctaatgaatcagttttgctaccaactatttcgaaggagaaaagacgc

SEQ ID NO: 45874 - DNA, 696 bp, Oryza sativa
aatctccattctacaatgataaaatgaaattattattgtttacatatatgacaggagctagttattgaacgaaacaaatcgaactcaaagatacttacaaaatccatgcgctcaaaagagagacgtcgagggcgtccagatggtacagatcgaagacatccttgaaatggagccagagaacatcttctccttgcaagaagtcggggtttctgatcctcactccgaacatctctctacccttggcgctcatttccatgtaccattcatggaatttgtacatctgtgtcggtagggactgcagctactcaggcgagacaagcggtttaccgagttcaaacttgtatgccactttcgccttcgggattggtgcggctccaatcagctgatccatagttagaccggtatctgaaatgaaatccgttattccaaaattttctccggtcaccaacggctcgacctcttggtttgtttgttctccaagctgaaggactggtttggacttcttgtgataggctttctgaagtgttcggtcatagtctgatatcttaaaggcctccttgtttgctatggacattcccttgaagaagttcttcacgctcgggtcaataggtatcttcttttcaggactccgaggcttgagttgtctcttcacttctcctaccatataagcatcaagctcctcttgactgcaatcgt

SEQ ID NO: 45875 - DNA, 641 bp, Oryza sativa
aaacaaaaatcaggatgtgacaatcttatattaaaactgtaataaacatatatatatatatatatatatatatatatatatatatatatatatatatatatatatatatatatatatatatatatgctaagtctaacaatcttatattaaatctctaataatataataatcttatattaaaactctaataatctaataatcttatattaaaactctaataatcttatattaaatctctaacaatcacttctttacatcacttgcctgcgcgaattcctttgatggctagctaccacttcggcttgagggacgacgacgacatcttctctgcaacattactaggaaaatgtattagtctaaacgggccaagttacatatgttgtatttcacgttttaacctatatatataatcatatatgtatgctaagtttaataatcgtttaattatctcgttcgtacacgtttcgctcgcgttcgttcacatacttttagtacaagtgcattcacgttcgtaagcgtttcgttcacgttcgttcgcattcgttaacgtttcgttcacgttcgttcgcgtttcgttcacattcgctcgcgttcgttaacgtttcgttcacgtttgttcgcgttcgttcacgttcattaat

SEQ ID NO: 45876 - DNA, 724 bp, Oryza sativa
tttaatatgacccaaaagtttggtgtaactctagcaaaagccattcctctatgtgctatggccacatcaacttgagttagaagccaggcagccacttcactggactgctcaaaaacattgtatcaggtatgacaatattttgctgtccagtggtctcttttaccaatcatgatggaaacggattgtcaggtttctctgcagttgcttcagtccaaggagaaggataggtctgatttggcatatgttatcaatgcagtcaaggatcttatgggcggtgacagggaaattctctttagtaaagtctgtcgtagtcaaaaccgggttagccaatgtttagcgaataaagctcggtgtgaatctctgtcaggcctgtggccggataatagttgtaatttcatttcatggttagcgaataaagctcggtgtgagtctctgtcaggcctgtgtttgagtaatatagatccttttccccgaaaaaaaaatgtatggcaatattagatgattaatgtggaatattgtaataaatcattacgtgtatttgtggggatatattgttccaataggataaataagctgagatttggatatttactttttcttccacttgctaggaaagcaaaaaacaaaaaccacaagaagatgaacacgacattaaactaattgtataagtggaacgacacggcaaaagaaggccaacatataaactatacagtgtagctctgaa

SEQ ID NO: 45877 - DNA, 724 bp, Oryza sativa
aggaggacgcggcggccgcagcagcggcggcgaggcccacaaggagcacaagcaagaggtggcggagtgagatccagtcggtcttcttctccaagtcgtcaccgtctctctctcccttcgcccgtcatcgccggatctggtaggtcacgcctcctactccccaccgtgctaccgccaactccgccccaacacgccgctgagggtgaaaggggaaactaccactgcgagagcgggaccacaagcgcaaggcttcgccacatcatcacccaacgcgaagccccaagctgtggcttgacgaaaagtagtcgaggagcacgtcccaaggagaggaggaggcgaaaagaagtcaaggagcacgtccctcacaaagacgtcgtggctctacgctggccgctggggaacacctccagctcgaaaaggtacggcatttgaacggcgtcgccagggataggcccttggccccatatccccatcacataaataggcatcctgtggaaggttagtagattgttggtgttagccccatgccccatcacataaataggcatcctgttccacactagagcttctcgatacagaagatcacatgtgcccggtacaactaagaaaatagctataggccgtgtttagtttcatttaaaaaaaataaaaatttaaagtatactgacacatcaaatgtaattagactcaagatgtgcaattgattttattttcaccatgcata

SEQ ID NO: 45878 - DNA, 2579 bp, Oryza sativa
atcccaatgacggttggagggcacttaggacaattccccttccacaaccatcataaccacctgggcacttaggacaattccccttccacaaccgtcataaccacctctatataaggagctcactctcttcacttcaacacacacctcaagcaatagctctctcattcctctcaagtttagtttagtagtatctagctggtagaatagaaatagaatgggagtcaggagtccggaaaccttcggaagagttcgggtatggccctagcagctttcctttcctcttttgtaagctttgtacttttattagaatactcttctatatacatttatggtattgaaatactttccgagtatatgagtacctactttacattacgttcatgtcatactgaatatacggctagcttatctgggagatgctttggtgcgggtatagtgtttgcttatgcaattactctatgtcatgacgatgatattagagtagtacctagtagtttagacgtggtgtctagattacgatatatcattatttggggttatatattgcggatgagaggtgggccgctgatggtgacagctcaatacgggtattcctccgcgcctatatataatcctaagttaatttcctagggagggttttcctccgtatttagccccggttggatggtcatgatgggctgtcgtaaggaactcggcagtcaggggtggcttttcgaagtaccaggagggcatcgaatagagggtgttagctagtatatcagttaactagaatggatgtatactatgtatattagaagtataggaatagatttcttttctcttttctttccacctagcttagattatttattatgaggatgagcagaaatgcttgtgtgtcactctacccttggattatcttaacccctgcttagaatatgattatcacaagtaatatataaattattagttgagttctctctacatgattttcccacggaataaaataaatacgacacccttagaatactctcgggtgaaatgctacaatggtataaccataatatactagaagtgtttctgcaccattgctgggaattatatttctaataatatcgttaagaaatactaacaccgattcggaggattcccgtaatatgttggctggcgagtttgattcattaacttcatcctaaccacgttttctaaattgttaaatgttaaatgatttatttttgtgaaaaatgttatatataaaaaagtttttaaatataataaaacaaatctattttttaagtgttaaagaaataatcattcattagttgttagtgatttatcttgtttctcatgaagcaaattaggcaagtgggacagctcaaacgcattctagccatacgagggtggcgcctcctgctgacggcacaactgctggcggacggccggtgtggtcggcgcagggaatccacacggcggtgccagcacggggaatgctgcttctgcgctcttagtggttggaatataaatgtaacggtgatgataaagtaggataaaattgtatataggatggtatctccgataactgacttatattgagtaattaattatgtgcttctcgatagcaaaaacatatatcttctaaaaaatagtgaggttttcttacatttatatatgtatagaaagtattaatctgaagcaggcaatcagtgaaaaccggcccgtttggctcgttggaggcagtcaagtaataccactgtccactgccaccaccacttctggagttctagtggctcatccaaatagcggattgatgttcggtgttagtgaatttattcgctcaagcaataacatgagctttgaagaagccattgatgtcgccgcagtcgctctgtcattatagatataggcattggtgatgcagaggttgagagtcggcatgaggaagtcctcggcgaagtgcatctttgagttagtgaagtagcgaatgtcagtgatgcctatgatcagcaacctaaaacaccggtcaaggaaaatgaaacactggtaaaataggatcactggagtggaaatttccttcgacctccctttagcgcttggttaggatcggaagggtttagggcttgtgaggaacaggaaccatgtcgagagagtagtcattttctcgtacgaggcttatttctcttattcctcttaattccattggagtttagtgcgagtgatccaatcaacgcgcatgttgtgcgcacgagtccatagactcataccttttctgttgtagagatcgtcgaactcacgtgggccatgccgcatgcctccatcttgctcggatagccagagatcatgacctagcatttgcatctcatagaaagaataagaccgaatcaatgatccgacgtgaccggcacctgtcttaaaaccggcacttatgtgtgggacctatttggatatcgaggtgccggttttaaaaaattttgcgcgtgggtgcaagggtgggaaaggcattatacgtgtcggttttacatactccggcacctatagtgccgatacctatttacctttctgtagttatgggtgcaaacagcgtggattgacaagaaaaaagt

SEQ ID NO: 45879 - DNA, 1038 bp, Oryza sativa
tccaaactttttgttaccttttaaaacatataatatttaattcattcatataaacaattatctatggtccgtataaaaacctgccatgtttcaaaagtatctatttaatttgtttggaaaacaatctacaaattaaacgtaaattaaaagcttgtttaattgaatgtttagtggtatttttcaaaaaatcctaaagaactattgttgttagtaaataaaactatttgtaccatcaagttagttctctttttagttggttcagattcacgcaagttgttacatacatataaattaacaaacacatatcatatagatcctcacttccttgtaatatttatgatctatagtatctcttctataagaaaatatagtcaacatgagtccaaaaaatttaaatgtaatagtaacaaatatgtaagcattaatatgtataggatagatgcaaggccattaatatgtaagcatttaaaaattattataaaaatggaacatgtaatggttggtccaattttagtgcaaagtacaaacttatttgatttttctccaaatagttcaatttagtgactattgatatgttatttttttagttttattttatatcagctcaaaacataggggttatggatctttaaattgttggtttagttatgaatagagcaatagttagattagaaatcatatgtgcaacttaaaaaatatgcatgttttaataacattattgattttctcgctataaaaaaaggagggtagaggagagagtggagaacttgaggtgagaggggagaggacgggtagtgctatgttgtgcacatgtgaggggagggtgaagtgcacgggaatatttttttctaaatgatttaattgaaaaatgaagatccttattttatcaaaatttctaatttccttttttttcaaaattttaggatgtaacacatgatggcttaagattcgggtagtattgtgttgtgcacatgtgaggggagggtgaagtgcatgggaaattttttttttctaaatgatttaattgaaaactgaaga

SEQ ID NO: 45880 - DNA, 1283 bp, Oryza sativa
tggtataggtcgtgtttagttctttggccaaaatttttttgagtgtatggacacacatttaaagtattaaacgtagactaataaaaaacacattactgattctgcctgtaaactgcaagacgaatttattaagcctaattaattcgtcgttagcaaatgtttactgtagcatcacattcttaaatcatggcgcaattaggcttgaaagattcatctcgcaatttacatgcaaattgtacaattggttttttttgtccacatttaatgatccatgcacatgtgtccaaacatttgatgtaacatttttgtaacacccgtatttctgttgcttttatttaaaaagttgtcatttacaaatttggagttaaatttggttcttaattgatttttgtgccaaaatggatctcaaatcctctcctagaaattcccttcaatttctgtgaaaccctagtccaaattcaaattcaaatcctttcaaaatctcctcaaaattcaactctacaaatctctggaaaaaggtgaaagttcactgttcaactgggccgccctcccctttcttttttctcggcccaactcccctccatcctctcctctgttcttctccccttagcaggccggcccagcccagcccgcaactcctcaccttcttcctccttgagccagcctcatccacgcacacaaggtgttcgacagaatgccgacccaagacgccgcaccgttttcgtgtcgtggcagcgccgcgtcgcactcccgtgcaccgcgtgtcgtgccaagaccacctccgcaccaagccgaggccgcgccacaccaaaatcgcgtcgcgccaagccgtcctcgccccggtttctgttgacggtcattatcgatcagtttcgaccgtcaatattactaaaacaggagagaactagtgatgcttgcaatgcataaatatgttagaatagtaatattctactagtattaggtcttctaaccttttgcagagaatgacaataaagtggaggagaatcgacatcaacaccaacgataaaacaatcggacgatgtcgagaaccagacttatatatgaatgggccaagaagtcagaattgacacgatgaattgggctaaaattcacaagtctgcggagtggagcaatagaggacgtcgccagccgaagatgggctggtttgggccagcccatggttcggccgaaccagggggttcggccaaacccccatctccaccgttgaggccagggtttggcatggacgtccaagattgcaccccaatgacggttggagggta

SEQ ID NO: 45881 - DNA, 1509 bp, Oryza sativa
cccgtagtgtatcctgggtattggtactatatcacaggtaatgcataacacccctatgtaaattagttgtgtttatggctaacgaatgtcggggcgttacaatttttggccaaaatttttggtatctaaacacacccataatttagatgttattgctgctgaattgtttaacagaaaaaattcttttctaactaacaaagtatgataataggagaagaaatatgtgcaaaaatatgaagacattaagagaagaagaggtggaagtaacgtgcgtacgtactatccttaaagcaaacgtacatacatatatagtaatatacgtacaggccggctcaaggtggaaaaaaaccgttcgtacatactatataatatacttacacgcccaaggtggacctggtctggggtcaggcagtttttcttttgataaatctaatagtggtaaataatggatccacctaatttaatgaaaattaatggctagagaatttttagaaaattctctaatttattatagtgccacgtggcggtgtaggaacatttgtaggatgacacgtggcgacttaggagcgtttgtaggaaatataatggacttttagtatataatagataatagatagatagatagatagatagatagatagatagatagatagatgatagatagagaaacatgttaattacatgagcattgctctagtccttcttttttaccacaaggtactagtaccgtgaggtactgaaatcccgtccgttgatgatggcagatcgaacggtcgcgattacatggtacctcggggtactagcttggtcatggggtggcaatcgcgagtgagccatggtgaaagggtataatcatattttctcgtttggaaggatgtttggatcggtggtttgtttggggaagtgccgcagagtagcaaaaccctaggcttcctcctgatggtggcgcgtggcggacaatacgacggcgacggctatggcggcggcatcagttggtctcgacgctggcgtcttccacttgtcccgtcattttccccttcgtggcggtgcctcatccattcctctcgacaccgctactcctgcgaccatgcggcggatagggtcctggagatccactgcagccacagcccttgcaacggcgtcgagacgactcctgcgactgcgacgatgactcctgcggctgcggctgcgactactcctgcgaccgcagcgataactcctgcagcgctggtgaggacacctgtgggggccacgcttccagaacgattgaggatctgcatctgcctgcggccgtgcggccgtgcggcggatagggtcgaccttcacctcgacttttttctcccgtgcagtgcagcggcgctagatgcaggagaagggaaagcgagagatatcgaggcgcgcacgctatttggaccacacgcgatagctccccatcgtacccctcagcaatcaacggccggatggagactggtgcctcatggtaccagtaccgcgtgctacaaaagtgag

SEQ ID NO: 45882 - DNA, 1257 bp, Oryza sativa
gagcatctcctgctccagtttgtctatctcctcggtcgtcatggcaaccttcgactgtagccaccagagctcatcatgcccgctgcctatctcaccattgccgaacacgaaagtgtagaaaccctagctcaaccgccagagagaaattgctaaatctgtctgtaccgttggcctcctccaaaactaaaggtacaatcactttctttataacacttccaccgtttcccatctccttcccattgtaactgttgttgaatctcacctaatcatcgcgaggccgtgtcagggggctccatgcatgaatattttccatgtcactcgtccatgtcagcgccggagacaagtcagacacgtgggtcaccctgtatttctcagtgattttgcaaaagcgccccactcttattcacattttgtttttttttctcacgatgaatcagtcacctgaggaattgagggcaaaggtgaggtggagtggttgcctgcctgaggaatcaacaacgaagtaaaggacgatggcaacttggcgatgccttgaaagtggacaacggaaatatcgctccactgagtggcgttgacgtggccaatgtggtggtgtcacatatagcctacaagcagccagtaggcgcacgcatgggcggggattaccaggaggccggtggggaggtgcccggtagatgaaactgaccaggcggctgcgtggggcgtgcttcaatgtgcttttgctgaactagtggtcggagtcgaattgatcgaacaggcaatctctgaatcttcttttgatttgcgaagtaggcattggccagaatctttttttatttattcctaattaatacacgaatcataattacctctaaatttattcctagttttgaataaactagcagtatatacatatttctagatggttaattctatttattttgaaagatacttttaacaccacaaaaaattacttctatttttctagagagttacttcatctaccaatatagctacttctgaaactgtgaagaattacttttaataccgtgaaaagttatttcgattcttctagatttagagtgaagagttagttctatttttatttttcttgattcagttatttttctttagtaatgtacttctaatactgtaattattttcttaattctataattattttcttagagttatttgtcctttgctctataggtacttttaatatcatcaacattaattattttcttaatactgtaattattttcttagagttatttt

SEQ ID NO: 45883 - DNA, 639 bp, Oryza sativa
ccaaagagaggtatattataacaactaaaaattaagcattatctaatatagtttacttgcaattttctgaagtttaaccatgttcagaacattgatccagaaattaagcaacatgctcctattcccccatgcatccatatggtgacattggtatacacaaataccattaactttaatctacagtacttcgaggaacttatgcaagcattgccttttgccatgccacacaaacaaaaaatgatttttttcttctaaaaatagcatataagctagttgtaaatgatcatcttcatcatgcatgattaatattcataataacactttagacaaaaacaaattgacagaggaattattatattcacatcacaaaaattaatatcttgtcaactttcagcattcttaaacatgttggagatgacatgtagtataatcttatgaaaacatgttgaactgaactaatgcaacaatccatttcttgttgtacattcaatcccataaaaataaaaccagtgaacattataatgcacaaagtttcagactaagtgtataacagatatatgatgaatgtagaaaaggatgaccacctcaacctttttctagtttctctctctagaaattagaacgtgtgggagtacaatt

SEQ ID NO: 45884 - DNA, 654 bp, Oryza sativa
atagaaaatctagtgagcagaaggctcttacgaaggtaataatccagtgccagtttagcatattaaagttgttctctgaagttctatttttcttttccttattttattccttcaacgtttttttactagcacctatttgaaccattcaatggactaggctttttagtggaatcctgattcagaaacaacagttcaagcgtcatgattgatgacggcatagaaagccatgagagcattggtggggagaggaatgttttgtacttaaataaaacttaaaacattctttctagtgctttggcttggaagttattttgcgcttaatataaaacataaagcatgctattttttcttgctcatattgctatttctgtaggttaaaacagtatatctggaacattttcctcgttcttgggatgagagaaatatcgaagaatgctgtgaaggatatgggaatattcaaaaagttaacattttgcggtcaaaaaagaaagttgtttcttttgttgaattctcatcacggaagagtgcgttagcttgtgtcgaaggaataagcaaggccaagatcaatgatagggaagttaaggtattttatatctttactcataccactgttgaatccaatccaagtaccacttttgctttctttgttttacc

SEQ ID NO: 45885 - DNA, 670 bp, Oryza sativa
ttggtgtgcgtctatgaattggcaaaggccagcattgcaacgcaatgaatgtaatatacgaactcgaaacatttatccccaaatcaagtcctcctcctccccacgtcagacctatgttcttctccgtttcctctactttttttaataatgcaaatgaattacatctccggtctctatccataggcacactgctaaacttcgtttcctcacgaccatgtaagatctggtcatgtaagagttctcaccgtacgtattaaccaagccgtgtaatcggaaattgggttttccaacttcacggctgggggctagggtaagcgttttttcaaccaaggcaggtcaagggtccaagagccttctcctccgagaacttatctccgatgacaagacgggggcttgggagagtgtatgacttaacaaactgactgatcgaagtcggtaaaaaagaggatgctcgtacatgaaacattggtctgtaaatttaattcatttttagttttccatggatattataacatgtcaccatttgagcattcgctcgggggttatttctatctaatattcttttctgagtattgatttcaggaaaattctattcgacattgtcgaaaactccatgtctctatggttcaacaccaagatcgactaaggcgagtacgacaaatgttgacaa

SEQ ID NO: 45886 - DNA, 1689 bp, Oryza sativa
atatatacttaaactaagtaattgggatagatcggtcgccatgccgagacaatataaatcacttaaatcgaaatatatattaaaacatgaattatatagaagtttatagcatagccgatcaaatagacctagcatgtatcggctaatactccgataccactctatatcaagatatcgagacaagcaagatatatcaaataataaacctaatataactttaacgcaacgagatcttaatataaagggcatatttaacatatcagtcaagtgcatgaggataaaatagctaaatcaggtaagatcggctggaactccgatacatctctattgatgatcataaaccaggctagatatcacaattatagatagaacttaatagatcgaactcaaccgatgtagcattaagcataaagataactgtaagatctaaacaagatgatgaaaacctcttagagatggtagatatacgatataatctagattaataacgagatctaactctatcggctactttctaacagtaaaaaccagccgatggcaagttatatagcgaaactaacagagattataaagtatatatgataactcgatgaattacataaacaagattagagtatcataaagatggaagcactaatcccgagaacacaaaccgccatgacaagtttacctctagttgaagatcgaatcgatgcagcttaaccagaaagcaagaactcgccgaaatagaatgaaagtaaaagggtggcgatgcgcggaaagttttgttgaacgtgtgttgtttgattacatgggttcgagtcatatttatacctgagattacaaaatatgtccttgccggatacgactcttatttttaacaaactctaagataacataagtctttgcggcagacttttgcccgaacatatctctaaggaatttacataagatatcctaattaatagatacaattgcctatctgagagctttatctccatcgtggcaatccttgtgaagcacatcgatcgattctagaaacagactcagccatcggaatcggctgtaccagctgtatcattcatcctctgaccgatctaactcagtcgatgcatactcggttcttcgaatctatctctttgccaaatccgattcgattccaacgtcgaacctggttcatatcttaccaaatttgagctttatctcaatcgtggcaatccttgtgaagcacgtcgatcgattctagaaacagactcggagctatctccatcggaatcggctgtaccggctgtatcatccatcctctatcggctgtaccggctgtatcatccatcctctgaccgatccaactcagccgatgcatactctgttctttgaatctatctctttgccaaatccgcttcgattccaatgtcgaacctgattcatatcttaccaaatttggtcgttaacagttacagatgacacacatctcaatcgggccaacataaaagcccgtcacggatgactctcatgtaacgtctcacccctccactttgtcctaactcatgtggaaccaggatgaattttccggttagtgactcatcccaaaattgctccaggccaagcacgcttaacctcaatgttcttgggagttcgacttccggataataagttgtaacttattggtatgagtattctattaattctattaagccctgggccaggatg

SEQ ID NO: 45887 - DNA, 539 bp, Oryza sativa
aaaactcaggcccgtcactaataacacctatccgtgacaggccgtagtttaggcccgattgagatatgaaatcatatctcaatcgggcctcaagttagcgcccgtcacggttaactcctatccgtgatgggtcttagtttaggcccgattgagataacattccatatctcaatcagacctcaagttgacgcccttcatggatgaccatcatccgtgatgagcaccaacttggggcccaattgagataacaactaggcccgtcacagatgactcatccgtgacctattgagataataactaatgcccgattgagatgacttagtatttttcaacttttcatatgaaatgtttatatttgtgagttgaccagtagcaaaagaattaactgcagtataataacattttattagtcaaaataattttttgggtagtaaatgatttcaaatggaaaaattttcaacaacaaagttgtataacttatcaagatttacaacttttattttggtcatttttctatataacttgaatttgaatttgaa

SEQ ID NO: 45888 - DNA, 881 bp, Oryza sativa
catgggattcctgggaggaggggacggcgacgtgaagacttggcgtcatgcactggtggcgattcgacggcgacgcgacacgaagtgacgcacgtagagcgggattggtggcgagacgtgggtgacgcgcagccgacggtggctacagccggaatttgggtggtagggttcagagcgaggcgacgggagtgttgacggtcattatcgaatagtttcgaccgtcaatattaccaaaatagaggagaactagttatgcttgcaatgcatatttatgttagaataataatattccactagtattaggtttactaaccttttgttgagaatgatcataaagtggaggagaattgacatcaacatagacgataaatcaatcagaaaatgtcgagaatcagacttatgtatgaatgagccaataacttagaattattgacatgacaaactgggccaaaattcacaagtctgtagagaagaacaacagaggaggccaccagccaaaccatgggctagttgggccagccccaggttcggccgaaccagggccctcgtcgccgttggatgcagggcttcttctggacggtgtggattagctcccaatgacggttggagggtatttccgactattccaaccgttacaaccgtcattgggaggctagataaactcctcaccttctcacttcactcacacacctcaagcaagctctctcatatcctctcaagtttagtttagtagtatctagctagtggaataggattagagtaggaatcaggagtcggaagccttcggaagagttcgggtatggctctagtagctattactctatggcaagggtagagtgacacacaagcattactactcatcctcataatatattatctga

SEQ ID NO: 45889 - DNA, 684 bp, Oryza sativa
acgtctcgcaggaattccgcagtaacataacagttatcgtgcaataacatgacaaactttctcgtagtaacaacatcgaaaaatagtcatgatggatctagttttgttaagcacttttttacgaacatcatggtgcagacggattagaaacatactatataatgtgagagatattgctctctaaagattgagatttacttttttttaagttctcttctctttagaaaaccgtagtaacgcgacgatcaatgtgtagtaacacgactactttccacagtaacaacataataaaagcatttttgtcttaatcatcgtgtagtaacaggactattgtctcgctgtaatatcgttttaaagcattatggtgaagacggttctaaaaaataatatgcgatatgagagatattattgtttaaatattataattctaaaagtttacttgtactaatctttctactatgtatctttgtatggacaaagagaagtacttttagcacttgtgttaagttgtgactatgcacatgcactttcttagcactttatattttgcactagattgagattttaaattttagctatgcacatgcagtggtactgtagtagtaccgttactaccatatgttctctgttattgcaatttcataatgatgttactgcaaaaagtgcagtaacgacctataaaat

SEQ ID NO: 45890 - DNA, 6024 bp, Oryza sativa
  unsure (1)..(6024): unsure at all n locations
ccccgtccgtcgacaaatataaggaattttcaaatgataggtgtgatctttaccaaatgagtaaactctttgtgtacaaagtaattcaacctcaatcttaaactctgctaaacaaactaggaccaattatatatgtgaccagatggagtacatagtttatagtcggacatgcgaaccagccacattacaactcagaatatatatgttattgttataactaagcttcttacaaagtatgttcaacgaacacctattttaactcattactataaataacatttaacatgtttcatggagggagattatggttgtgcaaatgcacgacttaaaggccagtttaaactaatttttttaggaccgaaattgaaacagtgaaaaacaatcgactactgtcaaccacgataccgagccagtggagaatctaggatgtaaattgagggagggctcgtgtttaaatatgaaagtgtgattgaaacaaactaagatatatcaattgacgaaaaatcttaaccgagagagctcttggtttagtaccaaggagcgatggtccagttgctaaatgtggtaaaattatcatttcaagccagagtttatgcaactgaaggctaggttggtatggggtttgtgccaacctattattgtcaacgtgcatgtcttttattcttcttataaaattttctgctaacttatttatccgatctataatctgattataccactatgttcgttgcaactaaatttttataaccaaatattacataattgattttattatatatgtaagttacttttatcatgtattaaaattacttttagattttattaaaaaaaatttcagacattcggtgaacaatttacttgattggttagttctatattatgttgattaaatttaattattagtttgacttatgtttttacccccacaataaattaacttttgatgtcgtgacaagttactttcttttattttgagttactattataatatatatgtaagttaccttttttaggatttattaaatttacttttatatgtctaagaaataatttaatgaaatctaaaagtaatttagatatattatgaaaataatttgtaatttttttaaaaaatataatcatgtaagatcttataaagattaaattattatgaacaaaacggtgtaatcggatcgtaaatcggatgagtaatttaagagaatatcctataagaaggaaaagaaaagacatgcactgttggcagctgatgcatacatgcctgctaggatgaatgtgtaatctcgagccaacaagcttggtagaacggtgttgttttagcaaaagaaacgataagcggcagacggcacgccgtactatttttagcaaggaggaggacggcgcatggtactatttgtggcacagaagatgtcactgtattagtcaatcgtgctcaactaagtattttcggatgaaaccccaaatgcatatgatcaattaacatcccattgctttctccattttaattcgcagctatacaaatatatctacacaaatctatcgagaaattagtatggtatacttacatcatatttgacattggcaacttaattttggcattcagtgcttgagctagctttccttgccagtacatatttacgctaaatgctaattaattagagtcattagtcgctaattagaggaagggaatcatgcagatggggcttgcgcaccaacaagccccaacaatagatccaccactgtaccgagctgtgtttttacagtaaaaaaaaactgcaaattttatactattgagtaaatttcacaaaactacatatactttgcacgatctatcacaaaactatagatttaagaacttattttataaaactatagattcaatatcttcgttgtcacaaaactacatgtactttgcagaatatatcacaaaactatatatttaaaaaattgtttaacaaaactacagatttaatatcttcatttctcacagaactataggttttagcattgttaaaccaatagttttgtaataatgaggacactacacctgtagtttggttataaatgaagacactaaatatgtagttatgtgataaacgaatacactaaatctataattttgtgaaacaagttattaaatctgtagttttgtgataaacggagacactaaatatatagttttgtgaaacaagctcttaaatctgtagttctgtgataaattatgcaaaatacctgtagctttgtgaaatttactctatattatactataaaagaaaaaaatcagtcagttaagtggaagttttatttggtttgttgcgaagtaactatcagtgccaaaattattgtaagaataagaatgattagacattaccaaaacaaaataaaagaataggacatggatggcaaactaaacagacctctttgctggctagattcaacggtactacgaaattgatattatcgtaaacacacaccaaacaccgagatatttaagtatttgttactgttacatgtgatatttaactatcgatagttaaatgttacatccgattttaggttgttaaattatgtaacggatggagtggacgttaagattctcgagtgcacgtgttccacgtgaaacagatagatatcgacccctgcactgaacttcaagcaaatttaatgatgaacgaaattaagaaagattgacgacctagcaagaaatttcacaataattatcgagtgcacatgtcccacaataaattattgaattcacagtatctttcttgttcacctatttgagtagtattttctgtctttttaaagagagcattacagatgattggatttgtggatttaaaaaaaatcctaaaaatatcaccttttagcccaacctctcatccttgtctctctccccgccccggatttttttaatatctaattttatttatttaaatattttttacaattttttaaagttttacaaatttactccctaacgctctctcgtaaaataacttttggtttcaaagttttttaaaaacactttatgttgtcatgatacacacccgttggtgtgttgttacagtcacgcgaacattttaatggcggtccccttgcagactatctatataaaatagtgacatacaacattttataagcgggccacttgccgttctctagagccttcctgtaaatggctagcctatgatactttgtaggtggccccttgcaaaatgaccgaccatttccatatggccgttagaatacaccaatgaatatgtaccatgtcataaaaaatcatttggaaggatattaggggtgtagatctgtaaaactttgaaaaaaatattttttaaattttttaataaaataaaattgaaaacaaaaaactcccctttcaatatgctgcagcccatatcttgcccagattcgtagcggcccagcaacaggctagctgacctaacctaactggtccagaccggcagcaaggccgaagtggcccagccaccagtcacgcgcacgctgacttcgccgcagcgcaccgggcgaaaccggcccacgcgatagcgctggtgcgccgcatttgccgccctgaccgaatcgtggaggccgtctcccgtgcgcccgatcgaaaccgtcttgccgctcccgctcccgctcccgctcccgcaccacactcgaccgccgcgaaccagatcgaaccaatcgccgcgccgaccacaccaagttgccactgtggctcacgtcacccgcaccctattgccacgaatccggcgtgctccaataatgggcggcgcgcgactgggggctgtgttccgttggtagggctgggaacggggtgaataattagggtatgattaattaataagtgtagtattaaatatttttaagaaaataaattaatacaatttttttgaaaaaatttaaagcacaaattttatacgatttagtagtttaaaaagcgtgaatgagaaaaacgagatatggaagttagggatcttagtgaaagaactcagccttcagcggaccacaaacatactgccctaaccttcgcctctcgctccacccactcctgcggtcaagcaccttgcgtgcgtgtctcgtcgcaagctcgccatctgcccttcgcgcgagtccaccgccctttcgcccgccatcgcctacctcactattggaaatgtagccttgcaaatgttaatacagaaaaataagatattaaatatgacatgtgaataaaaggatgatctagtgatagttctaaatatgaacatattaataacaggaatagcatcatctactaacatattcaatactaaagtgaatagaacaacatgctcggagaacgctttggatccagataaggcattgttgttgttgcctccgttgttgtggccgttctctcctcctttgccaccgttttctcattcattgccgccattcctggtactggttgacattgccagcagaggaaacaggggaaggcaagaaagccctcccgtcccgtccccgtccccagcttagctcagcgcgcacgcgtgtgtggcagtcctaccaccaccctatcaataggtgctatccatttgtagcttatttaagtctaggtcccttctcattggttttaagatgatattaatcccttaacattaattttggtttcattaaaaatactacaattaaattgggcctatcccatcaaattctaatactcaccacggctcaccgtctgcctttacccggtacactatcacttctcgttcaccttgagctctaagctcttagctagtccgcccggagctggagccagttcatccagcaccttgtgtgcaacgtcattcgttccatcccttcctggttcgagcaagggctaaggatggggatccataatcggcgcgtgtgcgcccccctctaatccactctgttcctatatacgtatataagtatatacacatgtgtgtatatatattagatataatccattatataccactgagtttgtcataggtttacgatttgccactgacttttgcttaacttctacgacttactatcgtcgtccagttagccttcgttagtactgtacaattttgtccaagtgaccaaaatatccctaggataaaaacttccaaaatttggaaaaatttccgaagtatcatattttaaatttttgatcaaattttaggatgctttaacaatgcttaatgaaagcataaatggccaggtttagaaaggaacaaattaggccaacccggaagaacacgncaggtntaagccaggtgcaatgctgcacagagctcctgggccaaaaactgacttcagcaaatatgaatgtagcaaaagaaaacagccaactttctagaaccattttaggaagtaacagggacgcactgctggagaatcgtttttagtcccagtttttcaaccgggattatgaatccgggactaaaaacgtcgcttttaatattgaaataactagaacaaaagtttttttcctttttttttcttttctggcgccaaatatctccaaatcattaaaaaataagaaatcaaaaatcacagattgtgttcacacattacatattgttcacacatcttagcatcccaaatcatccacaacaacaacccaatatctcaacatcccaaatcatccacaacaacaaatcacaaatccattcacacatcattctcaaatcacagatcaaatcaacaaacaattattcacattattcacacaacgagaaggaaaaaagaaaaaaaatccatggagcctgccgccgcgcggccttccgcgccgggccgccgtcgctccgccaccacctagtcgccatcgttccggcatgggcctggccgccgccgccccacccggcacgcgcctagctacggcagctgccgcccctgcccagcacaggcctggccgccgccgcccctcccctgcacgggcccagctgccgccggctgcttctcccgcatatctgaggaacggaagagaggaaaactcagatgtggaagaggaaggggagagggagagatgagagtgaaagagga

SEQ ID NO: 45891 - DNA, 2141 bp, Oryza sativa
catatatatgagtgtgattttctgttataactaggaagaaaggccccgcagatgcgcagacatcttatttactgttttatgaaataatgttaaaataagtcatatctcaccatttatacgctgtgagatagaccatagactttaatatatttaagaatgcatgttagacttaaaaaaacatcttgtcctagttccatatagattcttctacagtcacacaaacttattatcactattttaaaagttgagtaatatatgaaactatatatgtttatttccaaatccatatataaatattctaaaaacaccacttctaccgattaataggatacaccattaaaattaaaccattaaagttaaacataaatgctgggtgaagatagtcatagtcatcgagactttcttactctagtgccttgaatgatgggtctctcattaagatagccgtgcacgtgctctctcgagatcaacctagagcacaattttaatgtctaatttactatcacacccttatgtagtattgcattgtcatactggcaccgccttaactcagtgtatatacgcccctgttatacttacgatagcatagcaaacactgttgtttatgcttggtgaccctaggaaaggacaaagaaaagataaaggtgatcgacatagttgtgttttgaatcgatttgtggtacagagtagacacggtatgcttaagattttgatcattgctactcaaatttttatagtatagctagaatactctcattcataaagaagcaaggtccatcacccgatggtagttaaataattagccaaagagagacataccatcacaataatctccagagcactattgtttatattttgacaaatacctatagtttagcacctgatttgttttaacacctactgttggcaacaacatgataaacctttactaatttaaatgatgtatttatacttctaaacctatttatcaattacgtagtatatttatcatgtcatatttgacaaatatgaaattattttaaaattataattacattaattttcatatattagcccgagatgtggtgatgcatttagaatcggaatacaaattttattagacacaaatattttatttaaataaaggaatacaacaggatcacaaattggatatataatttaaaagataaccgtttcgagataattgattttatatttgatatttatattaccgatctaatttatatttctgcatatttgtggagtaatatatattttatatggtaaaaagttatattttaaagaccattgattttgttccaatgtacgtatgttttttattaagtatgtttcttattggctttatccttttttatggtaggtacgtgctttttttttcctcataatagttatatgtaaccttttttctcattttacatacgtacttatgtttttttgttctttgaccatcgaggtgcatacagatctactaagcacgctatgttttattttagcttttgtcgtacatacaggagaaaggtattatatatatagagagatctgatttattgtataaaattatgggtccaccatttaagtgaaaatcaacagcatatatctaatctaacattataaaataacgggtctaccaatttaaatgaaaatcgatggtgagattaaattttgtcacgtggcatcctaatagcatttgtatacagatctactaagcacgctgtgttttattttatctttcgtcatatatacaggagaaaggtattatatatagagagatctgatttattgtataaaattacaggtccaccatttaagtgaaaatcaacagtatatatctaatctaatataataacgggtccatcaatttaaataaaaaattgacggtgagattaaattttgccacgtggcatcctaggacctatacatgtaattcgaataccttctaattataccatattttgtatgttattgatagtcagagtttgtaatagtttgacctcaatattgtccataatttttctacttattagctgacaaaaatttcctcaaatccccgttatatgtgcctagctttcgcattcaatcctctagtgaacagagttcgagcatgaaggagggagccagaataaatacaacggcagtggttt

SEQ ID NO: 45892 - DNA, 1499 bp, Oryza sativa
tatatatacatatatatatatattctacacccggggtatagaataataccgccctccccctcaagagcccaacccacctccgcatccttttattgggctcataacccacctcccatcccagtcaaagcatggtcaaaggacggtcaaatcgctgccatgtcggtcaaaccagtgtgctaacttcctcccacgtctacctatttgttgtcctcgtctcgtgcgaactgtgcagtaacatgacgaccaccatgcagtaacgctgtagcttacttgcagtaacactaataaaatatagttaaaatatagtcttgacggatctagttttgtagagctctttttttaaagcattatggtgcaaaaggttcaaaaatataatatgtggtgtgagagatattattgtttaaagatgtgaattcaaaagatatcactttcacttacattttactagttcaaagtgggtggtaggtcttgtacctgtgtttggttgttaccacctgttattgcagtaacgctattaagaaattgcagtaacacatgttactgtaaaaattatagttgttactgcacacatatagtaacgtcatgatggaatagtagtaacacaccataaaaagtagtaacaataatgatttagtattactacttatggagagataaatttcaaaagaccaatcttcgagaagaaatagtagtaacacactcgattactgtaaaagcacataaactattacaactctacaggacacacaaagttccatagttgtaggaagctaagtagaagagaaatatatatgttattacaaaactcataacaagttactatgttttagtagtaacattatcgtataagtatagtaacacatcacattactacaaaacatataggatgttactgcacttttgatagtaacatcgtggtgaaattatagtaaactaggaattgaaacaaaaatatatgagttaaaagtctacatgctaaccatatttttgttactgcacaaaagtgtaagtgttactgcatggtagatacacgttaccacaagtttatgcagtagcactattcaagaattgcagtaagacgattttttactacaaaacttataatatttaccacactttcataataacgttatgatgggattgtagtaatgtacaatagatagtaataacacttatgatatagtattactacttgtggagagttaaatttcaaaagaccaatctttgaaggttctctctttgccccatgagtaaaccgagccaattcatctctctccatgttactgcacctttttttcttactatacatattcttgcagtaacgttatcaagtaatcgcagtaacacactatgttactatgaaacttacaatcgttactacatcttgtagtaacgatattatgtgattgcagtaacgcatagcagatcagcagtaatacttatgatatagaattactcctcgtggagagtcaaatttataaaaaaccaatctttaaagg

SEQ ID NO: 45893 - DNA, 1196 bp, Oryza sativa
aaaaaacatatagacacttctcaactggagatgatagaattgcaacgcgtaagaaatgtggctatttacattactactacaattgacgcatttagatattctaagacgtaatggtcgcagtaatacatgataaattccttgttgttaccatgatattcttaatgacaaatcaagatatataaatccattaatgttatagctgtacttttgaaaaaaatatgttgagaacataagaactactattaggttttgagcgccaaacatatatcagcccaggccaaccccagcccacgtcccgtcatcccactactagcgttgtcggagtaaacgatttactcctatcgcatgtctctaccacccacctttattcgagtaaacaatttacttcgataataaaaacaacttccctgcttccgatcccaccccatgtcccgcatcgtgctctcaccattatcggagtaaatgatttacttcgataaaaacaacttctctgcttccgttatatattctatttttcccatacccaaccaaccactctcgcccatttttttcctttttttttcggatctgaatcgatccaccatcctagcccacagatcggcgacacaccatggaggacgacgatgacaccgtggcggttgatggcagtggctggcgagtggtggccagcggcaattgaggcgacgacactgcttcgggcctcgctaccgaacgctgggcagcaccttaacaagtaaggaggtgttcacctgggccaataccaacaaccagcagctgcttcacgtttgcgacattgatagaacaaagaagtaaggaaatgacactctgatttgtatctacatactctccttgaacttcacacatgaagccccaaattttttttgcaaatcaaattaacatgcaatctccaatattacctgatcttaattgttgggctgcataggtcctacatttgcacatcgtgctctatgtggctggacacagaggatagggtagagtccgctggtgatggaggttgtttgttatttttcttttgctcgtcatttctattgacatgaacgagaatgtttttgcaattttttcgtgcttgcaagatgattgatggctgctactgcgcaacgtcgagctcgtctctagaccacaccgctacatccttccatgattccatcatcgactactgctcaccacctagttgc

SEQ ID NO: 45894 - DNA, 2007 bp, Oryza sativa
agaaggaacgaaaaacagaaaaatctggatggttaatattttaccgggcctattgatgaagcacaaaagaaaaaagaaatacgaaaggtgggtggtaaaaaacgaaaaaaataaaccgagaaaagatgggatacggaggaaaggcatgggtggtaaaaaagggaaaaccggacggagagggcgttgtggagcgctcgaactaatattccgcgttgtagcgtgcggattagcactactgtaaaaacatattcattattaattattattaacataaacaatatataaatatatttaatagatggagaggccatagtcgtgtgacacgacttatgttgctagttggtctgaagctaggagccggtatcaggcataatagcaccagtcacaagggagagagagaatcattggacccatctgtcagacaacacaatatctgattctcctttgcaattcaatacagctaggcccaccatatggagcctatgctgggttctattatggcatgtacaatggagaccacatgtactagtggtctcatgataccacataggatagaaccacataaaagtcacactacctacagtggaaaccactccaaaatatattttgcattttagttcctatctatttgtgtatcttagtatcaaatctattaaaacttaataatttggtccgtataacaaccaaaagaagtatatatgcacccctcaacaccatgcggacccactatcagcctgtccctgtccactcccttttttattctctctctccctgtccctcccgagccttctcgtcttcttcctctccatagagaccgtcggcactctccttctcccagtccaccccgccgacgagacccctcccctaccccgtgagctcgccgatgagacccgttccctcctgtcgtccccggttttaaaacacgggagaccacttgtgttaacaatactaaatccctagatcaataggttggcatacacacaatatgttactggtacagtgtcgtctgcagcgtattggattacaatacttaatattacaagggatgtccgagtggatccccaaataggccatgaggccgatacattaccaacatagaagcatagagtagggtagcagaagcgaggccgcgatggtatggctttattcccacaggcaatgattgggaattagtccctacggcatcaccacgtgttcttcttcggggagggtcttagtcgggtcatccacaaaatcagagtctagaaagtgatgtaaagcaagagtgagcacagaagtactcaaagacatcactacaagattcctaacttttaccaagggtgtttaaaccgtcggccacctattaaaactgtcggccatacatattactgagtgtcaactgtcggcaacttcccctcagccacatgtggtcggtaattgatcatattgctgagggtaccctcggtaactatgtacccgagggtttacggtcggtccttttttcagagaccacgcatggttctttcttgccgaccacatttcccgagcgtataccatcggttattcattgagtgacagtataatataccgtcggccttattctcacagagaggtttattttcccgtcaaattgtgattaccctcggcaatttagtaacaaatggttctacaagccttcggaaatagtatttgccataggtttttatataccgtcatccattcattaccctcggaaatagtattgccgagagattatttaggttacttgaaaaagaaaatcaaaccctcggtgatttgatattttctaaaaaaatgcaaatttaaattgtacccatttttaattaatcttataaaagtaacttactgcacatagtcacatcaaaacaaatttcagcttaattaatccataaacagatccacgggaagttcaaccatagatatataaccaaattgttcaaaaatatttatcatccatcaccatagcaaaactaagtaattcctgacatgtcttgcatgaaagactttaat

SEQ ID NO: 45895 - DNA, 591 bp, Oryza sativa
ccgaggtcagggttctgggattcaatagcgtaaaaatttcgggacctaccaaaatggatgaatctcggaaatttcagatgaaatttgaccgaatttggtgcaaaattcaaacaatcattaaaaaaatgggtaaaatgatcagagaaccatgacaagcatcaacacaccaccaaaataccatttaatacgcattaatgcatagatctaacaaccaagttcataacaacatacatagacttagcatgcaaattcataactgtgtagtccattagtctaattcatcaccatgtctaaggtctaaaataattacagtctatccatacatacacccaaaagaatactaaacatatatccataataaatattagtcatgtaactgtcgtcaattgctactgccactagctccatatgtgtagatgaattcaatcaccatcatacatgcattcataaaatactttgtcggtgacatggaaccgggagtagcatgactagaggcttgaggcagacacaatcgcccacgtggcctggcaccctcggggggcgtcgggcccgagggtgatgcgttcgccctcctcttagtccccccgagag

SEQ ID NO: 45896 - DNA, 665 bp, Oryza sativa
ggtccaaatgccaaacactgttcatcaatatactgttgcagaggaatactatacttcctccgtcccaaaatagccctcaggatctgtcccaaaatataataacttctcgatcaacattctcttcccaaccaatcacaaccctccaccgttcactttttccacctatcttcactactcatctaattataaccctctaccactcacttctatctattttcttaataaccgtgtccaatcctaaaactttttatattctattaatgagggagtagttaattagcaagaactcctagattatatgggatccttatacgtaacatctcgagagaaatttggtcaatgcttagcttcaattattttcaataaaaaactaatactacatgtacggcaaagtaaaagttttcaataggctagtctatattatctcgtctatctcacttgtactctttccatcttataaaaactcaacaatattagatatgatacattgtaatactatgaatttgaatgtgttaagattatattgatatttgatgggagggatggagaatttatcttcctactaccttggatgaatggatcacgtgactgtctgaacaggtaaaaacaagactacagatgagctgtgacctcgtgggttggcagataacagtcccggtgcgtgg

SEQ ID NO: 45897 - DNA, 696 bp, Oryza sativa
cttagtctttccgcgctgttcgcttctgcgccgtcgtttttatggttatttctgtaatgattgtgttgtttatctatgggcctgtccatgatgacaacttatgtaagaactactacccggtgatgtaataaagtagtttactttgattcatttattctgtgtgtaccagctagtgtatcctgggactggtactatattaaaggtaatgcataacactccggtgtaagttagctgtgtttatggctaacgaatgtcaggcgttataattttttgtcaaaatttttgggatctaaacacacccataatttagatgttatagctgctgaattgtttaacagaaaaaattcttttctaactaataaagtatgataataggagaaaaaaatatgtgcaaaaatatgaagacattgagagaagaagaggtgaaagtaacgtgagtatgtactatccttaaaacaaacatacatacatatagtaatacgtacggctcaaggtgaaaaaaaaaacgttcgtacatacatatagtaatatacgtacacgcccaaggtggacctcgtatggggttaggcagtttgttttcttttgataaatctaatggtggtaaataatggatccaccaaatttaatgaaaagcaatagctagagaatttttagaaaattctctaatttattataatactacgtggcggtttggaa

SEQ ID NO: 45898 - DNA, 562 bp, Oryza sativa
agatacaagaggttgcgcgacgactaacagatgcagtggaagcctcctctcagggcacgttccgaccagacagagatagggacgagctgacactcgccctgcagactccagagcatccaggacgaactcgagggaaaggggtgattccttggaagattggtttcaaggaggacatccacacgtacaggagtcgaatgaggagcaagagagataccgaggcgaagattgcagacctagagttccgggtatcgagctacgaactcaacatgcaagaggaggtggcaaggaaggttgatgaacgcatggccgcacatcggtcccatgatccccagccgaccattcctcctgcaatggtgagcccgtcaggaaaccgtagcagctgcgcctcaacggggcaggtaggatcacagagcatggacgccatgcaaacacaggacgaatcgacctgtcccgttgatgacatcactcagcggacaccatgtgagctgcatattcctttcaagaacttatcaataaaggtaagatttagccattccgctagttgctgcttatatatgttgat

SEQ ID NO: 45899 - DNA, 533 bp, Oryza sativa
caaattgctttttaacctgctattttattttgataccgattggtctgagtattttgatactgattctgttagttattagggtttgccgttgttcttttacatgatgcctttgatactataactggaaattaatattgcacacagattttctgatgtcattaacattttaattccactaccagctttttattactttcaaacacatattgatgcagaggtactggagttctctgatatctcttgctgttatcttttcatttcacgtcttaacaaacacaatgccatatttgaagttgttgacatctggtaatgttgttgttctattgcatgtcataaagaaagttgtactgaaaaaatgcatgcaatttaccaccaattgtctaggttttagttcagtgctatgaaggtctgttttgtagtagttggctttttttgtgattgagttgtaattctggacccatattctagaatgcacatatgattgatatttcagattgattatttgcaattatatcattcctatgttaaactag

SEQ ID NO: 45900 - DNA, 698 bp, Oryza sativa
atcatttttaacttggataatatttagtgtgaagtaatttaaactactcccaaaactttgaatttagtgattttcatcaatctagcaattttttttatttcagtcattatagtgaaggggtatatataatactgaacactaccatctaggtgtattcccgtagaaactagaaagtaagcaaaataattatttttattatataagtttgtgttactcttaatttccctgttctattctcacacaatctatgatacatgttctgcctatgttccaaaaaaattgtgaaacagtttgccttttttttccttgccaattcgtggtggtattctgtaggacttgacattgtaaaatcaccattgcttgatgacacctttttgatttttctgtgtactggcctgacagattattggaccgtgaccaagctgacggggaagagcctgtggaagatgaagaagaagacgaatttctaaaaggattcaaggtactgtgcatgaggagctcattttagttattcttacgagatgcctgctgtcacttctattttggcagtaatctgtatatttatgagataatgaaggatcatcatgcatgttgctttttccttggaaaaaaccaaaagtaaacataaatttggactagcctcttgttttaaggttgatgctaagccaatacatttggtggttgtcagttgtcatata

SEQ ID NO: 45901 - DNA, 627 bp, Oryza sativa
catttagttaagtttaattaataactaaactgagctatcaaaagtttataattttttttcacaaaactacatgtactttggaactatcacaaatttgtagatttaagacaatatatcacaaaactatttaagatggtgtatcacaaaattacagatttaatactaattttattacaaagctacaatgttcatgaatccaacgtaatagtaatgctagagatctaaactctaaaattaacactttagttttcatagctaaatatgtagttttgtgataaatttgatattaaatttgtagttttgttatatataccaccttacgtctcagttttatgataatttactcaaagtattcatacttaaacgaaaacagtcacattgtcaaacaaaatcaccataccatatattgtaagggtaatttgtccggttttaaaagtttactttattttagtgtgaagattgaaccacgagaaaatttgaagggcaaatgtgtatttctaaggcagaaatcttaaagaaaaaaaaaagccaagtgcccatgcgctaaacagaatatacaacttagggtttgtttagttcccaaacaaaattcttcacatcgaatgtttggacacatgtatggagtat

SEQ ID NO: 45902 - DNA, 719 bp, Oryza sativa
aatggcccagcccaaacattcttcaggaaatttgtactcctaccaaatggattaaggactgtcaacctgtcatcaccaggaatggatcactaatcacttaattaatcagttcatctcagctcaccggtcaggaccagtacttagtaagtacactgtacacgaaacagtggtaggttttccatctcttcaagacttgaatacacacaacagagaaagatcaaaatactactacagctttgtggctggctggctgctgccgccaccaccaccatcaccatcaccaattcacagctccgtgcaaaaactgtagctgcgtttgtgtttggctcgggaattgggtgtgaagaaagacacacacagagagagagagagagagagagagatggcaccgaccggaaaggccatgggccaaggcaagcgaagaaacacaaaacacaaacacgaggcattgctgcgatgcaggggctgcagcgtagcaggggggtgctttctcctgccttcctcatcccaagcacgaaaacatttcggactggaccctccctgtttttccctgtctttccctcccccacactagagtgccctttttgtgtctctctcatcccctttgagctctctcttcgatgctttctttactgagtactcaaaatttttttctactacatccgttctaagggctgcttttaatcgcagggttaaaaaaattggaggaataggaaaaa

SEQ ID NO: 45903 - DNA, 727 bp, Oryza sativa
attcctgcagcccagcgagacacaacactgaactatctgacacttgatgtatcgtgatcaacaatataatgaaattgcaacagaccgacaacaggactaagcatgcatctaaaaccacaagccatataattatcacaaacaaaatggcatgtcagctaacgaggtgaaaaccactatgtacacgtttgtagccaaggaaactaaatattactcctacatcaactgcataacataaaagtttcgtgcagaattatgcatcgtcatgatatatgaaggttccatgacacgaacatgctctaatattagttttcttacacaaatcaacagacctttttgataatctcaaatggtgttccgaaactttgaatctctggaaccacacaacatctcttggctacttttgaagtcaataatcaacagtgtttaaatattccttacaatctacacctatggataattctatagttccacttcaaaataggtgtgaacagcagttatatacacctcctctctcagattgatgatgcacatgcgtattaatcctgaaaccgcttttcatgagtgcagttaaaatgaattcaagctaattgagagggtataaaaggtacagattgagaaacgctccatctcaacttgaaacaaatctgggtgtgatattcctatgaataagctaggagattgcatcaacaatctttccatgtttgtacagaaatagtaagatttttca

SEQ ID NO: 45904 - DNA, 1866 bp, Oryza sativa
tagtgctagttttctaataggatgtagaaatggccaagatggtagtgtcatcaagatatatgaaatttaattgtttattgtaacaacatctcttttttctttataatgcgagttatggtaactctcctctttcctgcagccaaagaagtggcgcctgaaggcacaactgatcagtcacaagtttcccatctttacaacaaggtacttatggaacaaagttttttttttttgaggggatcctctcaaagaaaagttttcctatgctaactctggcctgaaaattttcttgagtgacaacttcctatctatctatgatatgcagatgtgctttgtccttgaagacagtgctgttcctgcactcaactcgcatttcggtgacaaggcagcttcctccggtttagccaatagcctccataagtttgaagctgtatgcgaagacgttagtcgcatcttgagatcccatgaaaatggtaccactcccaaagaggaagttatgctagatgcaagctccaaagagaccacgtctccaaaagatccagcaaccgaggtgccttcgtcagcttccaaagaagctacgcctccagtacaagatccagtcatagaggcagtgaaggaggagccacccactgttaaggcggaggacaaaatggaaatcgatagttaatttgtaggaatcataacgataatatcgaacctttttcgtctaatctaatcgctaaactggctgtagcttttaccatattacaagttgtaaactaaaaaatcactctaagctagtctcatcctgtagaggcctggacatctccaggcctgagatgaacgattaccatcaaatctgtcgtactaaaggttaccaggttttgctagctcctgccccgctgcatctgttaaatgtttaactcttcactgtcgaataggtcacttgactggtttgccatcaggatgattaggcccattgtaatgaccctactgctaaagctgtgttgctaattgtggcattgtgatgtgatgatcccaacgctataaagccgtgtggctgattgcgattacgacgtaaacatcaggaccgtagggacaggacaaactagcatcgactaatcatgagatgccgtgattagtagttgggtcggaggccccaccccgagatccacacgggatattttaattggatcatcatcgtcgttagtccgtcctcatccgtgtgccattaacggtggcctccatcgtcaagctgccaacgtctacaggacgagacagagagagagagagagagagagagagagagagaggtggccatggaggtggaagcggcgcgtcggagcaagcggccgccgtggagtcgcacggtggccgtgcaggtggcgctctgcgtcgcgatgtacgcggccttcagcctcggcgagccacgcttccaccggaatcggggccgcggcggtggcggcggcgtggaggcttcgctgggtcgtggcggacgcggcggcgtctccttcctcagcgtcgccggcggcgcgcggccggccgccgagcaggcccgcctcctacggcaggtgcgcgcgttccctccctttctctctccacgtcgtgttcggttgtcctattgcctctgctccacgccgattgcgatgttgttcgtcgcgatggcatcatttcccgtcgtttcgcggcatcgtttcccgtcgtttcgcggtgtgctggatccatccgcgaaacctccatgagagagaggctgcactgcacggcgaccaaccgcgccgtgttcgtagtgctatcgccagcttgccattcgcgtacaatgtggcgcgtctgctgctacaccgcacgggaatgtgtctctcacagtcacacagcagaactgggcattgctga

SEQ ID NO: 45905 - DNA, 609 bp, Oryza sativa
ctccaatatgccaaatgatgggctttttgtcagccagtgaaaaagagaataagaatgaatgtacatgggtactttattgacgggacaaccgaggtggtgggagaaaaaaaaaggagaaaacatattagggataaaattggcatgaaatttttacaatttggtcttttttgaaaactttatttatacgaatagattcttggaagaaatatttctaggaatggacagaaaatagatccattctgaaaatggtttttgaggggtctattttgtaacttttttataaaaaaaaggtcaaaatgtaaaaaattcagtgaaattggtagttagaaaaaaaaatccaaggtcatcctatttgttttctttaaaaaaggtagtaaagctaaataaaagcatcccggattcaaattttgaagcacatcccccttttacttttcagagaaaaaaaagaataaaaaataaagcaaagccggcgggcaggtagtcaggcacagacaggtaggccccgctcccgctccccttggaatcattcgctcgcaacgcacacccgcacgcacgcgcccacgccaacgccaccacgacccgttccgtctgttaaaaccgaaaccaggc

SEQ ID NO: 45906 - DNA, 1182 bp, Oryza sativa
ctagagagtgtaagaaatgattgcttgttatcaaagtataaggcaggcgtactttatttcgttaggatacatattttcttctcgtcttacgaggagaataagaggaagatattgcgccgactttcaattttctaaatttatattctttggaattattttccttcttttcgttaattaatcttcatttttataaccaaaccggcggcctttgacttttcaccggagtacacacatacataatatacacaattaatcttgtcgatcgatgtacgagattaatattaaccgaactacagtggtgaatattcgtagtgtatatatatatacttactactacagtatatatatatgtacatagtagcaagtggcgtgcccccaaattaaataccaatatatcacttaacatgtcgtcgtagcagcagtgcagtacacacgttgtcgtttgcagccatatctatctgcataatgccgcagtatatgcattatgcacgtacctacgtgtacgtacccgaaaaatccgggcaatatatatatttattcatacaacaacacatatatatcttgtctagctagcaatatggtatgtagatcttgccacgctgtgtactaccacaggtacgtgctcgatggataatgtcgctggcaatatttgcatatgcagcccttgtttagttctaaactttttttcaaaccttcaacttttttatcacattaaaactttattacacacataaatttctaacttttccatcacatcgttttaatttcaactaaatttttaattttgacgtgaactaaacgcagccgcagtgtggtagcaaaacgaaacattttgtgcagggacggactttgatgatgacgagatgtatctcctcctttcagcctttgaaggcagcggtgcgcgtgcctgcaatagaattggaattttaatcttaatagttaccgttcttttctccaacaaaagttatatggggattaagattttcgtggcacgtttttcaaactgctaaacgatgcgtttcgtgtaaaaactttctatatgaaagttgctctaaaatatcatattaatatattttttaagtttgtaataattaaaactcaatcaatcatgcattaataccacctcattataagtaaaaaaaacttaatattcatcttcaggagaaaatatccctccgtcct

SEQ ID NO: 45907 - DNA, 924 bp, Oryza sativa
gagaaaatgaagcagaagaatacatatgacttgggtagttcaaagctgcagggtggatttaattctagtggctgcaattttgatggccttctcaattccataatcaaagtggtatgaacctctaattttcctttcctttttccccatatagttttaaatatttatctacatgaatatgctcttccttctcattgagtaatttaaattgactccactgtatttaagcacaaagaacaaaggccactctaaatattaagctgtaaacagttgtaacctacacataaacaggatatgcctagcagtacctaatatttgcattttccatcttgttttatattatagaaatgttcttgagccacatttaacttggttctaacttatctaatctccatgggactttaccttttgcatatattcttctgaaagaaatgatggtttactgaagccttaattctaattccaatgcaggagaaggatgatctcccattcatggacaatgaattgggctgtgacctttttccacttggtgcctgcatatgaatccatcatttcggacaccaaagattttgcataatctaaaagagtcagctgtgctgcctgatctgtgctacttcatccaggctttgtgtatactaggatctagggacagtagtggcttgtaatcttgctttatctcttctctagggttggctatggaagtatggttagatcaagataagaagaaaatataatgctgtaatgtcagcgccttttctagtcaaaatctgtgtttgtttctaaccaagcaaccacatctagtgtttgctgcaccttctcagactgaaaaaatatggaaactcaccatggcatagataaatcaaaagggaagtctttaaccatccaagtttgctacaacattatggttcaatcttggtaaaaggtaaa

SEQ ID NO: 45908 - DNA, 2916 bp, Oryza sativa
agatgaataagccagtgatttcgtgatcaatcgatatcgctccacgttcattggtctcacatggtatcagctaaggttttgattcctggcttccgctctctcgccacgatcaactcccaacgacacgtgagacctctaatttctcaccgacttttgcgtctttcgccgcatatatgtgtatcttgtgattaaatctgcagttgcagagactagtactactaaattagttcaggttgttgattagttattcataaaaaaaaagaacagatctgaattacataattttgcgcttttcccttcccttttagcctctcttttgctttcttatgttcattagagtgcttcattttgtttgatgattcttcttcagtatcttgatttgatgatgatgtgtaagctcctgactcagaaatcctagttctcttgttcttgtcatcccctttttgataatgctacgtgcaggtagtccatgtcttcacagacatgtctatttcatcgagtctctccggttgatccttgagctctctctacatatactctaaggtgaaatgtttctcatttaacttgttcttgtatcatgcatgagctttctccatgatagtgtcatcaaagtgtccactggtatatgtattttttaacttgagcatagacactacaaaactttgcaatatcctacttaacattaccctaatgtgtcttttggcgtcgagattacgctagagatcatcacaagtgcattctctcttcataaaaaaaaagataatttctagggacgaatctaaataaccatttatctatgtttgtccttagaagttgattttttgggacggagggtgtacatgagaaaaggaagccatgttgccctcaacgtgcaaggtgttggcaatggcgaaaactgagcaaattgcttcaagaagtggttgcatttgctggtgaggtgcatcaacaaggtggcctcactcatcaagccatcacctctgtcatgtacatcgtagtggagcagaaggtgactattgtgattgtcatacatattgcattcacggcctgcatatgaggaagatgaaattgaggataaactgcataatttcaatattcttcagattttccctgtattagctaatagtaattaacgattcggatctattgtcctctacagcgacacgaaaaaaatcacatgaacatcaaaagatgtcgactgatgattggtaaatgatgacactcctaccctctttaaagaaaagtcaaaaacaaatcatcacattagttagtttttcatttaatatgtcgggatcctatctctcaatgtgtaaagtgttatatactcactatagtatttccaaaaaattcaaaaatagtgttatttgtacgtctttacggatatggggtgtgggtggtaggaagtgactagaaggctacgtatgcacacggaccaaaatatttcccgcgtatttttgcggatactacatcgtaaacaatatatatgcatgtgaatatcctagcttctacaaacaaatgaaatcaaaaggcagataggctacaagatctagaaaagccattcaagagttgttccttaccagagggaataggatcaacaagtagcagcaacagagtctccactttctagcttcttccaccttcctcatggtgatccgtcaaaaagagagcgcaatctatgtacatggcagagcagcaaaaagctgagctttttctaacagaacacctcgatgcgttttacccattttatacatgccaaaatagaaaaatatatattaggaaatattttttttaaaaaaatatttttcttaatactgccaacggttcagagaacacatgtaacggtattcatgatatttaatcagccagtagcccagcagcgatagaaatgtcaaggtgtaaaagaaacgagatacgatctccaattaactgagatgaatttcagttatatgggtgctcgtggaattacgatccgtacgtgcaatagttagatttcctcaagtgttagggaccgtttcacacgtcatgactgtacacgtggcacaacatgcatgtgtgcatgtttttcaaactgctaaacggtacatttctaatgttatcatcttgtgtataggaaatagggtgattgactagtgcataattaattatgtattattttttttaaaaaaaataaactaatatgttttttctacaacaactttcctataaatttctttacaaaacacacaatttaataattaaaaaatatgaaaactagagatagaagatgataaggggagcatgaaacacacctaaggctgagtttgtcaggaggagatggaaataaatattatgcacacggaacggtccattagcatgtaattaattacatattagctttttttttcaaaaatggatcaatataattttttaagcaaccttcgtataaaaacttttttgtaaaaaaatacatcgtttaatagtttagaaaacatgcgcacggaacacgagggagaagagctgggaacacaggctgccgaacacagcctaaggccccgttcacttccactacaaaaagtggataaagtcttggatattcgtggtacgcttttcaaactgctaaacggtgcatttcgtgcaaaaactttttatataaaagttggtctaaaatatcagattaatttattttttaagtttgtaataattaaaactcaattaatcacatgttattaccacctcgttttgcatgaaacacttaatctttattttcatcttcatgtttaggagattcaaacaccacataaatcgtatcctagacagggacagatgacatatcctctgcgttttctacaaaacttacaaatattcttttgtaccaaaaaaaacttacaaagattgtcgtttggcctttgctttggtaaaaatatcatgctatccatcacg

SEQ ID NO: 45909 - DNA, 681 bp, Oryza sativa
gttgatggatatttgatcgaatggacgatgcaagaaatgagaaaaatcaactattcgagaagtaatcctggtcttctgaggataattatttactccccgtgatgtatctagaacgaaaattatgagagatccttatgctaaattatcagggttccttagctgacccatgcagtagtcttatccaatttaaattggttagtgtgtccttcatgggataaatatgtactctatcggtcccaaaatattgcagcttttagcctttagaattttctcaaaatataaaaacttctccaccaatattcgtttctcaatcaatcacaacccttcaccattcgatttcttcacctacctccacttcttaaccaatcacaatcttccaccatttaattttacctaatttcttaaaaaccgtgtccaactctaaaactttttaggctatagccaacgaaaagaagtggcacttacctctagcctcccacgttggacgcgaggtcaaaaggcagctaagagcaagcgtctgcgaggaggctcgaacctcctgcccacgccatgcacccctgcgtgaggcgccgctctaaggcaagggttcgagccgtggctcgtgttgtgtagctcgaggcctctcggttgtgcagctttacacgctactaaaaaacggtttttcatagcgttgcacaataa

SEQ ID NO: 45910 - DNA, 645 bp, Oryza sativa
ttggctatactattaaacttgctcttaaaagagagcaacatgccaagagcaatggtggtgaataaggttgtcaggatcgggatactaggtagtatcgttttgcttaaagtaataccgtatcgtaggatcgtatcgtagtatcgggatactatgagattttatttttttaagtttaattaatatttatattaattatatatggctattctataaaaaaatatagtaatgatatatgtcatgcaaatagagacatttatcaagagaaaccacgttggttttgatatatttaaccgattttcatataaatttgagtatatttagttacattattttcaaaccatgttattttaaataatattttgtagtatcgtagggatcgtagaatcgggatatcatctaagatttcgtaggatcgtgtagtaatgaatagtaggatcgagatactattaagatactaggtggtatcggtatcgtttcggcttggtaggatcgtagtatcgtaagatattaggatacgaatcgggatactgacaaccttggtggtgaatgcttcatgcagcttggcctttaatccatggctgccttgtgtgcgtgcacacatgcgcatactggccacacgtgctcctctccgtgcgctcgtgtgca

SEQ ID NO: 45911 - DNA, 726 bp, Oryza sativa
attcctgcagccccatcaaatgaactgtgcaatggtaacctgtcagcagaaaatccaccatctattggaagagcaccctgctgggatatactagaatctcccaaattggtggaaaccccaagagtcctctcaagaagtgctgaactagaaggcggtatccgtatcgatggcggcatgctaactttggcttgtttgcactccaagagttcttgtggtggcaatgaactgcttggaactctttggagtgtgctggacaaagtgttggtcagagaactcccagaaaaaacatcagacagaccattaccttcttgatgaatccagttctgttgaagctgaggttgcccgatcgccgcggtcaagccttgtgctagatttgcctgctggttttcttccaagcaatggccaactgtgacatttcctgtagaagtctgaattgtgctggagggggcagcaagctcctgaagtccgaaagccgcggcggcgctagttcgggttagcaggccatgtggattgaaagatggaagagcagcagaaggtgcaaaaggttgatagctctggagtccttcaaatgctccaatatgcaagaaggagggatctctgcctccaaagcagcaacaatgctggcttgttgtgatgctacagcacctagtctcttgaggtaaagcctgtacttctgcatgtcacatgaaaatcaactgattagatatggacttgagtttttaaaca

SEQ ID NO: 45912 - DNA, 1043 bp, Oryza sativa
ttcctgcagcccctgggccaaggccaagaggctatatagcttgtgtaatggcgtgttggagtacaagtcagtttcgacctggacgctgtctggacgagaggagcaacacctcgacccggcagttattacgtttaacggatagtgatactaatggctactacaccctttggtccccagaaaagataatgcgaatccctgttttaagagttggagcgtgaacatttttgcgtgatcttatctggcgccgtcattgttcgtgtaatcatttttgggccaacgtggcacatgcgaagctgctgttgtattaggaccccgagtaaatggtattaagcgtacgtacttgtttttgcttgaaattgagctatgtgttgtttttttacctggatgaattacgcactgttttctcaaataattgtgtaaaattgtttagttgaagcgaacaagacatgttttgccaaatgttgctgcatgtgagaacctagaaattgttcataattctagtgtaaaatgaactgatccctgaaattcctacaagagttgtatatatataattcattcttccaaacaggatcttgatgcttaatttgtagtataacattaagcgaggtactgtgtgtgggggtatcattaacttggaaattcaactatgtaccaagaaggaagcaattaaattaacatgcaataattcttccagatgattgagctccaattttgaaaccgaagtagtgaaaattcgagatgctgccgaccagtgaaggtttcccgtgcagcattgatctcttcaattaattaaagattccggattcctccatcgctgaatctctcgcaacttaacaataacttcttgtctatacgtattaatgcaacagggtctctactccactctccacatgcatgtgtatttgcaaaatgcaaactagtatgcgtacgttcatgcacggactcctacgtaccccaatcctagatacacatatttgaatatcgtggcgcttgcaataagtgacagtcaattttcaacccacataattataaattagcatccc

SEQ ID NO: 45913 - DNA, 4222 bp, Oryza sativa
aataacgaatctatataatatgttcagattcgttgttctaggtgatgtccaatctcaatatagattggttctttttgggatggagaaagtacaccaattttttatttttatctcatatgtatcaattaaaaaacctagaataccatgattttctcaactcaaaatataattatattttgtctctttatctattttcaatgtatttactctctatgttttaaaatatcgatgcagttattaatagtaaacttattccgggataagcaaacgtagttaaaaataaatatattactcctatatgagacagggcgtgtaatagtacgggtcgtggttttggggggtgttactgtgggtgcacgcatgaatggccatgctggctagctaggtacgtataggtatagtgtggagcagcttggaaacaatcacacatgatgcaggaaggatgggagattctaccgttggcgctgctgccctggccgtgctagtacatctgacaccgtctaccgtgcatacgatgcggatgcaccgagacaaaattttaccatcgcctacggcaaaactgaaacaaaatttttatcgtctacggcaaattggtttcgattcatagtctgtgtagagctagcacgtgctcgtcgcgtactctcgtcatgcatgcaagttattaaaaaaataaatttaataatatagttcaatactgcacattgtctcaccagcgctgctacaaaatcctatctatgaaataaaaacttgagctaattgggcatttataagaaccaaataaaattagtggatatccatgaacggtgagacaatgtgcagtattgaactatattattaaatttattttttttaatttttttattatttatttcggcatgcaaagaatgaggaatcatcaccttataaaggataaatttaagatttttttcccatgttgtttctgccgttctacgacatgcctcttcagttttgacatacacacaattatctagttcaaacagactgaccaaaaaaaaaaaaactacatcaagagagttgaataccgatcgacattattagctagccttaatttgtcgctaaacaacctacaaattaaacctatgcacgtacgtactatcactacagtaactaattaaaccgaacactttcacatgtgtttagattaagtaaattaatcagcaccgtatgatagtactactcttgtaccaacagtgttacaggatcgtgtgttcgtatacatacgacaggctggttaatacggcctgttgcgagattctaatctctgaccaaacaataaaccactcttgcttgaaacggtagtatacaatttgaatcttggagtcaaatgcaatacatcattaaccatttctactactctagtcgtactcctagctacttgaacacttggagtacgtactggtgccgttcatggggttccattcaattcatcgacggatgatcggctcagtttgaatttttcacatggtaattaatcgccgttttagtactaatgagagccctttaatttggtgatgccacatgtgatggactaaaggtacgtgtttgattattgtctcctggtttgagcgcaaattatttacccagtttgcaacgcaaggttaattttaggatattatggctttccagtaaaaattttgaattattttgaagattagctgtacgtttaacacggaattgcagacgaatttattgtaattgaattgcatataaaagagcccaaattaatcttgctggaactatatacaggaaatatttctgtattgcaaatgtgcctagctaaaaatgttcctacatgatagtaccaagggaaaacgtttgtatttatttaattacaaagaataacaagccaaacccattttttttcaattacgcgcatacgtgtgcaaaccgttacgcacatacaccgcacttaaagagataaattaaagaccaacgacaactctcagacctccattggaagtgcactcgcgtgtatgtaatattcgtgggcataaggatctgaaccgtactttccaaaaacacgccaaagtttgagtagaagagaagctgaacatggatgatcagctgtacaatgatagttacattcaaattcaaaagagcgttgggctcaattcctccatttcaaaatgcgccacaattttgattcgataagtagtagtatttattcttgcttctcatagtaaggatcacaaaacaacaggcttaacctcatcaaaatcaaggctgctcaattacgcactactccatccattctaaaatataagagattttaggtggatatgacacaacataatactacaatttagataagcttactaaccagattcataatactagaatgtgtcacatccactaaaaatttattatactactctgttaaaaaaaatcaaatactatgtttgaatatagacaatatgtgtccaaattcaaactctgagtttgatttattctttttgggatggaggggtattttagaacataagagtactacaaaacaatgcattggatcaagcaatcagctatccagaaaagcattcagatttaattagctcttgcaatcaagcaatgtcttgcacagttggcaccgtccgatcctctgatccgacggctcgaggcagctagctccagctcccgaggaagatcctgccaacctagcagtgcagctctcttttccaaacagaacaaaacgacggcgacgcagtgctgcactgcactgccgtgtggtgtactacgcctatcctacctaccaccacactgcccttcactcgaaattccctgccggtgcagcccctgctctgccctgctgtgccggtgaggcagccacgcgcgggcggtgacagtggtcgatcagtaaaagttgcagaaatttttcacagaatgacagtgcccctttttgaaacgcaaaaggtaaaaatggaagcttttgtaccagcttcttcccctgttcatcccaacatgggttgctcgcgcccggagttaattcccccctccctgcaccctcccaatcactccccccgctgggaccatccgtcgatcgcaaattagcggttcatgcaacccaaaataatcgcattagaaccagccatcaaacttcaaattctataatatggatgatcatatttatgaatattccctccgtctcaaaataaataagtgtagttttacagtgttcatgttcaacttttaaccattcgtcttatttgaaatttttttatgattagtatttttattgttattagatgataaaatatgaatagtaatttatgtgtgactaatttttttaaaatttttcaaacaagacgaacggtcaaacgtcggacacggttccccacgactgcacttattctgggacggaggtagtattttttctagttggtgatataaccgtcgacaggaaaacatccgtgatgaattcattaattttaagatatatatgatggccaatccttcgaagttattcatagaagcagaatttacgtgtgtctatttacaattgtgcgtatattatgagcgtctgtctttgtattgtgtttcttgaagagagagagaaaaagatcgtatcgattagtagtagtagcagcacacaagcatttaatcttcttttgtgtgtgttgttttttttctttttttgaaaagaaaaagattggaaaagatttgaacttgctgcgatggcgcaaggtttgccgcgcgtttccggggcgtgctagcgatggactcctataaatacgtgtggattttctcgccggagttatcacgagaattcgagttgctctgtgttcgacgctagcttcgatcgtgttccgcgcgggcggcaatggagggctcagcgagggttggtagtaggatgggggcgatggaggcgctgccgctgcctccgccgccgcgcctcgcggcggtgtcgtcgccgtcgccggcggcgtccatcagggcgcacctcgcgagagccgccggcgcaggcgggggcgtcgagagctgccagtcgccgcgctcgctgctgtcgcgcatcctgcagcgaggcggcgacggcggcggcggcggcggcgggaagttcgggtgccgggtgcggctgccgcggcggtacagctccacctccgccgccggcgccggcgccgaggcgaaggacaccgcctccgagcaggacgccccggccagggtcaaggtcctcgggagggcgccggatctgtcgctccacacgccgcgg

SEQ ID NO: 45914 - DNA, 1078 bp, Oryza sativa
ccaaacacgtgaagtgatgaaacatgatgagatataaattccgttttttaaacatatatatgatgcagttgatttttaagatacgtttgttcattcattttattaaaaaaatacatgtaattaccatttatttttgttatgacttgacttatccctataggttatttaagcattatttatatttttttttatatttgtacaactttttgaataagatgaatgatcaagcatacgtttaaagtcaactatatcatatattaaaaaacggtaggagtactccatactgaactaataccgtgtgcattgagggaaggtgggtctaatatcagtggtgtcctgcattgggcctgctcctatttggatgagacaactgtttatattttaggcaaaaagtagagattaaatcacttcattttaatctaaaatctatgctttccactagaatttaagagttattatagccatgccaaacaaaccctaaaagctcatgtagctcatctactgggcatcctaaaaggaacaggtgtccctataatcataagttagcttgtaaagttaatgtagatcatatactgggcaggctacaaggaacaagtgtcccaataaccaccagttagctcgccaaatcatgtcaatcaggtcagataatcactaccagatgagagagcgaacgaatatgttatctggaggccctaattttgccattgtttagttccaaaaaaaagaatttttaggtgtcacatcggatgtttgactgatgtcgaaaggggttttcggacacgaataaaaaactaatttcataactcgcctggaaaccacgatacaaatcttttgagcctagttaagcagtcattagcccattgtgggttactgtagcacttatggctaatcatggactaattaggctcaaaagattcgtctcacgatttttatgcaaactatgcaattagtttttatttttatctatatttaatgctttatacatgtgttcaaagactcgatgtgatgtttttgggaaaaaaaaattaggaactaaaccaggcatgagtagccttatttttgaaagtgcaacttacag

SEQ ID NO: 45915 - DNA, 630 bp, Oryza sativa
aattaataaaaattccaatatatatatatacttagcatatatatgaatgatattattatattggtaaaaactctaattaagatatgtgtgtacatactgcatgatttaaaattaataaaaattgtaatcatcatatgtacttagcgtaggaattatattaaattaaatgctaaaaactctaattaacatatgtaaatgccacatgcatgatttaaaccttttaaaaattcgaatagtcatatataagtagcatatgaaagatagtaaattaaattgtgaaaaactctaatatatgaatgatagttttaaaaatatattaaatttaatacttttaaaaattctccagtcaattataattagcatatgaatgatagtaaattaaatgttaaaaactctaattaacatatgaaattgccacttgcgtgatttaaaacttttaaaaatcctctagtcaattataattagcatatgaatgctagtaaattaaatgttaaaaactctaattaacatacatatgaaattgccacctgtgtgatttaaaacttttaaaaattgtaagtatcacatataactaacatatacatgatttaaacttgttgaaacctctaataatcgtgcgtaattaacata

SEQ ID NO: 45916 - DNA, 667 bp, Oryza sativa
tatgggacggagggagtagcaaaatttatacatgcatatatgatgtattggatatatgaaaagtatgtttcaaaaaataatctgaaaagtatatgttactgaatttatcgttagaatacatatatactaaaatagatacaagttttgtgaagggtcgaaaagatactttgccagtcgaaggatccaacggtctacaaaatccagagcaaaaattggattgtccgcatttagatgacatggcacgttattgttttgagaaagattagttttttcactactttagattgctaatattcttttattgacaggttcgtctgatgggaggagagataagtatcaaagaaaaggaaccaggggagagaggaacatgctttgggttcaatgttcttctgaagactagtggaaaccaagcagctgaagaagatatagaggaagggccatcaacagtgagtgaattagacatccgagcctcagtgttcagggagactaactgcttcaagggttggcattgcatcctctttgttcatggtgatgagaccagaagagtcttgcaagcttggatggagagcattgggatgaaagtttggatggtcccaggagttgagtccatctcttctacattggagaaggcgcgatcctcccgcgatgattgtgatgtcgatcgatg

SEQ ID NO: 45917 - DNA, 709 bp, Oryza sativa
agccaagggtagctaccattgtatgcctacattacaaggttttcaaattgcctgccaagcttttgtttccatgattggaaaagtttacctttctctttgctgtttgtttctgaatcgcatccatcatccatggatttcactgtgactgagggttgcggaattaagttgtgtacattttgggctataggctttttaattagtcccctgtcccctgcctgggtgaagatgctgtgcttggattttaaatgacatggtagtagtagtacgagtacatagtacgtagtattcatctgtaggctagccaactctcctggtgaaagctttttttatgaagttgtgagtagtagctgtaactgcatgcatagacaacgagtttaactgcagtacagtaacattggcttccaactcgcaatgctgtattgttgttgctgcgtgtaacagtgctctgggatctgcacatttctgggccattattgtgaatctcttgcaatgaagcaaaactgtgtcattatactgttccaatatagtagcagtacagatttacaaggacactggtttggagtgaggctccatgcttttttctgcacacatggtagaggtcagtaaattacctgtaaaaaaaaatctgtaacagccttctgatctataaagaatccaggccaatccaaaaggcaggaaaacaaatctcacttgtgcttgatagtgcaaa

SEQ ID NO: 45918 - DNA, 635 bp, Oryza sativa
ctcacgtacagctggtttgtgtgagtcatgtagctacaaaatgaacacaaaaaatgtttgaatgttttaaatgctgcactgttcctggcacgtaatataatcatgccacgacaaactttagaactggtgcaatttttatatactccctccatcccaaaataagtgcagttctgcactattcacgttcaacgtttgaccgttcgttttatttgaaaactttttatgattagtatttttattactattagatgataaatattttatgtgtgactaaatactttcaaatttttcacaaattattcaaataagacggacgatcaaacgttgggcacggatattcatggctgcacttattttgggacggatgtagcatttttttttgcctgcggatggtaactattcatagtttctacgaaaattgaactgattgtgtactccctccggtttcattttaattgacgctttggacaatgacatgctctacaagatatatctttaaccttatttttctattataatatatacaataaataaatgcatgttacttttattatagtgttttgaaagacaaatctatatatgtttttctagtttctttaaactaaatatttttaaagttattgatggtcaaagtt

SEQ ID NO: 45919 - DNA, 543 bp, Oryza sativa
cagtgacataggacatgtcgcaggcaaggcgaatcgatgtcgacgaccactactgggactacatcgagccggaatcataggacccaaaataagattcctaaggaagtctacaccataacagaggtggacgatcttgggtatccgacggctccgacgaaagctgtcaaaaagttccatacgatatgcagagtcctagggaggcggaacttcactattctgaaggaccacatcgatctggtccctcaagaagaaaaagaagaggcatggaggcagttcaaggaaagcttccgataccctgcagaggccgagctatgactgaagcggcaggctatccgcaagatggggaattgttggaaaaatttcaagacaacgctggtcacggtgtacgtcctcaacccagcccagccagaaccatttgtgaaatacccattcatcaccaaacccgtgtgggatgagttccatgccgccaaatcaatgaatgagtctcgggaaaaaagccagacctaccgtgatctgcaggccaggaaccttgacccgcaccgg

SEQ ID NO: 45920 - DNA, 645 bp, Oryza sativa
tttttgggttcgtcatccgtgtttgagtcagttttaattttatgttttggtattttggtacatcatccgtgtataaatcggtttttaagttcgtttgcttttgaaaatacatatccatattttagtcggtttttaagatcgttcacttttggtatacaaaatgaatcatataagaaatctatttaaaaaaactcgcatgctaacttgagacgatcggacttctaactgcagcacatgattttctatatatatatatatccaagcgaactcgaacagtaaatttcattttatctaaaccatataacaataataatattaaaatagacttcacccgttgcaacgcacgggtatttttctagtttaattatacatgcaaattaagtttgcatgcatgtaaattaagtttttgtttcttgtgcatagggacagttgaagtgtgcatgttttttatttttccccatcacatactcgcatacaatgaaatataggaaagttaaggcttccatggttttagcgagaaaaacttatatgatgactaacagagggagtaaacaacagtgcagatgcaatttgcaactaattgaggcactaataaaaatattttttttctaaatacatggtcctgccttgcagtctggcaaaatt

SEQ ID NO: 45921 - DNA, 890 bp, Oryza sativa
agcaaggacaagagccatcgttccatgtctcgtgggacgtacacgaggaacattgtatatagagaggttctcacgtcatagaggtactgatttctgagctagcaccactgtagtatgttggtttgaacagcaatcctctgagctagcatgcaagtagctagcttttgtcgtaccagcactatatttatgtgctgatgtttgtttttacctaatttcagatgtaagatatgtattagcacttagctttctacgcacttatgatttcctgtaacataatcacataatttgtattattctagaaatatcagttgaattcatagcactatggaaatgtttgtgtcatgcgatggtttcatttgtgaagtggttcacaatttatgtctaaccggttgagcagcccatgatatggccagtgagaaaaacaaccgggaaccatctcgaattacccctccccacctgacctactcaaactagcatgaccagtccacccgttctattcaaagccaccttggaaacaccacaagagggatggtatgacattgaagacacgcaccaaccataggacgattcgaaatgaaccctgcagatccagaatcccagaaaatccagactcgccccttcccaagcaatgttaatgggaacccagctgatgggatacaggaaccactgacaaaatagtgcctataaaaagaacctaaggcaacttcaaaaagggcacacccccctcttgaactaagccagtcaaaaaaaccttagcccatggaaaaccctaatgggtatgcccaacagttgaagtacctactccagcaagtagggtacttccaggagccggtctattgttttgagcggatcacccaaggatccttggagatctggaaggtgaaaatctt

SEQ ID NO: 45922 - DNA, 890 bp, Oryza sativa
acatttaactgctccctctattctattctaatttgatcatcctctaagcaaagtgcacaaaataaaaaaaaatgtaatatccatcattttgaaattaatccacattaatcaatgtgctccgtcacttcgtgtccaacaaaaatttattcacactttaaacattgtgagtttaactaatagaaattaatcttaattggttgcatgtatgcatgcagaacattccacaatgaacatttactctctacacaaataaataaaggaaaaagtacgaattagcacctgaactatcgcgatcgaccgaattacccccttaacccgaaaaccagatatcactcaccccaaactttttataccggacgaattaaccccccccttcaacagaatccagagcggttttgtcctacgtggcgtacgcgtggcaatccagtcagcatttccttttaaagttactaggaagatggcccacgcgcatgcacgggtacttatattttgtcaaaattgtaagattaagggtaaactaaagctgggatgatggtattttataataatttagggttctatttttcttaaggtatctaaaaaaccgttttgagtaggagatggattaagtacttaccacttttgaatcatgtttttttctcgagtaaataagaaactattactagttaattaattatcatgcaatccatccatatacatatcgtgtagtatgtccacaaatgaaaaattcgagagcaagatatgcaaaattcttgtgattaaatcgtctcatgaaggcacatgatataataagaaagggagggaagcgtatgcatggaaaaaaagaagaaaggggaaaatgaaaaagagaggggaagtgtatgtacccacttacgtaggtgcgcacctat

SEQ ID NO: 45923 - DNA, 810 bp, Oryza sativa
acccctggaatccctggaattattatgtgttgttttattatatttgtatcacaatatttcactgtatctgttgctgaatatgtaaagatcattagatcagatgtaattgttgtttatgctaaaataatattttctgttgcgatgaactgattatttcttatcatctcgctaagatttaaagttgccctaatttttttcccattgcaacgcatgggcatccaactagtcaatagaaatatttctaattcgtgagtgcttaggaacataacaatatttttatatactgttagtcttttacattgtcagcttctatggcctgaaagggagagatagagagtgtgagtgagagagagattgagagagaggtagggagagagttacatgtgatctatcattttttttttcaaaatgatcagtttgcaaagtttgtcaaatgcgtgcaattgggtaatgttttagagttgaagcttgttactatggtttagatctcatttcctatgtcaccttgatgtttatatggcacatggctatatgaggtccacatttgctggaagacattcccttgcttcagatgatacatacaaatacttcctaagttagcattagagatattggattgcatgttcaatggaagagataagtatgatctcttaggcaatataagattatttagagactgtgtctaccataaactcaaaaaaaaatattctttttattactattctttccattttttcgtcgtcatgcaaccatgttttcatattatagatgataagagtcgctgttgagctgttgttacctatagcaatg

SEQ ID NO: 45924 - DNA, 3794 bp, Oryza sativa
gtccgctgctgtttatgttgattgtcagccctaagtgccttgtcataatgtaaatattatcgatataataaagatgtgtcttttatatcatgtttgtatggtgtaccccggcttttcctgggacggggattaatacactagcgttcgggaaaatgcgattttctcggtcgcgacagaaactacaatttagttgtactctctggagctcaaaagttgtgtgttgaagtgtgttaggtctcctactttcatagctgccaatgatggttggaatggcggttaacccctcagaaccatcattgggactccactggagccatccacgtgtaaggtggagatgaggtgggccaggatggattctctagcagcttataggtgggcccctatggcggtttggtcccaatgtaagtcagtttcgactgacttgtggtccgtccaatccttgtactcgcacatgattggtcagaggttcatttttgtcgcatggcagatatattttctccttaaatgacctgcatacatatatttaccaaaattagttgaagtggttagtagtaaactcctaccactatgttttgagagtatatttgatatcttttatgtaggtgttaacggttaaagtttgcacttaacgaccttcaatgacaccccaacacttatcttcaactcgtccctgagtaaagctcatgaacctactagagtaatgactttttgcttcatgacatgacataccaaatattccaagacatacttgaggctgtaaacattgatgtgtttaccatgccatctttaggcgattgaagaacgtaacagtcctcgaaccaagtcccctctactacttctgatgaattaccataggattttctttgatgtttataaaaacataacttttactgtacttctcaattgactccctcaaatcactcaaagtgtttattcctcaccaaggtattgatgttgcattttctcatcctacctttctaattaggcttatatggatctcagggtagggaataagaaatgacatacttgcatcagatatatagtaaagtcaaacagaggatacaacaagataactaatcatataaccatgaccaagcttgtgcacctatgtttatgggtagaaatgaaaagggtgaaaaatctacaataaaaaatgggatggtgactctttttatctctacctttttttcatcgtgctcgagtttgatcattttcttttgagcagagttttttattttagctcatctctcatttggcatggatcatgggaggagagaccacaaaatttttagagtctttattctgtggatacattgcttaaaacatagaagtttagcatatagatatggatggattagttttctttttggctaatcctccagtgtagagaaaaagcaatatttttggtgtctaagtgcacaagactttgctcatgagaatatgaaaagaatctaagatggtcacaaccatttggcaaaactcaaaatgatagcaagcaattgagtaccaactttccgataatgtacaaggtttcatcattaagatcgatatatggctttggtaggaagggaacatcaatgaagagtacgcaaagatatttattttctttttataaaatcccaaggattcattattaagagcaaggttcatatctgttgacggtcgttagcgatcagtttcgcacgtcaatattaccaaaataaagtagaactaagttttgcttgcaaagcatattatgtcaaaataagatatattccactagcactaggctttctaacctcttgcagagaataaacataaaatggaggcgattcgacagtaaaatggacgatcaatcaatcggacgctgtcgaggatcagacttagaggaagatgggccaagaattcagaaagaacacaaccaatgggacaaaactcgcaagtctgcagaaaccaacagaagaggaggccgccagccgaaattggactaattttggcccagcccatggttcggccgaacccccttgagctccgttggatgcaggggttggtttggacggtgtggattagctccgaatgatagttggagaggtatttaccgacgcattcgcaacaagtgcacaaccgtcattggagagctatataaggccttcacctcctcacctcttccacacatctcaagcaagaagcttcatacattctctcaagtttaatatagtttctagagtatagtggaatagaaatagaatataatcttcagtccgcagagtttttggaagagttcgggtaagactctagtagcttttccttcttttgtaagacttgtactatttatagaatattcttctcaatatattctcatttttgggggttatatgctgcggatacgtcgaggagggctactgatggagacagctcagtatgggtattcctctgcgcgtgtatataatcctaagttatttttttagggagggtactcctccgtatttagccccagttggatgggcttgacgggttgttgtaagaaactcggcaaccaagggtggtctctcgaaacaccaggagggcatcataagggggtattggctatacggttatatagtagataatattgactaaagtgtatgtatgtatattagaagtataggaaatgatccttttcttattctttccacttagcatagaattagtaagtatgagaatagtgaatgcttcagctttgtgtcaccctaccctttgaattgaactaaccccttcttagactttgattattacaagtaacatataagtattagcttggttctctctattataattttcccacgggattaaaaaaatacgatacccttggaatactctcgggtgaaatgctacaattatccatgtgcttgcggatgaactctgtaaccataatataccacgagtgtttctgcgtcattgctgggaattatatttctagcaatgtcgttaagaaataccaacagtgtttagattattggatatcattatttagggttatatgctgtggaagcgaggtgggctactgatgctaacagctcagtacggttattcctccgcacgtgtatatagtcctaagttaatttcctggagagggtactccttagtatttatcctcggttggatggtcatgacggattgtcgtaaggaactcggcaatcagggtggcttctccaaccacaaggagggcatcggaaagaggatattagctataatgatatgactaggatgtatgtataatatgtatgtatactattgtcacgccctgaagtttcccccttcttctttctttaaaaatttgttaaataaatcgtccaaagagatggttcaaattaacctagagctaattccctaattaataaatgcaattaataattggaaatggcattgtgggatttttcttgggttccacatgtcgcaattgattaacaagatttttagtggaattttcagagccttggaaataattttaaccaattaaaaatgagcaagtgcaatatttaatcccaggaaaaatcctttcttctttttcttttttcttttccttctttttctcttatgggccgccggcccatctcctcccgcgccctccccctcctaccgggctggccggttccctcttcccctccagaagtccacccggtctccccctcactatcaggtgctgacaggtggggtccacctatcagcccttcccctactccagcggttggagccaagctccacgccggcgcccccacctccccacgccgcccgctcctccgctccacctcgtgcccccactccacacacgcgcc

SEQ ID NO: 45925 - DNA, 742 bp, Oryza sativa
aaagatgcgccatataaaatgatctcatactgccactcccccccaaataaaatgaacaagtgtagatggtctgttcttattgaaaaaacccaaaaatcacaagtgtatatggtctgttcttatccattaaaaacccacatttaaacctaaacaagaacaagagtgaggccggcccaaaaatgcatccattttgcaaaacatcccgtactgccactccccccaaataaaatgaacaagtgtagatggtctgttcttattgaaaaaacccaaaaatcacaagtgaatatggtctgttcttatgcattaaaaacccacatttaaacctaaacaagaacaagagtgaggccggcccaaaaatgcatccattttgcaaaatatcccatacagccataaaaaacataccaaaacacatttcccccaaaataattcaaccatcacagcccacatcaattcatccatcccattggacccaaaatatcccaaaaatggtatgttcttgagcaatcatcactggccattcatccatcatagcccacaatatttcatcatcacagcccacatctaaacaattttcatcacatcccattctcccccaaattcacaaattcatccatcacagccatataaaaatgtatcagtagctaacacatatagaaatgcaccagtcatcacagccatataaaaatttaacagtagctaacacatatagaaatgcacaagtcatcacagccatataaaaatt

SEQ ID NO: 45926 - DNA, 602 bp, Oryza sativa
tatcactcgtcgacagtggcgcgccaggtagaggcatctggtactcaaggttctactactatgccatccagcttcgtcgacaacaacgtcaacaccagcttcagccaagcactccctacttcaacaatgctggtatggactcatgtcggcgaaattgtcttcccggtttacaccacgatgccgatctcaaccggtcctccaatgactggaaatgagaatgcagtggctacgaaccaaggcaactccatgtcgaaaaatccacccgtcgaaatggagaacggattaccgactacacccaagctcgggaaggattctgatgcggccaagccttatccttctgacataaatcacgggctgacaaagatgacttccgaagccaccaggtcttggtgtcctatccacaaaaccaagaaacacacccttcaagattgctgggtttttctcaacgtccgtgctgaaattcgcgcctgcaaagaccgtggaattctgtcacatcctgattttcgtttcaggatttataaattatttaataaattattaatagaatttatattaaatgtcctttaatttacaagtgaagtaaaatgtgggaaataaaattt

SEQ ID NO: 45927 - DNA, 861 bp, Oryza sativa
aaagagaagagaaaagctactagagccatacccgaactcttccgaaggcttccggacacctgatttcaacactatttctattccaccagctagatactactaaactaaacttgagagaaatgagagagctattgcttgaggtctgtgagtgaagtgagaaggcgaggggtttatatagcctcccaatgatggttgtgatggttggaatggtcggaatgatgtgcactagggttcccgaccttccgaaaggttctgataaacaacgatttgggcggagtcgcgacacaaatagatctggcttcttgaatgcgcacgctcttgagccccgcaattgcagcaccatgtctcctttggttatcacccgtgtcgaaacgcggatgacctcgccgagaaggctaatccctgtttgccaatcgaagaacacaaacaagaacgagatagaaaacaaccaaaattgcagatgaatgattaagctcacaagttggggtcttacaaaccgatctagcggcgaaactgttctcgacagaataatctaagcaaaacccaactctaaacgatgacggctactgaataaatgtgattagggacgtcctagggttgtcctagggcacacacccccttgggctaagcccaagacacaattacaaggcccaaaacccaaatcaaattcggactggatgagatacgtggcttgttttgaagattcccggtagctcgataggaattttgatgtgggaccacaaccatctgaaagtagactccataagctttccaacaagtactcatgggccccgaaattccttctagatcagcggctaggaccgttcgaaattgatggtgtcaggagaacaaggggatcca

SEQ ID NO: 45928 - DNA, 974 bp, Oryza sativa
gaccacatgcaacattaaaaaaatcaataaaaaattaaaatattttgttgtcaaaatataattatgtgtggtcttgttgtaaagatttaattgtaacgaatttagtggtgcaatcagatcgtagattagataaatagtttacgataaaaattcttttcaagaaataagaaaagaaaagattctttgcatgctgcagtggcaggaaaaaacaacgtctaatttttctccaacccgccggtggttcgggtgtgagcattttcacgaagaatgggttaaatcaatagtgggccccacctaacttttcgtccgatattttgtttcgctccggacgctcgatacgaagcgttttcgttcaaaacaagccacatatctcatccagtcccaatctgatttgggttttgggcctcgtaattgtgtcgtgggcttagcccaagtggtgtgcaccctaggcaacactaggacgtccctaatcacattattcagtagccgtcatcgtttagagttgggttttgcttagattattatgtgaagaatagtttcgccgctagttcggtttgtggaaccccaaattctagtgcttaatcattcatatgcaattgtgttgcaatctatcttgttcttgcttgtgttcttcgattcgcatgaagggattagccttctcggcaaggtcaactgggtttcggcacggttgataaccagaggagacatggtgctgcgattgcggggctcaagagcgtgcacgttcaacaagccggatcaatttgtgtcgtgactccacccaaatcgttgtttatcagaacctttcagaagatcgggaaccctagtgcacatcaagtggtatcagatttagttgaaggcatctgagaacaaccaaggtaatgaggtggaagagaagaaagactaagagcaaaaagatctatccatagctccatgccatgcttgaggaatgtttaattgaccaagcgcttacaatt

SEQ ID NO: 45929 - DNA, 574 bp, Oryza sativa
ctgtttggggatttgaattcgctgggtgtagtatagatctgacgatctagttgtgtctcctgcccctggagggcctcctgcccgccttatataaaatgggaggcaggattacaatataaaaaccttaaccaatacggtatcggtttcctaaatctactttacaatcttatcaaaccaggactttagcccattccataatatacagggaaacgtaatacccaagtcatgatctgttacatattccatagatataagttatctcctataactagtcggataaccatgccgtgtgggtatagggtacctgtaatctccacagcacgggagatgcctcggacgtcgttgaccaccgaggggcacgcgttgctcattttcaagcgactgcctcgtcgatggccggaggagaatacgggttctaccgacggaggagatgcgagagcatcgtagccacaccgccttgtcgttgccgatgccgccactgcgcactgcgcgagtttggatggagaagccgtgtcaatggttcggatggagaagaaaacgagtctcagcccgatagcctaacgggcctgatggc

SEQ ID NO: 45930 - DNA, 724 bp, Oryza sativa
atatggctgtttcttttttgcataaggacagccctctacacttgttcttaatttcttttgggggtgggggcagttgcaaatggtgataattgaagcataatttctaagcaaaactgaggccaaacttattatatgtcatgacttgtgttattttaggtaaaaaataatatatatgtgacttgtgtagtatgggctgttttgggtcattttgagggaaatgggatgtatattaatagaaatctgttattaaatgaagttactgaaattatggcatttcggagaatacgaagtgtcctagttgccaaatctggtttggtcgggttactgcctgcacggtaccgaccaagacaaattggtaaacagaacattttgttcaaatacaacatttctagaaatcttttatcgttaccaacatcctagattgttttcaaggtcatttctttatggaaccccattcccataaattcagtatccaaagatggttgctgtatctatgggaataagggttccataacgaaatgatctttgacgcaatctaggagtttgctgatgataatgttagggctcttggataggaagggttttggttgcctgtgtgttctatctgcatccgcctcgtcagcagatatgtagcatccatattccttagggctggagcagacgggatctcgacctcgacatccatatcccactagaacttgctaccgttgccactatctaatgt

SEQ ID NO: 45931 - DNA, 2204 bp, Oryza sativa
ggggtaatccgtccggtataaaaagtttggggtgagtgatatctggttttcaagttcaagggtaattcggttgacagtgatagttcagggggtaattcgtcggttgacagcgatagttcagggggtaattcgtactttttccataaataaataggcactttgttatatgattgtcattttgcgaaaacctcaaaaatcttaaatgatcataaattgaaatggagtatgtattgattattgatcagataaagtgatcgactcaattatgaggattcacatacgctgttcttgtgcattactgtagttcatgagcactgataatcatgagccttgatccttaagtaaatagctccatatagttcagttgggttttttgatgtataatctataccatattaaaaagactctaagcgtggtgtccgttcccaccgaagcggcgaagccgctcaccaataaaagcgcctccccttctctctcgctctctctcctcttcgtctttctcgcctcaccgtgcgcgcaagctctctctctctctctcgcctcatcgaagcgccgccgcccctcccttgctgccgcgccggccaccgccgccgccgctgccgcgccggccctcccgcgcagctgctacctcgccgcgcaagctctatctctctctctctctcgcctcatcgtagcgtcgccgcccctcccttgctgccgcgccagccatcccccgccgctgctgccgcgcggccctcccgcgctgcttcttccgcgcgtcgcgccggcctccgccgccgccgccgcccctctcccgcgaagaatccgtgccgcccaaagccgctccgccgccctctgcgtgaaggagagcctcccagggcgccatcgccgccgccccaaggcgccggttgtctctccgtctctctcgtgcaagccgctgccgctgcccgactcccgcgaagaagcagagccgccccaaggcgccgtcgccgccgccccaagccgccggttctctctctgtttctactgtgcaagcaaatcaactaattattcactaatcactaactgattaatattgtggaggggcatttatgagtatatcacaagctaactccatgtcccacaatgatcagagaaatatgtgcagccagctactatatgtggtcatgcatagtacacatttgtttgtatcctttgacaatcagatagatgtggtcatacatagtacacatttgcttgtatcatttgatcagatagctgaatgagacaagctagcctttactatcatttgacctgtcatctgttgatcaaatgaaaatttgaaaaacaaaatgatttaaattgatgtttgttcttcccatttttaaggatatacagtcatttaacatgagctcatttttactgtttttaaggatatacagtcatttaacatgagctcatttttactgttgactgcccaatagaatataattgttgggtgtggactgaaagaatgttggagttggacaaacataataagaattgttagctgcaacttgtggctaatgtaatactgcaggccaggctacttctttcttatatgctaacatattactttcacctttcagtaatgacacgtcctcctaccaaacactcttgtaaaggaaaacaaggtgctttgcgccctccaaattatttataacagtacatttgcatgagtattaaatatttgtaacaatacattttatatgagtattgaatacatccccacgctcatggtggtggtaacgaattgttttggcagtggagaataaatccaacagaacaaaaggaagtacctttacatcggttcacgttttggaccagggagaaagctcaaatggtatcgacctaaaactataagcattcttcttttacataacacagtacacaaataaaattattcaatgaatctattttagcacgggaacattctcgtcacgtggctcgctatgctagccttacactggaacaaaggcaagcaaagttagatcgtcaaagagcaaagcgacaaaatgcaacaccaagtgagaggcaaaaagaaagtgcccgccgaaaagctcgtaggcaacgtttgacacctgatgagaggcaagagttgaatgcccgtagaagatcagctaggcaagtttaccgcctaatgagaggcaagcattgctagatcgacggaatacaagcgatgcagctagacgggatacaccatgtct

SEQ ID NO: 45932 - DNA, 1382 bp, Oryza sativa
tctaagacagtcagaggagccgtcgacttcatagagaagatggtctccaacatggactggagcaaagaacgactccagacccgtaagtgaggaatgcacaccataaaggagaccaagatgctcgctgcaaaactggacctcctcatgaaacatttggacgaccacgagaagaagccccagggcactgttaaggcattggactcacatgtaacgtgcgaggtctgcggcagcatgggtcattgtggaaatgactatccggaaacacgtgaagaagcgatgtacatggataacaacacaacgggttccgtccacagggaggtcaggggtgaaaccaaccccacccatatttccaaggagccaacaataacggtaacctttctaaccaaccttccttgaaggatctcgtctttgcacaagccaaaacaacttacgcacttagcaaaaagctagctgctaatgacaagatactagagaatataaacgtcaagctagatggctttggttctgcatttcagaacaagcttagttttaaaagatgattgaaacccagctggcgtagcttgctgcattaattcccgctaatgaataagggagggttccggagcaaccggaaccttatgttgaaaatgctaaggcgattacaacgaggggaggtaagtccactcgcaatctgccatatcctaaccctgcagggaccggcaacaacagcaacagggaagcaccatctagtgacacaactgaagaagaggttcagtcaaagaagaccgtgctgcaggagtattgtgacacgagaccgctgccactcccccagagatacaagaagccgtcggtggacgagtagttcgctcgttttgttgaggtgatccaaaagattcacattcacgtgccgctgctagacgtcatgcaagtgcccacttatgcacgatacctcaaggatatcctcaacaaaggccactaccgacgactaaagtggtcaaactaatggaggaatgcagcaatgccatactccacaagctcccggaaaagaagaagggtccagggtatctcatgatcacctgctcgatcgagacacagaaattcaaccaggccctctacgaccttggagcaagcgtgagcatcatgcccaaggatgtcttcgacaaactcaactttacagtgttggcaccaacaccaatgcgtctgcagctgggcgattcattggtccattacccaactggcatagtggaatacgtaccggtcaagatacgggatttcttcatcccggttgacttcgtggtgttggatatggaatctgacaaggagacgccaatcatcttggggcgtccgttcgttagtaccgcagatactaacattgatgtgggaacgggaagcatccgtttttg

SEQ ID NO: 45933 - DNA, 556 bp, Oryza sativa
ccgtcgctcgggaagaccgccgtcgtcatcgccaagtcgccgccgtcctcgtccgccccttcgcagccgtcggaacccgccggagcttcgtcgccgtcgacaacccgaaggtagccgccgcttccttctcgtcgccgtcgtcgtccattccttctccgccgccgttttggtcaccggtgtgttcgccgtgttgtcctctacgtgctggtgccctccgttggtgccgtggtgccgccgttcgccggtgagtgtgcgccgcccgagccgtcttctccgccgagccgccgccgccgtcggtgacgtcattgctggcgtcatcagggccgttcgccgtgaaccaccgtggacccgatcgatctcggccgtccgatttggatcggatcaatctcgaccgtccgttcgtgtgaaccgccgcccatgcgccggtccaccaaaccctagcccgctgacgcaataaatccccttttccttttcaaaaatattcattattgcgtcataattcatttaaaccgatttaagtgttttaatccgatttaatctttaaaattcataacta

SEQ ID NO: 45934 - DNA, 1442 bp, Oryza sativa
cagcaaacgataaggattatacagaggcatataacttaaccatttgtagcaaggaattggaaacttataggatcaagcagaatgccattgattaaataatgtaaactactgtacgttcatgaagttctcttaactgttttgcaataggctcatgatcattaaatcaagtgcaattcaggctgaaattcaagaaatccctgcaaactaaaacttttgaaacggtgaagtgaacgaaatctaaaaagcattatactcatctaaattacagcactgccattacctaaactacagcattacacctactacaactactacatctgaacatgaaaagggggagcattacacctactacagccactacatctgaacatgaaaaggggtttttgagttgtacctcgaatgagctatagaacaagatgacagtgagcctaggaggcagctaatgcagtgtgccaagcaaataatatatatagttgtagccgaaaatatttgaatatttgaagttttgaactccacccgccaagaatccaagcccgccatcctcttctcccagattgtgaccaaataataggtcgattttgtgctttccccatgaagagagaggtctactgccctaacccgtgctcctgtcataccagccagcagtactccttggtagtatcatctatcaagtcttaagagagggagagacatgctgtgtagaccactcttctccaatcagacctgctacatttccaatcaaaggagtgtgtgtggttagagagggggattgaatgcagcgaatcagacacctgctagatttccaatcaacggagggtgtggggtaaattgttagagatgggggattgaatggagcgtgcactggaatggatgagactgatcttaccttggattcagagagtgatgtagtactccatagaggacttgtacgctcatggatcctgttgcaggcaagttctaccaatgtgacttgtgaggtccttcacagtacgacgacatggcctctggattcgattggtgcacgagtgctccgctgcgacgtggtccccacaatccgccgccgctccgagccctgcgcctccacgtcgcccttgtccgccactgctccgccccactggcagccgccgacagcaaaggaagcgacggtcggaggacgggaggaggggcggagggaacgacgtcggctcggtagggggagcgcgctgctggccccgctgtcgcccttgctcgaccgggccatcgcctccgagatctccctcatccaaatcctgcaagcccacggaagagggaggggcgtcggctgggaaacgcgtgctggccggggaaggaggaagggggcgccggccggaggaagtggaacggcggcgctggccgggggaggaggagaagaagcgctgaggcgctggcggccgggggataaggagaagatgcgctggggctgg

SEQ ID NO: 45935 - DNA, 1084 bp, Oryza sativa
gtgtcctagcacttctatgctggcatcacgagggtccactgtttggcgcttaagatttttgaactcaggtgtagcttctgtttctgtggaagatcttaggtgtttatttggcgtcgatactggagttgataggtctagatattgttcaatgtggtccaataatggttgcattcggtggttataacagttatccatggcaataaacaaggttgagagcggttacttagccattgcactggtttatacacatacttactattgcctcgtgcgctcgggtacgcgtctcattgagcacgtatttataggggagaggaggggggtccgggtgtggttactttggcctgcttttgtcgagcacgtgggcaagagagaggagaggggaaaatggagaggagggctggcgggggcttacttcgccggcggtcggggccgaaggtggcggagatcgaggtgcagcggcgagctattccaccggtgcaagtgacgggtggcgctgccgttggcgagggcgctggagcagttgtgcctaagcgttcccgtcgaggggaaaccttcctggcaggggtggccattgttttgcgctgggtgtgctccagtatgcgatttgtcggggcaaccatcttcaccatcttagcttggatggttcgcccgctggtcttgctctggaaatggtggcgagatctgatcgatgatggccactctgattacttatgcgaggcagtttgtctcttcattgtgttggcaccgattgtttttgtttctactcttaaagcgctactggagtagataatttatgaaatggttgccaagtcttggcatgtatcccttatgtatcaacttgcataatctctactttaatgctttctacacatgtgcctgatttgtgttgcctgtgaatgtgggatttctagttttttctcaacattcttaggcgcttttaggtttggcatcctctttattcggcgggataatccattcttactcgataaatgatttaatgttagaagggcacttcggcgtaagggtgattatggacaaccatttctgaaccactaagtcatgggggcaagagattgcattactc

SEQ ID NO: 45936 - DNA, 635 bp, Oryza sativa
ttaaggcctaacctcgtgaggaggttagagaagagcttagagaagagctcactgccgagctgttaggtatggaggctcggatggaggcacgcatcagggataggtcgaccgatggcactcccggtcccgtagtacatgtgagccccacgcagaggcgtagcagctgcgcatcaactgaggctccggcagaacagcctgaaggccccgccgcggtggaccacataacggtaataacaacttaataacgcatacattatattagcaccacaatacattgcaacatgtactaaggacactaacgaatcaatcgcaggaacccacatcgtgtaccctagtcattagggtgacaccaggatttgcaattcctgccgcagagggtcaagcattcaagcctaccccgaagacccgagtgcatggggcgcagctgcaagccggcaatgccaaagttcaggtggacttagtgaagcccgattgggttggctacactatcccacacccacctaatgacgagattctgacccttggggctgcacgtgggacctttattcaatggcccaagcacagcattgagatcaatataactccaaggccagcgccaagttctcgtccgccgccgacgcgtccccatcaaactg

SEQ ID NO: 45937 - DNA, 813 bp, Oryza sativa
taaaattcatatctaattcatccaagctccgtttaagtccattcaagtctcagtaaatttataaaaatccctagaatccattaaaaatggttttgtttcctgttttagtagtcttatagtgtgttttgcttgtgtgctttgtttgtcgcgtagatttcggccgtttcgtcgatccgcggtttctcgaagatgttgctgtggtctcatcagtgcgagagcaaggcaagtcatgcattacatttgatcatattgtacccaatttacaaatatcccgcatttctattaaatgtcgcattcttttacaatgtcatgtgggatgggtcctattactcagccatttattgtttaccctatgccattgataacttgggtatcaaaatgattagatgttggtttaggaaatgcttagccatgcctagttcaactagtacacaaatggggatcacattattacatagactttgactattagcatagctttggattggtgccaccgtaatggtgttagttaattaaaatacactgaatggtggactgtgggtgcatggttttgctggtcgcacccatggcaattaaggaccggttcacgggaaaccctgggagacttaccgtgcttaccacaagcgggagtgggtaactgctcggtctgaagtatagctcgactctttcctaggcaccggtggcgagggtgggcgtgatggagttgggtcggccggggtgtccggttgtccagctaccggattcaccgcggcgcaagaggggaccacccactacccgttgggggtgggggtgaaaccttagcatggtgtggat

SEQ ID NO: 45938 - DNA, 533 bp, Oryza sativa
tttaaaaacccgcacttatatctcacatataaggctgcgttcggccctgggtgattgtgagattgtttgttttgtcttccacgcctacgcttaccaaactactaaacggtgcgttttttgaaaaaaatttctagaaaagttgcttaaaaaataatattaatctatttttaaatttaaaatagttaatactcaattaatcatgcgctaatacctcaccttgttttgcgtatctttccaatcttctctatctcctcctcaaacacagcctaagtgtcggtttattaggaaaaccgtcatttatattattagtgttggttttttaataaaccggcacctatataatattataggtgtcatttttttacttttagacccattgaagggtcgggaggaccgaaaaagtctcatactatgtgccaagtttagggcgtttcttatcaggagtttcgtagtagtgtgtgaatttgagcccaacatggaaaaaaagaataaaatgcactagtggcccttaaacttgtcataaggtttcactt

SEQ ID NO: 45939 - DNA, 1641 bp, Oryza sativa
tattcaatcttgaccagatttaaatatttagaattaatgcttgtttagtatatttgctttagattgatattttgtataaggttgtatcggagctatagccaatacattatcttttcttacctaaacggtcttatcggctatgatacaaatacttgtagtttgcaatttattcaatcttggatacaagcagtttataaaatctcggtttagttcaatctatcccaattgcttgaaaatcttgaattatagattacatattgttagtttctgttgctgatggaacatgtgtaaggatctttcatatttatcttttcattccatactttatagccgattcagctcagttgcatcggctcggctaggtcatgacgatacgtcattggcttattggccaattgactatcgtttactagttcaaacatattgttattcttgttggttgcaggattgaaccaactgacatgttctgaatccgaagcgatatttggacctacactggagctaagcagaacttctaggccgctatgttttcgcataaacagactaacacactaccgtgcacaatctagtcacatcctgttttcttcaaaaacaggtagtctcttctcttcctaaatatattctgcgtaccattcaaaggttgacgctaatattataaaataagttcgttgaaggactaaaatgccaaaaactacatcctacagggaggtttggatccatgatcctactctattccctccgtcctaaaaaactcaacttctagagtttaaattttgttccacacaaaaccaacttctatcatcctacttaccctcagcacgtaaaacgagaagttttatcccttcgataccctttacctacctatcacctttactactttttccaatgattaaggacattttaatcattcttcatcttcacaaatcctaccttggaatgctaggaatagtggtaggaatagtttttttttgacagagagagtagcttccatgtatatatcattgatgtgattaatgattagccagccggccacgtcgtcatgcatgcgacctccgattcacttcaattgcttagtggaattgaagtgcaccgaccgaaacgtccaattgacaagaaaataaataaaattcaataaacaacaacgatacttttttgttagaaaaataaaacatcaccaactgctaaaggatacggcaatttattgtcgaccatacaacagtgactaactgcaaccttatttgattataaactctcgtatttctatttttaatgcgacagcaggttactgtagccatcttaaaaaccacatggccgcgttcaaaataaattagatatatatatcactggactcaaattctagccgaaaatccatggctggccggtggaaatagatcaaaccggggtgctatattgttgggtcattcaacactttgtggacctaattgactaactaattgttccggaaaatagctgcaatatatcttaagtctttgttcagtattaacattgataatcatcttctttggtgtaacaacaaatgtgtttatacagagttggttctttaaaatagccgcttgcgtacacttttccctttacaatggtgaccggcgctgtttttttctccaacaaaagttggataaa

SEQ ID NO: 45940 - DNA, 1057 bp, Oryza sativa
atatgtataggtgtttccactaatttcattgtggcctagatcacagattaattatgccctttgtgtggacttgattatatttcttttctggaaggagaacacacgtacacatgatggacctaacttcacatcatcgatctcatcttttcttctttattataaagggcactaaattgcatataaagtctcacttcgcctaaccaggtttgacgactaataactgaagtaccatcagtttaagtactcgatcgatcgcccaggtctaactttaaattttaattaaataattaatgggatgtctaggtgacggccggaattctccaattagtctcgtcatacttcttttcgatccaatatattactggaagagccaggagggagatggaaccaaacatgtctagctaaaatgtaacccaacggataaggaggttcagacctatttggaagagcatagaattgctatttggtagctagttaagaatctgaaaaactgagttttccagatcctggctgctaatttatcttatggattctgtagctacatatttcaaaaagttgggtgtgaatatggacttttgatagaagagttcaagattttagtagcgcaaatcacttatgtagtgaaatctgtaaactaccgctagatttaaaaataaacatctaatatttatccgtgctgccaagagtactcttgaataaatctcggggttcccaactccccctctcgttttccgcgcgcatgcttttggaactgctaaacagtacaatttttgtaaaaagtttctatacgaaagttgctttaaaaaatcatattaaaacatttttgaaaaaaatagctaatacttaattaatgacgcgctaatggatcgttctgttttccgtgcgggaggaattagttcccatcctcctgaaacgaacacaaccttagcctctcagacaacaacccaatttgaaattcgctcatataaagatttgaactgagaattttagggtggctgtaaccgctgctacatgtatatatacgaagaggactagcctgttcaacagccatgccacc

SEQ ID NO: 45941 - DNA, 661 bp, Oryza sativa
ttttttaatttaaacaaaacacatgaaattttatgatttttttaaataaaaatatatttttaaaaaatgtgatatattttttaaatgtttaagtttttatacaaaacacatgacatttttatgaaaaatcaattcgggctggtgggatttgaaccttgtacaatggaatcaaaagagctcaaccaccaggctatgttcacttcagctacttagagcatcaccaacagtctacttatctgatttccaaaactgattttgagagattttagtaaaaaaaaaacagcttcaacaaatctcctactcttttacccgagctttggagttcccttctcccgatttctagctccgtttatatgcggacgcgaaactcgctcccaatctcgcactcccgcctctcccttcccgtttccacgcgtggagaaagcgatctttctgcgcgtgaaagaaaaaaaaaggaatttcctatatatgtagtttaacagaagggtccactttcaagttttggggatcgaatttaggctatctgttggagggaggagttttttttacttcctattttcaatttaggaaacccacaaacaattttttggggaaagattatacgtaagtttgtggtgatgctcttagggcactcacaatgcaagccatggggctcgtaccc

SEQ ID NO: 45942 - DNA, 965 bp, Oryza sativa
gtttatctgaaccctcgtaccattcgcaacaacgtaatgttagcatcaatagtttcatggactacggccttgtttgataacaaaagtcttctattagtttagttttattgtttcttggttattaagttagttttttggtttatatgatttataagctggtggatttaaagctttaagtaaagatagagtcccatagctatctcacgtaaggaaaaaaaattctccaacttaatttttgttattgtgatcatgcgggaggaggaatataaagtgatttccgttagtagtgtatagtatgggcctacgttttggttttaataagtcctactcaatcccttggaaggatcactttttcacatatcaaaatccgtttatgattctcaaatttaaatttttggggatggaatttacctagtttgttggtgatgctctaagttgttgagaggcatatatatatactaggtgaaaccccgcgcattgctgcgggaatttagtatgataacaataaaaaaataacatgtaagatagctagataacatcagattaagtaaattaatgcggtttatgataatttaaatttaaataaaatgtagaatggtgattcaaaaataaaaagtaaggtggtatgactttatggaagaagaaaagtagggagatagtttggaccgtagattaataatctaaaggctaaaaacaattgatgtgatatgacttaattaagggaaaaaaaggagaaagataatttagaccatagattaatcatttaagcactaagtgaagatgaactatataagtatataggatatcataaacataataaggatttacattgaaacattatgtgaattatactggatgataatttaatttaatatgtttgtatttgaaaagctcttaaattataaaaactataaaaaactataaagatatagcatgtttgcatgatgtttaaatgtgatgattgt

SEQ ID NO: 45943 - DNA, 542 bp, Oryza sativa
tttagtgcttcatatatgtgtccaaatatttaatgtgataaaaaaagtcagaagtttgaaacatttaatgtgataaaaaaagtcagaagtttgaagaaaaataaaggcaaccaaattgtccttaattaatgcaaggatgatcaacgacgacgttacgtcgtagcttttcatgaatttgtttgcttggactgcaaacgaaaaaatgttcaacactttttcggtttgagttgacagcagttgacaaggatgtataatttggtgcatagcttcctggtcctattacaaccgaattttgccaactttttcatcatctctttttttctttcacattaattcatacaaaaagtcagtgaaaatttggtaccacatgtataatgcttattatattatatgcggcgctgtcacacaacgtacaacgtacgcagacaggctacgacgggtactacgtaaaaaagacaagaacacgcgatcgatgacacacactggttcctgcatactatgcacacagtacagtatggtggaaggctatgagcccacttgct

SEQ ID NO: 45944 - DNA, 753 bp, Oryza sativa
acaacaatatactgggatcggtgaaaataggaaaatatactgaggtaaacttttcacatcaagcatcattttggtatgcatgagcctgttctaaattacactggtttttgtagtggtttcatgatgtctccgatcgtgatatctctaatacatgtgaggatgcacttaaccttctttgcagcagcttcggatgtcaagtaagatcatcactatctaacataccttagacaataggagtacagtattctactagttaattatcacagtttatatatagcagcaacaataggcctttgcttttggttgtgcaatttcttctattaatggcaacatgttttattgtgtggttttctgttttttccttactgatgtgacattccaatgtgtacagatatttctatgtgcatcaattgcattatcgataatggatatgttgaaataactgtgaaatataaatgatatgtttattttttaaattctgtaaatcataattggtttataattgattactgagctgctttatctggagcttttaggaagctaatgagttgtatgagttacgcttaaactttttccagctacgaaatgtttgaatgagagccaattataatgatgtgttcctgtaaaaattttctgtcatgtaagttgataagattttatttatgtgtttaaagatagaagaaataatactgccagaacttgaggagatgcgtactgcccatgttgtctcaattggcacagaatcattctgtg

SEQ ID NO: 45945 - DNA, 560 bp, Oryza sativa
tataggaaatttgactagaattttatgagaattgctagcttcacaagcgtgatccttttgcatctcatgcttccactactagggaatccatcgttattagtcccgatttacaacccctttaacaccaatcgagactaaagattgtagcgccatgtggcaaatgttttttctttttattttcattattttttactacttgtgtattgattttgagccatgccagttgctcccaacatccctaaatccccacatcaaattgacatccacaaattcacaaaaacatactcaacaacaaaatcatccacaaaatcgaatgaacatactcaacaacgaaatcatctacaaattcaaaaaacatctaaaaaaagtctacaaaccacaggtctacatgcaacggcatcacaacaaaatcatccattattcattcatagatcgaatgcagctcgatgccagcgctgtccagcccaccaccaccgccaccaccggcggcggaaaaaagcgccctcccgctcttgcgcctccgcgccccagctgccacgccaaggcaaaagccgatgccg

SEQ ID NO: 45946 - DNA, 699 bp, Oryza sativa
aaaaaaccatttacgcccttgctcatttgatcatacttctcaatggtttttgtttcaatataatcaatatcgacaagtgtttgatagtgataatctcataactattacatgagtaaaaagttctaattccaacaaaaattttcaccttcatcactcgtcgcacgcacgcctgctggtggatcccgctaccttcaaccgttctgccgcccgtcgcccgtagttctctcgtttggatcgaagaagagaagcaccagccgtcctcctcgttcggagcgagaaggagcggcatcatcgccaatcgtcctccttgttcaaattgaggagaagcaatgtcattgccatcgtcgtctccttgcccttactgtatgccggataatgccgtcgctgccgatgcatatagcttgtggatgggaggttgtgccgctgcagccaacatcctcgccgacccgccgctactagttccagagcttgcacgcctcgactctatcgaatccaccgcccgggcctcctcatcaccggatccgccctgccactcctccttctcatcgcctgcgcaacaagcctccatttgatccacctcaccactgctgctccttgtcactgagccaccaccattgctccttctccttgtcgcacgcaccaagccttcatctgatctgcctcgctgctgctccttctttcctcgagccgccgccacct

SEQ ID NO: 45947 - DNA, 1214 bp, Oryza sativa
tattacctgacctgaattgatggtctgcacagatcctacatttgcacatcgtgctccatgtggctggccgcaggacaaggtggagtccgccagtgatggaggttgtttgctatttttcatttgctcgtcgtctctatgacatgaacaataatgtttttgctttttttttgcgcttgctagatgatggatggctgctactgcgcaacgtcgagcccatctctataccatgctgctacatcctcccttgattccatcgtcgcgtaccgttcgccactcggttgctctctccactaccagtcacaagacacagaccagcctctccatccttatagcaagatccagcaaagccaccaggatgtagtttcacgatggatttttggatgaatctttttttttcttttctagtttgattcacctgtgagtaatcttatcacttgtgtgtgattgagcctgtaatttttttcattcgtacggccattttgtgatacagactaacaatactcttagtatcagtttttactttttatactgtatattgaacacaccagtaaacatattactacatagtggatacgagatcatgggctatatagagagagggtggtaattgttttactcgcagaccacgaagcctcagtttttacccttatactgtgtattaaacacattagtaaacatattactacatggtggctacgagatcatgggctatattgagaggacggtggtaattattttagtcgcagaccacgaaatctaaataatatttataacactggtattcttttacgatcatctaggaatgatgcacgtacaatgtgagggcattcgtgcaagtaaatttgttaggtattcttttacgaccatctaggaatgatgcacatacaatgtgagggcatttgtgcaagtaaatttgttacttttgaaaggggcattcatgcgagtaaattcgttacttttgaaaaactccacaaagtaaattcgttacttttaaaacgttgtgaaacattagaaaaatgaacttggaaagaaaaactaaacggatggttaatattttaccgggtcctttgatgaagcacagataagatggaaaagagaaaaaagaaacacagaaggtggggtggtaaaaaaaacgaaaaaacgaacgagggagcattgtgcggcgctcgaactaggattagcgataccggacatttagtataataactatttga

SEQ ID NO: 45948 - DNA, 624 bp, Oryza sativa
catggcccccatcgaatctactacgggaggaaccctccttgttagaaagctcgtcaatttgtctccaacgtaaattacctgctttcctttaccctctaccccacactccttgtcaactttctccctcatgatgcttacacaagctgtaaatactagtatgcttattaagatttatgcatgtttaaacatattgtgtttgttgagtagcatgcacatcaagataatcaaaacaacataacatatctcaactatcaactcattatgtacaactcatcaaacttgtgtcagcatgattcttttgtcagtttactaccatgattaatctttttttttcatctaaattatgctttaatacttggcatctttcttcccagattgatattttttggcccataatcttttgctcctaaggttgtccctagtattgctcatcaattgcatgactgctgaatttgggtggccttatcttcattatgcagaactttgaaagtttaatttttagtagtcaatcaaaatttttccaagcgacttaccgcatgaactaaccaaaaacctgtataaaactagccaaaagcaacaagccaagtagccaacaatatagacttatgggactacctaaaaaac

SEQ ID NO: 45949 - DNA, 738 bp, Oryza sativa
cagtacacaattacacatgcatatagtacaaagttacaagtagtaattgagattttcaatacaggaggcgatgcaagttgcaactccactctctgttgtgtttgaattgactactggtagtggtactcttatacggaagcaaaacctgaaccgaactgcagtggcatcgcatcgcgcaacgcacagcacagcacagcacatgaataaagattaccagtgatgttctccagtactcgatccgttctataaaagattacaagtgatgtgacacatcctagtgttataaatttgaacggatataaatttgttgtactaaaatatgtcacatacagttttagattttttttcagagagaatacacaatatattattcagtactactagtactacctccttgcaaacttgttggttagttcaatattgagctaaccaatattgagttaacaaatgtcaaaaaaaatataaagggagtatatgcctagctagctagtagcagtataagttactcccctcatttctataaggcataactattttttttcatgttacataatataaggcatgcatgcatgcatataattaattagaacctcttctctattaaatatacttttttaaatcctcaactctcaagatctctaattctattggatacatgcattatatttattagggtgattcaaactagaagatgataataattatttcttggtatttaggttaagggtggttgcgtat

SEQ ID NO: 45950 - DNA, 3965 bp, Oryza sativa
aactttgtttttaacacctttttcatatgagttcatctagtgctataaaaatcgatttgaaatttaaaaagccacgtataaaaaatcaatttttacatgcggacgcttaagtagcccgtatgaaaaaatggtccctcttccgcagttcaaaaaatttcacacttaaccctatcttatcctctcctctcactttatcctctttgctccatgtttccaacccctctccctcgtattccgtgggcacgcttttcaaactgctaaacggtgcattttttgtaaaaaaaaattcaaattaatccatttttggaaaaaaaattgttaatacttaattaatcacacgctaatggaccgctccgtttttcgtgcggaggagatgggttccaaaccagggcatgcgaacacagcctcagtcttctctctcactctatctcttctctctctcagaccgagagtggcgcagggcgtggcggcggcactggccaagtgcagagggagcggccgcgggctctggtgccaagggcggcggaggcatggatccggcggtggcggcgcaacctcgcgtcgatccggcgtcggcggcccgtctcggcgtggatccgatggcggcgcgacgacggcgtcgatctggcgtcggcggcccgtccccgcgcggatccgccgcctctacctccctctgttgtcgccgtcgatttccccgccctcctctgcggcgcgacgacggcttcgatccgccggcggcggcgcgacctcgtgtcgatccggcgtctgcggcccgtccctgcgcggatccggcgctgacgacgatggacgacggtgggagcggcggattggccgacgacggcgacgaatccggcggcgcggaggccggctggattgggcagcagtgggctagggttcagcttttttctttttttttatttcgctgaattcattttcgcatgcggctagtataggggaccgcatgcaaaaattggatttttacatgcggttgctctagccgtatgcaaagatgacgatctttgcaggcctagccgtatgcgaaaatcgttgccatccgtatgcaaagacgtattctgtagtagtgtctggacatagatttgtacagattaaaacacacagttgtacatattaattacatccagttagactgaaggacctttcaagaagccatataagtttgtacagattaaaacacacagttgtacatgtacggatgtacccctctcgatcaaaccggggttattaggtaacagcttattgctagattaattacggatcaccgcccatacatggaacatgctagatatgaaggtgacacgcacaacacaatatactatgattattccattgcagatttgatcatgtcactgtaattggatgttaggttgagcaagatctcaggattaggacagtttagcacttttgtgcctttcgtcgtaatgtcgtggttccatgtctctggtgacactatagtaattaacaagtacattcccatgcaatgcaaaaggccaggcaaagataagaactatagctatctagcttggtaaagtgcttacctcgagaaatctcgtgttaggtacttgcatgctaggagttaggcctaggttagttggttttcctacccacccattttttaactggcatatgtgcatcaaaacgtactaaggctgtgtttgttggtggggttaggaaccatctctcacgtacagaaaaccaagcggtccattagcacgtgattaattaagtattacttttttaaaaaaaaataaatcaatatgattttttaagcaacttatgtattgaaactttttaaaaaaacataccgtttagtaatttgaaaagcgtacgcgcgaaaaacgagagggggagttgggaataggctatagatatttatatataaccatcgtacgaataggctatagattgcctataaatgatttgaattagtagttggctatactattaaacttgctctaatggagtagcattaatctctggaagattaattacatgaccaataattaggaagattatgtgattgctacaattaacttcagaatgaggttattcctaacccaatgactagaatgatatccatagcattaaataagctgccatctaagataaaaaaatgatatgacaagtaaataaatgaggaaagagaaggaaaccatgtcttgcatgggatttggtttctacacaacatccaagtcatcatgtgaaataagaaatagtggtatttacattggaagagtagtatatagtactagtttcttgattatgagaagtttatgaaaattatatatagtgttttaggttgggaatggcttgagggaggctgtggtgttgttggtctcggcgtatttttttctcccataataattaaaagagaatggagggatattcgacatagaaatcacaataatggccacctgctgtatagttccacgaaatacggcgaattgtgtattgtacaccactcaaattgaattaactaattaccggaccgcacgggtccagcaacctacagcacggtgcacgtaccattcaatttgcagcacgttcgcgcacacaccgttatctccatgtgatgtgcgacgacgaaccagaggagttgccgtacgtacgtgtcacggcgccacacacccctcgtcctccctgcaacctaaaccgttccacgcacatccgcctcggtcgatgctgcctcctcctgcttgcgttcggccctcgtattccggctcgacgaaccaggaccaatataaaaagctatggcctcaagaaaaagtaaatgtcaattaggataaaaccataatgtgatattctttacctaatatgaagccgagcattgctaatttgctatacgttcgataaaacttcatatgatcagagtacgatatttcgtagcctctggtgtgtgctgcaaatatggggcataacatgtttccacccaatcaaaaatcatggatggtaggatcgtattaaaatcctacaaatatcatcgtacgcaaagcaatttccatatgaagccatagccacattatcttttctttatccatgtcaatcggttacttttgtattaaatcctcactttttttttctattcacacatgcaagtctaataaattaataatccacaccctgaaaatcatatataagaacccatcccttccctttcattctacctttccctcatttctccctgtaactcctctctcatgtcccacggcatcaccacctctcccctctctagtggcgattcttttcccctctctttcatcaacaaggccaccaaggagactagatcggagacagtgagggtggatatcaagacggcagggtgtggattgagggggcaaaggtgtaaatcggggtgccacagcgtggatcagggtggtgacgatggatctgcccaatgtggtggaaggagcggtcgaatagtaggtggcagtgtagatagaggcagcgatggcaggcagagcttcgaggcgacgtcttcccgcaatggagcatctcaccatcgtcctcaatgaaccgtcaggtaggccctttttgacctcatttgtgatggcgacgcgtagaagtttgtttgcagcaacggcacgggccgacggcatggggcgaggccgcttcctaacgcgtttcctcgcatgattctcgcctaccagcagaggcgtggctatgctgaggacacatggacctcctgcatggttcgcacacctctgtagggtgcagtttctttatagttggcgtgaatatttgtctcggatggggtaagacaacatgccagctaggaacgtttggcattgccttaggccatgtacaatgcatggtctccgacttgtggttccatcctccaactaggctaagatgccacagtggaggttcgagagtgtcttcatttgttctagaataacctatagatgtcacagtggtttgaggagaaaagcagtggttctgggagaaaa

SEQ ID NO: 45951 - DNA, 1845 bp, Oryza sativa
cacaaaagaaaatcccaaagatttctcagatctaagcactcccccagtgagtgaactatcactaccaccactagctcaccgctcactctccaagaaccgggtcaaacaagcaaaggcacccggaaaatcccaaacccccaaaacctcaaaaccagagagatccaagaactcctcaaccgaggcaaaagaaaacacgaaaccctccgtcgatctcaggataatccggggggttttaagaggggttttagctttgaggttaagggcgggaaagggagaggagggggatttgttggctgtgggaggagaaaggggtaagacgaggtggaggatatatttatggcacaggtggataccactaccactgtagtaccactgttcttgatcttatcacgcttggggaaattactgttttgcccacctgctaggtccagctggaccgcgctgagagtgaaaccgagtgcaggggacagtgtgggcttcggttcatgtgttcagtggaagtttacttctttgcccctccctgtctggttcatttattgttttttttttatttcccaaaagaaacgtgtgtggttttgaatttgaagttgcttgaattcaacttgatgatgtattgatgttcataaccatgatccttcatggtgtaataataaaatccacttcaatcaaggtgtacttgttagtactcctgtttaaaagacatgatcacggggaagtttcacatgtgctcgagggattttccgtgtgcttcacctcgttttttgatggcttgttcacatacaatggcttgaaacttttgtgttaggtaagtgactggattggcatgattggtgagtttacaataaaataattaagtgacagttgtttctttttttaaatactatcaatatcgtaggctgaaccggtaaatataattaacgaataggtgaaaaagttatatgtgtacagcaagtcaataatttcacgagtaaaatggccattagtgcaaccagaggcacaagaggcacaagacccaaatgtacttctactaagaccctgtttctttcagcttggtattattataatctagattattaagccagattactataagctatattgttataatctgtagtagaataagcgactagttgtttttttttctaaattattatagcctagattattgggtttgcaagtctaaacagtgagtggggtggcatggtgggtaatttttcaccaataatctggaaaaagcttacctaaatgagcttatcagattataataagctgggctccagattataataagctacttcaataagttgtgtgtttctttcagcttactcccaataatctggattataataatcccaagctgaaagaaacagggcctaaataattactccatttttcagttcttgatataacgtttgacttttcgtcttatttaaaaattttctatgattagtatttttattgttattagataattagataataaaatatgaatagtattttatgtgttactaattttttaaaaaaaaattatataagacggatggtgaaacgttggacataaaaaactaaaaatgaagtcagacggagggagtaactatcatcaaatataaattctttaagccccatcgttttgcttatccttatacttatccgcaccacttattagcaaattaaaaaaagagtagttttgtagcaaactgaaacatatgtcgctattgttgtagcaaaccgatagttttgtcactaaaattgtagttttctaaaaattactaaaaaaattgtaagtaaaactttcatacgtctccttagtggtataatagcaaatgttgtaaaataaacatgatg

SEQ ID NO: 45952 - DNA, 753 bp, Oryza sativa
agttttataatagattgtgtaaaatatctataattttatgaaatatactcaatatttttttctaacatgaaattttaagaattattaaagacaaatagaattataccgtggctccactactcaaccaatcacaatcctccaccatttacttctacgtactttcttaataaccgtgtccaactctaaaaatgcttataatgtgagacggagggagtaaaacacagcacgtattagtgcatgattaattaagtattagtttaaaaaacatgaaattaatatgattttaaagcaacttttctttatatttttttacataaaatacacagatcggaaaagcgtgcgtataaaaagaagtaagtataagttaggaagatggagtaaaaagcacacccttaacccactaacttatgttttgcctcattgtaccccttgaactactaaaattggtttgctcgagcatttatcttcttcgtctctttttatatgagtcatattctatttgcagggccagacataacaccattatcaaagctctaaaatatttttaaaagttttcatgactattgtttgaaatttaaaaccacgatgttcaaatcatgcttagtgctttgaaatatatgtatacggtggtaaaaaaatatgaaaaatgctgagaggtaggttataatgtatctatatatcaatcctaccaaatttgcttgcaaaatacgatgtatatagttatatatctttatctacttaaaacattaatag

SEQ ID NO: 45953 - DNA, 512 bp, Oryza sativa
caaatatgaaattaccatcacatgaaagtaatttaaaatataaatctaatgatataataagtataatactgttagtatgattattagttaaaagttattgagtttataatttaggacggaaggagtattgtcattattaataaaaaaccgaaaaaaagattgaggacacaaagcactaggatagccagcaggtcggccatgtttgagaggactctcgcggtgcatgttttcatggattgggggattagagacggtctgttatagcaagtataataggggctgaagagccggcgataacaaattcaaaggctgagttggcaaaaagctgatgagagagaggaccagccggcgactaagagcaaggataataataaagcccactttttactattagcctatcttaaagtcaacatatataatagattagctataaggttggctataattttcttctcctctctctatctctcacttacacatttaatgcatttgtcttgaagcttgtgataagc

SEQ ID NO: 45954 - DNA, 2563 bp, Oryza sativa
gcgggtggaggcccgggcggcctcctgccggcgcggcgtcagacggagatacggcacgtcggcacaccggcgaccggcgcgacagtggctggcagcctgtgttatttttcttttttttaagaatttgtgactcagatctgtgtatttgatttgtgtgtgatgtccgtgaatatgtgatgtatttgtgatgaattttgtagaagttgtgatgtaattttgttttaagattttgtgatctatttgaatatggctgatttggggataatttatttgggattttgggatggggatggagcgaaatcaatatattaaaaacacaatgaagaaaagaaaataataataaagcaaccgatctagctaggctagctctatctttagtccggttggtaacaccaaccgggactaaagatagatttttactcctggttttttcacccgggactaaagatagtgatctttagtcccggattggtagtcccggtttgaaaaccgggactaaaggggggttatgaaccgggagtaaagcccctttctccaccagtgatttaggaaggtctcaagcagggatttttttagatcttttggcagttagtccttaaccactgtcagagaacaaaaaattttggaattagggatttactaaaatagtttttgtcagcccaaaaaatcgtgtcgttatagatttactcaacaatgtatttcccagagttcgaaacctcgagattctacgtcttcgtagaggagcttaaaaatatccgtagaggagcttaaaaatatccagatatttttcaaccctatccttgtgatgttctacaaatgcaatcctcctcgacttgttgtacattctccttgcttgaacaagatccagcctttgcaaacttccttggctcaccacaatcaaaatagtgaccgaggtcgacacctagccatatacgagtcctcaacacctccaataataaatccctcacaactacatggaaacaaccatatatagtgctcaaatatcaagagaagcacacacttggtcacagcggcagagccataaaaccttcgtgcgtaagcctgagctagttagagctcaaatattttcacagattatatagcatatttcaagattagattggggattatagagctaggcatagggctcaagcccaacctaccccatgtctgtttgtgcccatgcttggtctgaaactccaaatccacacacccaaagattcgaaccacaacgatagagaaggatttgagagagcaagagaaagagttcaagatccaaagcactataggcaaagctctacccacaagcaagattgaattggatgaatggataaccttacagaagggttgggtggaggtttaaatagccaacataaaattggttgttgtgggggagttgggggggggggtggtaattttagtcccaccttggatattctgacttcatcgatggatatgctccaactgtgacaaacaaatattgtctcgtaaaaatactggtcggatattccaattttgatatcgaaaactccaaaagcaaagaagtaaaccaaactgagactcaagttccaaggaatacaaggcattccaggtgatcttatgttcatactactaggcgatatgtgatggagcatattgtttctacccaagagttgagtcctttgaattttggattgttcggtccgtctggtatttgatgtaagcattgaaaactccagtcaagaatttaatcccaaacacataatcgagttccttagaaaaacgaagattccgacggatcagatattccaaaattgcagcggatatcttgatcacttttaatttagcccaaccctcaactcggctaaaaaaaatttcaatgcattggaattctgtcagtgagtcagatattccaacctaaaaagtaccaagactttgagaaaatgcaacttttagcactaaattataatccaattattacatgtggcttccgtcttaatagtatggtatcttggactcaataaagcaaaatattagaagttcgccaaaagtctccaaactgttttttgcaccttgcatcatgaggtagaaaatttactatttcaaacaattaacaatcccattactaaattcaaattggttctcattaatcaccaaaagaattagtgccatatatgcactttcagttctcgatcgttacagactaaatggtgtcctcaatttttagagggggatttggtgtttgccagaatgatgggtctagatatagaattatgtcgacaatggccataaagtggtgactctggtggagatatggatggaaacgaaggagcaccatatgttctcacatatgaggattccatttttgtggttattcgagagataggacatacgtgacgtgctggagggcatcatcttggcatgtgtttggtttggggattatgtgggatgtgttaaactcatccatgtgttttaggagggatggtcctacttcttatggatacccccacatgtcaatgtgagagaaaaatctattgtattggtccacccatttttgagggataatgtaaacatgaacctttgg

SEQ ID NO: 45955 - DNA, 570 bp, Oryza sativa
cctccgggcggaaatttcccttcttcctgaacacatgcagaatagctcaggtctttctactatggaacagctagctgatcaatccctgtgtgattttcctaccactaacaatgcctgtgcagatccagaaaatctttccgctgcaaatttttcccaggatcagccaaggtgctacttcatgcgcactcctcctgctggcgggagtgtaggaactggcgcgcctcctgacgtcgactcgcctgcatcagcgcctcgggatgcacccctgtcacctgctgtgtttgcctcaccagggacagcagactcatctcccactccgtcgaccccgcgtggcccgtctgcttcgccacccaccactccgcgcgcgctgtctccaatctagggggggcatgcagatgctgtcttggagtcgccgccatcgcatgggtctgcgtcgtcgtcgtcgtcgtcgacttcgtcagggtcatctacggcaacacatgagtcggctactacttctgctgcttcccttgtaccagcgccagcaccacaacgtcctgtaactaggttacagcaaggtattcccaagcc

SEQ ID NO: 45956 - DNA, 925 bp, Oryza sativa
tggtccaaaatgtgtttggtgaccaaagccagaacagaagatatgttgttcattgcaaattggaggatgagaccttcacatgtgtttgcaagcagtatgagagggaaggattactctgtgagcatatcctaaaggtgatgacacataggaatgtcaatctgataccagataaatacttgttccgtaggtggactctgaagggatcagacagtgctgctacatgaagtcatgtacctttgaacatggctgaagcgtccactaggaaaatgaggtattcaacaatttgcaagaaatcagtgtgcatggcaagtgaggcatgtagaacacaggaaggatacaatctagccctccgttcaattgaagaactgactgacaagcttgccgctattaacttgacccgacaagatcaacacctttctcggcccaacatttgtgataagaatgggaaagggatcaccatgggtgagagtaatacgatagctgagaaggtgctttcagaaagctgtctaaaagatccaacaaaaatcaggcctgctgcgtttgacaataatagtgagtcagcaagaaagagaaacaaagtgatgaaagcggtgcaagatctcaggagtccatttcaggtaacaaaactgacggattgaagtacagggtatcagtccatccttgatgtctgattatgtaaatgcaatagtgtccttgtgcccccttctcttaactcgctgacctgtaaggaaagaaggatttgctgcacatgggagaacggtgctagccttgttgacttcttctttttttctttttttttttttagcaatgccctgctggagttaatgtgctataacgtcattttggcactttggtagtgattgcgctcttccgtatctgaaattcttttcttccagtagcatagcatgtctgcaatgcaatgttg

SEQ ID NO: 45957 - DNA, 696 bp, Oryza sativa
aggtgagttcccaacctcaccaaacgaacacagccttagtgtgtttgcttcgatgacataatcttgtgttgctgcgatcttagtttgattataatttcttaaatagaaacttataattcaagtttttaagtttttattcttcttttcatgatacaatttgctaaagttccgaattctttcttgtgattgcagggaattctacagctatctggacatgctttctcgacttaaaaaacagtacaatcccccgaactctctaattttcatgtccaagccctacccagagaaagtatgcaattgcatcacctatcttgtagcattatgttttccgggaatctatagcaaatcgatgtgaaggaaagctcaaaacttttaattttcacaaccatcattaccaatgatgcacccaagcctactagctactacccaatgggtcacactgtcaaccctcttatcaatcgccatagcggctgataactacttctcatcctctagtccaatatttctaaattgtggagcctctgccatgcaacttgatagcaataatcggagttgggatggggacactagctccacgtttgcaccatcagtgaaagggcttgcagctagagcttcatatcaagacccttccctcccatctcttgtcccttacatgacatcccgcatcttcatttcaaattacacatattccttccc

SEQ ID NO: 45958 - DNA, 2024 bp, Oryza sativa
tttgcgcaaagcaagttttgtaattcttttcacaagcctaagacctagcattgactgatcaaattttagtaccagagtttgtatttacacaacgacggttctgtccaccatccattgtgatcccaaggatagcttcccgccattgattcgtcatggttttctgaggacgtccaccttcccgcctctcaggaagtggctccaacagcataagattcatcatgcaatatcccctcccacacaagttaagaatttagagtctagccaagtgtaatacatgtcccggtgctcaataaccgcgagcacggctattcgaatagatttggtttactcaaactgcagtggatgtacactttacccgcactccgcgactgcccaacacatgagcctcgtcccaacacatgagacgcgtcacggcaaagctttttgataacctcgcattggcagtacccgctccatgaacttttcatcctcatgcactctaggcgtacacggtttctagcagtgagaggagttctggcgcacccgggaagggaagactcacacatgcattaagttataattatgttttagattctcacatggtagtcctaccgatggcgacaccactgtagacacccgcctcgcggtcctaccaatggctgccccaccgtagagcccctgcctcacacatcaagaaaccactatgcatggatactgcctccgctcagctatctactccgctaggtctatacccatacgagaagtgcggttgtacgggggtcgtttcatgcttaacttcatggctcggtccttaattgaccagggacggcactagccttttccggacaccacccaagtcctccagccaccccagtcgaaaacagttgttttactttattttcctttcacaaattatgtcatcaatatcatggcaatgtggcgcttatgtcttcacatgtcgcatctcaattaccttcccaaaggtaattgcccaagcatataacatttgataaatatgagtatgcatgaatctaaaatagcatttctaagcaagtgtcatagttgactagggactcgtacgtatctatggttacaaagatttaaaggtgaacaataatcaaggcatggtataatcacaagtaggatgttcatgattgcatgcaattttatttgtaaacaaaacaatttcgcaattgggatcaacatgttcaaagaatagcgatgacttgccttgctcaaagtcttgcgggtcttggccttcacttggatccgcaactccctcgggctctatagttacgtgcaaaaattgatttgaatttggttagaattcaaataaaaatccaaataaatccaaatgaaagtcgaacgcgaaagttgattctttttattaactttactatctgcgaactacggcaaacccaatttcgatttaaactattttgcgggtataattatttcgttgtcaataatttagtctccccgagcattgtatataataggttagaaatttctaccacgagctaaatattggacgaaatcctagaaatattatacaatttaatttagtctatgactaaacgattaaatataatatacgtctaaaattcctagcgattaaatccgaatttttaccgtgaatcgattacttatagggattacccaaaaataatctataataatctataagaattcatttatttgtttagttattaattacatctaaattactaccgcgaattgatttcttatagaaattaccaagaataatccataatttatattaaattttgcaattctacgactataattaatctataattaaattctaattattttaaattttctaaacttccccaaactccctctaatttcctatttatttccttttcctttttctccctttcctttttcttttcttttctcttttcccttttctttttctcttttttctctcttttccttttcttttctttctctcctctctttctttttccctttcttctctccctcccggctcctttctctcttcctcggcttctccctcc

SEQ ID NO: 45959 - DNA, 533 bp, Oryza sativa
attgacaccactctgatttcgattctgaatctgacttaagaaaccacaatacttattgacatgttcttgtatagggaccaacaatgtacaagtgaactttgggagcgatctgattcgaattccttgttctgatgaaagtagtcatgaatacgtccccaatatgtaccgtgagattgatccatcccttgaaccggatcgaaagaaacatttatccacgccgacaccaaaaggttgtcctcctccaaactgaaattttttgatcttttttggttcggtctcacagcaacattttcattcacaactggttcttgttcatcatcatactggcttcccatctcactcgagccaaaatggttgctctcatcattgatcaagtttgtgtaatatcgctctcgctccatatcatctgtccatagataaaaaatcataaccttgtacttgagaaaaaaaaagactaacaaaacacaaacaagtgataatttctggacaaaaaatgcattctgttatttgaaatttcacatgtattggatggt

SEQ ID NO: 45960 - DNA, 2088 bp, Oryza sativa
aattgacacacgaactaaacacggccttagtcactggatacaaaaattgagctgatctgacgtctcaagtcaatttgtcaaaatgaatttccttttcaactagctacaatttttatgatacttcttatctgcctttcacagggttgggctaaacatccaaatgtgtcgttcatgaaattttaatctaatgaaaaatatgagatagatagttgctctatctcggggttgtcgatctgctggtgaaaaataaaagaggtaaagtttgctcctcgggtagtatgttgtttattctctctctttttaccctggaactattatttgattgtttctgttcacacttttgggcaagaatagcacatgggtgatgggtctatcctgcttgtactgccgctgtagtatatagcaacacatcaatggcaccaggtacacaacattgtaatattctgctggatctatcttaacttccctgttggatggcatcaatggcatgtttggctgtatcaatggcaactgggctctgatctatcttaacttccctattgaatcacatgttaccttgatctggtcaatccaccaaaacaatgcccgccgcgttgggaggtgcgtgcactagacgagtatggtatttactcctataaagtaagacatgcaagaagccacatcagcaataattttaagccattagatcatattagtacaaagataacaaccgtttgatcaagaagctacttaattattcatccaattcaatcgttgttttatttagtatttttgttgcaatagaaaataagatattgccaaaaaccattacgcttgcaaaaaaacatgttctatcatcacaattttaatttttttttggcattttgcatagtacatggctgtggtatgttacttttcactattttctgttaccacgatcaacaaattcgttgcaatgaaaaaaatgtcatcttataatttaacttaattttttcatatggacatggattgggacaaaatttatatgaaagttatagctctcgataagatcaacaattttataggtgataactttttcatttgaaatcttttagatatttaaatccgtgatttaaatctcagttagatatgctcaaatgaaacgatacacttttctaacagaattgatgagtaggtgagttggtaaatgagagcacacctaaaggataggtcttgtgttcgaatctagcgaagacaaggtatcaaataataaatagttaggatgtagaacaaaattagttattaatatttaaacttttaatttggtatgtaaaactaatgtcacatatggagtggtggcaataattatttattgcaatgatgtgaagtgttgcaatatgattttttgccacatccattctatggcaacatcaaaatttattaccaccgaataaaaaatgttgaaataacctattaccacgctatttattatcacggctagcaatgattttaaaattgtggcaatatgtatctatcgtcacaattttagtattgatgccatgatttttttcgtgatgacaaattatttttctagcagtacaccacagggacgtacccagagggtagtccaggtaggcccagaattgccctaggatttggcccagaaaggagcatgtatttttttttcatggcccataaacaaatcctggcccaacaaaaaaaaactctaactttcctactagcctcctcccggcctcccagttagggatggcaacggggcgcggcggggccgggttggacaggaacggccccgtcctcgacccctgactttatcccccggccccggcccctactggtccccgacccagaccggggccctgcaaagctgtagagaaagagggcaaaccaggactgtagcagccaagacgcggtggctcatcgaggaggccagcgtcgcggagatttggcggaggtgcagaagccggcgacgcgcgatgaaaacaaaggcgaagcagccggcgacgtgcgacgaaggcacaacagccggcgacacgcggcaaagttgcagcagccggagacgcagcgaaagtgcagcggccggcgacccgcggcctagacggaagcgcagca

SEQ ID NO: 45961 - DNA, 2016 bp, Oryza sativa
ttaagggctgtccctttcttttctttcatgcgggccaaaaggggcattcggagctatcaccgattagcaatttcatccacagagtgttattgaaacctaatgatatatagcctccatttttttcactacaacacaactaatgggacctttgtgctagccaaatcccagtccagcaagcagatgttctaatcaccaaacctgactaccagcgtggcgaagatcttaaaaatatagagtgatgcccactgtcatgccaaggctgtgtaggggttggttgactggtcacttagactcatagagtcataggatcaaaaggtgcgatagataagagtatatttcagcatgtaccacacaatatcatttttttctgaaatatcctgtctttgcgaactgtgatggttctgtttcgacaaggccatcacgtctatgaattgcactgctgtcgaggaaagccatcttgtttgaagcttttaattgggggagcttctgattctgggagatgctccgccaacaggccctatatcttgattgaattgcctgaatctgaggtgatatataactgataagctagctgattccttacttcggctacatgtgcccattcattggagttgaaggggtgattagctgtttctaggatcctgtattacagtaggcaaagtagttagtcgctcatcatctaatcgacaagtgatcctccagccaaaccctgttctaaaagaggactattataataacaaaagtaccatgcaatatcatttgtcatgtaacttcatggtgtccttatttagttttgtcaaaactattgttatcacattcctatgtgaagtgtgcatattctagagctagctacccattagtccatctcgaggtcgggaataatcatatacccgttgggcgggtgccattggcgatatgaagaacgcgacggtggcacacaattatgggaaggtggtcacaccatggagtgaatctcggcatggcagagggagcccaaagagatgccacgctatggatgaagccgacttggcgaaacctgacatctggcgagccaactatataggctacatgtgcttcgtaacatgtttaggccaatttaatatattcgacataatattgtagtcctgttctcatccatctgaaatggcatagatgcccattgtaacctattgcgacctatctagtatgggcaccgtttatctttattgacttaattttaaaatttataacaaatggaaaccaaatgcggatccacatatttatacttaattaaaacaaatggtgcaacactttttttctgttgtacatatgtactatctcctttggatataaaagataagcataaagagataatcgaactagactaagggaacctacagctcgtccataaaaagtgtacataccaatgagaggtttactacttcacaattgtgtggtgtaggcacatgtatacgtaggcttaggaagcatcgtgaagcgaaggatggcaaatccacttacgtaaccatctaaccttcaaaaagtatcaacggtgcgtgttattgaaattaaactggatgatatacggtacgcttcatcgaagtgtcgcacaacttgggggagtaagcataatggaatggaagtacagttatggtagaaatgtgaactactgcagcgttgtttagtccatgtttagttttttgcaaatttgtgattgccctgtttaattagtttcttctctgtcgctgtctcaagtctatattttctggttgcatttttccaaacggccaaacatgttacatgtatttcgtcgtataaggaaataaaaagcattgcactatattttcatttccaccatctaagattatttttcccgttaggttaggtcgtacaatattaatagctcgatcagatttaatgttgcttattaattcacaagttgcagagctacgctagttgaacaaatgtttttgcacgaacataaataaaacagattataactaaagtcatttctaataggttcatccagatgacaca

SEQ ID NO: 45962 - DNA, 1625 bp, Oryza sativa
aaaacagagccgtgtcaaaagagcatcgcgaagaggcaaattcaagattttgtattgaggccttagcaaatggaggccaccggctttggtgcttcgctaggatgtggcatgtagacctacacatataggactgggaaacaccaggaaccaaaggggtgcactataggtaggcaaaccaagcctactcaagaatatgtgttgaggtagccaacataaaacttgtatggtttcactctaacacagccatgtgagtatggctcccgcacctgcaacgtcgagttcggcagccgaatctggtgccgcccctccgcaacgatgctcggtggtggccggatccagtgccacccttcccacccggtgcttgggggctaccggatctggtgccattccccccgaccggtgctctggagcggctggatacggcgctaccccccaccagcgtcgcacctcctctccgcctcttcccaccagtgcaacccctcctttcggccccttcccaccgccgctcgggggtggccagttccggcgcctccttttttggcgccaccccctctttggcacagcacggcatgcaaagaggtttctccacgatggtggctgaattaccagggcatgtggactaacttctattttttttctgatttcttcatcttgttctttatgtttgatgcatgcaaatatttcctgtaatgaattttcattggagtgatgaatttttgtgcgaaaaatttgtggttcaatttcttcgattttgctctagatggatgtgggatggatggatggtgatatgcggatgtgggatgaggagctactcaatgcattggctattatcaagcaaatgcattgatccgacttttgttttgcaatgcattggctgtctgctagatgcagattaggaaatctggcacccatgagggttttccaaccggcacacattgttgtttctgcagtatgtggttgtcttggctaaccagtgagttcgacctacatgagtgcattccttgaagagatggcgcctattatcacattatagtagcacacagtagacaaaagtggttattcggccatcctctaatctgcaactgatatgccttccaaactatgttatgaaagagtactattattcatgtaacagcatggtattcccgtttagttttgttactgaacataatagtatttttaaatactcacagcagtatattgaaggtcttaattaattaccaaatgcaacaaggccaaggtccgagctacatactcgcttcgtattttaatgtatgacgccgttgacttttcgattaacatttgactattcgttttattcaaaattttcgtgcaaatatgaaaatatttatatatcatgcttaaataacatttgatgatgaatctagtcacaataaaataaatgataattgcataaatttttttaaataagacgaatggtcaaacgttggataaaaagtcaacggcgtcatacattaaaatatggaggtagtattattcatgcctaaacacatgaggccccatataacctactccctccgtttcaaaatgtttgacaccgttgactttttagtacgtgtttgaccattcgttttattcaaaaaatttaagtaattatttattat

SEQ ID NO: 45963 - DNA, 581 bp, Oryza sativa
tgacatctagcgagccactggatcccctctcacacgaagcttctatcggcagttcctccagagtatggactgtaggtgacgaagaattcctccacatgagcaatttcggtaagtccaatcctgatttgttcagtgtttagtttacatgctctgaattccttcacatctgaagctttcttaattgtgctttcttttttttcttcaatctggatagtattgtcttatttatactatctgatagaggttgcattttcagaaattttcatcatgttcttttgtgtatgcttgcaattgtagcaaaattgcctgacttgaacaagggtatgtctgctgtatgtgctgatgtacttcactgtggtgtatatcctgcatttatgtccagaagtatatagggtatgtacagcatgcaggaaagaatactcagtggtgttgtgctggaatttcagtttgacactatgtagtgagtataatatgctatcaaatttatgctctgagtttgacacagtggaaattcagtatgtactgagtttcatatacgatgctctgaaatttgacctgttgaacagttatctgaaccttgt

SEQ ID NO: 45964 - DNA, 7455 bp, Oryza sativa
ataggaaattagagggagtttggggaagtttagaaaatttaaaataattagaatttaattatagattaattatagtcgtagaattgcaaaatttaatataaattatggattattcttggtaatttctatgagaaatcaattcgcggtagtaatttagatgtgattaataactagacaaatagatgaattcttatagattattatagattatttttgggtaatccctataagtaatcgattcacggtagaaattcggatttagttactagggattttagccgtgtattatatttaatcatttagtcatagactaaattaaatcatataatatttctaggatttcgttcgatatttagctccaatttgagtgaaacttgaacctaaattcatctaaattcataagctttccaatgatatataattcactatttgataaaatatagttataaatattaaataattaatatcaagatgatgcataatagtcaacttaaaaatatgctaataaataaaattagtattgtacagtagagtggatgtaataatatttgtctctaacatgtcttgccactgtaacaaccacacaaactaattttatgtgatgtctcaaatgaatggatgtataggaaaatactagtacttatttaatattcgatggccatggcttataggttatttaaatcaagtgtagccttatgattatgcaactaaaatataaacacacatagatgaatctttaacctgcttaggagaataataatagagctagatgtggaggaatcactaagtaaattaatcgacgcaataccatatagaatagcttatatatgcctaaattgattaccacttattagtaacccaatagaaccagtgcttaaacttatcgcatcacatatacaatatcactcatagaaactagctaatgtataattaaactacaatatattcaggaatcacttggagcattgggtagtacactttctaaataagctcatgtagagtaggcgaccaaaaccttatacgttgttgcacacatatattgtacatcccattatagttacacaattaatttatctttttcatatattaaactgggagtatataacaaacatgaatagtagataagtactaattataaatcttgacctcatatgttcatagttcaattgtaactccggattgttcattaagagataatatgtaactataatattataaacttcccgaatttaacatatagagcatggataattattaaccttttataatttattgtgacaagtaaaatatgttcataatcaaggtaaagcttccatcaataaaataaataatacaaatgattcactgtaattatttgattgatcctaaatccatctaacaacataacctctagtatatgactgtcctatttagatggatgcatgcttagccataatccttccataagccatttgatagactaaaccaccgattagccaaatatatatgtatcccataaatgctatgatggttaactcctaaataggccacgttgacaatagaaagattaagaaaccttagcccctagcgtggttgggatccattagcaaacacgaatagtacattttgttgcgcatatttgattgttgtttgaatattggtttttctcgcgtattatagaccttgtgtatcggttagtcgtgaggcaacgtctgcaacttccaggaggtgaaggttgatcaagattatatcaataataaggattatcctgagcaaggcaagtcatcactattccttgaacatgttgatcctaattgcgaaattgttttgtttacaaataaaattgcatgcaatgatgaacatcctacttgtgattatgccatgccttgattattgtttacccttaaaatccttgtacccatgattacgtatgagtccctagtcaattatgacaattgcttagaaatgctattctagaatcatgcatactcatatttatcaaatgctatatgcttgggcaattacctttgggaaggtaattgagatgcggcatgtggagacatgagcgccacattgccatgatgttgatgacatgatttgtgaaaggagaaataaaattaaacaactgttttcgactggggcggacggaggatttgggtggtatctggaaaaggctagtaccgtccccggtcaattaaggaccgagccatgaagttaagcatgaaacgacccccgtacaaccgtacttctcgaatgggtatagacctagcggattagatagccgagcggaggcagtatccctgcatagatggttcacccctgagtgaggcaggtgcgctacgatgggacagccgttgaggtagggccgagaggcgtgccctacatcggtgtcgccattggtaggactgccatgagtgtgtgagagagagaacttaacttgaaccataatttaatatgtgtgtgagacttctctttcccgggagcgccagaactcctctcactgctagaaacatggacgcctagagtgcatgaggatttaagttcatggagcgggtactgccaatgcgaggttatcgaaaagctttgccgtgacgcgtctcatgtgttgggacgaggctcatgtgttgggcagtcgcggagtgcgggtaaagtgtacatccactgcagtgtgagtaaaccaaatctattcgaatagccgcgctcgcggttattgagcaccgggacatgtattacacttggctagactctaaattcttaacttgtggggaatgggatattgcatgatgaattttatgctgatggagccacatcccgagaggagggaaggtggacatcctcagaaaaccatgacgattcaatggcgggaagctatccttgagatcacaatggatggtggacagaaccgtcattgtttaaagtgaacactggtactaaaatttgatcagtctatgctaggttttaggcttgtgaaaagaattgtaaaattagctttatgcaaaaggacctgaagccattccttgaaataccctctatcatatgcattgttattatggtggcttgctgagtacggttggtactcacccttgctatttatatatcttttaggagagtgttgaagagaagcccttgtcggtacgcttgcgtatcccacaagatgatcggagtgcggtcttgttctaggtctcgttccccagtcgactgcctgtggcatgttaaccgggcccttatgttattttgtcttccgctgttgttctctgatagttgttggcctacctggccctaatgtaagtatttaactcctttagcctaaattcattcgtgatatgttgtgatccaactatgtatgtgtgtaccaactactgatccagggattggtacggataaacacagaagatttccgattgccaaaatcgggggtctacagggttggtatcagagcctatcgactgtaggtcgagaccctagatagaatggccgttagttgcaggaccttatattttacaaatatatttttaaaatgctaaaaaaaagaggttatgaaaacattcaaatattgtttctcatcttacctctcttcaaaaatatctgattccgatacgccaaaaagaaaaaaatatttttgataccttacatctcaacccttcctttgacaaggcgattttatcacttgatttgtgattgaaaaatattggttctacattctcatccacatttcaaaattttagaataagaaccgaaagcaattaagacgctatagggatattattgattgtgccgaaacctcatcctcgaaagtagacgattgcatcatgattatatgaaaaacaaagtaaagaaaaacaaaagaaaagaacagaaattaactcatcaatcatgataactcatgattgttagtactagtttgctctagtcacacactcgtatagtagaagtgaagtctcgactaagccgttagtgaccatagaagctcgacctgcgacatggaagttcataaagaacaataaagagaaaagaaacagactacgtatttatgagaaagcccagcaagaatactaaacatacaaggatctaaagattatggatcaagaaggaacataagatgctacgtagatatggaaattcaataaaaggaacccttatttggataagagtacatggacgaatgatgaaagagatttgaatttattggatattagcttgagggttgcttcaaaattccaaggacaagtcgaactcatatggcttaaatcctctgaactttattttataaaatgtctttagcaaaatatcgcgaagcaaattaatttttgcattttgaaatatagccttacaaaaaaaaattacttcaaaaaggaagaaaatgtttgtttcaaactatgtaattgcaaaattgtccccagagccgcactgaacttatattaaattttgggaatggtcgaaattagccttgaaaagaaaattttctctgaaaattatttgtgaaattttgattccaaataatgtattgcaaagttttccaaaataaaacttcattcaaaaccaatttttcagtgcatgtcttcgaaagcctcctttcaaaaggttttccaagctgaattccaataattatttgcctaaagctttgtttaaaaataataataataataataataataataataataataataataataataataataataatagtaaaaaaataaatttctttcatgagttttcctttgaggtgttcaaaattattgttgtttcaactttgaaccatgcatacaatctatatggtattttggccctattggcaagagtgctcttttgcgaaataaaatcaaatgttgtttaaaaaaaaaaatttgattacaaaagtttttagttgccatgttgctttttgttaaacatatgtatgattatacaaaatcttgcttgaaaaatctattttcaaattatatttggtgagaaactgcatctcttgaatattttaaatgttttgcaaacatcacttccaaaggatatttctgcaaaatcattttgaaaaaaaaaaatcttctttgtgaacgcaaaagcatatctccttttaaattgctttcaaaatttcttattttaaggggggtagcctatgatggagaaacctcgaggaaatcaataacttgtgggaaaatatggacaaggaatactatatatcaaggtatatttgcccttgtacagggaatttgaagtatcattggatagtaaaactgcaaagggtgtgaccttaactctcgtcggcaagattcataataaatattaaggaacgaaggattgaacaaatgaagaagaaaaacaacaattcagcattgtcatgctactattgatgactagtatagtagtttactaactttcaacctactaacttctaacaagagaaacctaccacaggacgtgaagacatggacccaatcgacatcgaaaaacaagaattcctccaatctacaagaccccaaaatatgggaataaaccagcccatgctactctttgaagatcctccccaagcttccaggaacaaaggacgagtccaagcctcactaaagcctgaagactacaccatcaatctgaatcacctaaagcaatattcttcgaatgaaaggtgccacctgactccagcaaaacgaaggataaatgtcacgtgttatagatgtggcgaggaaggacattgtgccttggattgccctaagaaaaagctaggaaatggacaagtaaggaatatacctcgacacccaaaaaggaaaatgagggcaggaataccaccaaaaccgatgccacattcactctatccaaaacctatgtatcagcaatttcgtagacaaggaactacaccacattggtggaagggaaaacggaaaagaaaagcgtcatcacgaataacatatgctgaacttaacctcagtaaaatgggaatagaaatcggtgatttgcctgaagatgttgaagaactacaactatggcaacgaaagagagatggctgttgtttttcttgtggacaatttggacattatgcgataggttgtactcaagacaccaatgaagaacaagaaacactgccctcacagatcggcccggaaaaggatagagttccagacccatccaaagaagtttcgaagattaaggcatgtagtcgttgcggagagataggacactacggtagtaattgcattactcaatgcccctactgtgacgaagaccatccaaacggagaatgcccaacaacgaagatcacgtgcttcctctgcgaaaagacggatcatgtgccccaagattgtcaactaagtccgttgctgaccaagacggcggaagtacaaagagtgtcgcttcgcttcgcccatcgactcatgacatccagaagccacgaagacccgggatttcctacttttgatttgcatgtttgtttgtcgaacaatatttaagccaaaatagtttaatgtctccgtagtcccactaaatctcggggacgagatttctttaaggggggtagatgtgtaacatcctaaaaattcccaacaataaaaatcactaaaatttcgaactttttaaaacttttgcatcatgctggttgttatgattcctattgcttgccaaaccataaatgatcaccaagaaggtaaagaaaagaactacatttaagcaatagatatgatttacgagaatatatttaatcctacaaataattatgcacaagatagttaagtcaaatattaatttctattacaaattacaaattaggtattaaatattcgaaccatgattgatagcttgatgtcacaattagctaaagaaatagtaagattaaatctaattcatttgaatcgaatctcccatgaaatataagaacacatgaaatgatgatcaccactatagtgatcgtgtttataaataagtaattcaccggaatatatagattgatacttgcaacatgtcgccgagttactcatgacatgaaaatcactcatataaaataatggtcatataaataaattaatccttatatataaacaagaatatgtgagtgtttaaaattagattaatgttgtaccgagtcttaatatactatttatagaataaatagattcaacctatccgtgtaaaatatattgctataagttcattcaatgtgctattgtaataataagggccacactaggatattttagaaccctcaaagcctccaaaattatctaggctaattttagaattagacctcatttaaataatacaatagaaatatatatataagaataaaatatgggtaatattaaaatttggtaaactttcatctaaattaaaacatatattgggcaaaccttatttatgtaaaaattaggatttatagaatgaaatttatacaagggataaactaaaatcgggttaaatagaaaatggcactgttcattgcactctaggtgctcgatgtggtccctggctctatttccccctcctcagcctcct

SEQ ID NO: 45965 - DNA, 1749 bp, Oryza sativa
gcatacattttgattcggtacttagcattatcaagatatctaaacaggaatattttgcacacaactaattacatagatctggcaacataaatccaattaattcatttcacaataatgtagtcaatgtcactgaacatatgtcattaacctgttcagattgtctagcagatgctaccacggtttatcaaataactgcatgtttgatcagaacttcaataatcatcagtgggaactaattttgtttcttgtacagaaataaacatggaatttagatggtggtaccggtgcttttcatcgaacacatggtgtatatagctctaacagagagcaagccatccagttttatttaaccctagttgatctaactctcagaaataagcatcaggaattttagagagaaggtacacaaactgtagagaggaatcctttggttgaaatgtcgattcctgtgacctgccctcaccaagcgcaggcgaaaaggatggggtggtttggatcttcgagtctgcagattccacaactcaagaaataggggagagagtctagagagatggccagatgagggggagagccatggccggaggccctgcgcggctgagcagttgagaatgcgatcttggaggaggcgatggaggagtgctctggtgagagatagtggggagcagaagactgactaactgattccaggttgaatggggattatatagggagcttattcgttgagagagatgtggagagagattagcaggtttgttactctaatgttgcggtactacttggagggaaaattgagtttggcgggaagtatttggaggcaaactacgcatgaaaaaactcaaggaatttccttattgaaaaaaaaagatacatctcaatttttttacaaaattggttaattactacattagtaattttgtaccttactgataaaaattaaggaaattccttatgtgattaacgtgatcccctaatgactgtgtccctctgctagctctcccttcatttttattcagcagaataatattattttaaaagggtatctatatcatataatatgaaactaatggttcttttttttcctattctttttacccgattgttttttttcatatcatataatacaaaactaaggggagccatgcattgtacggacaaatatgcttttagtttatcacatttcttaataacaccgagcctctaattagtaggtacggtccaacgtttattattggtcaaacttgatttatagggtccgatgctaggagaatttgtagtgttaacgtgtcgagtgcggctttctaaagatagaactaacagcgacgcgtcgctctcgggctctctactgttggtgttgccggcggctggctttctaaagacaaagactaatggtgatgcgttgttctcgggctctcagctgttggtgttgccgtcgcagccgccggggagggcagcagcatagatctccttgtggagcttcacgcacaacatcccttacaaatagacgaattttaatgctcatgtcctaaaatataagtatttttgtactccgacaaagtcttcgagatgcatgctattttcacattatatttataaaaataaaatattttaaataaaaaagttacatattaagatagtttgattaatgataaatctagtaacctcaattttacatgattatattattatttttttctattaatagtcaaagttaaaaatggtgactgtacattaggctaaaaatgtctatat

SEQ ID NO: 45966 - DNA, 611 bp, Oryza sativa
ttgtaataggaaggatcacatccttatttagattgagttttttaagacggagggagtaggaaatatgttagctatgtcactcaaaagtaagtcttcacccatagatcatgaaattaaataaggtggatcttgaggagtatatatatggtgctgaagctagcatcgatcgatcaatcttggcaacaccatctatcatatccgatccatgttgattccttcctgatataatatgaatggaagtcatcaggaaccaaggcataacatttcttcagtgaaagagagttcgttcattgcgtaattcatcgagaaaagtttagaccacaacatcgactacaacttttgagtgaccttgttaaatagataatgagcaaaatcgtcaaaatgtgtcaatcgtcagagtgaacaaacaactgcagggtgttgcattgcacaccagcaaaagagtgacatttatctgtcatgcattgctactacactcatgcactgtcagtcttcagtgccagtctgtgatactcaagacttctgcgggcatatgccaatctacagtgtcagtctgtgcagtgtgcactagctaatttcaagttccccttgtaagaatcatctatgaaaat

SEQ ID NO: 45967 - DNA, 1965 bp, Oryza sativa
ttgtgatgctcgcctacaaaaattcttaattttacatacacatgtgggcaggcggttgctatcccacttggaaaatgtgataggagatcgaaatcaaaccagagaatatagaagataattctatattcggcaatttatttagtatattttgagggttgtatgctgttaaactataaaacctcctaaactgtgaatttaatagaagaatatatagtggatgtatacaaccctcaaaatctttactattccaaaaattgaagatgtttccgctagaattttgatacgtcatccgtgtttgaatcagttttaattttatgtattgattttaattttatattcttgtaaaatcatgtcctttctatccgatatgcgcgcgatttgcccttgccgcatgtctgattgggactgcgtcatcctcacccgcgatttgaaaaatgaagatgtttttgtcaaaactatggtacgtcatccgtatccgattcccattacacgtaacatttatttagaagtcacgactcgcgagcgaactacaaaagagagtccgtgcaatgtggataccaagcaaatgaaactcgcagagtccgtgtggatatcacgtacatcattgcccagttcatacgattctattcgtattacactgtacgattcctatgacatattagcatgatttcaagtcagtctccacgcatactcgtactatcgtacgtgctaccagggattatccataaaaatcggttttagtttcgaaaagaacatggcaattgaaataaaggatgatcgaaattgctgattccatctttcatcaatttcagctgtcttacttgagataaagctggaggataaatcgatctcgtgtttttggagttgcttataattattcctacaagccaaatttaaaattttagaaattaattttgaattcgactttttggttttttgtcatactttatcttattttacagcatttgcttttgagtcgctaagaacatgtatataaaagatttgcacataaatagtattttatttgctaataagtgatttggataaggacatgaataaacgaaataatgggttgtaattatttatctacaaaatatgtacaaattaaattagctctacctattacaacacatgggcatcttttctagtctactaaataaattgccgaatatttttcatctccgcttcaggctttattcatgcatgcatgtctcagattttcatcttcgtatgattaacgagcatttggtagtactattggactcaaaagtaatatttgattttcatctccgcttgattaccgagctttgattttttttagcactgacttccgaagaaacattgaaagcctagtcttaaacattttctggcatgactaaaagctactccctccatccgagaatatatataagaagttttagagtttaacatggttattaagaaagtagataaaagtgaatgttagtgagttgtgactgaatgagtagtggaggtaggtgggaaaaatgaatagtggaggatcgtgattggttgggaaaaaaatattgatggagaaattgttatatttttggataaatcctaagggctaaaagttgttatattggggacggagggagtatattttcattgtttttactagtatttatacattttaatccagtactaaaatggtactcttcacaacgtacaccatgtgcaattaaacatcacagcaacagtgatatttatatatttttgttacgatgcatgttcattgtctggctaacatatgttcacatcaaggcctcgagggtgaggacactacatacgtaaggagataagtgcctggcaaaggggggtgatgttgtaatgttgttaccagcaacatgttgcactttacacaatgtcaaattaaattcaaaattaaattttctgggcacagacaatgtagagatggaagtgggaggcgtcaggagaattagttgt

SEQ ID NO: 45968 - DNA, 2549 bp, Oryza sativa
agagctgcgacagacatagccgtggagacataaaacttgaggacctacagtatcaattatcaaatcggcatcgaggacatgagcaggtaacggttttggatacatggctgaggcgagaaattccatgctactccctcgttccctaaatgttgacttttttaaatatgtttgaccgttcgttttattcaaaaacttttatgaaatatgtaaaactatatgtatatataaaaatatatttaacaatgaatcaaatgataggaaaagaattaataattatttaaatttttttaataagacgaacagacaaacatgtttaaaaaagttaatggcgttaaatattttgggatggagggagtagtagcttatatcgtttcagcatccgtttggctttgctatgtacgaaaatgaaaaaaactggggaagcttgaataagcagtgtcagaacattgttatgacagatgaaccagatcaattaatctggaaacatacaatgaatgggatttttacagttaaatctttctattgaactctgatcgtacagaacactggttttagatttcaaaagagatatggaagtttaagatcccaccgagagttaaagtttttatttggttgatattaaaaaaatagcattctaaccgaagacaatcttttaaaaagtggacggataggaaaaacatagtattctgatagaaatataagtgtaaaacagagaattttaaaacacatgaaaaacataagaatgatcatttgattgggccatagaaaagacacaggaatttaaggagagataaagactcaaaaagattttttccatgaggatatacctcatgttaaatttccttcaaaacttgcatgtgaagagacatttcttataaactaggaaggtagcccgcgcatttgcgcgggcatgtttttatttcgtttcgaaaacatgtctaacaaaataagtttaaattaaagtgaggtgtttcccttcttaattgaatgttcattgtattttttctttaaaaatcttgagaaactttaattgctcataaatatatattttttactaacctgctatcacctttttaaattgaccaaatatacatatgtaagatagtgattcttatgcgtaggatcctacagtatttttaagaaaaataccaagttaatatgagtcttaaaataaaaattagtaggaaatttctaatcatatcgttatacgaaatgcttattgattttgtattgacaccttagaggcatttacatgcaggtcgtggaatttagtgtattcgtttaattatcattgaccttcatctcctgatgtgtcaaagtgaaatatgacttgtatgtagagaagaaaaaaagtttaaaagaataaaatatcgttaggatgtaaaatgaacttttttttcctctgtaaccaatggaatagattgattcaatactacttttgcgggttaagtgctccactaaaatagttcactgtgtaaaagcttcgactctaccttctgggttaagtactccactaaagtagttatatgtaaacacattacaaaagttatttctaaaggtagcccatgagtccgaggcaaaaggctcatcacataggaggctgcacatttgaggaacatgagaacaatattctcgcggaaatcatttgtttagaatgtgatgaacataattgtatattcaattaaaaacgttagaaaagtggcttaaagttgtcatttcacattgattggttatgaaaataatggtatatataaatctttgtgccgatatcattgtttgccaacaatcaacgaacttgatagttacttttggtgttccttttggtatgtagcaaattggctacatattttacaacttactgtatcctttgctgagatgcacttgcttttttttctctgtatacttgattgtctcattgtttattaatggatgccttcggtccatgtgacacaatatatatttcaaataaaaagccttctcgagtctaaattgattttgcagcgtaggagatagtttattgtttcgtgtagagtgtgtgagactccatgtagcttagcaggaacataattttcattgcgaaaaataactccgcatgtgtgattattatgtagtgtggtatgattgttgtcatgatttaaatatttttactctaaaatttatgattaaacattaggattttacataatgcaaacaatcactttgtgattttatcttagctaacatgcattaggcctttagtgattatgtttatattgcataatcctaaatatgaagcctacaatgcttatcctattttatctttgttgtttgaaagaattagccatttatacaaccattgtagtttaaatactaaatagtttttaacttttaagtttctaaaataattggtagataaagcttttagctcggtcatgcatgatacatacatgtagtcccaagctaatttgccccctcacgctgacagtgtcctgagtaatgtcgatgggggcaaaattgtgaccgatcaaagtcttaatttttttcagttcaagaaaaaaaaatgaatctca

SEQ ID NO: 45969 - DNA, 1628 bp, Oryza sativa
caaatcgattaatccgattactgcccttgcaaaaaaaaaactcagattactgaagatgaagaataatgcatcatcctgatccatggtttggaattttctgaaatttcggccccaccagcaagcgcaaatctccccaaaatttttagtttttatcaaatatttgtaaatttggttaaaatttattcaaattcagtcaaaatatattaaaaattcaaataatttcagtccaaaataacccggcaatcatgaattttttaaattttcggcaaccaccgaaatttcggtggcaaccaaaattacaaaccctgtcctggtcgctttgccatttagccaattaaacaagtgaatgataatcgcgcattgcaatggtggtaaccaaaaaacataatgatttgctcttatccttttgaattgagttttggagcaaattacttatctaacctttcacaaaacaattcctggcagctctatctatatataggactcaaaagtaatgtttgattttttttttatggcacagctcttctctctttgtttgttttaccaagtaaattgggtattgatataccgtgttcaaagtcgcagctgcagtgatatcaagttgtatattttctttcgcagtgcctagctaactaatgggatgtggagactgagcatatgtgaagtgtttcccatttaataagacagtagtgcgacaatgttattgcaatgtacatagagagaaaataatctagcgccttatttaagagttgtgtcctccaacgcaagaggttctgcaaagtcccaatagagttgtcctcttaaatccttatacatgcaaagtcccaatagagttgttccaaactttttcttcaaactttcaacttttccattacattaaaacttttctacacacataaacttccaacttttccatcacatcgtttcaatttcaaccaaacttccaattttagcgtggactaaacacacccgtagttttaaattggtagcccaagtgcttaattaatcaacagaaccaactacctattgaaagccttccattgactcttgaagaaccatcgaatgcctagccttcgcatctcgctctgtttttctccaattaaacaccacaactacagtgatatatatcaagtgatatgaataattcttgttgcgatgcacgctctgtttgtctatattacatatatattgcctccggggtgaaaattgctgctacttctgtacccacatacatgaggagacccaaccttggaaaacgcataccactcaacagtttcgaaattcatgtttaaatgtactttgcacagacagcttacaattggaagtggaaggcatcagggaaattactgctactcctgtttcttggacatgttggagtgcatgaatttttggctcctcccatccaaggcctactctttttcttggtagctaatctcgctaaaccattatagctcattttgcgacaaggcatagaagattgaaatgaaacaagtgaaataataataaaaaaaagtcatgcatgcataattcgctggaattttcgaaagcaatggaagtcgaaattaaacgatgtattttttttatcaagtgaacagagcagttgaaaacagggtagtgagtcttggcaa

SEQ ID NO: 45970 - DNA, 1904 bp, Oryza sativa
ttttttaaataagacgaacggtcaaacatatgctaaaaagtcaacggtgtcaaacattttgaaacggagggagtagttactacttagtgggccattgctttgtttttttgcatacgtgggctagtagaaaacaaaaacctaacgcaataaaaaaaagttgcacaaaggcccagaagcctgaccaaagaatacctctaacaccactcgtgttgaaaacatgagcccaaaagcaactacgcattcgctggtagctgaaagaacgaaaggggtgtccctttcttttttcttttttttttcatctgggccaaaaagggcattcagagcaatcaccgatgagccatttcatccacagagtgttattgaaacctaatgatatatagcctccatttttttcactataacacaactagtgggccctttgtgtggtagtcaaatcccaaaatcccagtccagcaagcagaggatctaatcaccaaacctaactaaccagcgtggcgaagatctataaaaatagagtgatgcccactgtcaggatgtatgccaagactgtaggggtgtgtgcacatacgattgggaagatacgtaaaacgaggtggcctattaagttgtgtttgggagtgagggttcccagcacgtaaaacgaagcagcctttagcgtgtgattaattaagttttagcaattttttttaaaaaaattgatcaatatgaattttttaagcaactttcgtatataaactttttaaaaaaaacgcaccatttagcagtttgaaaagcgtgtgagcggaaaacgatgagaaggggttgggaacctagacaaacgaaatgagccttagtgcatgattaattgagtattaattattttaaattttaaaaatagattaatatgatttttaaagcaattttctgatagaaattttttgcaacaaacacacaacgagagaaatattctctatcacctgctgccgaatgcagttagactcatacgattcagcatgtaccagacaatatcattatttctgaaaaaaatcctgcctttggaatcgtgatgattctgttccgacaaggtcgccatgtctatgaactgcactgctgtcgaggaaagacatctatatcttgtttgaattgcctgaatctcaggtgataattaagctagctgattccgtacttcgcggctacatgggtccattccttgaaggggtgattagccgtttccaggattctgtattacagcaggcaaagtagttatttgctcatcatctaatctacaagtgatccgccatccaaaccctgttctaaaacagtactattattatgacaaaagtaccatgcaatatcatctgtcatgtaacttcgtcgtgtcctcatttagttttgtcaaaactattgttatcgcatcctatatgaagtgtgcacattcttgagctagctacccattagtccatatcgaggtcaagaataatcatatacccattgggcgggtgctattggcgagatgaagaacgcgatggtggcacacaaagacgggggtggtcgcaccgaggagaggatctcgacatggaagagggagcccaaagagatgccacagagtacaacagggacatgggcgtgagtcaacaaccacgctatggaggaagccgacttagcgaaacctgatatctggcgagccaagtatacgtgctgcgtgtccttcataatatgtttaggccaatttaatataggcaacataatgttgcgatcctgtcctcatccatctgaaatggcatagatgcctattgtaacctgttgcgacttatctagtatgggcaccatttatcttaacacatatgctttattgactcaattttaaaatttatagcagatgaaaaccatatgcggacccacatatttatacttattaatacaaa

SEQ ID NO: 45971 - DNA, 3238 bp, Oryza sativa
actagggggagtaaagcgttatggaagcacatatatcagtgctagtctactctccagatcagtcggctaaaatgccaccggacagaaataaagtaaagatgcacgatgatggctgcaaactctaccatgaggaagagagacaacgggtcccacagaaggatcacatgtgcaaattcagttatggtagaaatgtgagctactgcagcattgtttcgtccatgtttagttttcaaatttgcaatttcccagtttagttaatttcatctctgtgtcgctgtctagtctatattttctggctgcattctcccaaactgccaaacatgttacatgaatttcgttgtataaagaaaataaaaagccttgtactattttcatttcctccgttctaagatttttttttccgctaggttacgtcgtacaatattaacagctcagatgttagtgttgcttaattcacaatttgcagagctacgctagttgaaaaaaatgtttttgcacgaacatatatatataacaaattgtaactaatgccactgctaataggttcatccagatgacacacatccaactttgctttctgtggagatgatacatctaactcaaatatggttaaactctgcatatctgctcacatacggttataaataaaacatagccgtgccaacatgcatgagcatcatgaagagggaaactcatgattttgcattgagaccatagcaacggaaaccatgggaaatgtggcatgtagacctacacatataggactgggaaacaccaggaatcaaaggagtgcactgtgattaggccaaccaagcctacccaagaatctgtgttgaggtagccaacataaaacttctctggttttactctaacacagccaaatgagtaggccatccaagctatgctgagagccccgcagcagtgtctgcatctttcgatcgatgagtatcaattgaacaagcgagtatttggtttgaatagcagattaggacagcaaaacgatcaccaaccaacggagcaacctgtactaaaggagatgtaacaaaatagaacagtgcccactgccgggattaagggaaatgcctgacaggattctctgacttaactacacatgcaattgagtcacagtcatatgaatatgaatcccactttgctataatccacatgtcagtgactcaactgcacaatagctaagtcagataatcccttttcgaggcactcatatgattatgttatcatatatgaatcacttattagtgttgttagttcgaaagattcaatttttttttgaacataatactatatctttatatataccagtcagcagtagcttgatggttgtcttaattgcaagtaacaaagcccaggccgaagcaacacatttatgtgtaacagaccctggtctgcagtagcttggtcaatttggtcagtaaacctataatgtattttagggctgtgaacctgtgatgcaattgcatgtacttgtttggttagtgacctataattaatttatggtcagttattctattatttggatatgtgactgggtttgtccatatgtatttacactgtattagatctccactgggttttgttggatattacctgtgcaataacctctgtgctatatggccatatgggttgttactgggtataatatttagacctatgtagtattttgaaatggacttaggctgcgttagcttgtgtgatatagggtgagaaaggacctcgttttctgcacgcatgcttcccaaactattaaacggtgtattttttaaaaaaatcttctataggaaagttgctttaaaaaatcatattaatccatttttgaaatttaaaatagttaatattcaattaatcatgcgctaatggctcacttcgttttgcgtatcttcccaatctccccaatctccttctcctcaaacacacccttagtccacttgttatttaccacttcaaatgaattaacaagttgggtgaacatattatgtaaattgctacatcttaactagatttatatctaactaggtttgcaattatatcgagctcataaacaggttgctcattttatggaccttcacatgccaataatgcgtaaatccctactctttagatgggtaggccaaaatttaaccgggattataattgggcttagcacataaacaacttgacaatagcatggctcttgacatggcacaagataatgtgtgacgtttcctaggttcgacaatgagaaaactaagagacataaactaaatgacatcgtcactagcttcataatggaaaaaaaagtgttttcatcacagaacatgattaaaaacacatgataggtgacgaaagaatttttgtcatgtcaacatcataggttttggaacgtggcatgtttttttagttttttgtgatgtaaatggagcatcacctatcataaaatttattgtgttgtgatatagctataaattgaatggttgttttggtctattgctcttaaaggaggtgactatattgattatccacatgacttgatgtgcatattgcatttgtcttcaacattaatgccctcaaaatatgggattactacacctaacctttaaaaaatctgagatttcaaaaacttggccggcgagagattattgacgctgtcaacgaggaagatcaacggtcttggcacgggcgacatgatcatgcataagaggcgagtacagtgatagagccggcggcaccgttaaaccctgacgagtaatagtgttttttgatgatcgactaattttaataggtgttaataaatatccgtagtgcaaacaacaatggtgaaacccccgtgcggccgctcaacctgcccgagaggtagctctgccatttgaggtgaccaaaccaacctcgcaacattgaacatccggtgtgagcaaaccaagtggcctgatgtgctccactacagtcccaatcccgcccatgcaagccgacatttatttgtatggccaaagcctcacagaatatcagtaggtcccaagattcttcatatcgtacctcaaatatcctgtccaatatgggccacatgttcatcgtaccaccattccggcccaacctatgccacacagtattagagaactgatcttttgacatggtacctaaaatcataaatatctcggttagattaaaaaccaatactagagatgctttagtaccggttctaaaattttcaaatcgtctctacatcctgtttcttgtgcatttaaag

SEQ ID NO: 45972 - DNA, 4727 bp, Oryza sativa
tcctgtacctgttgcatttaaagtccaagcccctggaaatatatttagttccggttagtattatcaaccgatattaaaaatgcatatttagtatcggttgatgttaccaaccgagactaaagatagaagatcaaaaagtctgggttggtgttaccaactggtattaaagattcatttttagtactgatgtgtgttatcaaccggtgttaaagatgccttcaaggtaagttcaaaaggaaagtatctctgttcaagttagatgtgtgtagtaggtgtgatggttacgtgtgagggctgaggtgagagatcttgacctcgaatcccacatcccacatattttttcacttgctatatatttttagtaccagctctgttgctacaactggtagaaaatgggggttgtaaatcaggactaaatatcagttctctagtagttgttacaacttgtggtttgcacattccggttcaacctaagccaacccatgcatgcatttattggccttgcaaataaactgatgatcaggagttgctacaatttctggtttgcgcattccggcccaacctaagccaacctatgcatgcattcacattggccttgcaaataaactgatgatcaggagcaagcaaatatttaaagtgatgaccgatgaagaaaatgttgctgcgaaaaagttctgaagttaagaacttctgaatatgtactcatgagacgagacagagaaatggaaggcatttggaaagccaatactgaccagagtttgagaaaaagctcgatcaaagggcctccaccaacttctctaggtttcctgggacttgcatgtgttctatttgtcatttgaatccaagaaacggagacatgcaactacgctcgtcatcaaatagtgttccttaattgatcaaggtttacgaaaagtgaagtgatcaaaattcgtttgagctcaatatgctaacaagcagggatctgtctcaaacttaattggattaattatacgtgattactgatcattgtggtttagctttgaacaaagatgacaaactgatttggcaggccatttcgctgcagccggcctaaaccaagcaagtaatttttttgagcggtccgagatcaattatgcaagcatataaccaagcaaatcaaagaaactattatctcattggaacacatgatttccaaacttgtttgtaacaaggatttttgacagatcatgctggttaattaggaagattctactaagtgtcaaattttccaaataatattgctatctcctcggctggctgtatttgcctgaactgccaaacatgcatttttaaaggtataagcaaaagaaaaatcatttccacaaataaaagcttagatgagttatgtctgactaaaatgttggggaatcaatccatttcaaacatttttttccttgaacttaaataaacaagattgtgattaacaacattgctactgctatatgcatatagcgaggtatttgaaaaattggcgctgctataaagggaaatgtcccctagctagctaaagtacgtattaatagatataaacatgcttattattagataaagaaacaaggaaatagaaaaagggaaactgagaagatcatatatgggcagcaggtaagctagctgtaacttttatttttagtcggaaaatcaaagtgtgtctaatgaattaccgataaccatttacggtaaaatacgaatgaaaagccattacccattttttcataagtagttcaaatgtacttgagctattaattcctcaatcatttttcatccaactattccacacgctttgtcagcatgccccttgctcagattcaaaaacattaaggacttagaattatggaatttataaccagggtctatgacggtacatcactgtagcattgttgcaatccttcttcaacagaatataaaatgagggtagataaacgaccaagaatatgcactactggagaaaccatctttgatcggtcgaacaaattccacaatagtcccggttgcaataaaaatagggactaaagttcaattggttagagctactttttaatctttagtcctgtcctggttggtaacaccaaccgggactaaagatcatttttacccccggttcaaaaaaaaacggcaggtgatgtcagacccctctattaattatttttagtcccggttgatattactaatcgagaaaaaaagatcggcatgcgcagagaagacgaggcgagcgcgcgagatcgaggaggaggaggcgcacgacataagttctatctcctcatccctcacctttatctcttcctcatctcctcactcaccccatcttcctcttcctcctccggatccgccccctcccctctccttcccattctcaggaggccgggtggcggcggcggtggcctcgcgcagcggcgaaggcggcctcgtgcggcggcggccggcacggaggccggtgtggcggcagccggtggaggtcggcgcgcctatcgggattttttttcttttttttcttttttccttaatgtgtaatttgatctgtattattgttgtgaatgattttgagaatgaactatgttgttgtcaatgatttgggatgaactatatacgttgctttgaatgatttaagataatgggcgtgagatatacaaaatagcaaaaaaagaaaaaaaaactttaatcccggttggtaacgatcttactcccggttgaaaaaccgggactataggaggttaccaaccaggagtaaaaatcatttctccaccagtgacgacagctgagaacttctttatatatgagattttcatagcaacaacagtttcggtggcataaccaaacttatatgattgggaggcaccaggaagcgaaggagcgcagtatcacttggcgaatcatccaagcccaaataagtagcagcattgtgtttgccaacacgaggtgcgataaaatctctatgattaacaactgcatctttctttgccactcgaacgaggagaccatacctcatggagggcaattgagagcagacgacacacaccaaactggactagccagcttgtgcagtttgtatcaaaacataatgatgcacactgccagggtgaagggaaggctggggttatggtcagcttggatttccggtgatatcgatggacactccgactccaaggacctttcttaggaccaaaaggttttgtaggtagagtgtagtaccgtgtaccacgcaatactttttcttcgcaatattgaacaatttgttgattttgtattagtaggagcagaaaacgtttataagtttgtttacaacatcccgtcgcaccaagatatataatgatccatagccatcgcgaaaactctgttccaatgagccgtatgtgtctatgaacaagtcatgcaatgatgtggagggaagccatgtatcttatttcaattgcccacatcctaggcgatcagcttaccaattccatactttggctatcaggcattttcaggttcctgtagcacagcaaacaaaagtaattattcggctaccctctcttcttcaagagatctaatatccaaaccatgttctaaaagaggacaattattttgacaaaagtaacatgcaatacgattagtcctgtaacatcatggtatcctgatttagttttgttaaaatccatcacaatcatgacctatgttactagaacgggatcggttatctctaacgggcttaaacatcatctctttcgggcatgacccccgtgactaagcaaaggtcagtgacgtgagaaaatatctcaatcgggcaaccggtcatcacggatgacacacatctcaatcgtgccaacacaaaagcttgtcacggatgactctcatctctaacgggcctaaattatagcccatcacggatgactctcatctctaacgggtctaaattatagctcgtcacggatgagtataatcaaaaaaaataaattttgtttttttgttcgcctcaagcctttgacctcactcgtgtgcacccgggaagaacttctatgtcagtcacccatcccaaaattgctctagaacaagcacgtttaacctcatagttctttgaagattggcttccggaaaatatattgtaacttgttggcatgagtattatattaatcctataaagccctgggccagtatgacacaccctagcatcccatctattcataaacatttattcacatacacaaccatcaatatatttaacacaatcgcattcacataatatctattttgatcacatatttcactagtaaaactgagttaattggatcaaatatatattttgcaagtattatcatgaggaggaggcaaatcagacttctagacaaaaacgaattttgaattgaattttacaatactaaatgaacttatataaaaaagatgtcaaaaataaatttgtagaactcattgagatctaccaattttatttttgtcatttctccatccggtcttgatttaactatataaaatttgaatttcaaaatataagaaatttaaatattttttcgggtagtaaatgatttcaaatggaaaaattatcaacaacaaagttgtataactcatcaagttctataacttttactttggtcttgtttctatataaaatttgttgaacaatttgaatttgaatttgaaaatacgacaacctcaaaaaatattttcaaatactaaatgatttcaactgaaaaagtcatcaacaaaaaagttgtataact

SEQ ID NO: 45973 - DNA, 1658 bp, Oryza sativa
ggtttcataaactataacacatatatgtaaattttgtgaacaatgttaacaacactttgtctgatgaagaaataataaacataaaagttatagatcttggtgagttatacaactgtgttgttgatgacttttttagttgaaatcatttagtatttgaaaatgttgtttgaatttgtcgtattttcaaattcaaattcaaatgattcaaaataagttatatagaaaaataaccaaaataaaagctatagatcttgatgagttatacaactttgttgttgatgatttttttagttgaaatcatttagtatttgaaaatgttttttctgaagttgtcatatttttaaattcaaattcaaaccgttcaaaaaaaagtttatattgaaaaatgaccaaaataaaagttttaacacttgataagttatacaactttgttgttgataatttttccatttgaaatcatttagtatttgaaaatgttgtttgaagttgtcatattttcaaattcaaattcaaactgttgaaaaaaagttatatagaaaaatgaccaaaataaaagttgtaaatattgataagttatacaactttgttgttgacaatttttccatttgaaatcatttactacctaaaaaattattttgactaataaaataaattattatactgcagttaattatttttgctacatgtcaactcacaaatataaacatttcatatgacaaatggaaaaaaattctacatctcaatcgggcattagtatagagcccgtcacggatgagtcatctgtgatgaccatcatccgtgacgggcgccaacttgtggcccgattgagatatgtaatgttatctcaatcgggcctaaatacagcccgtcactgataggtgtcatccgtgacaggcccgggttttatgcctctctaacatgtctgtgcgaccatatctcaatcggacgctttttcagtccgtcacagatgtaaggttctgtaccagtgagggtgtacatactgtagactagctagccattagtctattttgaggtcgggaataatcatgtacgcggtgggcagatgccattggcgagataaggaaggcacactgggaggtgtggtgacatcgaggtagggctatcaacgagccaagctcgagcgagctcgtctgcccaagctcgagctcgacacaagttcgagccaagctcgagccgagcctatcgcaccttcgagcttttaggcaagctacgagctcgagctcggctaccgagctcggcaataagtagtataatatatatttgtggacccccgtttttataacaggaatcgatcgtgtaaacagtaccatttccctggatcaagtagtttggtacacacgaattcatagctggaatatcaagtgcacatacacgagtgtctaatacgaattattacatcataggcccgcaggcatagtcttaaatcatcggaccgagaggtccggaatacatccaaaagcagaaatagataaggcagcggaattcaggcagcggcatgccattgccacaggcaacgaccgtactaagacctactggacgccatcgtcttcatctccctcctgatagtaggcaagggatcctccgaggcttcatctcccgcttctgataaattttatatttgcaaggatgagtaccaa

SEQ ID NO: 45974 - DNA, 1735 bp, Oryza sativa
gcgcaatgaacagtgacttttcttatttatcccgattttagtgtattttccatctaaatttgattccacaattcctaattttacatatatgcattttactcaatattcgtgttatcttaactaatgaattcaccctagattaatattactcatattttatttttatataatttatttgagttttaattagggttaattcttattccatcgcaatgaaatttaattgatccaaatatggtcgcgataatattttatttattactatccacacctaatctttatttttaatttatatttattttaccaatttgtttttaaggtttatttctaattaactattctttactcacgattaataatcttcgagatcaactccagataaaatagacgaataagatcggcatgatgcaattagtttaaaaagtttttgaaaatccgtatttttagagttttggttttgtcggtcgaattttcagggtgttacaatattttaatgataataacttgataaatataattattttctagttaatcacactaataaaagagtagaaaataattaaaataaatatattgtgctaaaacatgctaatttgttgtgtaaatagatactaatatatatatttatctattagtttattatatcaataaggtgaacatgtaatataaactatacacaatcaagctcggtcaagctcggtagaagctcgagctcggctcagtaaagctcgtgagcttttgctcaggcttgggttcggtttgtttggagctcgagccgagctcgaatcgagcctaagacaagccaagctcgagctcctcgcgagcctcgagcttttttgacagccctacatcgaggggaggatatggagaaagcagaagtggccttgcgggctgggatgctgccgagtctagcatagacaggggacatgagtcaccaactaggctcagaggaggcagcatatggacaaagccgacttggcaaaacttgacatctggtgaaaaaatgctacactagtacagatccttctatctgtggggcctctaatatgcctacaaatagcgggccatcacaaggaagtcatttcaatcgggccgaaaagtgcccgattgagatatggtcacacagacatgttagatgggtataatacttaagcccgtcacggatgacacctatcagtgactggccatagtttaggcccgattgagataacattccatatctcaaacgggcctaaatttacggcccgtcacaaatgaccatcatctgtggcgggcaccaactttaggcccgattgagataacatttcatatctcaaacgggcctcaagttggggcccgtcatagatgaccatcatccgtgacgtgtaccaacttgaggcccgtttgagataacaactaggcccgtcacagatgactcatcagtgacgggctatatactaatgcccgattgagatgacttaatctctatcgggcaataactaaagcccgtcaacgatgagtatttttccatttttcatatgaaatatttatatttgtaagttgaactatagctaaataattaagtgcaatataataattcattttatgagtcaaaataattttacgggtagtaaatgatttcaaatggaaaaaatgtcaacaacaaagttgtataacttatcaagatttacaacatttagtttggttatttttctatataacattttttgaatagtttgaaattgaatttgaaaat

SEQ ID NO: 45975 - DNA, 1697 bp, Oryza sativa
aggaccgtatgatgatttcttcttttcccattttcggttttgcacataggcacatttccctttttgggcctttacctaatttgaggctaatctgggctcctttgattcctttacaataggttcactctaatatcataaccaataggttcacctagatgacgcatctaacttttctttctatgaagatgcatgatacatctaacttaaatatgcttgagcatcgtgaagtggccggagatcatgattcacattgtggccataagaatgggtaggggcgaaaatggtcatggaaattcccaatcgacccagtgttgttttcgtctaaggggtactgtttctaacattaccattattggttgtatatgaaatttgtttttttctaatttctttctgcatcatattcatgctaatactgagtaatttaaatgataaatatggtcaaatactggccgactgagcgtcgtttgcaaagagatgctaccaattcagatcatttccaatcatttgcattcctatttgaagccactggttcggtgcttcactaggatgtggcatgtagcgacctaagcatataggacttggagacaccaggaaccaaaggagaccactatgagttggccaaccaacaagcctaaacaagagaaccaacgtctaggtagccaacgtccttagacgcaatacaaaactgctctggctttactctaagacaactgcctctttctatgagcactgaacatgcaagtacatggtttgcaggccagtttaacacagcatatatagaacgatctgtttgctccatcctactcatacacctgcaacggtaggaggcaactgaaccatatttagtgaacatattacaatttttataccgccagtcaacataagcttgatgaatgtaaagagtgagcctatataaaaggatgtgtgcttgtggaggatggtggtgttatatagtgtttgttgtcccatgtcgcatatcattggtcatgatcgagtactttttaggtatatcacataagcagaaagaactaggagcgaaagattcaactccgacaacatgtaggaaagataggccggtccgaatattttggggggctggaacaaaaatgccagtatggatgcaatttaatccttatctgtacttataaaaagcaatagtgtttctgcccgattttcatccaccgacatgctgtctagatcgatcctgtcgttggagagcacatggtttttttttcacgtctttcgattcacgtctgattctattgtgccagggcatttcatacttcaggtggcacaaggacccttggcagcgggccgcgcatggatgggccactgctgccatctcatgtggatagattagctgcaatcgtaatatgttactgccaatcaaactcctcgttcgatgtcaaactactccatcttcatgtatgagtaagtccataatcatactttaaattaaaacaagaaatagaaggaaacaatcaatcatccagaacatacaacttagggggtcataaaaattaaaagtcaagaattcctatctcatcgatctaattgcatattgaagtgatcctctagatctctccggtaagttgtgatgtgtcgtccctccatgctgaacaaccacccatctctccctccacactgcctcactgagccatttaccaaccaaatccgctctattttgccaactttct

SEQ ID NO: 45976 - DNA, 1696 bp, Oryza sativa
taagctatatatatatgtgtgtgtgaagtgatgtatgctagagttagtgtaatattactgcagcaggtgcctatatatattgctccagtgaagatttagttttttttttccatacatgaacaatttagaaatggaagtgaaaggcattgggaaaactaatgctcctacgacatggatgggtcgagatgttctttgacagtacttcgacgttgatagtagggatttgacatgagccacaaagctggccatatatgccttctaagcgtatgagtgtgtcatcgaatttagagtgacctgtttagaatatgggagaaaaactgcaatgacaaatgatgggaaaatggccatatagtgctgtgctggtgctgagatgaaattccattcatttatcttgagggtataaacagaagaaaatagtagtatatttctatatgctttgtgctgagattttgatgaaaagtaaggagtacatgttgtttgctaataatatatcaatcacgagtcagtacagttacacaaatgcttcgctaagaaagaactattattaggtaaatctagtacattcatgtcacttcgtattcgtaatatctttgatccgagctacaagatagtaaattaagttcgtataaatatgcgaaacacagtgctgttgctaagaatacttttcccaagatattattttccttttctgcataacacatttatctttgcagctgtctaaatcctgcactacaccatgccattgtgacacgaattaagcttgcaaagttctttttctgcggaattctcagctaacatggcgtttccgaaccagcctggcagtgacttttttttttttttgaaagaactacggtaggggaagcccccaccgttaagattttatattaataaaggggaaaaaattacaacaaatttaaccactgtaataatgtatctctctcagaatttttgactctatgaactaaaagggagagatcattcctaaagagaactctccaagagggaacagagggaacaatgttttcaaaaattaaactattcctctgcttccaaatgttccaagcagcataaagcaccttctcaacaaaatgggtagagttatatgaatttctggccgtgatcaacatttcaccaaagcttaaagaaagattccaaaccacaccaaattgcacccaacattgagtgctaaaaggacactggaaaaataagtggagagttgtttcccttgatcctgttgaacaaagtacacagagcaaggaagcattttgaggggagcaacgccttctgtctaacatgtcataagtatttaaccgatcaatcaagaggagccaaccaaacaccttgactttcatagtacaactgctcttccaaatccatttaatataaacaggcacatagacatgagaaaaattcatggcataaattttctgtgaagaaaaaataccgttgccccaaacatatgtccaacgatcactctcatcattaagatgctccaaggtatctgcagctgacattgccaaatattcctgaaaagcttgctctgaaagtggcaaggcaaagagctgaggtagatcagaagtagagaacatcaaaactgagagatttgaattcctagcaaaagaatatattctatgataaaccaagtccctgactttattgttccacaaatcttcccaaaacaaacaagattttccat

SEQ ID NO: 45977 - DNA, 2849 bp, Oryza sativa
cactcgcgtgcttgctttactctgtttggggctgagtttaggtttgatatgaatgcctaagtttggattgaatatggtgaaaatagataaactataataataaaaggtttcttgaccgggttcctgggcaccccctctctttaatgtagctccgcccctgcccagattcaaaacaacttaagttttgcatcttataagaagggtatcaatggtgtatcatatatagtagaacattatttttgcatctatattgcatctactagttgaacacagataaaaagagggggaggggaggagcaagagtaggacaaccgaagacttctgtatgatattttcataatattcgtaggttcagtgttttcgctaggatgataaatacatatttagggcgctttgattcaaaggaaatttataggaattttagaggatttcatttctataggaatttttcctataaaaccctttgaatcaaagaaatgaaccctatggaattctatgaaattcctatggaatgcctcttcccgtacaagttttggaggaattttaacaagaggtagaacctcatggaagaaatcctttgagtctttatctttcctcaaattcctgtgtttttcctgtggtccaatcaaacggtcattcctatgtttttcctgtgttttagaatcctctgttttacacttgcattcctgtcagaatcctatgttttttctattcctccgttttttcattcctataattcaaaggggtccttaggattgggaggcacaggaagcaaatgagcgcattatgtcttgacgaatcaaccaagcgtgaacaagtagcagcatcctgttattgaattctggatgcagtaaaaactctcgggttttactctaacagtacaactgcctcttggaatgggcgttgaacaagggatgattgcacaacatggaggacagttgacagcaacacaaaagcagcaacggaacccgaataaggcttcagtagtgtaaaatggaaggttcatgctactgggacaaaggaaaggcgactttctccaggttggctggatgcatggtgagacacacttcgactccaaggatttttttccaaggattacatggacggacatgtggcagctagatgcattcgtccaaatatttgatgtgacaggtaaaatatttttttttaattcattcatattgtacttactgcagcagcagcttgacatgtctgtacagtctgacattcagtataatttcgcaggactgaccggttctttgactccggaggcgaattagagacaaatgaacaatttaagtgtctttatgagtgggtaaatcatcctttctttttataaaaaatcatcctattaattatgtacataactttctttttaatgtatactagttgtacaaccacgcattgttgtgggatattttttttataggttactttattttattcactacataaagtacatcccatgtagtcgcgtgtgacacttgttgagttgttatccaaaattatttgcacttaataaaaggccagcttctgccgtagtggagcggaggcccgtcgccgggaggcttgggctggagcgtagcggatcgtcatcccttttagggttccaccatatatatacctcttgtaagccgccgtgcggcgttgtaacctcaccccagatatagtgaagatattttgctggctggcgcccgtggatttttctctcatgttttgggagggtttttcacgttaaatctcgtgtcttctgtgattgatctattgttttttatcgtttgttcgcttatcgtttcctaacaacactgtggttaaaggatatatatatatagtaaaaatattgaattttctaccctaaataacttaattagggtagtaaaatagtttaccccaaactaccaagattcctcctcccatgtgatgtgccttgactagtacaaacatctgcatcctagaaataacacacaaggttagggaattaagtcaactggtattgatagttttggggttaaataagccaaaaaataacttaggatgtaaactggactaccaaaatagttcgggtagggaatggaacctttttcttctgtgggatatatcaacctttttgcattattcttttcttagctctttttccctttcagctaattactacatcatgtgcaaataaaagtcatatacaaagttatatttattctgcatttaattcagtagtgctttgctagctactccctccgtctcaaaatataagtatttttaaacttcaacacagtattcgagatattactttgaccaacaatatctataaaagtaaaatattttaaataaaaagagttgaatattatgatagtttgtttaatcataaatctagtaatatcaattttatataattgatctttttttaattaatagtcaaagttaaaaatgtttgactttacactatgctaaaatgcttatattttgggacagatggagtaataaattgcatatgacaggatatgcatataggagtatgtgaagtgatcatgcatccaagaggaaggaaaagggtttgtaacatttatggaaccgatatgatatgcatagcaccagtagagatttagaaatggaagtggaaggcatcgggaaaactaatgctcctaccaacatatgatggagatgggttgagatgattttccacagtttgagtttgccattgaggatcttacctaaaccagaaagccggccatgccttccatgcgtaacattagtggagaatgccccatctctcccggttcgcaacaccgggaggaggaatccgggactaaagatcgtcatttttactgccgtttaatacccaggagtagaga

SEQ ID NO: 45978 - DNA, 2599 bp, Oryza sativa
taagagggaaaaaaggaaaaaaaaaaagaaaaacgtccacgccgccgcctgccgcccggcggccaccgcggcccctccgtgtccgcgccgccgcttgccgcccggtggccaccacggcccctttgcgtccgtgccgccgcctgccgaccaacggccgccgcggcccctcctcgtccgcaccgccgcctgctgcccggtggatgccgcgccccttcacgtccgcgccactgcctgccacccgacggctgctgcggcccctctgcgtccgcgccgccgccgcccgccactaagcgctagttcaccactcctcagccgctcactcgcttgccactagaagaagaacacgacttagtagctaggataaagaaaagaaaatagagaggacaagaaaagagaggagaagggaagagtagttgctagagaataagtgcaaaggattatatactatgcgccaatttttagtcccggttggtgtttccaaccgggaataaaaagagtaggggacgaccactttttcatccaggactaaaaagatctttagccgcggttggtgttaccaaccgagactaaagattataaaagggcttgtaagatcaaacagaaaaaactaagccaaccagagggggtgaatgattggagtacccaaaaaccaaaacttttagcgaaattaaaagttatcctcaattcgattcagatcggtctgaccgaggttgatctaccggtctgaccgcgcctttgccatcggaatgaccaatatagattgcccggtctaatcgtcccgaagtcgccttgcctcctaacgccaccgccggtctgaccgccggtatctcgccggttagaccgccaagcccgagcaaatacaatttaaagaactctcagagtagatgacaacattattacttctctatgtgtttagaaagtgcaacaacagcacaccacatggaaactcgactaaactcaaaaccgtaactaaactcacaactcaatgctctaaaaaatgatacagggaggccacaccttccctctctatttatacatgaggtaggcagcctaaagccacgaatcaaactcgtacaagaagtcctaatccacctaggaaaccttcccgtacaagaaaccaactttacatactccaatcataccaaatttggactccttccaaattcgactccgcatcccatacgcacacacaatatctccatcatatgccatatggaatcttcaccaaccacgtgcattgatctttagccaatgtatcccgcatgctatctgatcgtctggacgtcgtcttatctccaagtcgactcccgatcattcaccggcaatactctcccgaggcatcaagacacctacacatgaatcaaacaaagaaatcatattctaagactaagatatctccaacttgactcatttttagcaaacaacaagtattagcatagcaaaagcatgccacgggagtatgccaaagccaagagcagagccgcggaaaggcccaagagagctggagcaccagaggtccgagaccgagaccagcactgtgggcctggccagagtactgaccgctcgatgcgcacaggtctgaccggaccaaaactccagcagtaccttttcatcacctataaaatccaatcatctccaaaaccactccgccgataatctccaaatatcaaaaccaataatcacatatgccaattgttcatcacagaataagaatcaaacatactttgattttacaaccggggctaaagatgatttttagtcccaattctctttagaaccggggctattaaggttttaggtcgacccagcaaagatcagctctcagtagtgtaagagaaacagaaaggagtgtgtcatggaaattagcacaaattgtagcatgagcagctgaaactgcaacgacacatagtaccacggggaatacctctgatcctgctatgatgttgaattgaatttactttgtgttttgtgctgagatttgacctaaattaaggagtatatgttgtttaatttggtaatggcatatatcaaccatgactgatcaatacagttacacagatgctattctaagaatgaacttttaggtaaaacctagtatgttcatatcatttcctagtgtattgattggatcaaaaacaaaaatcctttgagttggtcgaccgatggagaaaaaaataagcgggcgctctcctgaccaatcatcctctatccccctctgcattcttatccattcccttcctcccctcttgctctctttctctcccactctgtattctctccggcgcaggagggtatgcggagggcacagctggcggtggctttgctggcgtggcgggggacggtgcggatggggtggcaggtggcggtgctgagggagtgatcgacgtcgtgggcatcagcgacagaggcacgtcgatggggtggcaggaggcggggttgtgttgtttgcagcgggtgctaccggcagcgaggtcagcgccggtgtggtggtcttcggcgatatctcgcgacttcttccggagtagacaccgtcatggggaggggatgcggagagcacaaccggcggtgccttcactagcgcgggcgggggacggttgtc

SEQ ID NO: 45979 - DNA, 1244 bp, Oryza sativa
cccggttggtaactccaaccggaactaaagataaatctttactcccggttggtactatcaaccgggactaaagatcctcggccgctgacaggcttctgacagggatgaaccaggactaaagatgatttttagtcccggttggtaactccaaccaggactaaagatgattttttttttaactgggacaaaaatattctctagtcccggttctaaagaaccaggactattatggaaatcgttcgactctccaaagatcacttattctccagtagtgtgccttccactgcattttctaatttttagggtccaaactgccccccttcgttgttcatctcctcatcttctcaccaatctctctcgtattcatcgatctccctgtacactgcccccttctgtgtggcctccggcagcggccactcggcggcgccagcgacgtcgccacacgacggtcagcctctatgccaagaacggattggagaccgttggcatgccatgtaggacggcaaggatgggagctcatggaagccagaaaggagtcatgtcccgccggcagttgtattagagtttttagtccatctgaagatctctaccataagggtgctatttcattaggattggatggttggccaacacatagtggacgcctttgcttcctggtgcctctctatcctacttcgggaagcacggagcctgttaatgctatgaaaatatcacagagaacgaagttcccggttcaccgttcatattcttcctcctctcatcttccacctgcttttcacgtatgttgaagtggaagatgcaataaagtcaaaaataatgtacaaatatatggtgtactccctccgtactcgtaaaggaagtcgtttaggacaacgacacatacggtctccaaaacacaactttgacttcttgtttctataaaaatatttatttaaaagtgatatatgtatacttttatgaaagtatttttcaagacaaatctattcatataatttttacctttttaaactcaataacttgggagttatttatgatttatattcccaaggtttgacttaaacattgtcctaaacgactttttttacgagtatggagggagtacatctttgtgtttttaatatgacagtaataacatcaccgcatggccggttaagaaggccatatctgtgctagtgttatagcttctaaattagtagagtacactacagaaaagaaacttttgcatgcttcatgtcacaaatagt

SEQ ID NO: 45980 - DNA, 973 bp, Oryza sativa
aaaaagatgaaacaccattaagtatcaagtgcaacatttcgatccaacaaatagacatccagatacattggctgaaacatcacaaactcataaaaatgtaccatgtcaaatctgatttcttcctcgtcttcggtgggctcctccagtgatggaccacttgagtagaagaagagtactccccttcataatgcttccttcttcaggtcttttgctagtgaagtttgggaaagctagtagggaactgcaaccagggagagagttctagtgagtccagaatctttctttcgtccatcaaagcaaagcatggcaggaatcccaaactcatcattttttcttcttatcattcgtaattctactatggttttgatgtcttcttgtgtcgctatttgaggtttgagatcaagggaatagctaagcttgtgggttgaagtgagtaaagatctgaagctatggtaaataataggttgaaacagaagaatgataagaataaagtacctctctgaagagctactttcttacttgactttctgatcaatagaaaaagccttgatgtcctcagctagttgacatgcgatccaaccaaggaggcaatacttttgcctgagttcctccagatcctactcgtcgggattaccgtgctcccgcaggttgttcaccatgcgttccatagcatttttactttctaccttttactatcttggaatcatgtagatgtaaattgcttttattgcagccctaaaggtggcttgtaccagctcttagtcatcatacgtacccattacatagatgatccgccaagcccaagcctgaaagcaagggtatgatgaccactctctaaaaacttaaaactggtccccatgagaacggagactaggtgaggtccgaatgtgcgaacaacacgaccccaccatctgtcaccccatcgatgccacctctgacgccgacacccctaagcgtcatcacctgccaccag

SEQ ID NO: 45981 - DNA, 763 bp, Oryza sativa
gcggttgtgatagcatgttggcattgtcctttatgaggtgatgtcgttgaggaggtcaaaacaagtggtgataggccttggtgacagcagcaattaacaagctagtgtgtcataagacatttcatttttatctcttgttggatatgctgatccttattttcttggcaggtaaaatcaaacaccagtcaactggaaaccaataataatgatcatcattcgcttgagaataggattcaagttttggaatcaacagaaaggcagaacgcttctagattggtgaaaatggaggagtctattatccatcagcatgaaagaaccataggagtagagcaagacttgagtgcaaatataactcaacatggtcagcaaattcaaacgctccagaacaaagtaagtaaattctgtttattatgcctaacattttgccctgtataatttttagaaattccttactgtataaaatgtgggccttggggcttgcaaatgtggtagtaacagggggcggacccaggggtgtgctgggtggggtcacagaaaatttctaggatcagttatgcagtccatatccttacagctgtaagaacaggtgtaagcaccgtggaaagctcattagatcattaattcaccatacgcctgtgtgcaaacattaagcacacgcaaatagcacatcaatgcagcactgtcatgacccaataagagctctagtgtcccatgggggagtagcaccgttgtgtgcttgtcagcctgtggcacctaggaggct

SEQ ID NO: 45982 - DNA, 756 bp, Oryza sativa
aagcatttgatctcctttgccttagtgctatgtttctttttcgaatgtgaatggaaactgcaaaatagactatttatgctattgatccttacaagtattattaatataacatttgaagcaattcgattatatattagtgagattcaacaagcataatgagaatgattgcttagttgctgactcttgtaggtgcatttttcccccccacgatagtggtcaacatatgggaaaatggtgtgcatataaaactggagatggttatggtctcattagaaacaccagctgtgctttgtcctggaaatctttgtaggttgggatttttaccattatgtgcattaggttgcacataagtagtcttggatgttctatattatcatcttcagcttaataacattggctgaattggtgattctaatagttgtatattgtataaacttttctattcatcatggagatgcagtaaaccaggttcaaacaactttgatttaagttatgaaccacaccatatctatagacttattatttacatgttataaaattccaatcctctgtgaagattgtaggtttgactagctcccagctttgcatatggagacgtagtgagccgagaagtatttttcaatctcgtggagcctcattcaaccgtggcttatgtatgaggtgaggaacatgctttaagtttgtaaaatgacatgccttttgtttcgaacaaatgaaaagttagatgttacatatactactgaaattactgaattg

SEQ ID NO: 45983 - DNA, 634 bp, Oryza sativa
ataaagagtaggcggcggacgggtcgtagaggagtatagtggcagcgtttgacgagatttctaaagattataaaaaataaaatccaacgagacaataaattataaaaactataaggtccaaatttaaaaggttcgggcttatgaaaagtaaaaaaaaccaatgataaaatctcaatgagagtaaagaagggaggcagcgggcgagccgtattggagtacagtgataaagtcgctgacgttttggtggaacttccagaaagtaaaaaaaatgaacctaaacgataattatgttcgatttttaaaataccaatgacaattaagagaagaggtagtggacgggccgtagaggagtataatggcagcgtttgatgggacttttataaattataaaaacaaaacccggcgggacaataaactctaaaaattatatgatctaatttttaaatgttccaagaagaacgaatagaaacagtgctagatcgagaaagcaaataaaaaaaagatatgacataattaaggggtatcaactggcgtgtgacttttataaaaactataaaattaaaaacacagtgatgataatgtttggtccaacgagataattatttaataaattttaagtaaaattatattaaaa

SEQ ID NO: 45984 - DNA, 1715 bp, Oryza sativa
tattgtgttcttttaatatttttattttttatttttatttttagtcgtttcaaaattatattcctgcttgaactctctttttaatttgtccaatttcggattttattctatttttcattccgaatcttaattagtattattgggttcttatatatactcttatttcaatattgcttatatttaattccgaatttcagttaattttaaattgtatttctacctgaactcttcttttcttttcttttttataatttctatttttttattccgaattttaatattttcgtattgggtttttatatagactcttcttccaatattgcataattttaatttcgaatttcagttatttttaaattgtatttctactcaaactcttcttttcctttttttttttgctaatttcagattttattttggtggtctgaaaattaattaatctcgtattgggttcgtgtgttagtttaccatgagcctatgcttttcacagtaaatctagaattctaagcacaggagccgtgcagccagacagagtatgaagggccggtcggcactcggctcctgggcagctgcaattctaccccgtaacggtttcattaaagaaaaggaaaaattcgtgcggctgcaatcctaatcctactccttaacggtttcatcaaagaaaaataatccgattctgcctgattccaaatatgagcagtagattgctatatttcatccacaacttattataatttaaaaactacaattgtactacatatatattgctatcaacctacaccgttataatttagatccactacgatctaacggtgtagatttttctttttttctccgattaatgtgagaatttctagtcccacagcgaacgtggtgcctcctttcaaggctgttttaataatataacagatagatagatatctggtcctacctgttatacacacattacgttctgaagtccgtgttacagctggctacagatgtatagtccgctgctcttctctttctttatttatctttttaaaatataatttatatctggtttatagccctgtaattgtacttgctctcagtggcttgtggtgacatcgcgcattcgcaggtcaggtcgagataagagactccactcagccggcagggctgcctcctcgtgttggctttctggtaattttctttccccccaaaaaattttccggcctcgacgtggtcgatgcgatccatccatgatgtgatgtgaccaactcaccaacggcggaaagccaagcccatcgagcgaagcgaaggccgccgcggacagcgagagggcgcaatttttgtgtagtactcactccgtccacggtataagtgattttaatttttttttttcaccactcgtcttatttaaatttttttttataaatatataaaataaaaagttatgcttaaagtataaagtaagtcacaaataaaataaataataatttttaaaaaattaaataagatgagtggttaaatattgtaaacaaaaactcaaaatccctatattatgggacggtgggagattatgggacggtgggagtaaaagcgtttccacttcattataaaaaaggcggcggccgcgctggccacgctcgggcaccaggaaggcggagagagaagaagttttccgcatcgcgaccgcgcggacgatgcaggctggccgtcggatcgggctgaccgcgtctcgtttagaaata

SEQ ID NO: 45985 - DNA, 1979 bp, Oryza sativa
catcccaagagattatttctgctgatctcaagaagaagagacggagccccagcttgctgggcaggataatgttcagaaagaaagtggaaggcagctaggtcatgctgctgatctggtggatgcactgtgctggtaaaagcttgcaaaatctagtagcgctccaccactatgctgtcactggagatttcgactttgaacgaacgagcttgttctgtttgtgagcattcctgttccttagggtgcaacctttttggacacgtattctgtcacagagactgatgacttgtggtaagagactctgagcacatgatctgtatcggttttccttgacatggacaaattttctttttgtatttatggcctccatggttgtgtaaatgttaatttaataagttaaaaatttgttcttgttcactggaatacgtacatgcaattctttttttctgttgagcggctccaagtttcaagacctctctatactgtttggaaaaatccatacaccgacatgagattacaggtacagaagtagagattttggaaaaaaaaaatatatcacaaattcacaaataaaaagcattggagatggattgcttctgaattctgatactgcagaggcagatatccattgtgccttttgaaaccacaatagcgatctactgttagttgccccgtagttgtagccatttgaatgcaaaagcatttcaagattcttttaggtagggtgaggtcgccaccagtactcatcccaagaaggattctctcatcacagggatgtgaccttctgactttgcatagtatactactactatatttactttataaacagctgaaaaataccaatcatgctttcctttcaaataaataaaaaatcatgccggtgattgtcgtaatcatttacgaggtgtacagtacatcaccggcccagctgatctcaacagaaagaagcacaattggcgtaggcctcatcatctagaagcaatacgtcaaaacttatcccgagtcagcagcacaaaggatggccatattcagatattctaaaggcggccgtgacaggatagaaggcaacaccatcaagccactggggtttccagacgctgaccgatcccaaaaacaaacaaaagtctgaagcactaatatacttgcgtcaaatacaaaagaacggcatcactgcgtctgcatgctactgacaattttctcaaggctttatattcctcgagtcatttgcgttgcagttgcagacacctggatgcagttctgctccaataattagattatcattcaggttgcagacaggaactcatccaggcccggtgatgcctgggacggcaagagcttgtctttttctttcattttttttgtgttatttttctgctgctgatagactgatgatggcaattgtttgtcacttgtcagtcatgtactctgccttgtaccttttgttgctggatagcgttattcggcaacgtagccatgttatcgtgtcttatcctgtaatacatccgtcccaaaatatagctatttctagcacagtactttgttctaaaataaagctatttttctacctaccttctcctctcaaccaatcacaactattctttttttacctattttctcttttcaaccaatcacacaccttcttcaatcattctcatctactttcttaataccgtgccaacctcaaaaatacttacattttaggacggaggaagtaggctttctttgggttgtaatgcaggccaaatggcaacttgtagaatggtttcagatccttcacgccgcgtttggtttctgaaggggactgagatttcgtctccttcccatttggttatagttatctgtttatcaccacaagttactgtttgcttgtgttcttggtccaattcagactgctgcagtgctgctttcttgacctgcagctcatccaaattccatgtatacttttcttgccatggttatcctttgtaacactaaactgtttc

SEQ ID NO: 45986 - DNA, 2335 bp, Oryza sativa
gcagctcaggctgcgcgttccgcgacgacgagctccgccgccggtaaacaagaacagccaccgcgaccagcgccgcgaccggcaggaacacggacaagaacagcttcagccacagcgccatactctcctaattaacctcctcgcacctctcactctcacaccactctactcgatcaaatcatcctgcgccaccggagctgagtcggcgaggtggggcgaggtcatggacatggtggtcgtgcctggactgattcgtgtgacctgttgagttgtcgtgggggtttggtttggtgagtggtctaggaaggcaggcgcggcaagggaggaggctgactggctcaacggaagcaggcgaggaggaggaggaacgggagggcggttggagatggaaaggtttttaagccgcgggaaagcggggtgcatttttggggtgatttctctgtgggtgggtagcccgtagccgacgggaggagggctaatctgcaacgggtacatgggcacgtcatagggttgttaggttagtgacgtgatgtgagaacgccttatgttaataacacaggcgaaagtgttccgcaccaaatctctgtttcctgagtatgaacacttttcgggctccaaatggagaaatgtttttgcgttccattggctttatagcactcaataattaattaaacatttgttagcatacagttgtgagactaaacatttatcaataagcgtagcatatatatatccacgattctatgatagagacgccaattgtagtaaaccagtaaatttagtacatatttgtatttttaattttaatatagtcgtctttgtcattgtgttgttcttaaaccatcgactcgttcaactagatatattggctgataataacaccttcacacttttacgcccccacattttttgttgttagtatattacttctgtgaaaaaaaaatgaaatgcattgaaattttgtttcggcatataaaagttaatgatcagtataaccttgaatacgacgattataatctttttagactaacgagattgattgataggacaagcctaagtgttttaagacaatggataaattggtcattgctttaatagaaactacaactacttattacaagctaaacataagagccttactgaatgaatgattgaatgaatgcaaaaatttaattttgaacggaacattttgttgtggataagctagtagtgtgtccttctctcacttagtgaatgtggctcacaactttgatataaaatgcattcccagaattatgtatgaatatatgatacatttttttagaactaatatatgatacttggagtagtctagtagatgcagcactgctctcaacgaaatgtcactatgtggtatttgtgacaataagttgtagttggttagttactatcactttcccaatcactatgataaactacatgacgttaccaaatacgtgtaatgatgaaagtataagtacacaattggtagttttcgctcacatctcttattttaaataaaataaacaattgaaacgctctagtcactcacatatcttattttaagataaataaacatatcaacatgcactagtcatccgcataccagctcatctgtactccctcccatatttgattttaaatatatgtttgacaattcattttacttaaaaattataaaaacattacttgttttgttgcgacttttaccattaaaggtgctctaaacatgtcttatgttttatactaaatttttaataaacgaacgatggaaacatgaataaaagtaaataatgtcatatatttaaaaatagatgtaatattattttgctgatttcaccaatgtgaaaaaaaaactgtccctaagaatcggtcaagttatgtaatttgtgtaacctcccccctccctacaaaagaaactgatggatgttggcagtacttcttttcagctgaaaatttttcaaaaaaaaaaaacttaagcgcgtaattaatctgcataacgcatccgttaacccttttttctttgcaaaagcttcagctctgacctcactcctcactaagccatccccttgcagtttaatttggaggtacaaaacgccggtggacgtaagccggatggcacgcgagaacagacgtcagatatataccaaatcctatgaaaagtaatatgttctttctccgatgcgtcggtgtcgcggcaaacgtcagatgcccgcatgatcatccccggccgttctgttcacgatttcttccacttttttctattccaacggctcgctaatctctctctctctctctcgttgatagcaatcaacagcacgtgatttggaaggggctc

SEQ ID NO: 45987 - DNA, 821 bp, Oryza sativa
aaatttcccgtcgcccgggtgcaaaatcccatagctggcggggcaaaattcacacttcgtcttgtagccgtgcggtttactcttatctgttgatagagtaggaaaacagaagtcataaattaggatccttgttatgagagtaaaatcattagcagctgacatcagagagtcggcatagcagagagtgacataaattaggcaccaaaccaacacacgataaatgcagtttatgaaattcaataaatccgtaacatgagccgtgacttaccgatgatggtgcaggtcacaacggtcgcagagtcgtagtcgtcgtagcgtagctcggcgaagaactgcttgtcgggtgactcgggaggagccctgttgcgcttgttgcgggagcgtcgcttgcggcctcttttcacgtcggattcgtcatcatcggcagcagcagctgctgcttcatcggctggcttcaccgggctgctcctcctgcgagccaggaagctgacatgaacccagagcgcgcgtctgaagctgacggacgcataacccagagccttgacaggtcgaactcggcgccctggaaaaatgttgctactatgtcagtaacatggtttcgtttaagtacattgctaatcatcggttttgcatccatacatattcagttgttactgcagttatgtacgtagtgaggtgcttacaggattgttagcgttgtagtgatggagagcgcggttgacatggtcgacgatcaaggagagttcagcttgcctgcaattgcaagtgcggaattattgttaccgctacatatactcctcatcttaagaaaatgaagaaat

SEQ ID NO: 45988 - DNA, 1085 bp, Oryza sativa
atgtatcacataaccctgggttggtattatgggctataaagtttcacgaaactaaactatttatcattttaactttgatcggagaaacacctaggggtttttcggctagctccacaaggtggtgggctaaacgacctgggttcgaagctttaccccttctaattatttgatattaggccctttcctaatatttattttaactttgatctactacacgtttgaggtctacaatcaacaatcacatatcaaatttatgagtttttttatctgttgtatataaatgttacatccatataagtaaagcttcttaaaattgtgatataaaagtatgtcaaatttgttaatgatgtggttgtgtcaaaatttatatagttttgtgagactacaatagattgggttttataaaatctattctctctctctctctctctctcttaaaaaaagttcttttctatgaccattatgctgtggcacacaacaatatatcgtgagaggatttttttttaatggaatcgtgagaggaattgcaagttcaattttccaaacggccccggcccgagccaaaccgcttgagatctaaacaatcaatcaacatagggaaaacttgcagatcgatcgtgacgagctagctgtagacgatgatcaatggaggcgcaaacatggcatgagaattgagatcgaagacgtaccgccgttcagggcatgggaccccgcctcccctgcagcgacgaatgtcgcagccgcagcggcgcagccgttccaccgcctcgtcgatcaaacgctgccgccgtactagctccccgcgcgacaggttgaatagaaagggcagcctcgtcgtcgtcgtcggcggcggcggcggatcagcgtcctcctctctcgcttgttgggatcccatgtcgctgtgatccagccaagatctaatgttttacaagaaattctcaaaaaaaaaaaaagagaaaagctttacaagggaggctaaagtaaattcggcccatttaagtgttcaggcccatttaagacttttaggtgctgacgtgggctgcgcgtcgtgacccaatggaacgggctggcttgcaactccgtct

SEQ ID NO: 45989 - DNA, 1073 bp, Oryza sativa
  unsure (1)..(1073): unsure at all n locations
ttatagtgtcaacttctccttttgacttgccttgactaacgacaattgtcaaattttgccgttaacagtttcttacaatgatctagctcgagctacatcaggcttcttcgagtaaaacctaataggaagagaaatctatggttcatagttactgacttagttctaagcacgacttagtagatcaaacttaactgatgcatcactaagtatgaaaagaaacataatatctagacnacaagcctttgattgattttcagggtggtggataccttagttaatctaatctagcaagataatttaaccgataccagtataaaccctaaaatgaatctcagccgatatgatcaaattaagatgctaatctagattaactaagatatatgataaataggtaggtaaatatatcaaccgatccagagtgatccaagagggcgaagtgatgtaaccttgaacaacatcaatgtagctgatacaatctctagggccggcgaaatgtaggacttgccccttcaccggagatcgaactgaaccgatgcagccttgcatcaggtgacaagtttcgccggttgataagtaaaaaccttgaaaaagagggtggcgatgcgccgagagtagttgtattgatctgtgagatagtttacaatgactccatgtgtacatatttatatccatgggtagatactagtccttattggataataaagaaacttttctaagataaaaaggaaaacataaagtccttatcggacactaaacacactctcctaaagataacaagaaactaatggactcttcctaattaatagataaactctgcatcctccttttgaactcggtctcttatggataaatttcctttaattcaattaatttccttaaccgaacccatcaagaatcagactactggcgactgttagtgcccatcggccgatttgtcacaccccaatccggcaccgccatacaacggcacctgacaagagcgtgtcgtaggaaaaacggcgcgaaccgcttcatacgaaaccacgatcttagtaccagtcccaggacatagcgctggtaccccggtgacaaat

SEQ ID NO: 45990 - DNA, 1806 bp, Oryza sativa
aagatgaacaagcgaggcctctgtactgttggcaaggttcaggaagtttggtcggtggatttaaaaagggggcgagggctggagtttaatggaggaggagatgaggatagctgggtaggcgtcgaggatgcagcgggagtggccctttcgcgggaaaggggaggaagaagaagatgaagaaggcaaccaagggaagtttggtggttccagcattctgtcaaactcaactggagcggttgggctgttgagttctgtgtccgaaccgaaacacacacaagcccccactggaagtggtttttcttcctgctccacttccagctcaagaatgatgtcccactctcttgacattctaccgggatgcaggattacatgggtttgcagctaattttaaaaaccttacattagttgtgttttgtcatttgaattctgaattcggtctgtctgcaatatgtttgctcatgatgcagaaactgtttcaaccaagatgagtatgactggtgcatatgggttcgtaaaatgtcacaatgcgtgtaattttgctttcagaaaatcttgtgcagttattcttaggcctgagaagagcaatctgaactacctagccatataggggattgatgtgccaccttatgcgtggtgttaagctaatgaacacaattcggtaaaatgattctgtcagcttttgaggttttagaccaaatcactgcaccataaatcacatgacgtcagtttatcacgctgctagggaagtgaagcaagtcatacactatcgtcctctagcatgacagaaatgtgcatcacaatacattcttaccagttttctatagattaggtacgcacatatagaatacggtttcaatgaaaagggtcatcacgttggtccagaaaaccatctataccatatagtacagttcgagcaccggatgaactagttactagatactgtatggaattagacagtgacgtaggatgcacaacctgcttgaaaaagggcaaagctatcctgcatttatcatcagttggaagattgcatcggtgggaagctaagatgtaacatctgggaatggagcgaaagcccaatatgcagtaggtgcagacatacctcacccaatggtgggtcatgtgaagtaaactcagcaccaaaccccttcttgagccttggtgtagtagtagtagtagactgtgagcaagtagtatttttcgcacacaggacattggctgatgagcgatcaaatcgacactgcaaaaccctactaagataaggattggtggtgatttgcaaatgaaaggtacgtaatgggaagaattagaccaacgcatgtttatgctctatgcttacattacatccgaaataaatgttgtgttccatacttccatgcttagcgattaaataaagtatagcagtcattagttattccataatcacaatcattcaggaacaccaattgtgtagcatttctccatttagaaaaaaaagaagaaaagatttgtcgtgttcagaacttcaggctcaacaatcttgcgggcgttttcttttgttttcggaaatggtgacactcgtttcagatggtgtcctgtgtcacacaagttatgtgtgttgcacagccattcctctagcagatttctctcgacgtggttgcgtggtctttgcaatgtcaagaatggtgggggttagccggttaggctgtctgtcatggatcaatcaccgtcagttttgcaccctaattgagcttctgcctaattaatatcgtccactaaataacagtgcttttcatcaaactgttgtccggtggatggaccagtcgccaa

SEQ ID NO: 45991 - DNA, 2393 bp, Oryza sativa
agattgactatgaaccgagtagggagatggcattgggcccggttcacctattagggcccagcatcctaattacgatgaattttggtactaagttcacttttgatccctcatttgagatcgagtttcaaacacatccctaaattgcaataccagaaatcttaacatctaacttataaaaccgagttaaagtaggtacttcgacagtatctatggctggtttcgctaacgtggcaagttgacccggtccactcgtgctgaccaagcgcttatttggcaaaaataaaagtgagccccacatgtcatctacaatctactcacctccccccctacctctcctctttctctccatctctccccctcattcctctggagttcgatgcatcaagtgttctggcaaggaacagcgcccagcgggtaggaatgacttggggatggttaggagatgcgatgtggtggtggcggctgccatcgcaaccatggcagcaaggaggtggagtggggttgggggtggctcaggaacgaccggaaacagggcagctgacatcggagacggccgtgaggtcgcataaaaccgcccaactcggtaacggtggagaagagagggacggcggcgaggtcactcccttccctcttcctccagatccgcgcatcattccgccattgccaacggtgtcaacaagcatgatgatgtggtcgatcaagcggcattccgacgagctcatcgctgacatccatgtcatcgaatgggttcagctctcagacccctcctctgtggcccatcgaatcgaccaccaccaccaacacccatccttcctatgcaaccattgtggcgctcgaggaacctagcagacaaggatgcatgatagaggctgagcgatttcggggcacacagcggtggcgacggagtctatgagagagttgtttgacccacatcggcccaccgtgatgtggagggaggagggaagtaaggctgtgaggtggaggcgatgatccatcgagagccagcggagtccaactttcatacatacatcataccaccattcatcaaaaccctctacgggattagtagataggcttatgatagacacatacaccccttttgtacttgtgttctccatatataaataaagcaacctccccaaactgacaggacgtaggattattactctaaggagggcttaaacctgtgtaaaaatcgtaccttgtctgattggcattccctcgataacacacaaacatgacacatgtatacaaagtttctattgtcaggatttttatcgataacaataatatatactataattacaaaccaagctagcccgtgcattgcacatgttattgttattgatattataattatccaaactttaattatacatattattaaaaaatattatcactgttattttagatagcggtatatacattagttacaacctatatattaatccacacacttactaaccaaatcttccaggttaatttttttttacaattcttaagaaaacaactaagctactaaattttatactaaattttagtacctcaaagtaccaagtatttggaggtattgagttttatactagaaaatgtacttctatactttccattacatttctaaggatggctaaattaccattctttttaacacgtgggaggtacgagtattgcccaatttttatagatatagataaatactagtgattgtctaaatggcaattgatctaagaactatatagagcaataatgataagagttaagacaactaaataaagtatgagcgccaagatattatgatggagttattgtcattgcacgagattaattagtgtgtatctcctctgaggattggcatgatccttctgaaactatacccaaaactaacagcaagcaaggatattaacttagaagttacaacacaaactttactagcttatacccttacctgccattacccagcttccggaaggcagcaccttgcgtgtgtgtcactcacacccagtcaagcaaaacctgatcaacgaccaaacgagttgcaacacaaccgtgatcaagattcgtctaacctaaacttgacttgatctagcttaattaatcgatcgatcccctaattagctatactagctcctgttgctcctcttcatcgatcatcccatggcgccattgaaaggcgagctccagttggccgagtagccgttcgccctcgcgatgctcaccgtcgacgccgagccctgcgacagctggtacccgccgccggcggcgccgctcgccatcgccatggcgtcgtacccgatgagcttcccctgctcctcgttgccgtagctgcaggtgtttccatggttggtggccgtgctgctgtgcccctggtcggccacgacggtgctcgccggcat

SEQ ID NO: 45992 - DNA, 4225 bp, Oryza sativa
gctggcgcgtttatgccctacggctagccggtgaggcgggtagtgacgcggtggggcggtggcggtggaatgcacggtggggcggtgacggtggaatgcgcgatgggagggagtggcggcgacggaatgagcgaggggaggggaacggaaggagagttagggttaatacctctgcacgaatctaaaagcatatccgacggtccaaaatttgaaagatgggaggtgggattttctgtcaacatatcctatatatctatacaaatcatccccactactaggaattctctacttcctggtgcttccacgtcaccccatttgctattaaccgtacgatctgaatcattcggcagggaatccatgaagcagcctcccagagttccccggttgtttattgggccaaaagaagcccatgttatggcccaactcaacgggtatccatccctaaccagaggaaaacccgaattttttttatttatacttttttttattaaaatatttacaaaaataattttttgtttcgaaaatttacaaatctaatcgcctgccgccctcaagaagggcgatttttaaaaatcgcccttccacagggcggcaagggacctaaatgtaaattttccagcataacttgttagctctataattttacaatttaaaattatattatataaagtcagatgaaataaaactttatatcaaaattgtagagctcaaggagatctacaactttgtagttagtaactttttcatttaagatgttttagatatccaaatattcgttacaaaatataaaacacattttaaaaaatctcagatctatatttcaaacgatattggatggagataaactttatataaaagttgtatatcttgatgagatctataactttgtagtttatcacttttccatttaaaatcatttggagtatcgaataagcattattagtttttaagtaattaaaaccggtgggaagggtttaacacaaataaaaattttgtatttaggtcccttgccgctctttgagagggcgatttttaaaaatcgcccttcttgagggcggcaggcaattagatttgtaaattttcgaaacaaaaaattatttttgtaaatattttaataaaaaaaagtataaataaaaaaaattcaggaaaaccctccagttccatacaccgcaccacctgaggtggcggtgcccgtcacttcctctcccacgtgcgtcgtgtccctccatctatatggcgctccctctgcctttggttcaagcccacctgccgcctcccagccttttcgcctcctctttggaatgtcatgagaaacgaaaccgctgcttcgagatcagacttcatggttgtcatcaaatacatcaatttactgctcccataacgtcatggtgaattcatccttggccttcgcttattactggggaatgcttcaatcaggttctctgttctcctccaccaactctgcttcttccacatgtacgatgttctgcattgataaccgtagtaagtagttttatttttatccctttggatatttgatatgtacagaaagttatttggagatatggtatctacagccttccttctgaatgtgttatgctgctgctgtagatcttcaatctggaaaaaaaaaaaaaggtatgtaccgctttccttaaaccttcctccgaaatttattcagttgtctccaagcgaatgatcaatttaccctattctctttgtcagagttaagttcaatggttgttttaaatagctaaccggtgatgaataccttataccatttaactgaattttattcagtacgtatgtcaatccagctgattagtcctaggttgattttttgaatcaaacattgcagggagtcgcagtaagtcattgatttgttgtacaataagaacatgtgctcgctcaatgtattggcgccaacaattggtcaagattctctcacctgccgccattatcctgcgggtaggcaactatacttctattctctctctgggtttttttaacattattcatctttgatcttggtattaggcccgcagctggctcagattaatctgtcctctttccagccaatgaccatattgcatagatttaattttccctaaactgaagtgataaagcaagcttctacccaactggccacctttattctctgatgatgaggtagtttattatccccaggtcttctacctttaactgtcatggtttttacctttttgagaatccagttttccttttcataatagaagatgttgccgaaggtgctctaatctttctcctttgtttctcatttttcttgccatagtatcatcaggtgattcactaccttaccatattattatcaggtgattcagatgtagtgaaaggatgtaattgcatgaagtgcatgatttgatcaatacacaaaatagaagtgcaactgatcgtcatctgcagtacagggcaggtatttcagtatttcactatccatcagttaagtgtgttagtattcgttctccgtagcttctattttacggaatgtttttttctctttctgaattcatcctgcaaatatcacgttttttgtttagtttaaaaaagtctagaaatgtataagctttactagggaaaattttcagctatttgtttactcaataaagtgcaatactgcattacgaggtaaaacttaactgaccctttcaaatgttcccatagaattttacttaatctattgttcaaagtgtgttgtacgtattttttatatatatttgaaaatatatacactgttaattacacaccgttaacttcacatgcagcctacacattgttgctcgactaaccgagttttttttactgtagatggcaggttcatttgttgtacgtatggctggagctcagaagttgcttgcaacctaatcaggctaaccattcaatcatgacgtaagaatataacaaactggtgaatgtgattcagtaaacaaataagctgctaattaattaagaacttccattattctaggtgaacatcttcacaattcactgctacaaacatcagggtttcaaattaattatcatgtaacattagactatatgaaacaactttcggtcaatatctattactaaaagtttacaactctaggtcatgcaaaaaaatatcccgcagcaacgcgcgaggtattatctagtatatatataggcagtcccttaatattatgattagctttaatttttgttctaatcaaaccttttaaatttgtccgagttaatagaaaaaaaataataatatcttttaacacaaaataaacatattatcaaaatatattcaatgtcatatttaatgaaactaatttggtattatagatattgctaattttttaaatttgattaaacttaaaaagtttaactagaaaaataatcaaggctacttataatacgaaacgaagagaatacatagtatgaacatgatataaacacaatatttagtatttaccctcttcacgggcgtttctgcaaatatggttttttaggccgagggacatggacatgatttctccatctgtggcgtgcatccgcagaaattctccaccagctcagcctcggcaagacactaagacagcacagcaaactccgcacagcagcaagtcggcggtactgtacacgggccgactcttatcgcccggagccggtctcgtctcagagagagccagcctccggtggaggaaaagctcaagaagtccaccaccacttcgcgaaaccccaattccaacccgacttctccactccacgaagagagccagctccgccgccttcaccatggcgtccgtctggtgcctctcggcctcggcctccgccgctgcgccggtggcggcggcggcggcggcgcccgggcccctcggggcctcggtggcctccgtctccctcgcgcgggcggcggtcccctcgaggaggcggcgaagatgggacgcgctcgtggtgtgcgcggcccccgacgaggagaagattacgcggcggtcgcccctcgattttcccatcgtaataatccccctcttcccgattcaccgtgaaagattctatcggtttatgcactgattgttctcgtgtgtgttgaattgagtgctcgggttgaggaatttttttttttggtcattttactagcttatagcatgcggattcatgggatttggggattgggggtggatgaaatcagaagaaatgccatatataggttcgtagctcgcag

SEQ ID NO: 45993 - DNA, 1959 bp, Oryza sativa
attgaaagtatgtgtatgattttttctagattttttggtgacattttttagttggtgtgcacgtgtgtacacgtgagggcctgtgtgcataggatatgttgccctattagatagagccatcccagtgacattctccttacttttcgaaggaattcgtcactcttcagcatggagtgccatttgaagaagatctcggctggagtacaaatatgttatttacttacactgcttgtcctgtggatggagttgtttgagttaaaacaactataggatgtttggaggtccattgaaattatcataggttatttggaggccagagcttgttaagctaaccttgtagaactctggagatctctaagtagaatgttgagcagattagctgtttattattccgtgccatgagattagttccaaatgttcatccttcagtaaatagaagcacgaaattttatctggatttattgctgtaacttgcattgaagtaatcatgtttggaagtaagaactcctatcatatccttctcttagccttttcatttcagttgttctcttgatgtcatcatgctagtaattaatttagcttgtttcaaacacagcttgtagtttgttatatcctagagaagtacatgttagttaatccttcagagttagtatagtgatagataatgttcatatgatagtatgtaagtgaacatcagtgctcaggcttatcagttgttttgtgtgcatttcccattgtgaaggtcagaccatgttacatgaaatcttccattcacatgcaccatcatgtgttcaatgttggtcgtgattgttatcatattgaaactagatttgttgatttattttttgggggtaatgctgactagctgagacaatatgggaaaattatcacctcatgtcatgtttcaatttttaatatgatagccatagttatgagtacaagcatcttctcctttttcatatggttctgtttatattacagtccacatcagcaagcattttctttccatatgtgatttgtctttagccttaagcaaaaaatatgcactggttcagtggtttatccaccttttacgcttttgtgctagcattgaaataatgtctatctttaattaattttcaggaatgggagaaaccaaagcctgggaggaggcctgatatcttcccaaaattcagccctatgaaaacaccattgccccatccattgccagctgatgatcctctggatgatgatgaggaggaggaagaggaagaaccacaacctcaggaggaaccacaggaggatgatcctgacaaggaagaacctgaggaggatgacccggacaagccaacggagtaattttggatgatgtgggttatgttagataaaaacactatgtttagatctgccatatccttgagagaacgtcataggtctcagggtcaggtttgacctgttagttctgccggctcatataggctgtagacacgtttgttttgggagcacccctgagcttttctaaagccatggaagttttgtctgactgatcacaaatatgcaatgttatatttctgcagaaatacttctctctctgcccgttgaatattcataccgccacaagctctttgccagataattgtacgagtacgacaattgtgtcgctctatagacatgtaatgctgcttggtattctgaattttgatggtatttttaactgttagaactcatcagcagttgaatttccagcactcttgccaaaagtgaaaatatttgatacagaactaggcatttaaggtgctcctcctggcgcactttgacatatgtctggtaaatatgatcacagcacggtgtaggaaactaaaaggacgccaattgtacactacgcgataatactgaaatcttgttatattctatttccttgtaaaaatgtaaaacaatggctgttcactcgaaattgtattcaggaggactgaagtgtta

SEQ ID NO: 45994 - DNA, 659 bp, Oryza sativa
agggtttcagcacttggatgatcatgggggctgcatttgaaaaaacggcatgatgggacacaatttctcagtagcagtaaaattggtactctaacttaattgcagtaacttaatttctcagtaatttaaagggtaacacaatttttcaccattctcatctaacttaattgcacatgaacagattattattaaatgtgttcagtgttagttacctttctatctcacaggatgctgagttctcctgactgattttctcgtcctggtctagtataactcttgtgagttcttcatcaagttgactctcttcttggttaaccaaaatatgatctgtttttcggccttctaccgactgaattgattcttccagtgcttcagtttgtatgtctggagcagatgatgatttcggactttttatgtcacatccaccattcatgttaccaaatgattcctctccatccaaattctctgtattattattcacagtgtctggttgttcttggaatgatatattcttgtactggttgattatatactctagaaccaaacaaacctcatgcacaaacttttcaaggtcagttttaccatgcagtagatcatgacagacatggaccaaatgctcaaggcgagcacaaaattcagacctgtcaagcagcaatttt

SEQ ID NO: 45995 - DNA, 629 bp, Oryza sativa
ggactcggagtcaggcagataatatatccacggacatttatagaaaaggttatattcaattctcccccgctttgctgggttcagcaaaattagaatctccaaattctacttgcaagattatgttttcgaggcgagaaacttttcggtagagctttggaaaattttataagtcacatatttcgtacatttgagtttattttttctatggttggttcttgtatgcttctaaacgtgaaagaaaaataaaaataatagttgcacatctctctctcctctacactatgcgggggacgccagccacattggcgcgctccccctgccacctcagcgccgacccaccacagtggcaggaggacggcgatagcgactttggggccccaaaatggaccattttttagataagtttttccaagtgtctatttacaaaataattttttcaaaaggactaaattgtaaaaaatccagctcactcgatagtttccgctggtggtggtgttgagcttttgatgacgctttctgattaacataccgattttaccgctggtggtggtgttgagcttttgatgacgctttctgattaacataccgattttacgtatgttttcattaacacgatttttaaattacta

SEQ ID NO: 45996 - DNA, 1171 bp, Oryza sativa
aagtacagtatattaacctacctgtgatcggtgcacgtacacgtttaactccctcggttacgcgcgtagcttaattagatatatatgattttttttataataatctgggttacgatcggatagtcacagggtcgtcgcacggctccgtccaaggagctgagacaaaattaggctatacaggaccacctctttacatgcatgcatgcttgtgtacgtgctctcggcgacgaagctactacccaacaaagcggttgctcgtcggtatgctcctgtatcttgcgcccgcccgtgcgtgtgcatgcggccggccctcgcgtttcttcgctgcacgcgcgcgggtgtccggtgtccgggcctcccggccgcccacacccacgcacacgtccagcgaatgcatgtgttgtgcgcgagtgtcgttgcagcggttcgattaattaatctatactcggagtagtactacaggcgagtaggcgacgactaataatctacacgaacggtttaagagatcgtgtgagcccccggttgaatatcatgcatgtgccggacttgcagagagtccaacccgatagcaaagctagctaggtagcggatctgaatatacctgtcgccgggctcaacacgtgtcaggcgagccctgcgacagccgtcggagcatgagctgcaggtggcaggcgctttacacggccaggtgaatcttttgggctgacaggcacgggccattgattccggcctaatccgtcgtagtagaattggtattgtactacgcaccgcgtccgcgtacgacgctcgcaaccgggtgatacaccacgtgacgtgacacgcggacacggagcaagcgagctaaccgcagggacgacgcacgcacgcaacagcgtgcgcctgggccgcgttgcatccgtgcgcatccgctcggtcgatgggctccgcaccgtcatgggccgtcagcccgtcgtcacgcaccggggtggcagtggtgggccggcgccttacattcgcggggcgcgggttcaccgcgctcagcgtcgcggtccgcacgtcggcggaggcgaaaggccaccatgccacaagccggcgatttgctgctctcttctggggggaaaccgagcgcatcccgtcgagccgccgcccggtgtcctgacgggccaatgcgtgtgcaggactgcaggtgcgg

SEQ ID NO: 45997 - DNA, 666 bp, Oryza sativa
cagagggggtcccactggctttgttagcttcttttccagtgagactgtagcagtgtagctgccctgtgcctttacgtagggttagtactcctactactgtttgtttgttcagctcgtgcttaagttgcgtgcgacaatatttatacaggcaggcagcaagttgcacgtgaaattcgtctgctggttgctgccgctgcgcagcatgatttggatgtgtatgtggttggagtcttttcccacacatttggccggataaacccgacatgatttcctaaccgcgcgcgcttggagatattccgcctggtgtttaccatgatttctcgttcaatcctccgagcgaagtcacaataggcaatgtcgcgcgtttcacttgttacaccaggatttctgaggagattcaccgaggaggttgacacttgaaacaacacgatcaatagtttcttaccctcttcatattcacaaatatacgacaggcaaaaaattggtacgtgaaattcgtctgttgtttgccgctgcacagcatgatttggatgtgtatgtggttggcgtaaaccttatcccacacgtttggccagataaagcccatatgcatgcagatgcagacatgatttcctaaccgcgcgcttggaaatattccgcctggtttaccacgattcctcattcaat

SEQ ID NO: 45998 - DNA, 566 bp, Oryza sativa
ttcctgcagccctccctggcatcaaaatccgcagaattttcagctcaagatttccacggttgcaacgcgagaaagagaattcttgttaccgtcgaggtagaccgcgccgttggagtggaagccgatggacgacgcgtacgttccggccagcgacggccgtggcggcgcggcggacgcggcggtggcgaggccgaacgacatgaccgtgtgccgctgcttgtcgtggtgatcgtcgactttcgtggcggctctggtttcttggaccgcgttcttggcgtccggtgcaaagctgatgagcttggcgcggtcgctctcgctggagccgtccctgccgcggcggctcgccctcgacgccgaccactccggccgccgcgtgttgaggtagatgatggtgatctcgaagtaggcgtcctgcgggaacggcgcgccggcgaggggcgggccgggcagcggcaggctcatcctggcgaggcacagggcgctgctgttccccgccgcatcgtggtcgccgccgcggagcgggctcgggatgctcccggggagccacttcttggtggacgccgaga

SEQ ID NO: 45999 - DNA, 1399 bp, Oryza sativa
cagcagtaaatactgcaggacaatccaactgaccaggcactgttagctttcaccgactgctttccgatccaagatcgaagagaagaaatggataaatggatgggttatggtcaattgcttatggggacgaagtaaatattttatactataaagctaaaagcagcttggaacaagttatccaaacagtgttggtgtagaaaggttttggagaaattgcaatctggagtgtggcacaaatagtccgacataatttgccccctgtaattaaaaaaaggagcattgcagaactatgtttatacatgagttaggcacctgttcatattcggatttgacaaggtttatggtccctttgtatcaaaagatttgtagaggaatttcaaggggaatcctatatgaaaattttctattttaccttttgatacaaaggatttgagctttccaaatcctataaaattgctatgtaatggttcattgtatgtaggttttggaggaaacttagcaagagcttcaatctcttggaaattttctttttagtctatttcttttatgtgattcttgcatttttcgtacaacataaccaaatgaccattcttgcgtttagcaatcctctgttttgcacttgatttcttatcaaaatcatcgttttttggatactgcattttaaaggagtttcatggcagatcacaccatcacctggttgtcttattgacaaactctcggtgttctcctaatcctaggacctatgtcactctcataaacttaagatgttgtatcatagattgccacacttgccaaagatatgaacaaaccgttagcctcgttttaccaagtttaggttccttcggattatagaatttttcagaggtccttaggtattgggatttgaacatgtcttccaatagaatacattcctatatttaaataattcataggattttaagggccatttgaatcaaacgatttgtggagaaattttataggattcaaatcctgaagaattttttcctatctggtcattagatataaaggattggagattttcaaatcctatgcaagttgaatggctcattattcatagattttgggggatacttagtaagaaagagttccaaccttttagaacatttccttttaagtctattttttcatccaatttctttgttttttctgcaacttaattaaacaacaattcctagtttttcctgtgttttgtaatcctctgttttgtgcttgtattcctattaaaatcatgtgttttttctatgcctttgtttttcaatcacgcgtttcaaaggaaccctaaacatgttcttcaacttcatgatttctctttctatcctctttaatataatcatgttcttcaactccaatgcaaactctctctctctctctacccttt

SEQ ID NO: 46000 - DNA, 1890 bp, Oryza sativa
cgcgggttaagagtggtgtttgggtgaatctcattttaagagcccttttgaattgcaggaatggaaaaacggaggaataggaaaaacgtatgattgataggcagtataaaacagaggattggaaaatacaggaaaaacacaagaatgaccgtttgattggaccataggaaaaacacaggaatcggatgagagagatagactcaaaggaatttttccaaaaggttggatctcttgctaactttcctccaaaatctctataggattagtcattccataagaattttaaaggatagtatatgattcaatcctttatttcaaagtctttcataggaatttttttttcataggattggaatcctttaaattttctacacttttactacaaatcaaaggggcccttaagggtggcattatagcgaagccagtttttatgagtgacatatatgcaaatttctcctcaaacgcatgcttagaataatttctactctgtattgttttatttcccattatgttccacatgtcattgatatttcaatccaatattacatttttttccccgcgttctagaagactaaacagtgtggcgtaccagaactttgacaattaacacaaacaaatatcgcaaaaggtcgtgaaccaaatacacccaaaacttgtgctctgctaatgtcactcacttgtcaacaaaccggcgtgcagtaatgcgccatcgatcgagctgtcctagcaaatcgggagcaaatccgggggggtgcagatttgctgaagcacgcacatcacgttccagatccggcagagctcgacactgcctgcccccagcgtgcatcattcttccgtgattgtatcaaaacatcagtggccacctcacttgccaccacaaaaacccatccttcttccaaccaaacctaggagcaagctaaagagatatctgaggtttcagccatgtgaaaaaaagaggaaaaaaaagaaggatcgttatcgccttcataccaagatccttgaaatgcaactctgctgctgagattggccttttgatttgattacggttgttgataggggagctaggaaaaggagatcagctgtgtggtgtgtctgattacgattagacggcaggtgatagtagtagaacagtggtgccacaaacccacaaggcgtggattcacggttgaaacgtggtgtggtgcgtatcgttgcactgctccgtgggatcacaatctcgacccgacaagtacgggcactaccttcttgccaatggatgaagtagattagcaagtcacatcaaagatttagcaacaccatggcctagattacctcggcgggttttattgatgaaagcaatagagatactcttgtcccactgattgatttacgtgaggattccaatagttttgccagtttgatcagattttctgtcccctcgaaatttgattacttcaaatttgaattttcaaatattttttaaaatatcttcttagagagagttgttaatacccaaatttagctcctagagtaagaaataggaagtcataatcaaatttagaaataactcagacttgccacacgaggctagtgtgacaatagccattgggccggtcagacgacggcaagggcggtctgaccggcggcatgtggtcggtcagaccggcaaggccgactctgagtgaggtttgtaagttcttagattttcttgctaaggcttgggattttaaaatcctaattggtttctacctaattgaacgtggaaaaaactctgggaaataagtctacccctcttataaatataaaggagctaagaccgattgaaacaacaacaaatcaatcatcaaaatcaatttatttacccaaacctctatattctacatctccctccttcctactacctatgaccta

SEQ ID NO: 46001 - DNA, 2848 bp, Oryza sativa
tcaagttagtacgtaagttaattttttaaagagatttcttatacgaccgttcatgtatttccaaaagtgaacgaacttaaaaaccgactcaaatacagatctgtatttctaaaaacaaacgaacttaaaaactgactcatacacggatgacgtacctaagtaccaacaaaaacatcttcaatctttataatagttttactgtgagaatttgcttggatatatatttttctagaaaatcatgagctgcaattagaaatccgatcatctcaagttagcatgcaagttttttttaaaaagatctcttatatgactcctcctgtatttccaaaagtgaacaaatttaaaacccgactcaaatacaaatatatatttccaaaagcgaacgaacttaaaaaccgactcatacatggatgacgtaccaaagtaccggcaaaaacatcttcaatttttataatagtagagatatagaaatatcaataaatatatgattttattgaaataatttttaagattatttatacataaggtcttcatgtttgtaacacaaatattttagaagttattcgttgttaagtttttaaagttcaacatcagttttatccgcaacaataattaattttaacctagagaaaatattattttttattatgtagctactaatactactagtaaaaatctgaattgtttaagaagctaaggaatttaagatgtagctagacttgtactctctccgtgtaataaaaaaatctaatccaaattggaatatggacatagagtttgaatcgattcaaatttggattgggttttatatgggaccgagtactccctccgtcccataatataagggattttgagtttttacttgcactgtttgaccactcgtcttattcaaaaaatttgtgtaaatataaaaaatgaaaagttatgcttaaaatacttttgataataaagcaagtcataaaaaaataataatttcaattttttttaataagacgagtgataaaaaagtgcaaataaaaactcaaaattatttatattatgggacggagggagtagctaacagaagcttcacacaaacatgacctataattctctccaagtttcacgcgaaaaagatgatcagcaacagctgggcaattatacacgcaagacaaatcgcttctgttcttccacctggggtgctgatccgctgctacagcgttgctactggcaatatggaagccgacggcgacacctcgtttttggccgcgctggacttgctggtacagctaatgatgctggcttttgacgggagggcgagacagcgccgagagagaggcagaagcagggataacaataagcaagatcttagcgccttccgtatcagaatcgctggaaatgactcctcgtcaagattggccatggaacgatgttacattaattgacagcaacattacagattcagagtatagtacccgctacaatcaatgcaatgaactggtaaaaaaagacagaaaaaaaaaaggtgacgaaccgaatggggcagcagcaccaactttagcggaagaagatttgggaggattttcatcgggtgaggatcgatcttttgacgatgatgatggcagtgactgattcctgatggtgaaaacgttgtccgtttaccattttgtggttatttgcgggtacggaacgaaatgcgggtacgtggaagagacggaattaatcatggaaatgatttcaccatgaaaatggcacaaggcagtgatcacatttgtgtcttatgcctgataacgaccggggcctcctttggatttggatgaacttctgtaaaaatcctgtaaaattcttataaaaatttggtgaatccgattagtaaaccgaggaaagaatgagactggtaaaaggaagagttgattggttctggagaaaaaggttcggtacgtatatactgttgactgttgagcaattactgaaagaaaaggaccaaatgaaaagtccctccttttacgttgaaaggctggccaggctaggtttgtagattcttgagcaccttccatgtccagaggagctttactggaattattctactgattgatactggatgaatgggaaatgtttaggccatgattcatcacaaattgctatgcttgctagaatctaaattgtgggccgtgggagtcatgataacaaacacaaggaaaaattaggcatatgattgtaaagctgccaatttgaagcagggaacttttttttttccttttgacgctaactatctcattttgtcatattcatctctcttttccattgggggtggtacaaatggcggacaaaagtgaaattattttaggcctactggcaaaacggagaatgatatcgctagtgacaaatcaaagttgtcccgttgaaatatgccaccgcataattccaggttaaaaaggcctccacattgctacgttgacatgacctataagatgtaactttggatattctattctaattaataccctcttccgtcacaaatatatggcaaattttattatatgacattgtgacttcctgatttcaactactggacacggtaaacggaattgctagattaccgttgacagttttgggggaaaaattttaatttttagaccattagatttgctttaagattcgtgctagaaagtatgagaaaaaataaataggcaagtaaactttcaatttttagatcattggatttgctctaagattcgtgctagcaagtacgagaaaaataaataaattggcaagtgcagctgctgtgatttaacctcacgcccttgagtttgttgaagatatatgctaccaccacgccaacaaaatttgtaatagttttattccagat

SEQ ID NO: 46002 - DNA, 2835 bp, Oryza sativa
tggagttgctcttaataaacatgtatgtacgtagaaatgtcgttgacattttgattagaaaattcaacgatcaaaaatgtgtattggatgttactgtactaaacaataattaaaaaaaacaatattgcgagtatctaaacactattgcgcccagcttttaaaagttggactagctaggtacatggacaccccacagtatcaacttcttttcggaaaaacggcaaagtactgcaataggcaaatcaatgctgtggcaaacaaacaatctagccttgcacgtacacggtaggtcactaatatatttgctgaagcagcagctagctatacgacgtcctttacctcctccaaagcacaggccatgttccctcccaagttcatactactactagtaccagtgtaccacaaatcacaccagaccaatagtatagggttacggttatatacttccttcgtcccaaaaaaaacgaatctagaactggatatgacatattctagtagaggtatgtctagattcgtaatactaggatgtgtcacatctagtactagtttggttttttagggatggagggagtacgtacgtagcgctccagattcgcctatcgagctccgtcctctgaaccatatctccatgactccatccacccatatgcatcgtggcgttgcgccaccgccccacctcgcacgtcgtcgcgtagctcgaatccactcaaaaacgctcgaaacatacgtacgtcggcctcttcccgtggccggtcgttgtacccatcgagagagaaaggaattagtactaatcaacaccgcacgccaccactgcgaaagatatgatgcggcggatcaggacggcttcggtcattgaacaatgagagctagagagtagagacccctagctatagtataggtagctaactattcttagtagcagctttgccacttttggaacctagggaaggaaaaaggggtcgccgtgacgatcttccctgggatatcgtgatcatagcggcatcatcatcgccgtgaaaacgaacgagctgttgacgacggcgtccccccgtctcacgtccttccttcccactcgatggcgctacggaaaagccccggttgtggtggggatccccacgcctcagcgtcatagggtctgtttgagcttgatagttgtagctttctcttaaaattttcagctgccataagctcttcaaataattcagatttttatttagattttaagaaattgtagttgtagatactagaaaatgaattagaaattaaaaactgagtttctcagtttctctatattctcaccagttaattttttatcggctgtttctcagaattttaagctatctaagtaggatcctaatatgtttagctcggctttcaatcgatcgggctatggctagaaacgggacgggatgggatcccctgatccgcgctgccagtctaaaggcgcactcatgtcgtccatcgttcccatcattgcgagctccggtgaaaaaaaatatattttgatctaggactagcagtacgtatgtactactctacgtaccacgatgacgcgacggggaacggagtggaccatgcatgaaaaaaatcgatttcgcgcgcggccatgtggtttactacatgtcatcatgttggatctggccctatatatatatatcttggtagttccatcgagcagttgcaatatatgatacaagttgcaagtccatacagtattcgggaaagatataatactggtatgccaggttattaatttaatccttggcaaatatacgaaccggggaaaagttctgttttagattatcacaagctaaaagctaagctatagattcaccggaacaccaccatggagggagggatactaattgcttctgtggaccagcatctaacaaatcatcatggagcagatcgggaggactacggagatattctctcgatcgttggcttagcacttagtagcagttccaaaagctcgatgatgacgatcgcaaagatatgcatgatagtataaatcaaactccccggagaggctctcatgtagtagcggctctgctgctttagagcaagtttaatatagtcaattattagcttcaagccttcaaataatttatagttaatttaatagtcaattcatataatagttacctataaatatatattacactattaatacataacccccaaatatcatacacacattatgtcttaaagtctatgctacagctcgctggctataaatctgcagctcgctgctcttctgtctcatttatcttctagatatgtgtttatagttgacttatagtctgttgttacacctgctcttagctaccagctttcgtctttcattatattttctctgtacgtacgtcttccaaacaacattgtctcgtctcttatctatcccagactgaccccaccggacgatgaaacagttggatcttgagtagcagcaatcaagtgatcacgtcaatctatcgagatcccacgcagtggctcataatctcacatggcggcctgcctcgcactttttccttatccatgctaagccccctgctcctcgcagaaaagccggcagcacggttgcttttgccctctttaaccatcacactcttcttccattcaccacctcggttgtttgtttggtcgcgtgcatgagacctggctcgcgaagcgtacgcaaccatatccaatccaacgagagactcgtcgccggccaacagccggcgtccatgcctccaccgtgcaaacgcataagttgcacagtgtttaaatacacaatttgtttgtggtatactcgtgcaattattgtaagtacgtgaccccgacgacgcaatc

SEQ ID NO: 46003 - DNA, 2049 bp, Oryza sativa
tcatctcctgtttgccgctgcacagcatgatttggatgtgtatgtggttacacgtttggccggataagcccatatgcatgcagatgcatacatgatttcctaaccacgcgcgataggaaatattccacctggtttaccacgattcctcattcaatcctccgagcgaagtcacaataagcaatgtcacgcgtttcacttgttacaccaggatttctgaggagattcaccaaggatgttgacacttgaaacaacacgatcgatagtttcttacccccccccccttcattcacaaatatttcataaggtcatttgatgttttagaataaggttcggtcagactcttgagaagttgaacgtataatttctcaaaagcttatttttaaaattatatggtgcatatgagttatgatagtacttaaaaaacacatccacaagtgtgttaagcaatatatactatcttcattttttaatatatgatgtcgatgacttttaggcatgtgtttaatcatttgacttattcaaaatttctgtatagatttaaaaaatataagtcatgcttaaataacttttaatgataaagcaagtcacaataaaataaatgataattacattttttttaaaaaataagaggaatgatcaaacatatctttaaaaagtcaatggcaaaattattgctagatttctaatcaccttcagcctagcaccttggaattacagagggatgatgtgcgacggcgatttctagcagtggcggcatcatcaacaggctcatcttctctgacgatgttgaagtcctcttcttctttgacagtgtagtgcgtggcaacgaagttaaaatttagggtttcggaataaatgttgaagtgggatggcttacccggggagggggaagaaaagggttttcccgggcctagagagatgaccatgagcgacggcggtatgcaatggtgtagtcggggtgccaccagagctgcaaggatgaaggttggtggttggcggggatgtgagctagggaaaggggaggtgcaagggaagctataggttaggagacggtggtggcagtggtgtttctgtggtgcgagtcaccggagttagaagatgacacgacaaggaaatggcgtcaccgcttggcttggggaggaggagatggggagggagagaaggacagtcaaccaaatgaggctcaccgcacaaaggtggggaggagagcaatatcgcagatctcaatctgtctaacttactctcagggagaaggataacatgataagtaaggaagatactactgtccacgtacaaaagtcgatagaaccataactgtccaaaaaattgattgaaatctagggtattttcaggtgaccaaaatttacaagtcctatatctcaaatgcttgttttgaagttatacggtactcggtgcttatgatactacttccatttcaagttataagacgttttgactttggtcaaagtcaagctgcttcaagtttgtagaaaaaataacaatattttcagcccaagataaatttattatgaaaatatattcaagtattgatttaatgaaactaatttgatattataaatattactatatttatctataaacttagttaaacttgaattagtttgactttaaccaaagtcaaaacgttttataacctgaaacggagggagtagtacttataagaaaaaaatgcgtatgcgttgagaatgcacattcaatttagtactccctccgtcccacaatataagggattttcagtttttgcttgcaacgcttgaccactcgtcttattcaattttttttgcaaatataaaaaatgaaaagttgtgcttaaagtactatagataataaagtaagtcacaaataaaataaataataatttcaaaaaaatttgaataaaacgagtggtcaaacgttgcaagaaaaactcaaaatcccttatattaatggacggaggaagtacgttgtatgcgtgtggtgtaccgtgtattgcgcgcgcatgcctgccttatttgctgaatgatggagtatttaaagcatgcatacgcc

SEQ ID NO: 46004 - DNA, 726 bp, Oryza sativa
aaaaatggcgccccgtactcctcctcggcccaagtcccctgtcactagggatagcgctaggcctagctggaattgagatcacctgcagttgctagtatgactacaactttagcagttattcatctaactttggatcgaataacaaggattcagattacacaagagtaatgttcatcatatatattactgtagcaagatgatcttgtagcaaatgttgagaacagtactgctccataaatcttgacagtattgagagcatgagactgctaaacctgtagtccttattcaaactgcacaagatcccaatccgcctagctggtgtagccgctgcgacccgcggtccggcctggtcgaggcttgcttcaggcactgcgaggcgtgcctgcaatttttacattttaatccttttattaaacttattaatagaaaaaaaaactaatagcgcagaaggagatcatgggctcaacatcatctttgaatcgaaagcattgagcctcaacacttgttcgaggtggtacagacttgttaggtatggaagctcaataacataatatcaatattattattagcattgacctctatggactatggttcagataaaaagatatgcatgctttaactaataataaaacagggcgactctctcatccaatagatcatggttcaaactccgaaccattcacctctttttatttctttttctaacaaactttcacatgggaatta

SEQ ID NO: 46005 - DNA, 686 bp, Oryza sativa
cagtgccagcaaaaccggctacagcagtggatcttgttcctgctcagggcgttcgtgtgcaatggctcgtccaattggctcgaagcttatcctttttctctctctcatagagaaaaatgtgaaatggatttgggaatcatgggtacaagcactcctacgcgggccaaatacgttgcaacttgcgagttgcgatacattgcgctatggctcaacgacgaatggcacacgtacaatcacgaacattgtcgcagggcgcacctagacgagacaacaagaacaaggataaagttggacagtcagaggcaaatgcaatttgatgaaccggcagattacattggagcatatatgccaaaaaaaaaagaaggtagtactaacatacactggtggagaaaccatctttgctcggtcgacccaaatccacagtagtcccggttccattaaaaatcgggagtaaaaacgatttttagtcccaatttataagaacaacaggactagataatctttattcccggttggtgttaccaaccaggaataaaaatctaacacgtactatataatccctattacttatcctcttatatcgtccacacaacaaactctctctatctctttttttcctctctaactctcttcctctttcctgccttatctctttctttttgatagatcgagcgagagcgctgcct

SEQ ID NO: 46006 - DNA, 716 bp, Oryza sativa
tcgagtgtttgcttggattagcagatctgcttagtaaggtaaggcgtcatttgccgatacgaattaggcattgttatatgatgtacttccggttttggttgatgcgtttttgctttgagcgtcattgaaccgagcaaatcctgatagtagctgtcacctccaaattagtacgccatcatggtgtgtgatacacctccacctttgggtagtgcgctttatggagagcagtaatgcgttccgttttaagcatgggcaaacggagcaaaacattgtatcctcataggtagaggttgttactaaatctaaccgctttaagcggttaaatgaacggtattgagaccagacaggttggtgcatggtaatatcattggtggagaaaccatctttcctcccggttcgtaacccccatttaattccagttatttaaccggggctacaaatccgggactaaagatcgctatctttagtcccgggtgaaataaccgggactaaagatcgatctttagttccggttgttaacaccaaccgggactaaagataggggattaaagaggagataacagcagtctaaatgccccatccttttttttttctttttaattttctcccaaatcaagtaaaatgcgtatcccaaattaaaccccaaataccaaatcaaggtaatatcccaaatctacatcacaaatctttaaagttacttatacacacaaatcaaa

SEQ ID NO: 46007 - DNA, 2189 bp, Oryza sativa
acttttcaggaagtctaaggagccgttggagggagcggttaaaattagctttagaccctatttagatggtactaaaactgttttaagtccctatcacatcaaatgtttgaacactaattataaatattaaatgtagactattaataaaacccatccataatcttggactaattcgcgagacgaatctattgagcctaattaatccatgattagcctatgtgatgctacagtaaacattatctaattatggattaattaggcttaaaaaatttatctcgtaaattagctttcatttatgtaattagttttgtaagtagtctatatttaatactctaaattagtgtctacatatagggactaaagttaagtccctgcatccaaacaccaccttatagttgcatgtaaaataagatgaatcatcaatacataattaataaaaaattaattattatagacttgaacttttattaaaaaatctttttaaataaacttctatacgctatttaacagtttgggaagcgtgcttataaagattgagcaagtgtatcgttgtaaattgcatagaattcatcctaaaaatttgagcgtcaaagttcaaatgtaacatatcctatgtacacaagtttctcgtacacattcgtgcacaccaactagcaaatgtcacgaaaaattctaaaaaaaattggatatttactcgtaatagtattacacgtatccccaaagtctcatattcaaattcattatattttagccataaacaaatgaaaaatctaacagtttaaagataattatatgtcagaattttgtcttttttaggctaaaatataatgaatttgaacataaaatttcacatatagctgtaatgctatttgaagtatgtgtctttttttttatagaattttgtgtaacattcatttgttggtgtgcacggaaagcttttatgcgtaggatatattcccgagttcaaaacatttagtatttgtagcatatatttactttttttttcttcggaagaaaattgacgcggcaaatcctgcaagggggctatatgctgcaatttttttcctttataatatgtttatgtgacctatttgtttatataagtaatttacaataattacggagggtatcgtgcgcatttcataaagaacatagatacaatcatgcaaccacaatggatggagatgtgcacttgcaaatatctgttgaaaataaccatcatacacaaactatgattatacgtactacgactaatgaaagtttcatgtttatgtttaagatgtaacacgccttgttactacgatatccttttaaatattattagtaaatttattgaaaaaaagacaattgatcaaagtttacatataaatagcacttcgatgacatgtatttacaaacctgtatacaatattccacaacacatattgcattaagtctactttttttatgtgagcaacattatgctggaacatagaaatgttaactagtactatgtctgcaaaatttaatcatgtattcattctttaaaaaaaggaaaatgaacaagagttgataaatcttatattatgaacatatattctaaaaattcaaactctacctgtcgaatgtattcatacattttttttctcgggatcaaatcccaaaaggtgaaaagtagtacttttctaattttaaatatatgacattattaacttttaaatatgccgtataattatttgtcttattaattttagcgcttatgttcttgcaataataaagcaattcatgagaaaataaataaaatataatttttaataatacgaatggttaaatcatcaacatcatatatttaaaaagggacatgacacgtgtaatcctatttagacgcgcatcataatatatttacacgtgtgcgtgtgtatgtgcggcgatagagtgtgtatggaaggtgtactccgaagataaaaatcttagtagttttttagtataataaaatctatttcaataaatgctctctacgtgtaataaggagtatttgtgctagctgaaaaggacatttttataaccatgatgcttgagaaaaagaaggaatttatctacacacttgggggtgtagtcacagtgcttgtctgctagatccacttttccagacaagtactccattccattttcctctccatcgcggacgcggttttccagtacaaaaacca

SEQ ID NO: 46008 - DNA, 602 bp, Oryza sativa
tgaaattgcacaagcttgctgtaagacgtcaaaggaccatacaggcaaacttcggtgattgtgtgaacagtgcctctcctgaatgatttaagaatattattacatctgaattaatagaagtactaagaattacttctttcgtcccaaaatataagagattttaagtggacgtgatatattctaatacaatgaatctaaacagatgaaatacttactccgtcctaaaatataagggacatcacattcacctaaaatctcttatattttaagattttgggacagagagtattcacttttagatgtggaatgttcggcacaattcgttctatttgcgtacaaatatgtactagtgattgcagacagtggggattagtactggttaatttaatacagagtgtatggttttggtcccaggtactgtagaacattaaagtcagaagtccagcatgcgtggttggaacggtaggctatttccacagaaaatgaaagcgacgagatgaagtgatgaactaacggccatacttttccatgtcagaatgaatcgtaggcaaacacgttagacccaggatcaaatactcacccctaaaacgtgcgcagaggtt

SEQ ID NO: 46009 - DNA, 1430 bp, Oryza sativa
aaatggatttgctggtctcgcaaggcatgcgttgagcgttgttggcttgttgcgtcgccgttgagttaggctgcgttgcggggggtaaacgcgtgcatgatcctggatgaccgctggtggccagggatgaaaacggagcctatcgagaaaattgaatacattaggatggtacagatacggatacaatcatacaaatacaaatgtttttcccacatgaatagttgaatacaaatatggtattagactttccgacggatacacattttagaagtttaggtggatttcgtgttccgagacatatttgtttatgtattgtgtctggtgttattcaatccttatttgtattcgagatcattcatatttatgtctatatcccagctattcgtatttgttttcatatccggctaaaagtacgaaaaccgatgtgatatgaatgctatccgcatgtatccgctctattttcatctctattggtgacatgcagcagcgggggaagagggcaagaggaagtatggcgaaagttcataagatggtgcaatgcaaactttgcaatcccggcggacagtgacagcatgcttgctgactggtggcttgcaacgcggcgccgttttaggacgagctacagggtggacttcgacaacgcctttatgttaatttgctagcttatttggaaggaacaaaatgctagaatttttcagcatgtgtcaaagattccgaagcaactagccgaggatataaaagaagaaattgcggtgtggagggtagctgggatcttctcccattttggagagtaatcgtgttgtgtattgtcagggttctgccctaccttccctctttcccctttgcttgttcacgctgggtctgggatctctcccggactagcgcgacattgtaatgtcgttgtaacattctccttgtttttctttccaatcttaatgaaattggtcgttggccgacccggcaaaaaaaaaaagggcaagaggcaaatcttccgagtgtggtttcgtagcattacaaatttattagcatatttgagtaaaaataagaacaagtgggattgatttgcatcttggaggatcatgaaaaagaaaaatgcattaggtgaggcttgcgatttgtcagttagctgaaaatgcgaaaaaatatcactcgagttttaaaatactaggatggctttaagaatcttgcaacaccctgtaagccctacatgtcacttctcttattcctcaccccactgcccttgtcaccgccatcaatgtacctctctgcctcaccagcgtggaaggcaccaacaatgccaacaagggccaccataccgacctccttccccctatcccttctttcgcccgaagctgaggcgtggcaacctttcccgtctctagcggcttgcatcgtcgagataccaatgtgtctccaactctccatctcct

SEQ ID NO: 46010 - DNA, 655 bp, Oryza sativa
tttctctctttgatgatcctccgtttgactaaaaccattctgttgaagagttgcgttgatttattgttaaaatggacgttccttccccactacttttctcctctgatctatgtgcggtttgacttgagaatacatgttagaaaatgcagcaatgcttcagttgaatttctggcaacacaagcatctatcaactttatagcccagagaagttagatgtgcaatgattgacttgttgtatttggtaacagagcctccttggctcctttggactgtgggatttctccggattcttgtgaaaatcctttagattcgtgcaaaatggtcctgcgttctaaaggaggccttggtgcaatcagctcctcttccagccaaacagtcaatacaaagcatcatacacaatattaattccgtcccattttgatttgaattcttatttctttgatacatatacagtattcagaatgtccataaaatgtgctgtagaaattaattttccctttagaagcctgtatggaagtttaaaacataatgttgatatcattatttggtttatttaaatggtttcttgactcagccaatgtgaacaagtggccagatggtacattcaattctgtgacagggagatgttgactaataaagtgagattatcgactaa

SEQ ID NO: 46011 - DNA, 738 bp, Oryza sativa
cccaaataaaagacacatgagttaaaaaaaacagtttatgaattgatctagctatactcgatgtacgcgtacatgcttggctttgtcggctgaatttgccggtacaagctgctgactcttttgttaattaagtaaagaaattaagaaaatgtgctcctcgtcgtcggtaccgccgctgacatcatcagctggaacaaatgatcaatcacgaaggccggctgacatgtagaaaacaaacaaactagagatcgacctttggccctgtttggataagtagccaagagttattttaagacctattttttactcaaggaatagctcttcaatgaaataggccttaagctgttttgatgaaagagctatttgacatttagtacactttctcaatcataactaccccttttctctctttctccactgtatcttttgtgcatgtgtcttggtgtggccggctgcatatgccatgccgttgtgctctatcactaggacagggctctatctcataagcttgtagcataaagggagaaaacaacaaagttttttctttaaaaaagagagatcaaattgctctgtggagcgcgtggactgttcattccattgcataagcactgatccatcaaacgcatccacgctgacacggggaggaggagcatggccggggccggtcgctgacggctgcgacggccagacgcttggatttggatcttcggagaagaaatcgaagccaccaccctccat

SEQ ID NO: 46012 - DNA, 1425 bp, Oryza sativa
gtgtcagtgaccgcgggcgcctcgagaggatacgtacgagccgtacgatgcgccaggtgacggctcgatgggcgacacgtcgcgagcccggcggcgggtggcgcgtcgctcgtgggttcgtggctctccgccgcgaggccgcctccggttcaaagcctagccctctctgatctccctgtttttacgtctcttttgcagctagcaccctgtgtttcgaggtgatttgctaaggattgaatacacactttataggcaagctcttcggttatttcttagaaagcacttaaagcaaacgttttcaggtatggagagagggacgccgatttggatatctttaagattgccgcaccagatgcgtgtagcacatggcatgaatcaatggtggttgttgtgtatatatgtttattagtagtagtgatctttatatatgcatcctaacatagaggagttgtatattactatattggtatgttcacatggatgtattgtagagttcctcccgttttatcatgcactaccttgttggatataattgtaaatgagtagaactggggatggtcatatacaattggtacttatgatttgagagagtaacaatacttttatatcaacaggacaaacacttgcaaatacatacatatatactccctccattctaaaaaaagtgagtacatcccaaaacaatatgtaataggggtgctaaaatcaaattttgctcggttatccagcatgtaatcgtttaattcatatgatacgaaagacaacttgctctaatagcatgtatccacacaatcatgttaatttgaagagtagatctattggtttttttgttgttatgtagtcctcgttctcgattcactttttttttccgaggttcacgattcgcatttcagttacacttaccagctgcaaactaagttgggaggtaataaaaacattatcagattttaatattaaattaataggtttcaaatattgacaatgttactagcttgtggtccgtatgcttcaaaataattcaaaaataatacagcttgctgaagacagcattaatatgccaccacaagaataatatactcaatttttagtatatgaccaaactagtcaataatttttattttctacactataaaaatataaaattaggaggtttgtagctaaggatacattttttggtgggaaccataaggctatcaactagagataaaaccatagaattattatatattttttcaaacactgaatcattgatttatatgagaagccgcaaataactagacacgagagaatacattaagcttatacatcccactatttgtcgatgtgatattaaacaaaagatcaatacaactatatatgctcttcccacatgcaaaaattttggagaatacaaacttcaacaaccaaattaagtgttgttttgcc

SEQ ID NO: 46013 - DNA, 1157 bp, Oryza sativa
ttgaagataacttgtagaatatccccctcaaccaaaacggtgtgatatttttggctcattaaagacattataagatgccacattgatcactaatttcattcgtacaaatttaatcatgccattttcaaatatgatcactttatgttgtacatgcaatgattttcaacgcatattgaagaccaccatcaccgccagctagtgtggttttatgttctcttttcacatggagaaatttgagaaaaaaaaatgttgcaacacatgaaaacaaaagaatatgagtgtggtatgtatttgggggtatatataatgattaatttgacctttcgattggtacttttgaagaacagaatcttttgatgatattacacaattgtgtgaaacaataagtatgtataccgtaatgtatatataatgagagagcataggaatgggaacttggtacctgtaatactagtccatatgtatatgcatttatcaactcattgcactgaaactttcaatttaagtcagcaaagataacctatgcataattttaagttcaataatatttgtaggtaacactagattttaagagttatatcgctagctttctgcatgctgcacctacatatctaaagagtaggactgatgaaatgtatatatattgtactattttaacatgaaccatgatcaacattgtatccctctagctagtaatatctgcattttggacatcgacataatagttttccaacaactgcaactttgactactaatttctatatgttgtaagcaattgtaaaatccattaaaatttattattacagtagaacttttttagtacaaattcacgtgtataatttttatttatctgatatgattattcgaaaatatattgattagtcaaagttttgaaagtttgccaaaaacttgtccataatgataggtatttgtacacatgcatcatcatatggagtagtaaaatcattgacacaccgcttttttttccgaatttaatttggtgcagacatatgcaaaactaggactaaaattcatcacactacttgatgagaaaaattatgacccagagggagattgttttattttattggaacataggaaacgatgaggattatgggtacttcagtattttgctcaaaggcatttatatatacgtc

SEQ ID NO: 46014 - DNA, 2917 bp, Oryza sativa
gatcatgatgtgcatgtattataccggttgagattgattagatatctatagtaatggaaactatctagagaaattaatcctactcagacttggtaaaaaaaactttgctactctacacaacaaaacataaattatgatggaattatgtccggacactcaatcggacagggtctttctatatagtatacatttttcttaataatatctatagtacacgtatacagacaccacgtacaacagtaacacaaggcctcatcagtatatacatttatggataaatatatatggtggactgaggatatatattattagtttggttgattgatggctgataaagggcatcaaagttggcaagtacatgcagcctgttactgcccagacagaaacaaaataaatctaaaaataaaataaattctgaataacaaatagaataaatttagaaaacaaataaataattataggagttcaagtagcaaaataatttataaataaaaatatcgaaagaaaaatatggaattttcaaaaaaaaatcatctagaacacagataataaatgacaataaagatgggataagtaataggcctgtaaaggagtacagtggtgatggttgatgggacatctaaaaagtattaacaaaaccccaaattgaattccaaagactattaaaaggagggacggtggacatgttgttaagcaatatggtcatgacggttggcgggacttctaaaaagtaaaaggtaaacccccaatgataatcatgtctgattttaaaatcttaatgccagtaaagaggggaagcagcggatgagctgtaaaggagtatagtggcaaagccccagatggtttggcgggacttctagaaagtaaaaaattgacccacacgatagttatgtttggtttttaaaatcccagtgacaataaagagaggaggcaacagacggaccgtagagaagtatagtgtcagggtttgatgggacttctaataattataaaaatgaaacccaacgagacatgaattgaaacattgacacgatatgctaccctgccataaaactttcatgtccaaatttaatttaatcattgagaaacaaaaggtacaaatatgtagtactccggagtatgtgaatggaataaaaccaagttggctccggtgtaagaaactttagatggccacatccatactttgggtcgtgttttttttatttctgcagtttttaccaacgggccctgactgttgaaggatacaaggtgatcctgtgcataagtgagatagtagtacaacagttcatctcatcaaatatctttataaaatacggccatttatatgattaaatctctaaagaaagaaacaatgatactccgtctctttatagagctttagctctatttctcctgaagcttgaagccagagctcgacccaagaaaacgaggcggacctaagagctctcacaaaataaactagataattaaaatagggtttaggctgcttcataatttctatacgaactcagcttttgaagttaaatttagaaacctacccctccgtcaaaaaaagttaaatactagctacaaatcttaacccacacgtatccagatttatagctagagtttgtctttttttaggaagagtattaaaaaccgacacagcatgactatagcttataaaaagttaaaaactcacttcgctgtgagatccgaggaacgcgatcataattaggagtacacaagttaaacaacagtacacttaaaccttgctagtagtggccaaaccaaaatgggccaggaggagttgacttggagttgagcagagccacgccgtagcagagcccgctgtcccgcgctagctagccgctagtagctgcagtcccaacaacacacacgcacaggcaggcggtcactgccactgctcgctgtttacgcaggggcgccgggccgagggcgtggccatggaagaagaaaaagcccagtagacatgggcaccttttggtcatattctcacgtacacgtacgggggcagagaggcaggcagctgctgcccccaccgcaagaagcaaacaaacaacaatcgctggctcttgctcggctttaaacttccctttaccgtacgtctccctgcgcagtggcgccggggagacgggggacacggccgggcgcccggccgcgcttgggagagagggagaacgctgggagagtggaaaaaggagccgagatgaaaggagctcatcatgacccatggcccatgcctcctgcggtagtcctgccccgtcgtcgcacggctcctgccactctctggccccgtcagtcccatctataccttcctgacacggctaaaaatcctgtagaagctcggacatatcccctccgtccaaaaaaaaaaaagacaaacctgatttctgtattaatcatgttttattatctaacaacaataaaaataataattataaaaaaatttcatataaaacggacagtcaaacgttggcacagaaaccaggatttgcctttttttaggacggagggagtagagtatggagcacgctcgctcggttgcattgttgcgccttaattcagccgtgcaaagctacttgaccggttaaggggtatttagattcagggattcagggatatatcggatattatatagttattgtataggttgtttgagcactataaaaaaattaattatagaatccatcagtaaaccgcgagataaatttattaagcctaaataatctatcattagcatatgttactgtagcaccacattattaaatcatagagcaattaggcttaaaagattcgtctcgcaaattagtcgcaatctatataattagttattttttaaatatgtatttaatactttatgcatgtgtttaaacggggaaattttacgtgggaactgaacattcatgatacacca

SEQ ID NO: 46015 - DNA, 2283 bp, Oryza sativa
tgttggagcagggcttaagtactgttagaccatgccctacgcgtgatcttaaaactgtggttctagcctccaactaagctcatatggcatggtgaaggttcgggaagagttttatttgtgtcacagtactatgtagatgccgcagtgatttaagaaagaaaaagagtgatccaagcccggatcgagatccatccaaagaaaccctttctctgtcgggaggaccccactaccacggagcttgctgaccacgccggagtagggggaggagagtggggacgccactaatgatatatccacgctaagctcgccaccagatccgtgcttgttgccaggatttcgttgatcacatcgtcgtcgagggctcgccctcccgacggcttacgtggtctcccaacaaggaggggatgtcgtccgccttgatatgccacgcataatcatcattgtgctttctggagaggaggggaggcccgccgcctcgatcaatcgatggggttgaaaggctcacgagcaccacgaccgaagaaggggaaacgagagtcgagagagtagcagatggggagtgggagagaggcgggtggtgcttagacgaggaagagaggtggcgttgcggctgcggtgcttagacgaggaagagaagcgacgatgcatttggttgggaggggggagagaaaggcgaatcaatgagaaagaaggaagggtggtgaaaaaaaattataagagtgactggcatgtgggtctatatttgttaatggtacacatgtatttatcttatagttgttatacggtacaaaatataacagtttcagtgggatttgataacaattagtatttcaataattgacataagggttgaaacacaaaatagttggatgtgacctcaattgtgagagttgtaacctatgtgaggtatcagtccatataacctactcactatgtcccataaaaaactaacctagtatcgaatgtgacgtatgtatgtccagattcatagtattagcatatgtcacatccgatactggattggttttttatgggatggagggaaaatctaagaacacttttacatggggtctccattatacgtggctttaggacaaggccaatgtttatgactcgatgagcgataggggtgtgacccgctaaaaggagccacaactatagcgatccgtacaatgctatgtctatcagtctatgtaaaaaaaaggtgagccttattcagttgcggatctaggaagaaatagcaagcggtttgaataaactagacaaaactacaatctcctcccccatgtatagatagcaaaaaaaaaaaagtcgggactttcatgtacctcgcgtcagtagtggatgcttgagactctaccgtctccatgctagattcgctcttagggctactttggattgatgccaaaatgtgccatgccaatttttttggtagtttgaatagtaaatatgatggtttggtttgaagccaaatgaatggtactgcccatgcttaatttggtataattctagaattttcttcaccataatataaattttggcttccaattggtattaatccaaacacattacttagaattctaccctaccaaattattggtagtgtcaaaacatgcttaagttttagcactaccaatgtttttgtatggccttaaaccaaacaagctagcccttagccccattggttccccaaatgaaagaaaatttcaattgtcccacgtagcagactagcgggatttgaaaccaaagaggattgaagattaaatcggtgcacgtaaaactaaaatgtcattagcgaataattaattaagttttaattattacaaaattaataaatgaatatacttgacattttaaaataacttttatataaaaattttttcgcacgaaatataccgtttagtagtttatgttttattagtatgattttttttgtgttcatactttataagtttaaggtgtattttgatttggtaatgattatgatatcaaatgtttaatgctactacttttacaaaaacattgtggataccatacacgatgacttaccgatccgaagctacagaacatgacccaaccacccacccacccggcgatgcacgctgtcttgccgcctcctgccgttatgcgcgtaaaacatcggtgatgcgcgtagggacagccagaacaggtaattaatgtgagtggttttgtggatcatatagtccgatactccgatgggttgtgccgggcgggtgctctagccgcgtccaggcgagcaaggacagtgacacggcccgggac

SEQ ID NO: 46016 - DNA, 1002 bp, Oryza sativa
aacttataagtcgaaaccataaccgatctaaagaaaaattactctaggtaagagtcgtaagacttctacacctctactctcagcagtcttaagctaaggttggatgaaaaagcaacgtgaaaaaacccgtaaacaaagttaagtcctaaactcaagattggctattggaagaagcaggcccttaaatactaattttaatggcccaataagaaagaaattgcagcttttcttagaggaagaaatattttatattaaacaggcaatataagcccaagagagttttatctggcgaagaataggactggattgctgtggtgggctggtggcccatacgcctaacagggcacaccatttaatcgtacttcccatatattttctacgtcccacaacgaatctgaacatggtgagatgtaagatagtagattgtgcagattcgttatactaaatatatgtcatatacagttatgtccagattcgttgtactagaaaatattacatctagtactggatttattttttttgacacaggggtaggatgaaaaattagagatagattctttttacaaaatatatagatagatagatagatagatatagattattaattttataaaacatattgatgtttctcaaaaaaatattgactgttgctataaggactaaattatttttctacacaaactaatcttaaatgcatataattgtactttttgtacaactatatagtgttcctatttccacaaaaatgtaatagtaattaccatttcttcagtcttcataaatatttactagtatgtgctctgcattacgtatacaagttaatcaatcaccgccgttataatttagacccgtcaccttttgtatgtgcatatgtttgtttttttttcatttaatgtggtagtataatatctaattagctcgatccacacacacaaactccgcatgtgtttggttttgagatgagatgggatgggttgagttcattcttgatttttgggatag

SEQ ID NO: 46017 - DNA, 1154 bp, Oryza sativa
cggctggacgttggaccggaccagaccagaccaaaaccaaacacgccccggcagtgccgtcgcggtgccagctccaccacccgctcacgaatgattagttcgtacgtattgcgcgcacaaacaaatgtatcaccagtagtagtacaaccaaaaccatatgtagagtggcactatacggtttcaccgaggactgctcgtcgtcaccaacacagtatgtacctttcgttttgactttgccctgcgagccatgttcgattgcaaccgaatctactgtgctgagccaaacccatccttgcttgctcatgtcatccacctgtggtggttctggtgtgctcgagctagaatcggcttctgcagagcacaagacgaccccagggccaaagaccagcgaccagaatacaaacgccaggacacaagaggacaaccggacaaggccacagaaaagaaaggagacgcgaaaaaagaaagattagaaaaaagagaaaaaaaaaacacaatagggagcttgggcggaaaaaaatccggtcgaaaatcctcccggtcggccacttttaattaacaagtcgtctcctcctcatccatccaccacaccacttgcctccaaacaaaaatctgacctgacctgacctcctcctcggctcctcctcctcacccacaactcttcccaatgtcgcctcccctcgagccgcacgactacatcggcctctccgctgcggcggcgtccccgacgccgagctcgtcgtcctgctcgtcctcgccgaacccaggcggcgaggcccgcggcccacgcctcacgctccgccttggctcccggggtcggagtcccccgagcgggaggtcgtcgccgcggggctcaccctcgggccttttgccccgaccaccaccaaggcgggctccaagcgcgccttccccgactcctccccgcggcacggcgccagctccggctccgtcgccgccgccgcagcttgccaggacaaggcggcccccgccgccgctccgccggctgcaaagtaagattcgtgagattcgatgtggggcgggtgtgtgtgcgtgtgctgccgtgctggtactgatcggcgatggcgatgtggagcccagggcgcaggtggtgggatggccgccggtgcggaactaccgaaagaacacgctggcgg

SEQ ID NO: 46018 - DNA, 702 bp, Oryza sativa
aaaattcagtactgatcttaatgcaaatgaagggtctaaattacatctacttattgcataatttttcaaagagtaaacttctcattttctttcccttgcattaatttattgggctaggcatatgatgtgttaatctgttacctgccccaatgttcgggctgaccattttgagacattattctgtactgaacttcaaaccgagctctgcacattattagttttgatagcattgaccataaacaaatgtaggggacattggatgaactatgaacgtagcttagatttaatgattttcccaaactaatatccacaacctgaggccataacaggataaaccccgccaggaggatactagggaagagatgtagatttagactagggaagaagaacattgagggagagcttagattaactttgattcattattcattgcttaaccctgaatcaggatacaattcatccgcatatagatagagggaaggaccagtctaacatttaatccatgtacctatctaacagtctctaaccaactgagctacattacggttataagttatgggttgaattaccgtattactgttacaggtgaggtgaggatagggttactcgaccggtactggttgttatcctttgagccttagcctctcggcccaatgacactaatcactaattttgattcaagattacagaccttctatattg

SEQ ID NO: 46019 - DNA, 598 bp, Oryza sativa
attcctgcagcccaaaagaaattaagtaaatcaagacatgcctgagggacaacatctagaaagaggtctgtcatatacatagaagccgattgatggaataggtgcagtttccattcaccccaccatctgtcaaatgctttgctcctgaaggttgctagctctatgttgtcaatgctgcctagagggggtccttggagattaagcagccgatccatcattaaggttgatgaaatttcccctcggcactggatcttatcggcaaagaataagccgattgggagttggcccattcctagttgtctgattgtgctcattgggtgataaaactcataagaaacctggatgtttcttccttgatgaatgccaacagggaggatacatggactgattacagctgagaagatttctctgggtttctgatatctttcgtgattgatattttcgaacctaaagtccaatggattctccagaagtgttgaatcttcgtagaggaaccaaactcgagtgtctttttggaaaccctcataaaaactacagaaccagtccttgagcagctcggccgataactttgctcctgcatcggctggtgtggaggcat

SEQ ID NO: 46020 - DNA, 1541 bp, Oryza sativa
attcctgcagccctgattctaattggagctagcgctgtatattggtcaatttgacgttgtcgcaatgataaagtttttaatggtaaacaattatctaaccctatgcaggttatcttcatgtcttcctactggctccacttctagtctacaatgctaccacaggaggagcaggatactatacgcaatggtgctacacttttggaatcggtagccaatggtctcttattccactatgggtggcgtagttctataagaattgctagctaaaatattttatgtgatttaacgctagtcaataataaaggggagttgaggatttgtcccatcaccttatttctcattttgatttacttttatcttacatttttattactattaaacttatggctgtgtgtcttatgacagaagccagagatataattcatttccattattaaaaaataaacttttatgagccagcgctaataatagaaaggagtcgtgccatataactcacctgattcacaagccaaaactagaaaaggaaatcaaaaagtgctcccaaccaattcagtcagatacatcgcgtacctttcacattataagatgttttgggtaaatagattcatatatatatatacacacacacttactttgtatatgtgtccaaattcgtatttatattagtgaatctagactaaagatgaaggaattttatagtatggaatggaggagccaaaacgtaatggaaaaaaaatacttttttccaatccaaggattcaaaagctctagaaaaaactcatggaaaagctaaattcatcgagattgctagtaataggccgtattgacgctactggcgcatacttttttttaagtccattagtaaatttgtcaattgggacctccagaaaatttggttggtagattccatatgctagaaaattaggaaaattctatactactggttattctacttctggagataccaatctcagagtacttctggaggcccagcacatcttacttctagaacggtcggcccagcccatcagagacaccaatcccggcacggactccgactccgactccaattcgcactccgaaactgacgccgcttcgtcgtctcccagccagcgcttgcgtaattagtacgtctcggctccgtttacgagccgagcccaactcggactcgggatttctacgcgtgaccgcgccccatataaacgcggccatcccccgcccggagtctttcaccattcttaccccgacgcggcgtctcctcccctctcctctccccttccctccatcgcatctcctcccgctccttcgatcccaaatcggccgccgccgccgctccgccatgtccccctcccgccccgacgaggcggaccccgccgccgacttcggctcccaccccaccgaccaagagctcgtcaccaaatacctacgccgccacgtcgactccggcgggaacccgtggcggtacgtccacgaggccgacgtgtacgccgccgatcccgacgacctcaccggcaagtactccccggccgtcgccagcgacg

SEQ ID NO: 46021 - DNA, 881 bp, Oryza sativa
attcggtaggtggtgatctcctaggatctttgccatcaaaacaacacttattttttcctctgaaatatgtgatcagagagctgtcaccatacctattctgagggaaataaaaggacttaattagcaggatgttaaatgatttttatattttgtttgttcgtagctcatgtacgtacactacaaatttagtggacagaaatttctttttatgtggtgggtaaagttgtgaatgtgtaacactacctactaaagttcaaatccgggtggaaaaaataaacggccgttatattcatacactaccacataatgtgctatcattgttggttctatgtgaatgtgacagtgatagagtaacactgctaactagctcgcacagactatcctactggtttattagtaggactgtctgtcccatgccccgatcatctaggtcgagcgttttttttaaatttccagacagatatcattgccggttcttgacaccggttggcagtaataagcaatgccctaccgttacctggctgtgctatcactattggttctaggtgtgaatcgattgacatgcagtgagataccttttcattatcggtaaaaaaatactaacaatattgctcgcagggaacactgtcagtaaccccttgccggcagggaaactggcaatgattggtcccatgaattggcagtgttcgatctatggtagtgattaagaagaatgtaatttagcaacacatgttaatttgtgcaaacaagtctttcttgcattatgcaagaacacacgtggctagaagtaccacccttcttacaaacactaatgtaattaatcttcttaacttaatgagaggagagctctctgttctcaaaaaaacaaaagagagagagct

SEQ ID NO: 46022 - DNA, 2462 bp, Oryza sativa
attataaaagcaccagcccaaacgatcagccaagataatcaccatcagctcacggcacaagcacgtatatgcattatctgctcttcttatttttaggttgttgagatatctacagcataataaaatctaaacaacatttgatttatatcttcgattgaatgtagactttcatggttatcacggtcagtgtcatcttcgtggagggctccatgcatgtattaacttttggtcagtttagttctttatattcttgacaattaaatcaataatttaaatctatatattgatgttttattatcaaattataaaatagtgtgagccatatatatatgccttcaccctttgcattttctatgatatagagataaaatatattactctacgaactttaaattaggtcagtgtcatcttcgtggagggctccatgcatgttttaacttttgaaaactataagttggttttatgatcaatttagttctttatattcttgacaattaaatcaataatttaaatctatatattgatgttttattataaattaaaaaatagtgtgagccataccatcaccctttgcattttctatgatatagagctaaaatatattactctacaaactttaaattagtaaacccgttattttataccattaaattaggtctactgaaaaaacaatccaccccccccccaaaaaaaaaccaaaatctcccatgtaagaaaaagcaaagtaacacatatacacatgtaaaaatataaatatatagctaaaaatatacatacacactatgatcagagaaaatcaatggtctctaaactatgattttccatgatataaaaaatattacccaaccaacatacgcagttaaactagatcaaagatgtaatatgaattcaatggtctgtaagtgttcatctattaaatatatatatcaattttaataattctgatgtattcctttaattaaatgaactattattgacctatagtagttagtgctaactgataaatacataatggcacataataattaatatcataataatttttcaaataattatggtgtacaatatcacctgacaaataatttgaatctacatatgtaaaaatgaaaaatgaaaacaacagaatttagttatatttttttcaagtagatcttatctaattttaatatgtgagatattacgattctcaaatattttttttgaatttttcaaaactatttgattggtatttgaaaagtgagaagccacacatgatacatagacatgataactttattaaaaatacttctagcgagtgatatggctatactacaaccccttaatccatcatgagaactatggtcatatatgtaggttttttgtttgtcatatagttttggcaacaaataaacaatcaagtaacacccataatatatattttttatacttgaggaattccgatgtgtcgggcatagttgatggatgtatgtcatatactctactaacatgataacctcactcactttcaaataagaatattgtatatgtattattgaaatttgagtaatattgatttacactataaacaaattgtgtctactatataccacaaaacaactcaatctttaaaaaggattattgtaatcacctccgtcttctctttttccattctcaaaagggtgccaagcatagataataaagcttgctatactaccatgatatagcaaaggcatacatttggatagttaagccaccatgggtacttaattaacgatgcaatcctttatgagggtactaatagtgaattagccgttaaaactgttatccacgatggtcttgatgggcacgattatgtcgatatgtgacccatgtttcaaggtatcgagaaagaaagccttggtagttatgttcggcttcatccgttagatgggcattcatatcaaattttaacattattatcctattaactcatagaagcgatattgttataatatatttttttgataaaatattattggaatatttatacatagatttagaaataagtcagatcgacatgaacagttaggttagtagtggagataatttttttagtcgattaacgatgtattgttcttattttgatgttacaaatacagtttcatctattaaataggtggtgtttggatccagggacttaactttagtctctgtatttagacactaatttagagtattaaatatagactaattacaaaactaattacataaatgaaagttaatttacgagacaatttttttaagcctaatttaatccataattaaaaaatgtttactgtagcatcacataggctaatcatggattaattaggctcaatagattcgtctcgcaaattagtccaagattatggatgagttttattaatagtctaagtttaatatttataattagtgttcaaacatccgatgtgatagggacttaaaagttttagggctgcaggaat

SEQ ID NO: 46023 - DNA, 848 bp, Oryza sativa
acacattcggaaaaacttcaccgttttttaataaccatacaaaattaccattgtcttccgttacgtacacacgtgacgttttacgtactacgcgttctctaaacaatacattttttactaataatttataatgctactacgatctgttcttcctcccatgcatgactctaattcttttttgtgtttctcatatgtgtataccaactacaatttttttaaaaaaaattcttatatttttaattcgtgtagaaactcgatggacatgacattatatacctaccttcccattcctgggttttcttattaatctttttttcaaaggggtctttttttttccttttgaaaattgggcttgaaactgattaaaacgacattttccatgaatagagggttagattttgaatgtcacgcaccgtccccgaaaagctagggttatatgcttcacaaaatacagccgtattgcattctcatttgtacttcatatttttacggccaatagaagcatacaaacaggacagcaacgcagatgatgtggccaaggcacgtaatgttagctagtaggcgttggaaaattgtttgatactaagtagtagagtataaataaattgtcacctccatccactatcaagtagtcgatatgtccgagtggttaaggagacagactcgaaatctgttgggctttgcctgcgcaggttcgaatcctgctgtcgacgtacttttttctttcaagtaaaacagcaccagacggcttattagaaataaaaataaatttgtatataaaactttttatatttatatatgtgttctttgtgacttaaagccaatgctgaaaaaaaaagtaggttaaa

SEQ ID NO: 46024 - DNA, 832 bp, Oryza sativa
gcgatggcagcgactcgccggatctccccttctccttgccggcaggtgctagacgatgccattctccgtcgcctccctctcccattctcttctcctccaccacacctcccctctcctccgaccgccgcaacgtagaatggggtggacggggtgaggtggcactcgaagcggctcggcggcagatcgatgacagatccatcctcgtcttcctcgcctctccactgccctgccctctccgtgacaaggtcgggacgtcgtgtggagtaagggctccccggcggcggcgtggagtagcgagcttccccatcgagccggcgagcgcccgacagctctcctcccttggcaatggtcgacgcggcattgagcgtggcgatggtcgacaacagcgtggagcgtggggatggtcgacgacagcaacgaggtctctctcctccatctcctttccctgacgatgcgttgctcaattgtgggccccacctgcaaaactgatgaggaacggggagctcaaattggctccgcggtcttgagcaggctacacggtttgcttatgtggctaacaatattcgcttttttgctacgaggctgaacgccacgtccttgcactgtaaacgccctaacaaacttacctacgcttatctcttgtatgttcatttgtatctgttgcaacatgcaaacagtagagaattgaaagtgtaaataatctactctgaatttgataatgattaaaccatatccattgtgcacttatgtaagttgagacagattacaatacgaatcagccagatgtacgttgaatacgtatatggataggatactagcgcattcgggtcaa

SEQ ID NO: 46025 - DNA, 1835 bp, Oryza sativa
gtgtaacattcataagcacctggagcggatctatagtataatggtcgatgtcgggtgacaccgatgacttttgacaaaatctatagttaaattgcttatccatatatattataacactatgatctaaacataattagtatattatgacacaccagtagatacgttataatactaacgaatcaattttatggattcgccactgataagcactaggttgtaaaccctgagtaatataatagtcatacgatcataacttcaccacaataccacctgtgtttccccgaatattattctatttttaaggctaaatgggcagctgtaggcctatatgtaaataataagattgaaagatatccttccacgttagcaaaaatagattttatttgatcaagatcatgttatcaaaggcaccaatagaatagcagggcacaccacacacatacaagcttcgattggactccagcctggccatcgaatcctgtcaggtcacataatagtacaacacaagctaaagcctcctaacaatataagatcagctaaaaattattgcgcaagcagattatctgagaaaaaagattgtgcacacaggagatgagctaaaacaacatggcaaggagtggagtacatcttgtcaaagaccatcgagatggctgtgtgctggctaagctggcttacaattttcggtgaaaaatatataaacaggagaatctttgagtcaagctggagcgtccgtccctgtcaaactccttaaaggagacaacatctaccccgcatggcctgatacccttcctttccccctaatttaagttaatttaatggggggagttagtgaaggatcagattagaaataatgcatcacgcattgcatgccgcgtagtattttatcactatgcctaacgccacggatcttttttaatatcaattgcggctagctcgatcatctagctagctgtctgcattccttaattagtcgcatcagcaaatatttttctaaagtgtcactgatgtttacagtttggtaaattttcagaaagttgctttctagctctgttcaaatgcttattgctggttccaattagcttggacctcaaacaaggctgaagctctaggcccggccctaagaaaatattaattcctttgcctagctagtcgtacaaaacagaatgtagacgctgaaaaaactagcgatacgtggatgtcaaacaacacttatcacccgctctgctaccagcctaccacaacttgagacatcgcctttcaccttctcgttgagtgtatctacatacacgaaaaaaaatctgggatctgatgggaaccaaaatctcgtgcgagcaagtcaagccattggaaggcaatatagatagtacatgagcggtaggaacccaaacatggggacacactccattgcttcctcgtcctcctcgtatcctagaaattatggaaggaaagttaccaaaagtatttttagataaagtactttcaataatagttttattaggatatatacaatggttattaataggaggatttttaacattgctaattagaaatatttactgacatagaaaagagagaaagagcggagagggaaaaacatcgttgctatggttaacaatggctttcctttcccattttctactctctcatttttcaatcgcatacttccaaaccactaaacggtgtgttttttcaaaaaaaaagtcacttaaaaatcatattaatatatttttaagttaatacttaattaattatgtgcgaacgagtccatccatattttatgcgcgggattagtttcataccctctatgccaaacacaaccttaccctttataaaat

SEQ ID NO: 46026 - DNA, 1072 bp, Oryza sativa
acagacacgctctcccgggtcccgaacatatcgatccccatctggatcgctcacgatccctcgccagccgccagccgccagccgccggccgccggccgctagccggtgctcatgttccatcgcgatcgagaaaggcgcggatgattgtcgcgtgcttaaactattctgaatagtttacaaatacttttatacacttggaagtgtgaatgataatactactggctatttctgtaccattatattacaaacggtatcgagcacggttcaaaggtaactccccactatatatataactggcgaatagctactcgatctcaaaacctatggggtcaagcctttgaaatcggtgttttatatatgtatttcaatgaagatataattgtattccaaaaaatgtgagaatatcccacaataaatgtgaggtttataaaccttcagtgtcagaatggactttagattaatttctcgggaaaaaataggactacagataagaaacttgtaagctgcatatgggaaaaaaataatatggaaatgcagcttttaatgaaagaaaacaaagtataacacttgcatgtacaatctatttacataatgacatatattatattttatatcatttggttgatccatttggctactacatatatatgcatatggacattcgaaaatgatcgggtctgcacatacttttgataatattatatacgcattgatcaactagcgcttccaatggcttgaacaactccaacttggttgcattcctccaactacacctagtacgacgtacagtgatttggtatacgttgtactacgggaataatgcaggcactgtgcaacttacaggggccgatgagagcagtgatcaatctagcgctaactcccaaagtaaagcctttttggcaggtgggagatttgcagttcaatatatccaacttgatgtggccatataacataacgtgcatgcctgcatgcagcctctgcctcttgtatgcctagtgggtagtacatacacgtattaaatacttcatccgtttcgtattataagttgtttgattttttttaagtgtgatta

SEQ ID NO: 46027 - DNA, 972 bp, Oryza sativa
tgtactgttaaacagatggcaactatacagtacatcatattttcaggccgcattcttttttagcctaaattcgcattccgctacattttctatctatattcatattcgtatcaacatgtttctggccgatctgtagtatttagcaatttgttccaacttatacgaactaattaaccggatctggttttttgtttatattatccatttcggatgttgaaggtgcattcgtgtatacacatatatacgttaggattggcaatatatatatatatatacacacacacacacacacccgatatgtatatactctatccgtcccatttaagtgcagccatgattttccgtgcccaattttgatcgtctatcttatttatcatctcataacaataaaaatactaattataaaaacatttcaaataagacagacgattaaagtttttggcacgaaaacttatagttgcacttaaaataggacggacggagtaccctgcgaggctctctgatgatcagaatctatggaaaagaagcgaacctacaatattccgaacacaagtgcgcgagcaaattaaaagaacgaagagcatatatcggcgcgcgtacttctgaccgaactgatgatctgtacctttgtcgcgcaaaagaaccagcccagccgcgcgcacggacacagccactcacgtacacattcagagctactcgagcaaacaagcttaagcccgaccagtcgcgtgcctgctgaggccggcatatcgatctataggtggtccacgtgccggagtccgaaaacccaaagccggtgggtagctagtaggcacgcatgacaagctgccgaacgcccgcgtgtgcaggtggggtgggaggtgtgcaggtggtgggaggctgcgtgcgcgggggcgccagcgaagcttcggacggtggcagggagagatcgagcgaatcgcgagatcgctctccgacacggcgaaatcgcgc

SEQ ID NO: 46028 - DNA, 1393 bp, Oryza sativa
aaatttagacaggaagcctgttcagttttgttgtactataaaacgttacattttatcttaatttatttatattatgcgacagagagagtattacaagagggagtactacataccaacgtatgtgtcatcgttggctcaaagggcattctgcccggtcggctagctagctgcctagctacccttcgtcctcaggaaattaaaatcaatttttaaggacatttatctggatttattttcaaaggttggtttcttttttaacggatggacagtagcttaattacaaagccagaggcctcttctcttactgttagctagctggaaattaatctcatatttaagtcgttctagctactttattcatcccacaatacttatcttctactcctgccgtcctaaaatataagcatttttagctataaatctggacaatatatccagatttatagccaaaagctgttatattttaagacgaatgtagtagttctagtattcaaaagttattcaaaaatagtactacctccgtcccaaaataagtgcagccatgagattccacgtccaactttaatcgtctgtcttatttgaaatttttttataattagcatttttgttgttatgagatgataaaacatgaatagtactttactcttgacttatgtttttcttttcaaaaaatttttaaataagacgaatggttaaaattgaacgcggaaaaccaagactgtacttattttgggacgaagggagtatcactttggagtactacttgtcacacaatcattttcaattcaaaattttccccattttacccctaaccaccattctactcctaaccaccatcctatatctaactctatactccctccatctatttttgatagtcatatttcatcttggcacacagaccaaggataagtaattgtacttatcatccatttaaacatgctactagttattcctcgtaaacatgcgattcattaatatttacatttctcaatacccatgtagccaatcatgtgtggaagaatggagagtcatacattaaattcgagaaagccattaaaatgataggttgttgaattaaaatatgcctatcaaaaataaatttcagatttagaaatatgactaacaaaaatagatggatggagtattatttattaaggatattatagtttttttctccccttaatatatgctaaacaatttagaatgataagttttatggaacggaggaagtagctagcggcgcaaaacgactgtattttgtgtaactgtgccctgagaagatgtccattaagtactgagcacttaattagtacaccggaactaacgtgagcagggtgatttgataactatgcgacaaaaggcatggacgctgccaaatacatatagcgac

SEQ ID NO: 46029 - DNA, 666 bp, Oryza sativa
aatttccactctggagtatttacatctgtagcattcagcctgcacaaaataaataaccataaagaattaactaagacagcgaagactccataggctcaatgacttgtctaggaagcaacaaaaaatgtataggaaagcaagatgctcatcaacgaatgaaagtattttctaagttcaatctagaagtcccattcatgtaatattgtcttacatgcatgaaagaattctccaagcaagtagcatctagataacatgatcacaaaaaaaaaagttcacacataattttagagtgggaattatcggacaacagttttcatatgcctgttcttgtaacatctcactttcaggagcctgtaaataagcaagtattgatacaatatatttgagcagcagtcttgatagaagcccagtgttattactcattatctatcaaaacgaaattcatgtcactggaagtacatcatgtagtttaatgtgatcaattaaaaagaggtggtcagtgtcctcttctattggatgtgaacaacgatggtaaaattggtgaatacatgagtgttcaaatagaatctagaacgccctgagattttcaaacgaagtaacactcatgctaagggctacatataggcaactccctcttgtaaaaaatacttaatgcccatcaaacaa

SEQ ID NO: 46030 - DNA, 608 bp, Oryza sativa
actgccaaaatttgatgtagctaccatacctttgtcaaatcaaggaacaggaacactgggatagtttccccacaaaaaaaaaaaaacactggaatagtttcattagcctttttgtgtgcgtgtgccaagcgtagataacaattgggatgtggatcatctgcagtactgctgaaagcaatagtagtgatttatgtgggaacccgaacccacatgtcagtcactcttactgcattagtagtactacggacaatctccactgtaacaattggcatgaaacaaacagcccacatgttttgagatcttttcctttcagctactctcctcttccaacaaagtggtcgccgctcggcgggtcttgctcgtgcaattgatgaagctctctctatctcgcaggtacagcttatggcccatgcctttaattgtcacttcgaagaaaaaaaatttacttctaactcgattgaggagcatctcctcattagcaggctcattagcaggtaggagtatctggaagctatccattgcatcggctttgcgatgtcctgtccatttaaagggagtaaaggtatgcagttgatgcgttcctctcatcatttaagggctgcaggaat

SEQ ID NO: 46031 - DNA, 1743 bp, Oryza sativa
aaatggatgggatagccaactacgtgcacttattatgctgcataatttcaaccggcaagcatgacaagcagaggaaacactagctaagttttgcgacattttgcagttatcctatctctttttagttaccagatgatttcctgcgcgttattgtgaggattgattcatatggagcaaacaaatagtttgagcaaatgactataaatagcatgggagaatgaataggaaccatcaaaatcaaatctatcggctcaacttgttgattgatgatacggtgtgtcatggatgtgcttatttgtaggagttagacagttagtaggatatagttataactcattcactgtcgctactgctacaaagtagccaccaagaagccgcctaatcacttatctttgttctacttcaataatagagtcagcatcacatgtactcctaaatcctaaaaatagttgagttaaaagttttaaaatttgtgtagagtttcttttttcaagtgctgagctgaaaagttcaaattttgggtagttttttttaaaaaaatatttgagttgaaagtttcaaattttgattaattatatttgaattttgagatcaaagttttaatttttttcatagaagtttttttatttaaaaaaatgagcttgacactttccgtttaaaaaagtcagataaaccgtatagatgaaacctatatatatatggtggttgcatcgcatactgcttcctacatcgacactcgaaatcagcacgtaccatgttccttgagtgggccttatatgggtcaaaaccatgtgttccaacacagctacgctaattagaccgaggacggcgacgatcaatggcgaggaggaagccattacgccatttgccaatagcgatggagatgcccttggcttcaaagggggtgttcagataaagtttgagcgtgacacatcgaatattatatagggtgtcacatagggtgtttgggcactaacaaaagaattaattacagaattcgttagtaaaccgcgagacgaatttattaagtcttaattcgtcattagcaaatgtttactgtagcataatattgtcaaatcatggagcaattaggcttaaaagattcgttttgcaaattagtcacaatctgtgcaattagttatttttttaagtatatctatactttatatatgtgttcaaacgtttaatatgataaggcataaagttttaccgtgggatataaacagagccaaagtctatctttgcctcccctttcgatcgctaccaggaggcagggaccctcccctccgcgccaccattctcctccggtgcgtgctcctgcgcatgctaagatggcactggttttgatagtttgagtttgcggttaatggatgaaaaagaagctcgatccataatggagggcctaaagtggactttatacattagtaaatacgcacggcaggtcacgttctcttccaagatgggctttgtgtcagtgttctgggccttggtagctcagccttctattgtatcttggcccggtgtggcggtgcctccggtgtgaagtttaccctcaaacattcttaaaaggaaaaagttcatcgaaggtccctcaacttaacagcgagattttttaaggtcccctaaccacaaaaccagaaatatgtacccctaaactcactcaaaccgttcaaacaaggtcccatggcagtatttttgcccggttttactggtgttgcatcctagtcagcaaaaaataaaaaa

SEQ ID NO: 46032 - DNA, 718 bp, Oryza sativa
ggaaacaccattggcaggaacaaccagctaagggctgtcctaggaaaagatgatttgtagaggcatgatatattttcatatgcttataatatcttttcatattatcttttcattatgtgtcccatggagctccttatctaccgatttgcaaaataggctatattttatagatatttggttgttaaacctcgaggcattttgtggacctcagtttccgtttgaggtgtagccttatcagcctcaacctgcttcagttactttgaggcagagataatcttttgaggcagtgttctctgccacaatagacaatttggggcaagagtatctgagacatggggaggctatctcgtaatctcttttgagatagactttgaggctgatttggttgctttgttataaaaacggcccagaaatcacatcggaaaccaaatcgcggaagaaaacgccataggagatccaaacatgatgacgacaccgaggtacgatatttgataatggagttcagccgaggcatacatcttcggggcactgattacgggcactccttcccgatccagtatattagagcgtatcaaagttataacgactcacggctggtcgccgccggcagccactccctctcgctatgctaaatcgccatgcggttacaacaggcatgctcctctatttatgagagatcctaggatagactccgactcatactcgagtcctaatacct

SEQ ID NO: 46033 - DNA, 3169 bp, Oryza sativa
ttgtataaaggaaagaaacttgaataattgtaaaaggcaacaaaggttgagaccagtcaaatattgaaggggtaaataaattgttactaagggcctcacttgatgaataaaagatagcatggtatggtaattgtcctttatagtattgttttgcatggctgattttagcatgagaaaaacccatcctcttggacaaaaatccatttatatcgtggttggtacttggtagcagtggacagtctttaatcttgttcagtttggacttgatcaaaattcctgctaagtcttgtcgaaatatattcatatcttgctgcataaagtaaagggagaacattttatatgattttcataatgggaagctttggtgcaaaatatgaatagagttcattgtggttgcctgaaatcattgtattgatgtcagaaatcattgttgattcacacagataatagacagaaaagggaatgaattgagcaacccatataccaacgttacatgtccttcagttattggatcaaccacaggaaggttaaaaatattgaccatataagaggaattttgcttaagttctaaaagaatatctgaatcacatcgtaattcataaggaatttcgcttaagttctaattaactttggttgatcatgttgcctgactcactacataatatttggagtgttaatgccaattcatatagtgctctactatcactattttagtagtgcatatactgttaatcaaaataatttcattttgcaacttgtatatatatctctacatgaggactttgcaaagcaacatctcaggggcctacaatgagttgttgctcaggtaacaagtttcagtatcaaaattcataatatgttcactacaggtttcaggttcatatatctgaccaaagtactgtccttgccagattcagttccaaaatgagacacagttctcaccaggattacaggtgacggaacactttgtcgtggctacatagcacttgcatgcagaggggtagcagcttatgaagccacctcttgtttcatcagaggtaagattgagctaaagatgatgaatttagaaacttcataagctggcatgaactgaacttactgacaaatgcttaatttagaaacctgacaagatctcacgaactaacacaagaaaatctggtctttatgcacgaactttgggtgttcagccagcaggacgttgcggagctaccaggtctacttcagcatgaggaagcagtcaaccaacaatatcggcagcaagcacatgctgggaatgagactgtgttaatcttattaaatcaaaaaattagttcatgttatgccatttatttagtgtaattatagttatatatgtcctgttgtatgcttatgctgccatcggccaatctatgccgttaggatatgcatgtaagaactcagaagcggtgtatcaatcgaaaatcgattgattttttttctcacaaaacaagcatatgatagataaatgatcaattgaaaatcggttgaatttttttctcacaaaacaagcatatgatagataaatggtctctgatcttttcagcctacctaatttttttctccaaaacaaaccgttctgttttttattctatgcgcggtcgacaaaaaaaccatgatttcttaaaatcgacccaatctgaacgatcatcctgggcttaataatttttttgtccaaaataaaccgatctgctttattctatacgcgatcgaccaaaaaccatgattttgaaaaatagacccgatccggacggtctcggacttaatatttttttccataataaacggttctattttattctatgcgcgatcgactgaaaaaccattttttaaaatcgacccggtccgaacggcctcggacttatttttcttatccaaaataaacagttctgctatattctatgcgcagtcgaccaaagaaccatgatttttttaaaatcgacctggtccaaacggtctcaaacttaatatttttttttgtccaaaataagctttattctatgctcggaagacctgaaaaccaattttttttaaatcgaccaggtccgaatggtcctggacttaatattttttttccaaaataaactatcctactttattctttacgcgatcaaccgaaaattcttgattttttaaaatcgtcccgatctatacggtcctggacttaatattttttctaaaataaaccgttatgctttattctatacgtggttttttaaatctatccggtccggacagaccgaacgtgtaccttttactacctagtagatgttcgacagttttttttaaccataacattcgatatttttagccgcatgatccaacatcaacaacggtgactgttaagtggctaacgggtccacatcaaaatacagtacaacaaacgaaggatgatgtccgtaaaatctgggagaaaaataggaagttacagtgagttacagcatgtaactgcatgtaattagcatatactataactagtataaatttgccttcaatcctcaaattggatatagctcagtgacaaggaagtcatgcaggtgacgcggaagtttgagggatcgattcctatgttcgcttgtttttgctgctatttcgtttctcatcctaagcacgaatcttgatgttaatccaatgacccagaaatcgacagtttttctctgagaaatctgtcacaagttatttagggcccctttgaatcgcagggtagaaaaaatggaggaataggaaaaacacaggattctgacaggatttgaagtgtaaaacagaggattgcaaaacacaggaaaaacacagaaatgatcgtttgattggagcgcaggaaaaacgcaggaattagatgagagagatagactcaaaggaaattttccaagaggttggagctcttgctaaatttcctccaaattcacatgcaatatgccattccataggaatttcataggatttagaaagcttcaatcctttgaatcaaagggccaaataggaaaatttcctataggatttaaatcctatgaaattcctacgtagatcctttaattcaaaggggcccttagcaattccgatccagataggtatcacgtacccaaaatccgatcggcctgagatgcggtggctgcgtcgtgcctgatgcgatcaagccaaaattaccaaaattacc

SEQ ID NO: 46034 - DNA, 927 bp, Oryza sativa
gtcataagccttccttggctgattcgggtccagtttctcagtatcctatatcaacctaaagaatgagtttatttatatatataaagaatgagtttgctatgtttatgaatgattcatgttgaggatacaaatgtacaacaatctctacaactgataataaccaaaacagatttagagtttcatttatgatgaatcatagtcaacttgaacttaatgacctagatgttggtagagaagttaatcaactagcctatctctggttaaagacattgaacaagttgcaagactttcagtcctagtgactacacctatcttaaccatgaaaggacatatgcgtcctataaaggatgtaacagtgagtaaggaagatacccataatgattataaatggaagcatcggctaaccatgcaagcggccaacaaaattctaagggacaccaatcttgatgctatcatacttggtggttgtttagtaaccaatcaagcatatgtaaatattatcgctttaaagatgtcttttgtatcatgattttttatgtgtacctgacttttcctgggacggggatcaatggactagcgattgggaaaaggtatttttccggtcgtgacacatgccgccggtgggaggttgacggagagggagaatcgctcgtggggaggccgcccgacgtgggcgacactgctcgccggttgggagagggagcagagagggagagggaggggcggcggtggaggaggaggtgaggggggagggggccggaggggaggcggaaggggagcgaggaagggagggcacggtggaggaggaggcgaggggcgagggtgccggggagggagaatcgctcgtggggaggccgcccgacgtgggcgacactgctcgccggttgggagagggagcagagagggagagggaggggcggcggtgga

SEQ ID NO: 46035 - DNA, 1049 bp, Oryza sativa
aggaagtagcaccctttgcaattcacactatgcagtcccccgcctcctccatcctcaccatgccgcctcccgacctcgccagcatcaaaaggcatcaacgtctcggtgcggcacccggcctggctggcctcctctacatcccccctcccatttgtccccggtttgctccttgctgcagctctggtggtgatgccaccgcgcgcattgctgaccgcactaaataattgaagtctagagataatgagatttaaagagtgatcctatagtactgcagtgcacaaagcaatacggctctcctccatatcgacttacccttctatatatatcaccccttctttaaacattcacatcttatttccctagctagttaaaaagggggcatcttttttataatgtttgtgacgctacacctaatagtatgtttgtagagattgatatacataccacaacagaaatgaaggggccaaggataaatatgatgaggcaaaatttgggaaattttgtttatgttatacgaatgagagtcatcctgaaaacggtaaccacgctagccaatgggccaagccaaatagaatttcggacaagtacaatgattcaccaaatcatcttataacaaaaggtcatgatggctagtaggaaatcccttactcctgaggaacattttccagcatgtcaaatattcattcgatctacctagccacagggcatgttaaggtaaatatattttacttttcctatttttttccaggcaggtctgtataccgtgtaattaattgttggttcagttgcttagtttcagttaccgatcgatatgctatattctacttgttatcaggagcattcttcatcaaagccatagttttactaatgtatatatagcagatttttcattgtctactaacactctctttttgttttataaaactaggtgtatggcatttttttcctcgagccctttagttacttatttattagaaaatggtgtatttactatgtaccattttttatggggaaccgtcacaccccttattggatatgagaatttttta

SEQ ID NO: 46036 - DNA, 1316 bp, Oryza sativa
tgagatttaagactactacgcccaaggaacactcaacctcaaggttaataatatacaagtgggggtcttgtgtacctacaagttcgtgggtatcagagctcaatatatatctctactggagctgaagttagagctttgggatacacatgccatacaacctagagtgtttgccaggcaaatcttttgcttgtggcaaagaattaaccttgatgttcttcgatgtaatctcattgaacttgactcatatgctggtatggccacccttttcctgatgcctcttattcatattgcgctcttgagaaaaacacaaaactctctggaattcttgcctctgttaatccccagcaccatcatttttagttgtggattgctcgtatgtttctaccaatacaaagctgaattgtgaggaagagtaaagagtggcacctctctgtctgcttttttttaccagcaaagtaatacttgttgaccaaaagactggtttatgtgtatatgaggataaggtatccattatttatttattctctctgcatgactgttgaaaacgtaagtgtttgatagtataggagaggaatactgcataacgtgggacgattgtatcctaatataactctaactaccatatactctaatagtaaggaaatgtggactacaatattttcaacagataaaaaaataatatatatcattaagcagcagaacaaataagatgtgtcacaatgagatgtatgaaaaaaaattcttttactcaggaaacttcttccatgctaaaatatgtatagagcatatgcctgaagaatctgcattttacttgaacttgtttagacattggtggttgtcagagcattcaaacataagtggaaaggggtgatagaaaaaaggggaaattattgatgatggtaccgaaggcgattattgtgatgtagtgtgaatgttcataattaaaataaaatctattattgcaaagtgcaaaaccgaagaaggaccccaaaggaaaagcagaggttctgctcaccatgcctgtagaatgaaacgatggatccagtccagcaaacaacctggtttcacccaaaaaaaatttaaaagcgaaacttgtacttgcaacttttcatggtagacagggtttccttaacttgtgatccaccggatattaattcatatgccttcatacactctgctatgcatttgttcttattttcattatgtcattcgcatctgcttgtattacgccaatagcacaaggaattgttaacatttcaaaactttagatagaacataaatttttttgagtaaattttacaaaagtacatgtattt

SEQ ID NO: 46037 - DNA, 617 bp, Oryza sativa
ttccatgatgatctcacctaaaatgtagaaattgtctttaaattgggaggatacaaacttttcgatgtgatatcagaattaacaacaatggttcaacctagagtgcaaacggaaaaaaaggagcatatataataatttcaagagttctccagttggtatgtatctctgtcattttactggaccttcgcaagtgctgtcccattacttttccttttaatttgcttgcacctctcactgtcctgtatagtcatgcatgtgcacatgttaaggccttatatcttaaacacgagaatagaaaaaattgcatacaatcgggtattacggattcctcaatctgacataagtaaaaaaaaatgcgtaaaacataaaaatgaaaaggcagtgtttggatgcaacaatggaaaaacataggttggacctgaagaaaatggtaaaatgtggtgaaaagggggaaacttttatatgtatcgctgtgtgatacaaatgagaggcatcatgaaaacagaaaacatgctagcctccgcacagggccatcaagggcggtgtgcgaggttagtgcccgcacagggcctccaatcggcgagagcaaccagcctgacatcatgttctgcgtactg

SEQ ID NO: 46038 - DNA, 3355 bp, Oryza sativa
ctacataatggatttggacttgtcttgttgtttagtcctctcgtagtgttctttagtcctggggaggttcataagtaccggggaggttctgccaatttttttattaaattttgacaacttttaacatatcgcattagttggcctgtttggtagagctctaactcctaaatttaacttcagaagttgggtctagagtggagttgaggtgctgcctaaaaccagctccacctctttagtttattttgtgagagagctccacacagttccgctctcattctaggtggagctgagctccagctctaggagaggtggagctagagctggacctgtgccaaacagaccatgtaagcgttaattaattaatgatctttgttacctacaaatacaccgataatcttattcatatgcaatactagtattaaattcctatgcagcacaggctccgtagcagtcggcccattagtcctatactcctattcgccaatccaccacttctcacaggtaaagcaccttttcttcctctcacattcgtcttcctcgatgcaccctctccttttcatttttacgcaatctttccttccgccatctcctttccattcactggcggccggctacaatcaatctccggcgagctcccactgcaggttctcctttcgcccccgtataaacctcccacttgatgcagcactccaacacactgtatgacccattttcatttctcttcatctggacctcccaaaagctcgactgcagccgcttggaaattgtgaccatggcgagaccgacagcggaccacaacaacgaaggaattttgaggtggcgcgacatggagagataagatgggggagcactggaagaaagcgtcgggacttggggagaaatatgcgggcttacggcggcaatgctttacccattctaatcttaccccttgcaaatggatggatgtgagtggtacctcgtggtacctggcacctcataataaaaactctcatttttttactctactttgctctatgttcaagtcagtgatctaagcataacgctgtaattaactatcctatataaaaactagatatatgttgattaattttgtttcactacccttgaaatcccatctccgtcctgtattcaatatttcgtatatatttaagttatgacatgaagtgaaattaagatcctaaagctctaacctcagtgtttcacgtcatcgtcagttctcagccgttggatcagtgacttgtatcgtttctcagccgttggatgaggaaaatgcatcactgtcagattgaagacagcccaaccatcatctcacacacagatagcacatgaggcccatgtaataacttggaccacgtgaggcccatgtaataacttggaccatgtgaggcccatctgtgtcgatctaggcccaatcaacagtgaaggagttagggtttgtttttttttttttttggctcagtgggggtttcctcatggagttagagtggtggcggtggcggcgcttctttccatcaacggtgctcgggaccgtagcgttagcttctcctattctaaaacatctttcgcttcaacttccctgttcgactcttcatctccttagcaacgaaactgacagccacctccttcgctaataaaagcatgcaccaccaacgattattcttagcgatgcaagcagagctgcgtagccaagcgcctgcttgcctagatcaactattgagctcaggtagtcaggtaattaatcagtttaagcatgtcaggttaatttctttagctccctctcactctctcaacattttcttttaatttcatggatcccaatttttccttttttatttcttcttattaatcacacaaccaattcaaattcgacaaatttaatgttgttaagtagttcttgttttcactgaaatctctgaagttgttggaagaaatcagtggaccgaccaagattattactgtccgcatcacatctgatagatagtttcagcaaattctcggtaaaatgctttagcagtgcagcatgagtggtaagaagaaccacatctttttcgaatcatgatatttatgtgtttctatatattgttatggtcttagagctgttggttgctccaagtataatttttatatgctccacaaattattgccttcattgacaatgttttaatatacagcttattactctgagggatgagtggtggtatgatatgctgtatattttatctgtgcagggcactttttttctctgaatggaccataatatctgttgagatattgcattcttactcacctgttcataagataaattattgcatggaaccatggactgaatcatatatcgtgtgctctatgcagtatggacatttgctaaaatcctactcaatttatggtgtaatgtatatgtagctcctgtaagttcttcctagatgaattctgaatattaatgtttgcttcaaatgtaatatagcgttgacagtcactccattcttaccttaagttataaatatctcaggctcttactttctctgttctgctaatacaacttcgaactagttatctatataaactaatttgttgtaatagccacagcttccatattcttaatttacctacctgctcttttatagaaaaacaattgggaaagcccctcttgtatattaattgtataaagtttattttaatttctctaccccttatggtttacatcttttgctaaccaaataggaatatatattaatgtacttcaactggctattttttttattattggaatagacatttctcattgatgtttatattattttatatatattacaattttatgactgaattgtatacccaaacatcccgcatcaacgcgtgaggtgtcaactagttatacatatgtcagggatctctacagtttactctgcggctcttcctttagtctcagatccgctgctcccgacatgagctgcgacccgctacatcgcaccactcgtacggtttccaccggcatccaccacacaccacaatatggtttgctgaccgaaagctgcaaacaatgtactcccatcagccagctttgtgcgcatgatgcctcaccatggccggcactcacaccgggtaaggatggtgctcagagtcagagatacttggcaactcacactctcgagtaaccacggcagctgccacagcgagacacattagaatgtcagcactactagtcactatggatgtaatgaaaaccttcgaattatttttcttgttcggtccacttcttttctgatgcttcctactcccatcacatcacaatgcaagacaacttgaagaaactagattctcttatatatctacctctcccattgtcttgttgatt

SEQ ID NO: 46039 - DNA, 527 bp, Oryza sativa
gtaattactacctcctgctacgaacatatatagatgggtattaaatgcatagaggcattatatatttcgtcgtccttttatatataccacctcatctttcagtaccaattcactattttcgtatcttttgaacaaacataatagcaaactatagtgaacaaaaagtatggatgatggagtaagaggagataagaaattaatagatatcaagttctgcatgtatatctcagtttgatcggacaaggaggcatccaggaaaatttgaccttgcaagcttatggtttcagttggatgaattgttgctctggcacatggtaaactgtggaggacacgatgtttccacgcttgacattcaagatctacagaatgtttttttaagaatttttgtgatgaaagaaatgtgaggctacctgcatatgttcagttcataattataacctatgcatgcaatttcacttccaattcctgcaatatcgggaacacccctcccccgcgtgaacgaaactattttgcccaaagtttcaatt

SEQ ID NO: 46040 - DNA, 582 bp, Oryza sativa
tttggctactggtgatactacaatggtagtcagtagaggcttgctcgcaaaagatgagcaggaatatgtttcatttctgcttatagaacaactactagaatctgtgaaaaaactattaagatatgtagtgcctccactgaccacttgtatcggtgttaattttctatgccactaggccattgccgataactgcatccactatgtttttatttcactctcataccatgagagattcaggtgattatttgtatccaaagactccattatttgtatcctatattcaggtgattaatcatttgtatatacatataagaagatagaaaactgcccatcgatgaaaccgtgatcctcgttttccatgctagtgtcaaatcattatcttttaacacatccttgaccctgcgaagcagtgagcggtggcggcagcaagcaaatgtatcaggggtgttgagctctagctcatgtcggcagcggggcttggttctagggggtgatagaggcagagctcggatgtgagggccagtggccggagtgactagtaaagcatgtggtcacacctttgccgatgcctcctactcccat

SEQ ID NO: 46041 - DNA, 673 bp, Oryza sativa
aaaattacaagattacaatcccggccaggtcgtaactcataaccaggaaaacaaaatagtatacaaccacccacacaccgacagtgccaacacacagacccaggagaaggctagcaccggaccggctgccgctaagcatgaccgaccgccactaagccaacaacggaacacagccgagatcgcccaaaactcgacccttataaccgacacaaaaccccgctctatccaaatcttcgggattgaggaagagaggtgagacagaagaatggaactgctctccccctaggccctccgacggctaacttgcggaagctaggaagccgacaaaagaggatatgaatctagagcgaggttgcaccaattgcttgggaggtttcggcaaggggtgcctagacaatgtctttaaaaagagaagcgacgaaagcaccgccgccgccgtccgtcaaggtctccaagagaactgagactgggctttcatccggcagccacactagagggggtgagacggcatgacaacgccctcaagaggggagtggcactcgaacgccaccgttgttggcccggccaaggtcgggctgtgttttcacccgttgtccacctcctgctgatcgaaagctgttctccattgctccaaccactgacccttcactgtcagcgcgtgtacaccactgca

SEQ ID NO: 46042 - DNA, 1887 bp, Oryza sativa
tttaatctaacggcttataatattggacacaccaatttatgtggaaattaagggatatatgttttgttttttttctcaaattttgtagcatttggtaacttgagagcgttttgaggaactttaatggacatacgtcgtatcgtttggttgagacacttatataaggacaatattaaccggagaacatccagcacgttttgtccctaaattgttttcgtcagttttgctttttataattttgtaacataatagttatctttatactatattgtatttatgtaatacatagaagcaattatttataatgttattcatcaactgtaaagaatggtaggcttattttctttaaaaaagcatgcatactaaattaagtgttaaatgaaaattaagacttttttaattggatataggttattgttttctattaatggatgaattgggtggacatgaaagtccactaaatgcattggttatatagtctaatatgatttggtgtagttcgagatgcggcccaggaatccaagaattgagaatttttttacggtggattaattgttttttggattttaatatttgtatgttaaaattcagcagctatcagtgagatggagtaacctcagttttgtatttttcttcagaacagaagaattaaacattggtgctaattacgtctaaatagaaaaaagtacatttagttctaataacaatgattaaaagaagcaatattaaacacataccacataactgttgatcttcgttctttctgccccataatgttttcttgtctgtaaactcaaagtagtagtccgagaaacattcttttttgcttcgacctattttattattgtatcgtgataaaaaaagattttgagatatctttcggtacacagtacttatcatgttccataactttgattatttttaaaaaatgtataatgagtttatcttaatttttggcctaaagtggtttgccaattgctttgggattgaggcatgtattgagttgcctcgaagaaaatagtatttacataatagaacaatatattaaatgacatgtttgcaacaatcataccttgcatctagtagactcatctgtataccatagaactcacagccattgtaagattaaccgcatcctatagcctaatcactcttactttaattatacacaatacttatcatgttccataactttggaacttttaaaaatatataatgagtttatcttaatttttggcctaaagtggtttgccaattgctttgggattgcggcatgtattgagttgccccgaagaaaatagtatttacataatagaacaatatattaaatgatatgtttgcaacaatgataccttgcgtcaagtagaatcatctgtataccatagaactcatcagccattgtaggattaatcgcatcccattgcctaatcactcttaatttaattgtccacctatcattttttctgtgttaacgcagtaatcaaattgtaaagtaccatgttatctgcaaatgttcatatgcaatataatatatacatttatgttattcaatagatgcaatatagtgtagccttaattaatacaggatagcattattgtgttcttctataggtgcacgattaccttcttttgccaaatatgagcagcctgaattgactaatgtcaccaaacacctcttatgccaagatgagtcgccagatagagtcgtgtattgtagagattaaaataccatctggtcgtggtgttgctgaaggagataacactggtggagaaaccctttgtagtcccggttcgtaacccccctttagtcccggtttccaaaccgggagtaccatccgggactaaagatcgctatctttagtcccgggtgaaataaccgggagtaaa

SEQ ID NO: 46043 - DNA, 598 bp, Oryza sativa
tggtctgtaagtgttcatctattaaatatatatcaatttcaataattctgatgtattcctttaattaaatgaactattattgacctatagtagttagtgctaactgataaatacataatggcacataataattaatgtcataataatttttcaaataattatggtgtacaatatcacctgacaaataatttgaatctacatatgtaaaaatgaaaaatgaaaacaacagaatttagttatatttttttcaagtagatcttatctaattttaatatgtgagatattacgattttcaaatattttttttgaatttttcaaaactatttgattggtatttgaaaagtgagaagcacacatgatacatagacatgataaactttattaaaaatacttctagcgagtgatatggctatactacaaccccttaatccatcatgagaactatggtcatatatgtaggttttttgtttgtcatatagttttggcaacaagtaaacaatccagtaacacccataatatattttcttatacttcaggaattccgatgtgtcgggcatagttgatggatgtatgtcatacactctactaacatgataac

SEQ ID NO: 46044 - DNA, 2111 bp, Oryza sativa
gcgaaacaagcattatcttaatcttaattaattaaaataaaaccaaagatatttattttgagatgtaaattttgaaaaggctaaaaataaagatgctccaatcttatagaactcaaacaagaaccggatataaaacttgtcacaaaagattttctctaatattttaaaattttaaaattgaaatggttgaataggaagggaaagaaatacaaatgattaaaatagatgggggaaaaacaaataggactttagccccaaaatatttagcatggatttttgatggttcgataataggctaaaggagatttggatttttgaataaaggaattgaaaatgggtttcttagctcaagagcaatcactcaagtatttgtgataatattgttctttgtgccaaggatgtgatcaagccatatagattatataggtggtgtgatcaaaatagaaacttgaccacataatggatggtagcatattttggttgaaggggaagtgaagattttggggggaaatataggaattaatattttatgtactccagagatgtcggagaatgatatttcatgtgctctggagatagttgggtgagatcaaaagggtatttgtggatgttggagatgttagggaatggattcaaaggaaatataatttagagccaatgttagggatttaaataaaataaatggagaggttttgtaaaatttaaaagagaacaattaactttgcaaataaagttttagatccaagataaaagaaaaggttaaatgcaagattgctccaacgtaagaatcgacaaaagcatgacttaaaatatttcgcaaaaaaaaaatcctgaaattttgagtccgttacacgtacacatgggaaatatgtcatttttgacatatgtgaatgattaacctctcccttttgcaaacatttgaactgtgacaactgacaatcaaatgtggagagtactagctttaacgtgttaatttggttcccatgttgacttaccaaagttttgatgaaatctacaagcacaaaaacatgttgcgtcaaaaaatcaggtcagcatctgtattatttcgcggagggacttgataagaaaatcatgaatgaaggccgtaaacacaaaaatttggactatatatgactatcagatcacattgtcactgatcctgaatgatagaccacctgagaccctgtgattttctctcttttctgttcctccattcttattgcttgtccgtttcaagtttctatatttggttgcaaaaacttgatgcgattcattgcaatgcgttctacggatatctattatctagctcttcaaatgctttaaattcgtgtcggtgaggaagtcctcgcatttgtgcaaatatggtgaagcatgtgtctgcaccaacgtcatcacatatttatcctttatggagaagacatagtgtcattatccgaaatattacaaatgcgatccaaaatagtttaaaagacaaagaatgaaaatggaggagaaaaatttgcttcatgtatgcactctaagaaatattgcttcatgcaggtggtaaagctccactccacatatgttgttggactaaactctaactgcaatacattcttattcatctataccgctagcgaacatgtacatgtgtatatgtgctgacttctgaatattcatgcgtcgaaaagcatctagctgcatcatcattcagctgaagattttcaagagtcagagcagcaaatgagtctgtaatgatgtggcatgctgtgcgagaacttggtttctatcagtggtcagagagaaacaatctgtactgacttgggagacttcaggttggtgtggagcctcctaagagatttgtttgagtacagtgatgagataatttcttcacaagttcacatattcccttatgcctcctatccatatcgcattatatgctaatttggttttagatagatgatccatgccactacacctaggggtgtatcacaatgtagtgtacaccatgaaacgttcgatctctctctctcctccttcctgttccaaagtctttgttggatgcctggttcttgctagttgctatagttagaatgtgttggtgtggtggcaagggctgctgcatgcatgct

SEQ ID NO: 46045 - DNA, 3686 bp, Oryza sativa
  unsure (1)..(3686): unsure at all n locations
tagctgcatgcgccgcgcctcgccggtcgcgcctcgcctgcacacccacgccggcctcctccgctctattgcccgcccttgccgcgagccgctcgcctccgccgcgccgtctcctccggccgtcaaatccggccgcggcggcgtcggatccagccgtggagggccggatacggccgcaggcgatgcccgagacatgaccccaagccgcgccgctgcgcggcctgccccacgtgccagtccgcctcctcgcgccgagatggggcacagccgtggggggtgtggccctgctgccaccatcccggcgtgccgcgcggtttccggtggcagcggtgggggaaagagggtttcgccactgggtcatccgcgcgtggacgacgtgggggggggggaggttaggtcatacatatatatgtactactagaagatggattattgaattactaaaggctttccttgtaaattggaaaaaaatgtttagggggctaggcaatgaaactctggagtagttaccatcattgattcatcaacctccagaatttctcatgccattaatccatgttcgccaagtgcatcccatatttgtacttaactctgggcaactactctgaagatcccttgtatcatatatccaaagtgagcaatcattttcgcatctgcagggatagagaatttcttttgcctttgggacaagaaatttcccgtccatgatcctcacagaaataattctagggtatcagatttatttgctgaaaggttggccaaccaattttattaacatcaaagcagaaacaaaaagaaagatgacacaacatttgcagtaggttgtcaaaactgggaagtcatgactcatgagacgcccttaagggttaaaatccaaaactaattacaagcgtctacagcagatacagacagctgctattatcctcgactttaggagatcacttcatgaaagaatgcagatttcatccttgactacagtgaacaactccaccaccattttcatttccaccatgaagatgtgcacatgtctttcattccaaactagccagcacaccgtcacctaaatagttgcataaatgttgatcaaaatttgacacgacagattgtgatgatacaagtcagtacacaaacatgtaaatatgaattcgctctgaatatgtatgcatggaggaacataaacaaatcattcttcatatgtcattgcatatgtattattcacttgttgattttgtaatttttgtttcacaatgtatacatcgatcctatacctgcatgtctgtgtagtgacttatactattgtaatccatctcgtcaaaatttttatacaattagtattatgtagtgtgaaagtaattggtgcctttgcacctaggcggctaggccattctacatatgcagtgagcgggcccattctacatatgccttttatcagctgtatgcccctgattccttcacgctcatctgagacccaagcctccatcctacacggctgcaaatcttgtggtcagttgctggccatgacaaactctagaatacatgttttggaaatacatattgtgccctccacaggttgccttgtgccagatcaacaaaacatccaactgaaactacaaggttttatggtcatatttttcctgatgcctcctagtcatatcaaactgagacatacactaagctcgatctctattgatttcttttatcctcctcctcttaccacatactttcttgctttttcacttgctacagtacttacctattatgtctattgacatttgacaggaagtgaatttgtgatgcatagtgagctgaatactgaaagaaggggtggtatatagaagggaccaggaaaaaaatcatgcggttattgcaagttangtngaattggncgaccaggaaatatgatgcggttattgcccttctatgttatatatacaaggtggtcataattaaatttctctcatatagtatcatcaacttcttgggttgatctgaattaaatagtgaaaataaatgtgctatgatttctacatagactttttgtaccattaattactcacccttggagagctagaaataatgaaggtaaggttttgaaacttttatatgacttgaagttatatgtaccgtagtacgtctcctcagaactaagggcaagttttataaaagatgtggtggtcacctccaattttatccaattatccatccctagcctatatagatgtattgcatttaataccctagtcccagtacacttgccaccaatcaactcctctaattttctcttgttcttgaagtttgtgtggaggttgccccttgcgtgaggggtggcttctcctctctcttctcttctctcttccgcatcatcatttaagcatatagtggatgcaatggaaagttaattgtgttgggcacaaccaccactgacaggcagtcaggcatatatacagaggtcaccaggttttgtaatggtatgaaaaaaatggacagagatgaattgccttgcaacaagatgagcagcactatatttcttttcctgattagaacaactaccaatctgtgaaagaactattaacatatacatggaatgcttccacctgtatcggtgttaatctctcatcatgccattaggcaatggttggtaactgcatctgctagatttttaattcactatcatcccagtatgtagctaatttttaatctcagtcttgccacaatcattgatcactaccgatgcctgtgaccttcacaaattgcttccactggcgttcacttctagctctcagctgcaaaatgtatattcctatcctccagcttctcgtgaataaactggaaatccttgtaataatgaatggttgagtgcatggcttatgcagagaccggaataatatattcctttatctaaaaaatgtgcacaatgctgtgccatggctagtactcgtgttggggaaaaggatagaaggtactcctgttcagctagccacggtagctagccagccgctgaagtaagccataagggaagatccatactactggtcaccatgactgtcgtgacaatttttaacggtctactacgggagtggattctaatccctcgaggggatatcccatcgtatatccttttcttctaaatttgatgtaaatagttgtgaaaaaatctgaaaaaaattgacaatgtatagtataatgatacctactagttcacgaaaattcagtttcaacttcgatctacacatcgagaaacaaaaaagacaaatttagatataaacagtacgctactattcatatgctgaatttgtcttttttatatctcgacatgtgagttgagtttgaacttaagattttgtggagttgtatatatgtgttgtatgaatgttgccaaattttttcagaatttttcataaccgtttatatggtttttaagtaaagaagggaacatcccctctcgagggattagaatagtttcctaagttgtgctcaactaataaagtatatggccacttctttgccgctgcttcccacttccatatcacaaaggcaagacagctcaaaatgtctatcttccatcccccattctcttgttggttgttgcttgctagttgctcctacttgcaatgggaagccaatactagtgaacgaaggtgcatacccaaaatttgaagggttatatcagagagttagagaagctt

SEQ ID NO: 46046 - DNA, 768 bp, Oryza sativa
ttgcactgcacaaagcaatacagctctcctcccaacagttctatatatcaccccatctttgaatatcacttcttatatttccctagctagttcaaaagggagcatcttttttataatatttatggcactacacctcatagtatgttgtagagattggaataccacagcagaaaggaaggagccgaggataaatatgatgaggtaaaaactgataaattttgattatgtgatacgaatgtgtcaaatggctatactcgacaacggtatttgtatttcatgggggacgttaatactaagttatacgcgagattgcagtaaagtagataggagagaaagatttttatattggttcaagcctctgaaatagataatagccctacttcagtttatatgtatagctttgggatatattactaattataataggggagcaagctagctaatccagccgatctactaatactcatcaagaactaatttcatgacttggagtcggtggctagctattgttttcttcctcctggttgatcactctccgtgtaaaggaaatttgatcaatgatttctcactttgttgatccacgtggaagcagaacgaacattttcatattgagaatatttacaacttctgcacccatgcaaaccttctagcatagaataaattcaattttgtctacaaatttcacccatctacatgatctctactcctaacgttagcaatttatggcagattgtcattgtggttttcttttcatcatgatatgatgag

SEQ ID NO: 46047 - DNA, 745 bp, Oryza sativa
cccttcacgaagggactatcacgaaatgtgataaacaatgcatcgaaggagatgggtttgagacccatgtgagttatactatggtggtaacccagtctatgtgatcggagatcccgtgaattagatcctgggaagaacaaaccattagtaaactagaggagagtatcaatatatataccctctccaagtgaagatgcatgtactctcgtgagctgcaaggcaggttggctatgccttaatgagttctgttggctttaattagcgaagatgttgtcctgcagagcattcttgaaagaactcacctttgtgagcttgactgttggtcgcagtctatgaagattttgggtgaatcttctaggaagcttactaaagacctaggagtatgacttatacgctccacccgaggggtagtctacagacggtctagtaccagataagactttgagtgaaacttgcttgcacaagacttgcaattcaaggcgtagtccattgttcaagttgtgagtaagtgtagcttggagttctaggtggatgttcaaccttaattggtctccatcgaaccgctggtatataaacagtacattggaaaaggcaaatctcagtgggattttgagatttggtgggggattgttggaattaatgaatgggccttagcccactcgaagattaattctttggaaaatcacaaaagcccacctcatgggatggcatgcatgtggagtttagtaccaccttgcttattcta

SEQ ID NO: 46048 - DNA, 644 bp, Oryza sativa
aattaactaacaccattgcggtggcaccaatccaaagctatgctcatagtcaaagtctatgtaataatgtgatccccatgtgtgtgctagttgaactaagcatggctaagcatttcctaaaccaacatctagtcattttgatacccaagttatcaatggcataaggtaaacaataaatggctgagtattaggacccatcccacatgacattgtaaaaggatgcaacatttaatagaaatgcgggatatttgtaaattgggtacaatatgatcaaacgtattgcatgacttgccttgctctcgcactgacgagacctcagcaacgtcttcgagaaaccgtggatcgacgaaacggccgaaacctacgcgacaaacaaagcacacaagcaaaacatgctataagactactgaaacaggaaacaaaactatttttaatggattctttgcatttttcttgatttactgagacttgaatggacttaaacagagctcggatgaattacttatgaattttagaagataaactgtgtttttactaataaagaaaagcccttaatcaatttattgcgcaataaagcccagggctgacgtcagcgaggggagggggtggcgccgacaggcgggccccactggtcagcggcacta

SEQ ID NO: 46049 - DNA, 731 bp, Oryza sativa
cacaactcattcaagcaatagcaaggcaggcagcatgagccatccaagaagaatttagaacatgattgagagagggggagggaaataatgggtgtattacagtgtgatacaccctcaggtgcagaggcatggaatggttggtttcattttccaaaacaaattacaacacgagatatgaataggaggcatcagggaatatatcttgtggaacaaatcccatgaaagaatctcccaaatcagtatagattgttcatctccggaatctgtgttgacaggggtgacagaatttaccaataccaacgttctcacagcattgtctaaatgactcgtacgcatgtgcacgcacattttctgcttcatgcgcaccaaaaccaatgttctcgcagcttcagatctgattcagcattttctgattcatctcgtatgtgacgttttctgatctgactcttgtacatcttcagctgaatatgatgatgcaactatggctgctattccaacgcatgaatattcagaagtaagcatataactcatacgcatgcacatgttcgctaggtatatcttgcagatgaatataaaaaaaacatattgcaattagatggagctttctccacatgcatgcagcagttgttaagtgtgctgctccatttcattctctctttgacctcttttgtaacatttggctactacacgacatgctaaaaacaattgtactaggagggaaaaaaactgaa

SEQ ID NO: 46050 - DNA, 561 bp, Oryza sativa
ttttcttaaaaaaattgatacccatcctaaatagcaatgttttaatatttttggagtactgaaataatgaaaataactaaaattttaaataaaatataatagaaaatttgaatttttctgtattatgttggaaacaaaatctaacataatttcagttcaaagtatacaaccctaaactacaacttgggagcgataaaagtcttattttctaatatattttctcattgagaaaaacatttaccgctaaactgtagtttcatactgcaatactatatacacacaaataaatgctaaactgtagtttcatactgcaatactatatacacacaaataaatcaatatttcaacatattcagctcataattatatgtagtcatattaggcatatttttaatagaaaatatcttcaattaatatatcctaaaattcataaagacatatatattatacaaaagaaaattgttacttagagtttagaaagtacaaaattaagttatgctaaatattaaaaaaaagaaacgcgttatgtacaaatgatatatagtttcatatatatttttt

SEQ ID NO: 46051 - DNA, 721 bp, Oryza sativa
acgagagtgatcatgattcgttcatgttaaacgagctgcaaaacagagcatactcacctgctttccaataactccgtgccgcctagtggactgaactcaaatctctccttgatttcaggtgctaaaccgagcagtactctctccgtcccaaaataaatacagttttgcactattcacgtttaacgtttgactattcgtcttatttaaaatttttttatgattagtatttttattactattagatgataaaacatgaatagtactttatgtgtgactaaatatgtttaaatttttcacaaaattttcaaataagatggacggtcaaacgttgaacatggatatccacgactgcacttattttgggacggaggtagtattatattctgttcagcttttgcgtgctgatcatgctgagtgctgactgctgaccagggttcacaaaaccgccggtaaccgcgcggttaccgcggttaccgggcttaccgcgggggtacggtaatgtaaataccgcggtaacctcctaaattcaaataaatttaaaaaataatttgaatttttgatgaattttacacggttttgtacggtttttcacggttaccgcggtaaccgcgcggtaaccgtgcttaccgccggggcacggtaaccccggccccggcggttttgtgaaccctgctgctgactagttcctgttagcgatttttctgactcaatggagctcgga

SEQ ID NO: 46052 - DNA, 5160 bp, Oryza sativa
tagtctacatttaatactttaaatgtgtgtttgtatacatcaaaaaaattgccaaaacaactaaacacggtctatgaggtggtaataattatttcctagtttttaatttgagagtggttgtgccttatattttagaatagagggagtataagattacttatataaacatagtagagccttgtagcctagtggttacaacagtctcagtagcaccttaggtcctggagtaacggctttgtgctttcaatggtaggcgacgtacccgtcgacaacgagatgtctgcggtgacttcgtcaatctccagatggatttgctggccagtcttcaaatatgctcataggggtagggtgagtgtgcatgcgttgttgttagatgataaaacatgattaatattttatgtgtgacttgtctttttaattttttttataattttttcaaataagacggacggttaaacgttggacacggaaaccagggtttgtctttttttggacggagagagtatgtataagataccaagccggtcggcagtcggcaggaaaagtagtagcggaatttgaggaaattaaaagtgcagggaccctttgggaagagaaagagagaaagagagaggagagtagcaagagagcgacgaggcagtgtgttgtgtgtgcatagaggatctctgccctctctactgctgctgggctcttttgttggcgagcgaggtgaggtgagctgatgggatagtgtgaggtcaaatcagcaaaagtactgaaaaagccttcccttctttataattgcatgccctgcactgccgctgccttgccctgctccccgcaacaactctcctctgtacattcactcccgtcttgcttgccctattcaatgcgcctcatctcatatgagcgctagtactagctcgtttcactttcaccacaggaaaggtatctatcgcatctgtaaacgtacaaggctacaggaattgaaggagttgtctgtcgatagagtatatagtatagcaagcagctcgacagcgaattggagagctagcttgtagaaaaaaaagaaaacaatgtaaagacactgcatatatgacttgagataacttatcccatgtatgcaaatcttcatgaacatattacatagaaatttgctctggtccaacaaaaaatatctcgagatgtcaacaactcacagtaccaaatcgttttcgatcgttgaatctaactatgcctatcctgtaaagctagattcaacgattgaaattgatttttgctagaccggagcaaaattctattacgtatgtcgtacaattttttactggttatttggttccgtagagaaaatgtctatttggggattaccatcgccctggtcatgaaagctctacgtggtcatgcatgctgcacacacatcgatcgaccatgatcgatcacacaactttccttcggctaatttggctttcgatccgtttcttctccatggtccatccgctaggcgactcccagaggctcagagtccgcgtgggtttctttcttctgtgcgcgctgatcgctcgctcgtcgtcttctctttccgatcgatctcccctctctcgcgcgctctccccaacctctggcgccgcgcggccctgtgcttgcatgcatgctgctcctgctcctgctcctgtgctacagagcgctgccggccgcgccgcggcggccgcctctctcgggaataacgacggctacatcggccgcagcaacggcagctagctgctagctagcgcatgcagtgaacccacccttcctaccgtgggcctttcaccacgggtaactcgtgttcgcgcgatcgatcgcggctctggtcaggttgtaaacaggagttacggcgtgcagcttactgttcatgatcacatgtttgtcttaggctaatttatctgctagaacaccattacgacgctttccactgatagtacaaaacaatttgaaccgtgatcttatttgatcgaaaggtttagatctatttgaattaccacatcagttagcagtatataatagaaatgtcaagggacatcattatcaaaataaaaaggtgtgaagggatataattatcatttatagcagtgactaaactataaagctttgctacggtttctttttttttctgaaaggctaattatgtagttgaatatttttttataattattcaaggtataaatgaaagaatatttttacaaaataaattaacttttataaagttgataaatatattaaaataatactatatgaaattcatatatagaatatttttacaaacatcccatcgtttagaaactcgcgaacatgtatatccatccaattatccgttaatccaaattcctgctggaaggttgtggctggaattataccatgcctggaagttagaatgcgactcaaattcaaaatttaactaatgagataattgaaagaaaatgtttttctttatttttaatctttgctaaaatagcctagatatgcttgggagggcatacctgatatatatagagtgttttttttcagaaaaaaaaaagaaaaaccaaaccgtgaatcacccgtcgcgccaacttaatttcactgcagtaataaactagttctagcagtactaataatatactagagtacgcatattgttttgccttttaccatttctctgaatactcggctagcttcctcaaaggatcaaacgttctccttcgacgggttgtaaaattttggtggcctatttatatatggagaacagttatgttgcactgttctgtcgtaacactactacagtgccaaacacgtcgatgtctgtcgtgtcctcatacaagcaactcgttcaccatggcccacaaccagtccaagagcgatgctacgatgcttttttactagcgatgcttcgatgctttttaatgataatattatactgcatatagtaatctattaatataatgactatgagttactttatcttttatatttttccggttaaatcaatctataattatccattttgttggcatcgctcatattccatcgaaaaagctaaaaaaaaggaaaagtttagttactgctaaatgacgattacactcctatcgtaacttttttttataacaatccccctccatgcttctactatcgttaactgggacagtatatattataaatggatatgaatcattcgatcaaataagatcaacagtttagatttctttctacttccagtaaaataagcatagtgagctcgtccaaataacactggtagagaaatcatctttggtcggtcgacccaaatccacaatagttccaattccaataaaaaccgggactaaaaatgatttttagtcccggttgttgttaccaaccagggctaaaaatcatctccaaccgggactaaagttcatctttagtcccggttgattccatgtcaggccgtgtcagggccctaagatctttagtcccagttagtaacaaccgggactaaaaacctatttttagttccggttgatgttactaaccgggaataaaaatcaaaacacactatataatccctagtaccgatccttttcccgtccacacaacaaactcctccctctatctcttttttcctctctaacttcttatctctttccttatctctaactcctagccttctctttccttttttttccttccattcacagcgaagaagacggcgggccggccggcggcgcggggggccgcgcggcggcggccggccagcacggaggggaggaggcagtggccggccggcttttttttttttacaatttatgatttatcctgtgatatatttgatttgtgtgtgatgtgaatctgtgatatattttttagaacttgtgatgtaatttttttaagagtttgtgatgtatttggagatatctatttgaggatttggagatgttctgtgatatgtgatgatttggatttgggatttcttggcatgattaggggatggtgtgaaatcaatattcaatgctaaaaacaatgaaaaagaggaaaaaaagaaaaaatatatttattcccggttggtgactaaaatgctccatctttaatcccggttggtaacaccaaccgggactaaagattgatctttagtcccggttatttgaaccaggattaaagatagcgatctttagtcccggattcgtagtcccgattaaaaaaccgggactacaggaggttacgaactgggacttaaaaagcacttcttcaccagtgtaagagtataagacaggaggaagctttcataaatgatagtggcggcttgtaccatcctcgttagtaattttaaataaaaaatataggattagcaagatatatcgagggacgaagaagcaaattaatatgttgacatgtaggttgtgttttttttatgggtacaaggtcacttaagtatcgatatggaaggagattacatcaatgccaaaaaggctatgtacaagacaaaaacagggatcttaattaggtgatatcttccaatatggttagttgctcccgcttttgacccaagctatgtccgcttttgatccttgtatctcttgcaccggccattgttccaaactactaggatgatgagggattttaatttatggacttcttggggatgcctggcgttgagaatagctgctgccaccattcctccccagtccccaccacatctcgttctccccattgctgtatacacaggttgtattttttttagttttgttattgtttattattgattggtatgttgatgtcatctctcttcttcactcatatgaattttatgtagacgcctcatcatctaattaaaacatccactactagagaattgatgtttactcggatggcaaaaatcatattagtcccgattcaaaagcctaggggtactttttgatctttagttccagttttttttcgaggggacaggcagagagttcctgtaattcattatagaagaagagagttgatcccgtttataaggaaaaccggaccaaaaaccttataacatcatgattaattaaaggaaaaccgacaaaaaccctaacattaattgacgtactgatcctaggagcaacagtccaacaaggaaaaaactcctaaaacgaagtcttcaagaagggtacgccgacagaatgacgacatcgtccgatcctaacgaatctaaggttt

SEQ ID NO: 46053 - DNA, 1245 bp, Oryza sativa
cttgttactgatgatttagtgtgtcttgttagattgttactattgccttctagcataatggatatagcaagtatgtttagctggatagtaatgttgtgctctattaaaaacaaaggaacaatggagcggattgcccttaagtttctggtttctccgcgtggtcgaggctctgattggcgactttggtgggcaaagcccttctctaatatccttattgtttaagtttccaaagtgtatacaacctctatgtactaggtggcatctaataattagggaatctgacacaaactaggaatatcaaatagaatacataaatcaagctaggactagaattatgaacatatctaacgcaccatgccaatgtttcctgcacctatggtatttgatcccataacatccgtaacagataacctgtatgcagatggaatgttgcaaatcatgagtcctttactgacagcaattgtctaggagaaaattctagttagtgttgcagaaaattaggtgcctctttgccagcaaattcgacctttgatgccatcattgttggtgtagcagaaataatgtcatcaatgttcaatgcagtctcagttcaatgtaggtcaaatcaaaactttacaagacagatgccaacttcagttcgaaatttgagtaaagcttgttacagttctttttataaagttaatagttaatggctacggggaaaacagaagttgaccgctgttatttttgccatgcaggagttcatcaaagagtctttaattgatcgattatccttagggataattggttctaattcggtctacattgcaagccataattccttcagaagtacctgtcacaatggcagcacaatgaaaagtggaaaacaaaagcatcctgccggcaaaacgacttgtggctgaagaacaatgatgaagcaaggggtgacgcagaagtatttattttacttttggccgggttataacttataagtcccttgatcgctgcaggttataagctctgggaatcttcattgccctaggtctagtgttgaatctatgtagttttttatgtagttttttcaaccaaaatcaatcttgaagtttgctgtttatgtgtaattacgatttgtaccaacaagattagaatgtttagctatatgccttggattgattaactaggctcagtttttctctcattcaagtgttcaatgaatgaaatgtatggttctctagcttttcttttgtttcaaaatccttagttttt

SEQ ID NO: 46054 - DNA, 2545 bp, Oryza sativa
ccctctacgtcggcccgcagcggacagcgggcggcagcgccctcccctccgctggaggggaggtggcaagcggtggcccacggctcgccgagccaccagggcccctcctcctcctccactcctccctctacgtcggccagcagcgggcggcgggcagcggcaggaggaagaacaaacattgatgttcattatttctttttttgagaatttgtgatgtatttgaaatttgatgttatctgtgatatgtgaatctttggtttggagatgtagggaacaacttgatttagggaaatcaatatgcaggcaataaaaaacaaagaaaaaaaaatctttagttcaagttggtaggcatctttagccccggattagacgtcccaatttacaaccccggattaaaggggttgcaaaccgggactaaagacgagttccccagcagtgcaccttggtttagatcatattaacctcttcaaggccggcgcctgaacagtgcgctatggtaattttacgaaaaagcccttcagtttatgggcaattcgatctaggtctctcgtatattgataaaacatggacgattttaagagtctaggtaccgaaagaaattaaactgtgtttcgtggtgaaagggaccaaactaaggtcatagttgagtggaccgatcgaatactggcctctctcgggcagcaagtagatttggtaaggaatacgtacctgaaaatcttccttcacatgcaacgatcggaaccagtatgcagcgtccttgtcagcttcagagcaagaataatagtgggctataagcaagttatatgcttatgtggaaaaaagagataaataaaagtggtgagtgttgtctctcatgaaagagctaactacacacaagttccaagaaatatacattaaattcatagtaataaaaagagggagaatgaagaaaataaagataaccttatagccaacctactatacatgttagctttaatattgactaatactcccttcttccctaaatgtttaacaccgttgacttttttaaacatgtttgaccattcgttttattcaaaaacttttgtgatatgtgtaaaactatatgtatacataaaaatatatttaacaataaatcaaatgatagaaaaagaattaacaattacttaaattttttgaataagacgaacggttaaacattttttaaaaagtcaacggtgtcaaatattttaggatggaggtagtaataagtagtgagctctattattaaacttgttcttagttatctcggatggagatcaattatgacgataccgatgtacgtactcttcttgggcgcatacgtctacgtcatacgtggctgcgccatgcatgcgggcatcataatatatgagcattatatatgccgcaaaaattcgcataccaaccagcaacaaaccctcgaccgcgccacgcgataccctgttggtcgcactcgcaccaccctggtcaggtagtagtactctccggcccgcccgggtccagcgcatgaagccaaacgaaaaggagagatcagagaccaaccgtgggcggggctagctagcacgcggcgcgactatgtgcaatgcgtgtagtactccgtttgtcacaagatggacggacatgcatggatcgatataccccgcgtccggctgccagctgcatgccacggcgcgcgcgagatatgtatgcaagcattttacttactgatccagtacgtcttttacttgccccgccccggtcgcatgcggcatgcatgcattcatacgcatgtgccgctctgcctctccatacagtgcatgcacccccccccccccccccttctcctgtgttcatgcatgcatgctcgcccgccgagggcccggttgtcagcatgccggccgtaataatcaactgatctctacacgtacggccacgaacggcacgacatagcaagccgagagctctcttgatcattgcgcccaggaacacgacccagtacaggtacgggctgtttggttggtggcctcggtttgccacaccaaaccttaggcgcgccataatttttcaggctagtgtttatttgcgtgtcgcagttaagtcaagccatactttactagcacattggcccacgcgtcatactcttatttgctacccaaagtctgtcatagttatggctaacaaattattggccacactttgtgtggcttgccacagttatggcaaatcgagttatacatatagcctccatccaaacagcagtagctccgtgtaacactctcgagcgggtgcgggcgtggcgatcgatcgaacggcaaaccaggcgtgtcccgtgtccgtccgtggagaggggaggggagggagagggagaccgggcgcatcgcgccacagtttggccggggcgcgtgggcgatccccaccactcattccccttttcagtcacgaacagtgtccgcgagatgcggcccacgctggctactgttgcgcggggacatgcagagcccggccggtagagcaatacgtactatactttgcctgcatatgcccccatctcgctaatacacactag

SEQ ID NO: 46055 - DNA, 835 bp, Oryza sativa
aaggctgtacactgttaggcttgtggtaaacactcttaaacaaagataaaagaatatgctttactattctattttgcctttggtgatatattaaaaatggtaaaccaataacacaagaatacagcacaagagcggcataaaatttgatttggtgtgacgatattcaacagataaagctctcctgactgtataagttatccaagtcgtacacccctgtagttccactgaatgcgtaactagaaataagttttgcagttgtcttataaagtctagaacatccttctcaatccaccataactctcattaaaaaaatatcttgtcattgttatgtccttgttggcttgcaaaattaagttttacaagtatcccctcacaaaagtatccttgccaaactactttgatctaataactgagcattaattctaatttaaacaggaaatggcattggcaaggtataatatatagagtgatagtgaattaaattaccgttgcagcatcaacaaattgttgccaccaaatagaaaaccagtgagtatcctcccatttgttctttaatgtaagacctgttggagattcttccacatccttttctgaaacatggtgataccctgaaaggcaataagaaactactttcagaataattcgaaccccgaagaattgttacacgaagtaaagaaaatagtgagtgaaaaaaaaacagaaattgattaccttcattactgtaagaacgcgctgagaatatatccacaatatcctcattctggccagggagtatgtccccaatcccatcatagttatcgtcataatcaactgaagcatcttccgtcggaaccca

SEQ ID NO: 46056 - DNA, 2070 bp, Oryza sativa
cccttttatcactttcgccttttttccaacctcgctgctcttccaagtgaccaatggcagccacacagaaacacctgtggctggtaaattaattaacacgcctagctggctctgcacttcttcagcttgttcaatgatactactacatcaagcttgtatagctagctagctgtagtagtgtacagtacagggccacagtatgtacagatctgcaacaagctgtacaaatactcctacatgagtgatcatgctgcaggaaaaacgtacaccagaaatcagaactcacatgagcatgagcagactagactgatctgctgctctaccagagcacctgtattccaatacgctcctgtcccctcaacctttctgtagtatatactaagatctcaaaaaaaaaacattctgaatactatctctgtgactgacttgtgggcccggaggcgatggtgctcacagggttgcagcgtggtgggcccggaggacgatctgtaaaaatatctgcgcagagcctttttgcgcttttacagttgtatttgtatacgctgggtagagtacatgcaagtgtacaaatacagtagaatacgggttggtggcgtagagaaaacctggagactttgcctgccatgatggcgtacaccgagctaagctgctgctgctgcaggtgggtgtgtgtgtgcggggtggggcccgacgaggattggcgagaccgcaacgcgccctccccattggccggcctgggccccacctcgctcgaccaaccgggaaacgccacgtcggacgcagagcggtagctaatgattcgtggcggtccggccgtgggtaaataaccgcaggtaattaccccgtttgtggggaggctttatgattgggcttaaaaaaaaacctagacaatatcctgttggaacggaatactcttatataagatagtacctgatatctgttgtggtactagctgtatggtacctgatacttgtgatacctgttacccgatacctatgatatctaggacctgatacctgtgaaactcgtgcaagagaatagttaatatgctttatcttgttgtaatgggatcccgttttgtagcagccctcttaggcttaaccaccgccgcattgtaggagagatgtgtttttaccgcgatggcggccggcacgtcgaaagatcaaacgacacgcgtatgtatgtacgtatgtagatgtgtaagtaattaaggattaacagcggattagcctgcaacttagcgagtggtacgtaggttctaatagctgtaaacgacttgactatgagtggcgttttgatgcgttgcgtgcggcggtgcaatatttttcgaaggctcgcttttcttaaccggagaaagttacagctcgtactcgatgggaggaagaaagggagaagaaaaaaaaagttacagctcgatcgttcgctagctaactcgtccatggccttcccataattctgcatgcaagtggataagatgttgcgtctgtgggtcccacgttaccgggacgggaagaaggaaaagagaagaagccccatgatcggtccatcgatcgatcattccatatgttcatgaccatgtcgccgcaccaggcaaaaatatacattgtggttcaggtctgcatgatcggtagcattggcatggatgcagattcttgtaccactaaaaatctgctaacctgatttttttttctcaataaattaagttttgctaatcgatcgcgaacacaaaaattcctaatcttgtgttaattaacactgcctaatgcctgcaacccaggaagttaattagcctcttcatacgcatgcagctgcagccggccgccggcatacttgaggtctcttgctggccgtttccaaactcgtcgttgatgatcatggccatagccaccgcatggtgcatgcatgcgcgagaatatgtatggccgcaactgctgttacgtacactaatatacggagtataccacaggagtgcatgccaagcgcttaaacctaggtgcaaagttccaaatcacaagtcaaaaaggccaaacaaacagtacgcacgcacacgccctcgtttgggcagcacgc

SEQ ID NO: 46057 - DNA, 963 bp, Oryza sativa
tttcagatgaactattcaagttcacctttaacaagtagattgaatcaagcttttggtgaagaggttctcaggagagggacaaaacaatagcggtggttccccaggatataatgttcaaatcgttaggtacagtaatatggtcaatggtcatagtagacataacgcagattgctactaacttgcatcacaaaaaaaaaagtatataagcttgcaactactacgtactccctctgtttcataatgtaagactttctagcattgttcacattcatataaatgttaatgaatctagacacatatatatttagattcattaatacctatatgaatgtgggcaatgctagaatgacttacattatgaaacggaggaagtataacagagctaccagtagaactaggatcaacataaataaatttcaaaagtcgctaaatctaaataaatagaccaaaacgaatgcatttacagcttaaggctgattgaatgctttatctaaagttcgcatagggatcatatcaatcaggtttgtatgtagcgtttatgactttcttctctcttaatcttgagctttccattaattctgaatcccatgtgttttgtgtgattgtaagaccacctatggaattactcctcagagatctaactagatgttgtggaaagatcctcaagtagttaacttgcaagtcagtaagaactgcagataaatcaactaacaaaagcacaagcaatataaatatacaaaattcaatcttcttttgacactaaacaggacatttgatgtgtttgcatcacttggttaacataaatatttaatttacttggcatctgttgtaggctttatcaactgccctaatgtggtgtcatgactgctagtcacttatatatatagaacccgaccatccttacactagttcagaaaactaacagttaagcaaaacaataaacaggtaatcctcacaataact

SEQ ID NO: 46058 - DNA, 1682 bp, Oryza sativa
atttcacaactgccatctgtcttctagctgggacatagctttgtacatataagcaaaagtcttgagatggattgcacgtcgacaactcattcactgtgtagatgaattaagagctgtgaggttaggaatgcctttaaattgctaatttgttatgtgtagataggtgagtttgtgtttgaggagtaacctgtcattgcctttttgctgggcaccatccttgaacaatttcttagcaaccggaggtgttgctgtaggtgtaggccttcctctatttattgaaacgatgtgttagttacaatggaagaaatctttattattggaatgcacctaggagtgatcaaagcacctttttttggctggggtatttgtagggaaggatggggttgcttgtttggcttcttcagcagtttctggtagtccctttcccttgtaaaagaagtggcggttaagtctcgtgctaagatttctagtacatctcaggcgaagagatgtatttgattgattattaattattaatgaaaatatttttatttttttatttttaaaaaatatttatgattttttttttcaaaatatgcctcttttagcagtcgaggaagagtgctcactagaaacgatgaagtagctaagccttgaagccaaatggaatacaacctaagagcatgtataaatgtagagcctgattagctcttagcatgtataaatgtaaatgcagtgcgctagaaacgatgaagtagctaagccttgaagccaaatggaatgcaacaataatgtaatttaatttcttgggaatattttgtctccatatcaggatgaaacaatagcgtgtggattggggaagcaccggtattgtggtggtgtaatcgtggttgcgagacttcacttactagggtttaaatcatggtgcccacaaatatatacacacttgagtgtgatatcaataggaaatcagcgatgctatggatatgccgttcgtttcttttaacatgtgttatgggacgcacttttgggtgtgcgagcatggcatgcgtcttcggttaataaaaaaaagtgctgattttggatactttgttttacagtttatggaaaacaagtactatatataacctgtaggttgatggtcataaataacgggctatgcagattatcaccattattaatgtgttgtctctatttttatacggatactcaaatagtattttaatcaaggtgtgattttatgatacgtagtcgttcaacttacagtctaagaccctgtttagatgggagtaaaacttttaagtccctatcagatcgaatgtttggacactaattataaatattaaacgtagactattaataaaagccattcataatcttagactaattcgccatagcccaaagtacatcactagcatacaccattattttattttcactttggtctcgcctcaaaaagcttttgtccctagggtcattcttgtctttttgaaaaatttctctctccgattgagccggaagtgtcctccagcaaactaccatttttttagagtgtctttcagccgtaacacgttttcacgatgtctatcagcaaattacacaaattttgggtgtcctgtagcaaattttgccttttttatgtcaccaaaattacataaaattatcagaaaatagttactcccttcgagttgataatatttgtc

SEQ ID NO: 46059 - DNA, 688 bp, Oryza sativa
tatagtaagagagggtattaaggtagacctcaaaatccaatactagacattaagagagggagagagagagtagcactaccacgagagagtggagattgatagattttttttttttggtcttaggagtggtctttatacatatagttagctcaaccaaatgttttttttataagaactactctcactttagaggcttaagacatccttatatctgtattgtggctaccctaatgatgaactctgacaataaggcgatggaggatatggtagcacggatttatccttcaagaattgggattaaattgattatatgtgtaaatatcagctcttttctttttcaaatggctaatcaaatgactggtgttatattaatgggttaattggatctatgatattgtaaatatgtcatattagaaaaataccactactatttgcgatatcggctacgtgccactgaaatttggggaaattgaaatcatgccactcccatcaagttttctgtcaacctctgtctaacccccatgaacagcgtcaaattcctccgtctaaccccatcgaagaacatcgtcgcctacaccaatcggtgctggatcgattgtcgtcggttcatggaggaggaggaccacgcggagaccaaccggtgagctctgggaaggtccgacgtggcgacactcggtcgggtggaggg

SEQ ID NO: 46060 - DNA, 535 bp, Oryza sativa
gatcaagcacatatacatacttgatacatcatatggtctatcttctaattgaaatgatgcataatagacaatgattagcacgaggcaaattggacagcggctggctgcttggtgactcggcgacgacgagtcgatgtggagatgaatcgacgacgaggcgatgtggagatgaattgatgcaacgaaatagtagacggtaagaagggggttggttgaagtaaggaaagagataagggtcgagggaaactagcgtcttgagcttttatatgtcaatttggaatgagtttaatgggcctatattattgcaatgggctactttcagagaggtactccttccgtttcacaatgtaagtcattttagcatttctcacattcatattgatgttaataaatctaaacagacagacagacagacagacagacagacacacacacacacacacacacacacacacacacacacacacacacatatatatatatatatatatatatatatatatatatatatatatatatatatatatatatatat

SEQ ID NO: 46061 - DNA, 891 bp, Oryza sativa
tttctgctacatatatttcagtaaaaattaatcactgaagtattaaccactaaatatttcagctgatatttctttcgtattaaattgatccctccattttaaactcatcatatgttgggccattttttttctcaatctggcttaaacatggatattactagaacttagaacccagaaaaaattgaaaacttcaaattcgtttgcttatccagaattatattgctgctcacgccattttcttccttgaaatgagtctaggcatcagtctgttgaacttcctgacaaaaagactaagtacaacttggatagcgatgtgtgcaaatcatgctgagattgaactactagcactctgcagtccgcacacactcacatgatcaaacgtacatagatcaaggcgcatcgtcaggggtttgacaccatcgcaaccttggtagcatggacaatttggaaggagagaaacaatagagttttcaatcaaaccagcagatcttgggtggacatcgctcgggccatgacaggcgaagctgatctttgaaggctggctagggcagccattcctagcgtagtaatccatgcggatagggaggggtcgccaaatgattttggagattaggctttagtactcttgatcctctcctgtatcccatccccatcttgttttgcttttgttcccgccttatacataaactttatttcttcttaatacaatgatgtgctccttgcgcattcccaaaaaaaagatcctggggctgctttcagtagttcacttctcatcaagcccaaatcgttaacttattgctcagttaatttctttttttttgacggaaaattgctcggttaatttcagtactgaaggcaaaccttttcgttttcaaaagctaaaaaccgaaa

SEQ ID NO: 46062 - DNA, 777 bp, Oryza sativa
tgtatcgtacagtatctgttcctcattgcgatcagccatctgttcatacaagaaatatttgctaagtctataggtcatatttgctttaacaatcttatatgctaacaatcataaatgctaagtctaagtgtcgtatattagaaccctagataatcattaaaactgtactaatcttgtactaaaactctaacaatcatatatgctaagtctaattacaaatctaataatcttatattaagactcaaataatcttgtattaaaactcaaataatcttatattaaaaatctaatagtcatatatgctaagtctaactgttgtatattagaaccctagacaatcatatatgctaagtctaattacaaatctaataatcttataataaaactcaaataatcgtgtattaaaactctaataatcttatattaaaaatctaatagtcatatatgctaagtctaactgtcgtatattagaaacctagacaatcatatatgctaagtctaattacaaatctaataatcttatattaaaactcaaataatcttatattaaaactctaataatcttatattaaaactctaacagtcatatatgctaagcctaagtgtcgtatattagaaccctagacaatcatatatgctaagtctaattacaaatctaataatcttatattaaaactaaaataatcttgtattaaacctctaataatcttatattaaaactctaacagtcatatatgctaagcctaagtgtcgtatattagaaccctaaacaatcat

SEQ ID NO: 46063 - DNA, 875 bp, Oryza sativa
tgcttgctgacttctaatcggtcccactgggcgtgccaaaagcgtgttgatagaaaacacgaggccagagagatctgcttaactccagtgcaggtccaaagctctccttcgaatgtatgagcgtgccagttgatttgatcctgtaatcaacaagaaatagaaacaaagaattcgtggttaaatctataaatgatagccaatcggctaggtgccgatgacatatcatttatctttgagccgatgtaatatatgaatcaatcggcggttataaatagatagtaaggaactaaatctattcgatcggctgtagatattaacgatatataattcttatattaatatatacttaaatcaagtgattgggatagatcggtcaccatgccgagatagtataaatcacttatatcgacatatatattaataacaggattatatatgtttatagcatagccgatcagatagatctagcgtctatcggctaatactccgatactactctaaatcaagatattaaaacaggtataatgtattaaacaaaagcttaatatatttagattgcgacgatatcttgacacaaagggcggatttaacatgtcattgaagcatatagatcgaatatggttaaatcagataagatcggctgaaactccgatactaccctaatcggcaaccaaaggacaggctagagattgatattctaagcatgacttaatagatcaaactcaactgatgtagcattaagtatgaaaagaagaacaatatctagacaatcaagccgctgggtgtttcataaagtggtagatatctcatataatctaggacaacgtcactatttaacctaatcggctgccttctattaacggatgttagccgat

SEQ ID NO: 46064 - DNA, 634 bp, Oryza sativa
ggcattctaaaatctcaccgtcgattttttttttaaaatcggtggacccattaattttaaccattagatctccatctaaaaaataaatctggtgtccctactttttttttaaaaaaattaccatgtttactctaactaatatatagaaaaagtctggatcgggcaggaaacgttagtattattttttttccttttttttccggcggcatacatacatactccacgttagtattgttttttttcctttcttttgcaaaagtacttttcctttacacgttctgaaaacagtactactactacgcacatcgtacgtacactaggggagtttaggaggtagtgttaatagatatataaaatcacatcttaccgatttaagtgaaaatccacagttagattttttttctttttcttataatttttaataattcttttaattgagagatatgacatgtggtgacctacaagcttttatatgagtgtcacgtgacagcttaatagcgtttctaaaaagtttaaaggacttatatactaaaagttaattaaactttcaataaatactctcaagccgtcatatggccttctacaaacgctcataaatcaccacgtggtattctataatcacaccgtcgatttt

SEQ ID NO: 46065 - DNA, 681 bp, Oryza sativa
tacatgaaggttgaaaggtggcattctgacaaaaatgttataccttaaatctactttgataacccctgttctccatttctgtagcaatgtctcggaatctatccacctcctaatttcggaatcacaaaatgttataggagtacggtcgcacaagtggtataaacatcatgcagattgagttctgacctgtagacacactaggtcaggatcccagtgtctaatttcacgaataataagcctcctccgcgaatcccacctcattgcatcccaagggacatccaaataaaggtcaggatggtaatgtgcattgttatccgccaagatgttgtatgacatgattgtgcacgcatctgacaaaagctttattactcttagtattacactaacaaagccagaatggcatcatcccagagtaatacagctccatcaacccaaacagatgcaagtcaaacaaaaaggacgaacaaaaatcacaactttaggggtgaaattggcactggttggggcgaagcttcatacttgcactagctgggtcaactgatttctcactatttactctagcaaaactagcaaagagaaaaaaaaaagaagcaaaagtgcaatcttcactcagacattggcacaaacagatggtgagcaaaggcaacaaaatttcaccaacgatacatccagcataatacc

SEQ ID NO: 46066 - DNA, 660 bp, Oryza sativa
ttttgtagtactacacataacaaatgacaagcctgaaccaatatttgagctcaaactttgatgacgtgttttcacctctctattatctgaacctaaaactaaactaatctatctagtaacatactcgtggtaatgctacggtggcatttggtaatacaaatgttgtatatccacgtcactgaaaatatgcttttcattgtttgcgtaatataaaatgttgtacataaaaaactcggagtccatttacaaatagaatgaatcactgaaaacaggagcacttttaccaaacattagctaagcatcacaatataaaaaccaaggtaatgctgattttcatctaactttattctttttgtttgaatatacaactcaataatagatcagtctctttttactatgaggtggtttggtcctccatgcaccaagaaataagtacatatggttcaaaagttaaacatggacaatttcttcttgtgatgttatgaagcaatctgatatatacagtgcccttcctccaaccatagcacatgctcatgtcttgttcttgtttcaagatcagagtagaaattacctctagttattaggtcccccctaatttcacctttatttggcttccacttattggaagatataccctgaagatcactcagcaatttctga

SEQ ID NO: 46067 - DNA, 2205 bp, Oryza sativa
cctccgatcgatcgtatgattcgtatccggtatccccctaccacaaactgatgaattttggtgatgaaaaaagtgattcccaacggcggctactccgggcgtacgtcgccatcggacggtcgaccggcgcagcacgcacgcacgccaacgtgtcgaggtgacgaaacatgcgacacgaattaatcaactatctagtctcatgatgggtttgcgtggggctggctctgggcctgggcgggcgtgcactttgcgggattatcggtacggactattccttgatttgcaccgatgaccaagcgatgtattttgctagttaatttgaaaaaaaaattgaaggagagagacgtacctccacatattgtttaagaagaaaatatagacgtgttgggggattaaatagggggatactagcgcgtgcgtgcgcgccgtggaaaggagccggcgcgcgccagcgcgtccctacacgtttctttttttttcctagatatcctattttaacgtcagtttttttttccttttttaaatcgcttttttcagatttttttaatcgcgtctttctttttcacacgcacgcatgattttttttatatttttttgtaatatattatatatatacataataaaattaaccacatatatataaaacagtagatgattgcatccctggcgtaatgctaatcataaactacatcttctactagtaagtaatcacatacctgtcgtttgagtgcattgcattcgtgtgcattcatcttagatattgctgcacatccaagcattgggatttcggctgaggctagaggtaacagtacatgtacagttctgcacgtgagatatagctagtatcgccgattggcctaacgcccatcaactcaagtgatcgatcgattatgaaatgtgcatgtgcaaaaaaccgatctttacaacaacgaccatcgatctaaacgtccttccttttcatatttgcgtgcgaacaaagcgcctgcattgtcatcacattgaggaccacacaaattagaatgcatgaccttttctgttaggctgagacgactgaactggccacaaagatattcatcaaagagtttaccagattgaactggccacataagtggtactagccattcgtcggttagctaataatcttcaggaccattgcccacgatgcatgccatcgatgccgaccacttctcccggcccattcattttgcaggaaattattttgctcaagaaagaagagaagacagatgcatgatcaatagaaattaccaagatactccatccatttttaaatatttgacgtcgttgactttttaaaacatatttgactatttgtcttattaaaaaattaagaaattattaattcttttcctatcatttgatttattgttaaatatacttttatgtatacatatagttttacatatttcacaatttttttgaataagacgaacggttaaacatgtgctaaaaagtcaacggtgtcaaatatttagaaacggagagagtactatataagggttgattataatgcagtattgagataggtgggaaaatatattgtagtttgtatacttagatgaaaactcgtgtaaaccaagaccaaaaattcgtctcaaatcacacaaaaaatcccacatgcagataagatgataatgaatagctacgtaaaattaaaatctactacctccgtttcatattataagtcgtttgattttttttcttagtcaaaactctttaggtttactttaagtttagataagattaacaacatctacaataccaaattagttttattaaattcaccattgaataaactttaataatatgtttgttttatattgaaaatgtcagtacatttttctacaaagtcggtcaaaactaaagaagtttgactatcaaacgatttataatacgaaactgagggagtaacacaaattcaacttcatttgtaagataaaaaaataataaatttcaaacaactcgtcaagactatttttctggtttgaaatttgttagttttatatctcacaaaggaagtcgaatttatattagatttgctgcacagctattcaccgtgatctcatttacatgtagaagtatgattttagacgatttcagtttccaccgtatatttacccgagataggtaggttaatttggaatcttggagagatcgatgtgtagctgcatgcgtcccggccggcct

SEQ ID NO: 46068 - DNA, 946 bp, Oryza sativa
tttacatacagtgaaattgacaccgtgctatgccaattcattaaaaagaactgatggattggattgaaaatggaagattaaacatcacgtatttataaagattactgccatcgaatcagcagtcggatcaattactgctgctttaaaagtggaatccttctttcatcctctcctagcctctctaatctatactacttagaaaaaccatagtggtggtcttgatttctaacgtagcagacgtatcaggtagacacgtacaatcacaaccatcggttcgccagattgaaaaagaccggtcacagaatttgagagtcgctttgcatggagatgttagcgatgtagaaaaacagatccattgcacaagttgagagtcgttttgcctgtttcttgattttcgctagcgagcaagataccgttgagagctccttgggtatggcttccagttaacaggtttggcttggtcgcgagaaatcacaatacgagcatgtcccaaattcttatgttcctttaggttagttcttgcatggaaagcattaagcatagctgcaaattgagtcaaattggaaagcaagacgctaacacgtttctctcggtgaatgtcagttcatttcgatctcatgtcaagcaccatatgcctaactgaaaatacagcaaccctcctgtctacatgagctagcgcccgtagtacgtatgcttttcttagaattcaaacaaatactgatgagccattgctgtgagatgtcaaactgcgtgtacactcctcgcatgcttgcgatgctagatttgactaagatgtactaaaggactgttcttttctgctgctaggatgtcaggatgagttattccttcgtttattatgaacatatttttcaaacttcgaaataatgtgtgtgtcttttaaaaaattgtatctaagttttcttaaaatatcaaataaatcaatctt

SEQ ID NO: 46069 - DNA, 1670 bp, Oryza sativa
  unsure (1)..(1670): unsure at all n locations
atatggaagtggtatacgtataataatacaaggcttgcttcatcagtatactaatggaacagtatgcctacttggatatcattgtttagtagttaagctgttcggcacacttctgctattgtggtcctgtagtacatgcatgcctggccttcccgatttgggcgttcaaaaaattaagcacgggagtagtgattaatccagttgatcagagtgttgtatctgagggaggttggcacttggcagggtgaaagtgtgatccaacagcaagtgatgtttacccctacgtatgtgtatcatttgaggatactgctttagaaggtagtagtaggataggtcgtcaacttcaacaaagatattggcagtgaaggactagtacacatacaaatatacagataggatgtggagagatgttgtcgtcttcgttctaaaggtagtgctgttaagatctagtgaaatgttgatgatgttcattgcaaattgtgatagctgtccgtaacctatgttgatgttgtttgagtcgtcatcatgtttgtagacttgtagtagctgtacttcactgatatatacgtaggtcatacaaatgcagctcttttattaatttctatcagggcatgtcttagcatcttactcctgtaattgtgcaaaaaaaaaaaagttgtccagtagtagttgttaagacgtcgaactttggggtagctgtcaaaatcatttgatataattcacattcagatatatcactaacggtgaaatctacattcttagttcatcattagaaatgattagtctcttttacctaatcacctaccttgtacactaatttatacaagcatgtaagataatgattaaaatcaattcacttgatcatcatgcatcgatgcaacattattgtacgctaaaatcaaaatcacgacaattgaaatacagtagagaagttcgtgttggagttttttttatccgcttaaacttttggattaaattggttgatatatgtaacttaatatgataccagaattaaagatcttaaattcaaattctgaatgagacacacttaaatacaaaaaaaattgtgcaaagtgagttagctcaactagttaggtttcttatggtggatggcccacccaggttctagtcctaggtttgacatggatacctgtatttacggctaattattcgtttcagtgataagtgacgtacccatcgacagcaacacacttatagtgactttgtcaatatcaaaatatgttagtctagtcttaggatgtactcatagaggtaaggtgtgcgcacgtgcggtgcgttcataggaattagtgtatgtgcattgtgagtgtctacgtttataccgtgttttagaaaaaagcaaagttccccgcacaaaataaaaatggagtagcttgagatctgatgagttcccgcacaaaagaaaaatggattggagaagtaaacaatctatggacctgggaggaaccagcaacccaaattgtttgtggcctttgggccatcatgacaccaaccccaggctagctcatgaaccaaatgaaaaggcccaacaaccccaacctcaccgntccttttctactctctctctctctctctctctctctctgatctcttatttgcgaggaacagtttttttttttatccttttgtacgtggtagctcaaacgtag

SEQ ID NO: 46070 - DNA, 3017 bp, Oryza sativa
atttagacagaggtatgctcaaattctaggttggttttttatgagacgatgagtcgacatgtttttgggaatacgcgaggtgcgcatttttattaagaaagaataaatgtatgtacaagacgggccgaacaaattaaaaatgaagaggacagggtacaggaggggggaagaaaaacagaaagcctatcttctagggaatttggtgacccatctatcaaagaaggaactaccatggccggtatggctgccctagccatccaccaaaggtccgcttcacccgtcatagccctagcgatctccggccaggttctgctttcctggttgaagagccgattgtttctttacttctagattgtccaagctaccagtgtggctatcgtgtcaaaccctcggctatgatccttggtcatcctcttgcggctgtcacacaaccaaacatggaaggactgctcgttgattggaagacattcggaatgtatgtaagcgggtcgacatgtgaatctacttatatatatatcaaataagtgataattaacaggttttcatatcatggtccggcttattatcatacctagaaatataagtgatcgatccataaacttatttatagattaaattagtaggtaatccacgagttaatctacggccactaaattttacttataagtgggtttatgggttggtaacttgatacacttacatccctagctagaattatatggccagtgggaggaatacgatcgctccggacgtactgagagccggatctactcctgttgcaaatctgatgtgaacaactgcaatttagtccggtgaaattgactaagctcctccacaattacttgttttagataggtcatcggtcaatatattgaaactttgagtatgaacataagatgttttttctttcctcgcaatataacatggacatgctttttaagtggatttgtatacctcttttgcgctaataatttggagagcatataactctttcggacaattctagactctagagtgcaatgtatgattgtatctgctcttgtcaagctaacttgggcgtgcagcctgctctttgaaatttaatcggcacgcttggcaggagtaggttctctactgtccttttcagaagagatatggtgcagcgtcagaatcaataacatatgttgcccatccaaacagtaagtgtgtacacaaatcagcgtcagccttttccaagttctccaagtttggtggttccttccaactactacctgtaagtcagacagtccctctaataaggtcctttttgtttcattttaaaattattatactctagattattaagtccaattgctagctataagctgaataataataaactaaattagaataaattgtaagttgtttgtttctctgaattatttgatacatgaattattgggtttgaaatattaatgtctatcatcttcttggctattttggatgcttgttcacttttttatcactgtatataggaaatatataattggtagtggctaaaaaatattgtcatatatatactacagtggcaatataaatttttcttggtagaattttgtgacatcaccattcacggttactcgtattagctattgtcgttgtccatacactgcatacaaattataggagtactcccagttcttttattacacatgaagaatcattgtctaaaacaacccaaatctacaatggcatagagcaccttgaaaacctgtatagcctattttgttttctaattaggatgtaacttttcttgcgaaaactttatagacatgaagttgctataaaatattaaataaatactttttcacttttaaaacttaattaattactacctccatattttaatgtatgacgccgttaactttttgtttaacatttaaccattcatcttattaaaaaaaattatgtaattatcatttattttattgtgacttgattcattatcaaatgttctttaagcatgacataaatatttttatatttgcataaaaattttgaataaactgaatggtcaaaggttggttgaaaagttaacggcatcattcattaaaatacggagggagtataagctaatggtttttctcctattatttgtatcacgatatctctgaataccaggaagtcaagtcaactagccatcgtgacgacaacgacatgccacccataaggagttagtactgtacactatacatatacgaatcgtcgtcctatacaaaatccagttgcgactgtaccagttagttcgggaagaaaaggtaaattataggcggcgttagctcacacgcacggtccaacaatgcgacgcaccagcagtccgtccagcaccccaactccccgcgagtcgtggtccggtccactgcgacggaaataagggaaagaaaacacgtaggtgtggtactatttagtatatacgtcaagacagatcgatccagccacagtgtggtacgtggtggacaggtgctacctgcccgatcgatcgctgggtcttcagtcttctgccgccgttgctcgatcggttagttgagtgagacgtgcacgtacggattggagtgcgtagctagccgtgaagtcgttcggggtgcagtgcaccaaggaggcgcagtacggtgttgcgtgacgactccggccggactgccgcccgcctgcggcctgccggagggctggtgtgatgcggccatggcccgtgggggcgcgttccgtttctccagcgagaccccgtattcgggcccaatggaatatgcatatgggccccttctccgaaggcccgtttagtgtttacaggacgattagaggccaccggtatcgctcttgaggaaaaagtgcaccgaaggtccctcaacttatcatcgagttacaaaatcgtcccccaactgcaaaaccagatatttggcgtcccataactaataaaaaccggtcacaatagctccttcggtggttttgaccctagttttgtcttacgtggcagctgagtcagcgtgggacccacgtggggccca

SEQ ID NO: 46071 - DNA, 921 bp, Oryza sativa
ctccatattgcacatggttctgtgccggcagtccaaatatgtattccaatggtgcagacacctgagaattccccccctgggactctcttcctgccccttctctgtactgacagcttcagcttcagttcaatcagactgctctagtgatgatgaaaaactgaattgtgctccgtctcaacatgcccggaaaagatcccgcactttgtgctctgatagtgttgtacagactctccactgcctaaagagacgacctgccattgcatttgcctactttaaagatacacagagcattgggtttaatcatgacttttcaacctactcagagatgattcagattctatcccactcacgccaggggaagatgttagtttcattgttctctgagcttgtttcaagtagtaatgctagtggtcctgaaattttgccccttgttgatcaccacagaagaacatgtgctactccatgttcactctcgttcatggttgattgcttgatcaaggcatgcatcacttgctatgatgtacaagcaaccatatgcttatttagtggcatttgcaggcttggagttgtcccatctgtttggacttggaacctgcttctcaaatttatagctgagactggtgaatatgagatggttctcgcagcttataatgaaatgaagtgctttcagctgactcccgatgtttatacatttgccatagtcactaggtcactttttcaagcaaagaaagtggatgaggctttgcaagtttgggccgagatgactgaaatgggagtgaaaccagatgcacgtgggtactcgtcatttctaattggtctgtgtgattgcagaaaatatgatttagcttatgttattctacaagagattaatagggagaaggttcctgttgaggccatggcttataacatggtaatggatgg

SEQ ID NO: 46072 - DNA, 559 bp, Oryza sativa
aatgcagtataggagaatgtgtgcgtgctacggtgtaattggtataatgtttttatcgatgcaagcattatgaaaaaatgtgtgcatggtatcttaattgatgcgatttaaattatccttggtcttggtgcataaatatatatgatgattaatttgtgatgaaaggagtataacttttggacagctgaacaataagagaaaccgaagcttacatttcatgtaccattggttatgcattgcaaagtgagatcatcttttcgtaactttagtccatatctctatcggcttagagcaaccaacatagaggagcgcagtaatttgagtctgttgctactttttcccctagcttactgtagcaacaatatatctaatttgccatttaattgtacaccaaggctgtacacacgtctatcgcattcatttattgcatcctcaagtcataaatactgttttcctctgactttactatacaatgttagagcatctgcaatggtaaaggactttactatacaatgttagagcatctgcaatggtaaagtaaggtgctatctaaaaacat

SEQ ID NO: 46073 - DNA, 1108 bp, Oryza sativa
ttataagacattttgggttttgatttttaatagattcgtacattagtcgatgcatatgtttcatatatgtggctaagtttatatagatgttagtgaatctagacaagagaaagagagtccaaaatgtttttataaaataaaatggtgggggtactagaataccggaaaggttcattgatcgatctgcttaactcgtgcagccgcacacgccccctccccaatgcccctgcgtgattagcggatcggatcccgctaattacccatattaacgttaattaccttgattagtatttttttagtacgcaaaaaattgggataagtatggagaattaacaacaataaactttcaacgaaggtttgaaaacttttacgtgaagatttggaacattcaaatcaagattttttgaaatttttaactcagatttgaaaactctcaactcaagatttaaaaactattaactcggatttaaaaactctcaactcaaacttgaaaactttcaactcggttttaaaaacattcaactcagatttaaaaactttcgattcagacttgaaaactttcaactaggatttgaaagtttttagttcagaattaaaacctttcaactcggattcgaaaactttcaactcaaaattaaaaaaattcaagtcgagatattaaaacttaacttatgtttgaaaacttttaactcaaatttaaaaactttcacctcgaaattcaaaatatttgattcaaatttgaaaactttcatctcaaaattaaaaacattcaactttaatttaagaaactttcaatttaaattcaaaactctcaactgatattgaaggtgaaagattcaatttataaaatatcgcaaaaaaagtcacgcgtgtgtgtggacagaaaaagggggcgatttctgaagaaaaaaaagtgtgtgtggacagaaaaagggggcgatttctgaagaaaaaaaagtaaactaacgcccgagttcccgaaaaaaaaaaggagaaaacgagcgtatgcgtgggccgtgtgggtcggaagtgcgcgcctgcggcgtgtatgcgcgaattaggaattgtgctaggtaactccgatggcaatggtcgaggggctgcagga

SEQ ID NO: 46074 - DNA, 1021 bp, Oryza sativa
aatttgaaatacgtcatagataccccgatcctatcctttgcatagtaactacatatgaatggaacactaaaaaaattgacaatatgcattatatcatcttaaatcattctacgtaataaaattccattaattgttcattaaatatcctcaaaagtactataaatcaccacatgtcagaattaaaatacaacatagaccccctatcagcattataaccaaattacaatcaaatattttaaaaaatcaatatgtattatatcatcttaaatcattctacataataataataataataaagatatgttaaacgccctataaaacactcttaaatcataacgcgccatgttttcaaaattagaaaagatccaacgaataaaagtgaaaccacataccatcagcttccatgtaaattacatctatttttcaaccattatcgacggatctatttcctctccccctttcaattatttagctatcaaactagaagagaagcacaataaatagttgtacattttaaaacgacaataaattttaaggtacatgtctaatttctattataactatttttctatttataattagatgaataattgaaggtccatatgcctatacttttctatattagaaatatatcactcagaaatagtcgatccatgcattttacatgtcatccaaatagcaacgaaatacgataaaaactatcaatatatactatgtcattctatatattattccataaatatagatagctaaagcaaaattaatggtgttgaaacacaaattataaattcaagtatgaaataatatttttttatcgatggacaacacctgccattttacatgttgtccaaattgccataaaaagctacaaaatatttcaactacacttgttgcaccaatattatttctcaaacatgaataactaaattggatatatagtacctaagaaacaaatagctcgaatatggatagtccaagccagtacataattatttagagggagaaacaggggtgcaggaat

SEQ ID NO: 46075 - DNA, 708 bp, Oryza sativa
catcttatcattggtttccacttaaaaccgttttcagtcattaaacttaccttaagaagaaaatcataacctgtgatatgccacgccttaaaattagaaaacaaatatagaaatcagagaaaaaaaaagcatttgatcattagctaaatcatttcgaaaaagagtctcctccatccctcgccccccccccccaacctgcacaaagcacttcccaacctttcctttccctctgtggctcgactctatgctcttcattcctctcctctcactattttctttaagatatcaaacttaaagaaacaatcaataattataattataagttatacgtctaatttttaatctaattgttggagtcaaaccagtaatgtaagcttcatgtgcctatattatactactcctatatgagaatataagattcaggcatagttcacatataaatagtccaagccattgaataaaaaattcagaggaacacgcgccattagtcttttgcatgtcaaccgaattacaatttaaaaaaacatgaaaaaaattcaacaacacatgttgcagtagcatgcattgttttgcaaacatgcatagctaaatcataaaaaaaaaactaactcatatataaatagttcacaccacggcataaaaatccggtgccttcatatttttcttgaaattagtatgctcaaataatctgagcaatataaataatct

SEQ ID NO: 46076 - DNA, 1149 bp, Oryza sativa
tactaaccgggactaaatatcatagggccctgacacagcctgacatggaatcaaccgggactaaagatgaactttagtcccggttggaaactccaaccgggactaaagatgatttttagtcccggttggtaacaacaaccggggactaaagatcttcctcttattaaccgggactaaaaatcatttttagtcccggtttttaatggaaccgggactattgtggatatgggtcaaccgaccaaagatggtttctctaccagtggaatcataataggaaacggaaggagcggagtacctacttagcacttttatgattcagccatttaggtgcacttaggtggtttatgcattcttaatcactcggtgcattagttgcttgctttgtaatagtgttcgagtcacggttattttatttttattttgctaagtctgggtttagaataaatcaagtctcggtttaagcttcgtcgatcgatttgattgtttgctcttcctggattaggctggtcctttggcatacatcatggagtatcattctgacatgcaagagaaagcaattggattgccaattcataaaagttatctcaccaacaattcgtaaactttatctcagatgggttctcaaataattaatcatttctcaagtaactagctaacggagtctaagtggacttatttcttcaggggatcgatctcctgggcttggcgggaagaaggaagagggaggcgttgacgcgtcgtggactttagaagatatttttcgtgctgggcggtacgatgggtggggcccacggagagggttattggagtgggtcccactgcaggtcccagtcccacacgtaggggtggacgttcggtctgaccgaaaaattcggtctcggttttcggtctttgaaaactcaagaccgaatttcatccaaataaactcaggaccggcaaattcggtctcggttttttttgtctcggtctcggtctaaccgaattcgctggagacttagatggcgcaggtgggcagcgagagctggtggcgactagcgaggccgcggctatggctgcagcaacggcgaaggccacgctgccgctcgccaggcgtaccgcggacggcggcgctcgtcggggccgcggcggaggctggaggcggacggcggc

SEQ ID NO: 46077 - DNA, 652 bp, Oryza sativa
taaaagtaatgtgctcaaataatctgagcaaggaaaatgatcttttgccatttgtgaagtgctataaactttgaaacaactattgcattaaccattgcataataattgccttagataattagaacaacactaataggttagaaaattatctcagcaatgccaacaagaaaatttctgaagcaagcatacttctaaagtatggcacgtgttttccggttaatattcctctcctttaagtgtctcaagcggaacatacgatacatgcccacgcgaatgcgcgggctacctttctaattttaagaatagtcatcagacacctgacgtgtattcttcttctattcacacacgcccatacaaataaattttgttcaatgttggcttatgttttgatgagttcaaacattttttgtttttaaccaagatgataaaaattaaaaggttaagtttcttcgagaggtatatacgtctctctactacttgagaggtaaaaaaaaaaattgaactgtctttccctgttcataaccgcattgagcatgtagcttcttcagctaaaatgaaaccccttgttgtttagaaaaataaatgtacataatgattttgttagttctgaatgtatgcacgtcaagcacaaatgcacaatggtatttgtcat

SEQ ID NO: 46078 - DNA, 687 bp, Oryza sativa
ttgataactgattcatgtgtagccagagattataaagctgttttaggccttgtttgatagccataacctacccaggatttttgctcccaaacaaggacttggagctgtttgtagtgcaggaatttaattggaaatagttcaattcctgcaggagcataaaaattttctgtgttccagacagggcctaagtgtggcgcattttatataggccctagttttcaccagttgtttgcaggaatcattcagaaataaaaaaaatgaatttaaattataaatgaataaatgttaaaacattagatctgtgttggtttggaaaatatggtgttgggatggggggctgacatttcttgaaatatacagtaataatccaatcttttcaatgttggatccatcgtattcactagatttcaaagaagtgcagctagacagttcagctcattctttatattctcaaaaaaaataatctttgcttcatccatatgaactaccagatatcacttttttcattggcaatagttttgtgttcataaatgtctttgcttatgttctttcttttttttgtattttccctctgatcttattatcatgtttcacgtgatatccagattttttatattttcgataactcaaaacgttgcactatggatgtcctttctcattgtttttcagaattcaagtttctcaaaa

SEQ ID NO: 46079 - DNA, 2748 bp, Oryza sativa
ggagttagcatcagaggcagcggtggcggcagcgcaggtggaaggaagcggcggagcgagcgggaacggggaggatagcaccgacgagcggcatggggaggcggagggaagaggcgcgcgacgtgaggagggcggcacaggcgtgaggagggcggcgcaggcggagggaagcgtccgagagagcggtggtttgtgggttttctcttttttttttctttttctttctcccagacgatgtgggttcggtttgtggagacgtgataaggagttggtccaggtggctgggtgggttggatccaggattgtaggattggaagattgcatgattgtggatgaacttgtactttttatattagtatagatggagtggaaaaatctcatccccttgctaaccaaaccaacgcgagcactagccatcagtaggcccactagctaatcagcgcaaacgccctacttctcgatctagcgcgcatttctggcccacttcgttgtgttttattctggcccaccagcgaggaagtgagaggaaacgctgattagcgcgtaaacgctaacgaccaatgcacacgtgacacgtgttaggtttagtctttttttctgtcgttacttttctttaggaaaacgctcatttttttcttccacgattatttaaattttgtcaccgcatgcatctttttttcgtgatattttataaattgatttttttcatcttcaatgtccattgaaagtttttaagatttgagttgaatttttgaattttgagatgaaagttttcaaatttgacttgaatgttttgaattttgagatgaaagtttcaaatctcgagttgaaagttttaaatctcgagataaaagttttcaaatctgagtagaaagttttaaatcttgagttgaaacttttcaaatctgggttaaaagttttcaaagttgagttgaaagttttcaaatctaacttgatagtttttaaatcaagatttgaaagttttaacatcagagttgaattttttaaaaaaaattaagttgaaaatattcaaatattgacttaaaaatttttaaatctaattttaaatctaaacttgaaagttttcaaattttagttgaaaaattttcaaatcgtaaataaatatgagttaaaagtttgtttcagacaaaagaaaataagaatgaaacttatgcatggcagttttttatcaaaaaaaatgagtgtgggttttcttatccaaaattaagcgctattagtcctgcgaaacgcgcggcgcctcgattcatgtcacgcacacgcgaggtaggaacccccaagagaaattaagatgattagtgttgatatcctcgccacgggaagctcactgatgtgatacgaaggaggttagtgccaatgacactgacactgtcaccgagaacctactcataagaaataatgtttacattttaacctttttgaaaaaaaaaatacgaatagatcctcggcaccagtgtcattggcaccgaccccttcactgaattagcttctataagaggtgagggtgtcagcgcccgcattattagtgcagagatattggacctccacgccaacatcaccatgagtaaaaaaagatttatttttagaataagtttttccagatgtgcatttataaactaagtttttataacaagtactaaaatgaataaaagtccagctgacccaggaccctgagaaaattgggctttgagatgggccttacttcctaaagcccgtggaaacctcaagcaggtccgtggcatttctctttttctttttctatttttataaataactagcaaaaatatccgtgcgttgcaacgggtgaaaagttctaatgataatatacatttttcatgcataatcatgtcaatgacaatgtttgtattttaacgagcgacttgtctttctataaacgattttttttcttgtgcgattttctcaaaccatttttaaaaaatggcgcatttctttctaacagatttttcctagcatgttctttttgtttttttactgacgacgaaaaccatatttttctcccttttttgcttttcttttctcgtgtgttttttgcatgttttttctgacaattattttctcgtgcgttttttgcttgtttttttcgaatgttcttttttgttttttccaatacaggagaatatatgacgaaataaaaaccgtgtaatagatgacaaaaaaaatggatggatcctatccagctcaagcgtccatcaatttagcgttttttcgacagatttttcagagcgatttgttttttaatagatgatgtttttttcttatacggttttttcaaaccattttttagaaatggtgcgttttttctgacagttttttcctcgcatgttttttttaaaaaaatttccgatgtttttttaaaaaaattctgatgaaataaaaccgtgtagtagatgacaaaaaatggatggatcctatccggctcaagcgtccatcaatttagctttttttttcttacagatttttcagagcgatttgtttttcaatagacgatgtttttttcttgcacggttttttcaaaccattttttagaaatggcgtgttttttctgacagttttttcctcgtatttttttaagtaatttttttaccgacgatggaaataattattgttgcgtgtttttttttatggaaaatggaaacctttttagcgtgtttttttgcgcttttttctaacttttctcacacgtttctttgaaccttttattgtcgtgca

SEQ ID NO: 46080 - DNA, 1163 bp, Oryza sativa
atacaaatacgcaaaccctatttctatgatagacaaatatttatccaaaaagaaaaaaaagaaaaaaaacaaacgtccatacgagaaactacgtttcgctagaaaaaaacatacatataactacatttatctctttttttatgtcgtccccatcaaaatagtgttaacatttagcacaaataattttaataaatttcatcgaatattaatccccacaaacatgaattggtgaattagatgtataatacacgaaaaaaataaaaatatatattaacttgtatgtttgcaaaggatcacagtttgagaaaaaaaaaattacgtggtcctcaccatcgaagctattagatttttcgaagtagagtccaatgatcaaccctgctaatttttaaaagagaaaattatatatataccactaaaatgtagtactatcgattaacaccacaaacaaactatgtatactctatataataaatcaactcaagacataaaaaaaatattttcatctaccttattttaaactgtctaccttattttaaattgttagatctgtatattaaaaaaacctactgatcgatcaggtcgtcagactgcgtatgtacagcacatgtatccagttccctcctcacggactaaacgaacccactggatctcgcctctttgttttccttacaacaattaagttaaccactgaataaaagatcctaaaaattaccccgaaaaaatatccaccataattttttaataaaattggtagactaattacttcataccattagacatctaacgactttctaccaacttaattatatttcccaacttgtataccaggtctatttaagctaaatcaatctataaggtacaaataaatccgtctatgaatgaagctcttttttattactatatatctccatcttataatggatcctaaaattttataccccctccatcccaaaatataacaacttttagcacttacggtacattaccaccaacattcatgtcccaaccaatcacaatcctccacctttcacttttctcacatacacttgatttctcaaaccaatataacatctccctattaattctacctactttcttaataattgtatccaactctaaaacttcttatattctgggacggagggagtagaaatcaaggagga

SEQ ID NO: 46081 - DNA, 1273 bp, Oryza sativa
tgcatatagacaaatgtccaaaaacatgttccctcttaacgcaattcccatcggtccaacttacctctatagttagatatgcatatagacaaatgtccaaaaacatgttccctcttaacgcacgcccgtacgtcaagtgatcgaaacaaacttccaaaacaatccaaaaaaatattgataaacatagatttagaagagtataaaaatattttttttgaaaaaaaatcctatacataaacattcatcacaaaatttcaaacaccattaaataaggtgccagcgcatttgcgcggactaccttcctagttatatactaaaagtccattaaacttcctacaaacgctcctatatcgccatgtggcactctacaaacgctcctaaaccaccacgtggtactctaaaaaagtagtaaaaaataaaaaaatatcctaccttaatttaagtaaattggtgggtccaataatattccaaaacatcagatctatcttataattaaaaacgaatcccaatttcctatcgtttgttttgccatgtacgtgtacggcctccgcacgtacgatctacacccaacctccctttccttctctcttgattttctaagaaactctcactttttatgtatggtaactaaaaagatgtctaatcccaactttatttctactcggttagacgcataaattagatcattcgttgtagtataaaaaattatgtaattataataggaaatcccagaaattccgagaaaaatacaaaacataactaacccttaattttcacttaaatcggtagactacttattttataccactagatcagatctattgagaaaataacgctttattaacaaaccgaaacaaaatcccgtgtacttataaatacatactactgttcactgtgtgagatgtgtacgtacatactcctactattcgccgaaaaaaatagttctactgtgtgagatgtgcttggatgcccctaagaaaaaactacatggattttaaagaagatgaatcgactagattacaaggcacctaacatcctaacactactatagaagatgtcgtatctgccagttcgtaaaggatcatatgtgtcagattttcattggcaccaatttatcattaccaataccagcaaccgacacctatgagaaaaatagaactcaccaaccacaccaccactgccatcatcctcctggatccattgtcggctccctcaagcctaattccctgccgccaacgtctcccggattttacagcgaaaaccaagaggccaa

SEQ ID NO: 46082 - DNA, 1731 bp, Oryza sativa
ttagttatgtgaagtcgaacaaatgttttatatgccaacacgtaacacttatacaaatgcttctaaactttcacatgatggaaatgattttgttgttgtattccttatgtattatgcttatttttatcatatagattagtttcatatataaagagagacttaaatttcaagataatgataataaataatcgtgattggccagtgtagatgtaatcgggacaaagtgattttagtttaatatgagtgacattcaatatatcaaagtctataatctatttcatagtatagaatattatttttcaatttccctgattataacgtaatttattgtacttataacgaatacgatgaggaaggattacttttagcattgtttttacgatcaataaataacatgcccgcgcagatgcgcgggcttcgttcctagttattaaaatatataaaccgatgggccattcttgctgcactatgattttttatcagtcgtaccaactgaaatggcatggctagaaaggtttaaaactaaataatgttttcgaggatttattttaaaattttaaaatttttaagaaatataaaaaatcaaaggtaaccgttaagttatcagctttattgagccaagatcgaggaaccagagtggtaaataggttgagtttttgtaagaaaagataaaataaagtttaaattttgagtcaatggactgtatatgcgtgagctacgataacaaattttgttttaaacccattttgtggggaggcactatgattcgattatatatggttcttggatttttttttatgaaaggttgacaatattgatttgtacaactgcttggtctcttgtacaacatgacgctcgtaaattgcaaaactatctggtgctatatgcaactcaaactgatgtactgatctctgtttggaacgcatgccaggatactttatttctataacatttgataattaaattgtatatatatcattgtgaaaattgtatgttcctaattagtaaggccaacaaggacacattttctgcgaatttcgcattacacatgcatgaacgcagagcgctttatactgaaaaagaattaacaaatgcataataattaattgcagtgatacatatatcgctcgagcttttttactggaaaagaattaacaaatccatatatcacaaagtctcaacatatatagttgcacagttcgtgcatccatgatcatccatatctcggaatggagctaactagctagtaaccttatctagcaggaagacggcggatgctcgagccttcactactggtaatagaatcatggaagctcttacgaagccttgctaaatttttttttgataacatatatgcgtacggaggatatatatatattcagactactactatttcttcgtgaatctgtccctaattaaactagatatagctagcagcaggtgccgctgccatttccgccggacttggagccgacgagcatctccaccaccgtccgtaccacgccgccggcctccggcatcagccactcctccccaggcagcgtcctcgccgccgccgccagcacgccggagacatgcagcagcaccaccaccaccagcacaagcttcgtcatcgtcgtcgtcgccgccgccgccgccatcgccgttaattgctgtgtgtcgcgaaaaggggagacagatcgagatgaaaggttttcgctagctaagccgaaattaagcgctaagtgagat

SEQ ID NO: 46083 - DNA, 813 bp, Oryza sativa
taatttatggttgaggatagaagggtggttgaggggtagaataaggagaaatttgagtgtgatgtgattgatgggacaagtagtacttgggagtgacaagtattgttggacaaaatttgaatgtaggaagataactaatttgggacagaggaagtaccctagataattgaatgtcaatcagtgaacaattaagtcctacttgtgctggcctaacattattctgtattcctcatttctcattatttttagtagaacgaaggaatgagtggaagcacatcatatgtttactttgaatctgcaagaggttacatactatactattgaaaggcctcgactgaaaaaaaatgtcacagatattactaggttcagttgtatatgcaacttgagatgttttattggaggtaggatttgtgctgttgcttttgatgtactccacctggtttatgatgtatcgcagttgacatttatacatacttttgaccattcgtcttgttgaaaagttttgtgcaaatgtgcaaaagtataagttatgctcaaagtacctttaatgataaaacaaatcacagaaaaataaatgataattacatatttttttaataagatgaatggtaaaacgtatgtccacaagtcaacggtatcatacattaaaaatctgagggagtaattattacaattgtaccaaatcatgaattcacaactcatgcttttgatatataggagtatcttttagtgaattaaaataaataacatccttcgcatttgtgcagcttgttgggctcctgaaatctgtcggttacctaactctagcaattg

SEQ ID NO: 46084 - DNA, 3713 bp, Oryza sativa
attttctttttcctggagttaaatttcggtttctgatttgaacggtgcaaaagggcccacttaatagtcgtcctctgcatttttggttgaggtcactttgtgcatgttcttggtgattagcgtacgcgtgcagtcgattaattacgagtcatattttacctttatgcttagctgacgccgtggttcctgatttgttcttcatgctattcgtccatcggttggaccagactaattaatcaagatcaaacttgttatgattgactcggctaacgggctaagctcttgatccattctccattctactttatgaactctggtctctcttgaactttcagtctgcaacaaaaaacaactaaattttcgtgcttcacaagagtactttttcttgcaagtgcaatcagctacttccaaatgaaggttgtaaggaggcaatgacaaataatgtcaactaaattgtttatcgattaatctggttgatttcttgctggtcatagattaaaatgtcagtgcgtagaacagagatatgtcatatgtgtgcacttgactttatatttcttttgaacaaatattcatattctttggcttgaccagaacgtagctgcagtagaattcaaaacgctggcatccatataggctgtgtttagttcagcgcaaagtttggattttagttgaaattggagatgatgtgactgaaaagttgtatgtgtatgataggttaatgtgatggaaaagactgaagtttggatccaaactttggatctaatcacagccatatttcgcacgctcgagcaacttccgtgacatttcatacagtgacacactgacactaaataagcctagctacttgatgcacaagcagcaggaaataaccattcaatctcccaagtgcacgtacaagtctagcttgatgattcagagtttcaaaccaaaataacccacatacatgggaaagaccaatcccagattattaattgaaggaattattgctgtggaatcgtggattgtgtactcgatttaagtggtagatatttcagaaaataaactgaacaaacatctggtttaagcaatgtaatacaatattaaaaaaacttattttcctaagcatggagtaaataatatgtttcaataatcagacgaataatctgaaaaaaaacaagaccttaattctctggctgcaagaaaattaacaaactaggacatcagtacgaacttgaaatgtccagccagcattgatgaattcgtcttaatgtgttcattacacttgaatcatgcccaacagaagctgaaacctggcgttgaatgaagtgcttgctatactacttgtttggagctattttttaaagttttttaaacatttttaattcatctctaattaagtaaataatcatcgtcaatatataatctagtgaataatctgttttgaacggggtcttattagttagaggctgtgatcgagttagtgaaaatctgttaaccattttcttgtgtgtaacaacttcggacgcctagcttgttcgtttaatccccgagagagagggccagaatagagcggattgagaagatataattccacactataataggtgtgtaataaatcttctccaaatcctactcaatcccctttgtgggaggaattaaacgaataaggcgttaaggagatgtctcacgtttaagagattttcttttgaagctctcattgtggactgcataaaaacagatcgagaatgtttttttttaaaaaattgttgtttgttcaaatgaaataaaacactgttgcgtattatcagctttgcggatctagaaatttcttcgagcctagacaaacgcatggacaaatgattttaaacgttattgaatattagtatggtgatctgctagcgagccccagcttgcccgaggtggcctggccttggatatgatccaccctgactctagtttattacctttaaagagactagaaaaaatacccgtgcattgtaacgggtaaagtctattttagtttattattattatatgatttagttaaaataaaattcactgtgggagttcgcttgaatcgatatatatatatatacgcaaaaccaggtagttctatagtttgtgaagcatatacgcaagaaactatagagggaaggttgagaaccaaaacttgcgaagacagcctaagtgatgctgtagataggatctcttataatttaagatagaggtattacattttttgcttttgaaaagaattaacagtgcttaggactttttcttcgattaattaagaagtaaacatgcttgcactcaaaagaaaatagcgaattaatatgccccagtaatgcatactagcatgttaatatattgattatatatacaagacagaactaatcaaataggaggagtacattttcacattgacatatcacaatcaaactagtatacaacacattcctgccaagcatgttacaccatctgtcccataatttttcgggtcacatatgatgtaacatgcttagccccataacttttcgggtcacaatcaactagaatcaatcaatcaatctcggccactcaatcggtagccgggaaaaaggataactactaccttcattctaaaatatatacatacggttgaaatatgggtattaaaaaaataggtaaaattaaaaggaagaagattatgattggtcgagaagtttggtaataaaattgaatggtgaagagttgtgtttggttgagaagaaaatattggtagagaagttatatatattttagaacaaatcttgaatgctccaaattgttatatttcggaacggatggtaattaagcttagctctagctagaggagctagctagctagcagcaggtgcctcttccatttccgccggacttggagccgacgagcatctccaccaccgtccgtacaacgccaccgccatccgtcagcagccactcctccccgctcagactcctcgccgccgccgccagcacgctggagacatgcatcagcaccaccaccaccagcacaagcttcgccgtcgtcctcgccggcaccgccatcgtcgcccgccgtgttcttgtcggacagatggagagacagggaaaagatgtgtgtgctaattgcatggggagaggtagtatatatatagcccgggaagccgcgttaattttgaagtttgaagccgtcgcgtcttgtgcaacggcgggagagtcagtgtcagtgtgttaatttgaagtcagcaagtgcgtgtgtttatatgctataactttgctaagcaaattaaattaaacgcagttaattaattaattacgtgctatgggtatatatatatgtagtatcgtgtttatatatattaagcagttcctgatcgattcaatcagttcaattcgatttcatatgatgctgaccaagaagattgactgctgaaaggaaattctccccagacgagagttttaatttcggtttttagaccgatgaatttccggtcttcaatgaactagtgatagtattgactcggttgtttttcacttgacgccgtaaaatccttgcggccctgaagtttgatcaccaatatatttagatttatgtattttgtatcattagatttttattagaaataatgctattgtaatatcataatgttattattgtatctcaatcaccgcaaaaataaaaatatatattggtcaaagttatactgggtcaccacgaaaataaaaaaaaaatg

SEQ ID NO: 46085 - DNA, 744 bp, Oryza sativa
agctagccattacccattggttatattaattaacttctcattaatctcattgatttacataagttctttttatatgattggttttacagaagttagttatactaatttcttgttggtcataaatgtcagtgcgtacaacagagatatgtgtgcacttgacttacattttttgttgaacaaatattcatattcatattctttgacttgaccaggataaattcgtctgagctagctaggctagccgcagtagaattcaaaagccagcatccatatatttcgttgcactggtggccatgcgagttctgtgacagtacgtggaccctccgtaaacggtaccatttccctggatcaagtagtctggtacacacgagttcatagctgaaataccaaatgcacatacacgagagtctagtgcgagttattacatcacaagcccgcaggcattgtcttaaatcatcggaccaagcggtccggaatacatccaaaagcagaaatagataaggcagcggaattaaggcagcggcatgccattgccacaggcaacgaccgtactaagacctactgagcgccatcgtcttcatctccctcctggtagtaggcatagggatcctccggagattcatcttccgcttctgattaagtttatatttgcaagggtgagtaccaaccgtactcagcaagccaccacatcaacaatgcatatgataggggtatttcaaaggatggctatggttcttttgcaca

SEQ ID NO: 46086 - DNA, 1379 bp, Oryza sativa
aataaactggtcttcatgtttcctgttcttcctttttgtggtgtactaccggaaaagtgcttcataggcaacattttttaagctctagctaaagatcaatccaagaaaagaacactgaacaccaatatctaaacaatgagtcaagaacatgtaacgacctaaaactggtgagggaaaaattccttttttgtttgataacggaagtgagggaaaaaaatctatatattgaaaactaaatatacatgatttcatcacatacctttagcttatgagggatgatcgaatgagaagaagattagaagaaaatagagttcagccatgaactctaaaccctaaggcaataggatgggaaaaagaaataagattcgctgaactgaaggaatataatcattttcaaatttttaatcagtgaggagaaggatcaatagatcgatggatcatcatcacctgatgttagcttccgttttgtcgtccatctttagttctctgttccacacggcggcgactcggcgagtagcaatcatagcaagcaatcatgggcccgtatttgtgggccgtaaggcctgacaacgaagtgcctggaggcccaatctagctggactgaaaaaaggccgtgtgcgtgtgcggtcgaaagaaaaaggaataagttcaccaggtctgtcaaacttaacagcgagattttgtgagatcctttaaccacagaactaaaaatgtgtacagcaagattttttagctcgtttaaccacaaaattagaaatgtgtacctctaaactcactcaaaccgttaacagaagatcccatgacaatatttttgccccagatttgctgacgtggcatcctagtcaacaaaaaaattttaaaaattacgtgagacccacatgtcagctacacattttttttctcctcttttcttcttcgcctctcttttttcccttctctcttccctagcggcgggcggcaatgggcgaacgcgggatgcgggcggcgggcggagagccagtgggcctaggaggctagcggcaagtgagctcgatagcggtcggcgcgtggcgagcggagcggcggcgggctgcgagtggagcggccaacccccgccgccaccaccgtctctctcacccgccgccagctatcgacccctgcatgagcggcttcacggcgacggctgtactcctcatcaccgttgcgctacatggcgcccgcaggtgaccacccttattcccgcgcccggccggagaggggaagggaggccgggtgaagtgggggaagatgaggccaacgggagagggggaaagagacagcgcctcgccgctgcttgctgcgccgtcctcgcccgtcgcttgccgccgctgcagccacgctcgcccgctgacgccgccgct

SEQ ID NO: 46087 - DNA, 4008 bp, Oryza sativa
aaataatgtaaggattattgatatgcttgtatgttgagctcttaaattgtagatttggatgtttacattgttagagacattacaagatgagcatgacagggagagcataatcctattcagaaactacacaatcatgtaatatctctaatatgcatgttaagatgtaataattactggcggatgatgatgtagtatgtttgcatgttaagttttaggatacagtgggttataactctatagaagatatagatacacaaacgcacaccatatcctgataacaacatttgagagaccttgctgaaatatgttaaagctaacgaagttattatagatttcttcctgtcgataaatactttatctggcactgaatttaggcatgcaattactcgttattaatttcagccctattgagattactcataaattatttgtcaagctaaccccatcctatgcaggcataccacatggatctatatatagttctatacacagttcaatcatggagcacacagtagtttccaagcaagcaagaagcatcttcatgctctctaaatgcatactaatttatcatatcatatttttctcacctccttagttgttagtctcatcttagaaatatattgtataggggaactagttcgatcgaaaggataatagagccaacgagatgtggttggtagatcttgaccggatgcccccgtgtaaactgactttggagcaatgcatgcatatatagattttatatgcttgatgaagaagcattagagatgagcatatcaaattgtcaatgcacttgatctatgcttgcatggattagatgacattaaaatattagtgtttttttattcgtggtaataatggccagagtgctaattaactagcaaggccaaggcatatatgtaagagttaccaaattttagcaggtaacaaactgaatatactcatgtcattgtctctctaccaaaatttgacatttacggaaatttctttagatgaaaatattaccaaaatttgataaggctacaacccaaacacattcaatgccaccaaatcgtattaaaatttggcattaggttatttcaaaaacgaactgaacaaacccattgtctgcaagtattaagagagagtcaaacaaatatagcctaattgccaaaattaaaaatgaagatccacatatattaagccaaactgaagcgatatgtttaccagcaaggtctgacgtacagaagctctgttgatgctgaaccaagtaattaacacgtatgtaaccaacgtagagtacattgttagcccctcaggcacccgatcaagattattaaacttaataataattaattctggattcctcagattattgtagaacagcacattggtatatatataagtatatggtatggaattagtatatagtaatacgcacttgtactttagcgctgcttgtttgggtgttaatttaatttagctggttggtcgggtgaccaaccaatagcgacagaggtacagcttgtccggttaaattataatcccccgtttctaaatatttgacatcgttaactttttaacacatatttaaccgttcgtcttattcaaaaacttttgtaaaatatgtaaaactatattatacgtataagtatacttaagaatgaataaaatgataggaaaataattaataattaaaatttgaataagacgaacgatcaaacatatttaaaaaagtcaacggtgtcaaatatttagaaacggagggagtatattataaagtgagcgtaacacaactagtaattagtttccgtgtgacagaaccggctcatcaggttcaagttctagacttaatataggtgctcgtattcaacggcgagacgtccgtggtataagggtttaagttctagacttaatacgggtgcggtcgacggtgagtcacccgtgtataaagtgtatgcgcgtttgtattttgtttcttaaaaaaattatctacatatcaatatacgtagtactagtagtatcattttgccaaaatttactaggtaaatcaagtcagagttgcgtcaaaaaaatcagtacgtctagctctcttgtctcatcacggtttccataattgatttacaaagtttgtgggtttccaagaaggatggactcaacactttgatgttgtgtgttcaaattaacttagattatgttaatttctagtaaaaatggagcgtatgattaattaagccttaattattacaaactttaatacggaaaggttttttttacgaaatgtactgctttaaccgtttgaaaaacatgctaataataatctgaggtgaaatctgcagtaacttaggcctggtttacttcccaactttttttcaaactttcaatttttccatcacatcaaaacttttctacacacataaacttccaactttttcatcacatcgttccaattttaatcaaacttccaaatttaacgtgaactaaacacacccaaagtggagtactactcagacagctgccactctgctagtactctagctactaatttttagttatttttaacttgacgtttttaaaaacctttggcaataaatcaaaacaatattttgaaatcatttttggttataaatttaatgatatatatttagaaaataaacccatatgataattctaagcataactttagtgaaattggctgcacaaatttcagggtgtaaactaaaaacagacagagatatagttctttcatcctaaactgttgctattttattggggattgaaaattcatcggtccaaattccaaattagaacccgtgtccatgttggggaccaaaagcatgctgcatgcagtcaatcacaaacatgcgaattcttggtccgtacaaaggtagtagaacatagtacgtaattaactgcggtcttagcttaaacttaaacacgcacgagcagactttaaaatcaacacactgctgagacgaattcaaagttcaaacagtagccaacctgctatctacctatatatatgcggctacctcctcgccatgaagctgacacctctcttgctgctctctttagctaaagtgttctccattttctgtctcccgtttactcgacagcatgacgatggcggtagtggcggcgacggcgaagcttgtgctgcttctggcggtgttgttgcagttctccggcgtgctcacggcggcgaggacgctgccgggggaggagtggctgctgccggagggcggcggcgtcgtacgggcggtggtggagatgctcgtcggctccaagtccggcggaggcggcggtggcacccactgctgctagcttagctctagctcctctcagtttccaagagctataaaaatttatttatttatttggatgcacgaaatgtgcagcaaagctcatctgacgagttagggcggatgatggcatgcatcactgtaaatatacactccctctgtcccaaaatatagcagtttttaaaaatgcttacattttaggacggatgtagtattcaattagtttaatataattccttaatcgatcaggatatatgtgtatactggaggcatttggtaattctttttgggtaaaaattattaagctcgatctatgtgtgcatctgtacgtggtatgtattcgcaggaaaaagtcctgctcagattacttttgctttttcttcgtaaaaggaaaaatgtacagctcagataagaaggaaacattttgttttttctttgtaaacggaaaaatctcaggagaaacttattatcggcgctaataagaagaaaacagagcccagaacaaaccatagtgcttggacaacagcgctgtgtattttgaccgctttaattatttatttatagataatgatttccactaaaaatcaattctactctaatatcacgtaaaaatcaaactccctccgtccctcataagtttacttttaggagagagggaaaaaagtaagaggaagacaaaattacctaaacacccttattaagcagagaataatatggggggatccac

SEQ ID NO: 46088 - DNA, 1357 bp, Oryza sativa
acagcagtagggtctcctggcgccgcgcgcccccacctggcgccccacgccacggtggagtcaccacccctctcccctctcctctctccccccttatctcttcccctctcccctatataaggttcaccactccccactctcccctctatcctcacctcctctcctttacccactccaccgcgccgccacctccacgccgccgcgccgccgcattaggccgccgcgctgccgctttgagccgccgcgccgcttgcgccaccgtcgccgtcgccgccgtcggtaagccgtcgcccccccctccctgcgtccatcgtcgtcgccgccgggagagcaagaagccgagagagggagaggaagggaggagccgggaggggaaaagaaaagagagagagaaaagaaaaagaaaaaaagaagagagagagaagaaagtgaaaagagaagagagagagaggaagaaaagaaaagaaaagagagagagaaaagaaagggaaaaattagggggagatttaaaatatttaaaaatattagaaattaattataggattaatgaaaatataattagatgaattcttacagattgttatagattatttttagtaatctccataaggaatcaatttcgcggtagtaatttagatgtaattaagaactaaataattagatgaagtctaggacgtaattttaaattacaaaatttcttaggaaacgcaaaacatcttaggaggaggaataattccacttcgcgaataaaatagccgatatagaattcacctctcgcgctcgtttttcaattcggtcattatttggattttgtttgaattctaatcgaattcaaattgttcttacgcacgtaactatagagaccgagggagccgcggatccgggtgaaggccaagacccgcaagaccttgagcaaggcaagtcatcactattctttgatcacgttgatcccaattgcgaaattaatttttgtttacaaataagattgcatgcaatgatgaacatcctatttgtgattatgccatgccttgtttattgttcacctttaaatccttgtaaccatgattacgtatgagtctctagtcaattatgacacttgcttagaaatgctactttagaatcttgcatactcatatttatcaaatattatatgcttgggcaattacctttgggtaggtaattgaaatgcggtatgtggagacatgagcgccacattgccatgataatggtgacatgaaaggaattaaacatttgttttagaccggggcggacggtggatttgggtggtatccgggaaaggctagtaccgtccccggtcaattaagaaccgagccatgaagttaagcatgaaacgacc

SEQ ID NO: 46089 - DNA, 4391 bp, Oryza sativa
ctcctatataggagcagagactagaggggggctgctgatcacgggcgtgcgcggccgcgcgaccagtcgcggatcagcgcccctgtagcgagagcatagttaagaataagatggagataaatttaaatgatattgattgatatgataataagtatgttaggattgcacttattttagaaaaaaatttagaattacacttatagtgagacttagcgggcagtatactcttaagatgaaataaaagctgcaattagtgcgctaacagcatcacgcgcgttcatcatcctagtcatcaaactcatcagaatattgcaacatttcaggagtttctatttattttttttccaaagacccaacatgtctttgaatttatttcaggattcctttttgcattgtcgttgccttggttgtatcgtcctatctacggtacattcaacacgcgccggtgcgccttttagtttcagaattccaccatgtttggcaggcatgattcaagtgcgtgatagctgaataatttaagacgaatcgttagcctcgtcaaatttctttcagcgagattttcgggtccgccttgtcagttctcacacgttctggtctactttggtctgaagtctgaacccctgagagtcagagacgctcctgctctttttcccaaagctcagcctcgtcaggccatagctgatagctgccatgaggtgagtgaataatctgattttatcttcaaaggtttagttgttcctctccttcaggtcatccatctaattattgttgttattttcataaaatctaattatagttagtagatgcaaattttacacttttacagcatttcagtgtcctctctcctcttcttgatgtacttggtgcgcaccggtaagcgccaatcccgctacccacgtaaatatcctctttatagttaatttcctacctagtataaaacttgaaagaaaaaacttttctttaaggaataaagaaagagagaaactaaaatttcgataagcgaaaaaaaaactccacttgtccatttcacttgcatccctaattaaccggtgtcaccaatcatcaaactagggactaacagcttatttataagattttcctttgcggggaagcttagttataagttttagtttaggggactaataattgcctacaaatttggtgccagttaccgatacaaaattaaagtcgcgttcagagaaggcaaagtttgatttgatgccacactagtcgatcaggcagtaggatcttttgactagtgaagggcctggaatgggtgctagtttgctcacttgggccaaaatataagagttttcctgggccgaaacggactactactcttcaactatgtcaatcaaatttcaaaatatgaaatccttaacaagtaaaaaacttctatttaatatgtgaaaatggtattagttaatctctatgaaaataacttaaatatttatttttggaaatatttttcatgaatgaatatataattagaaaatagtagatacagatcgatgccagaaattttcaagtatagaaataaccaatatacggtacataataatataatatttagtttgcaaaatattatgctacttatttttttctcttccgaaagcacaggattaatttgtgcgacacagtgcttaatgttgatccctgataatgacacatcatatgccagggtgacagcaattgatgactacttcgattaattctttctttccatggaccatgacatgctgaacatgacagtgcccttttcctttgacctgaacaccgaggcacgtaagttcgactactcttcgaccgtaaaattaacaaaataaaaaataaaaaataaaaaccgtcgcccaaaatattacggcgtcaagtaaaaccgagtcaatatcactactcaactattatattgaagaccgggcataattcatcggtccaaatccaaatttaaacccgtgtgggaggaaaaatattttttagcatgcagtcaatctcaacgtacgaattcttggtcagcatcaagagaaacgaatttgaacagaatccaggaatgaactgcttaatcaaaacctagcacgtaattaattagactgagtttatatgctgcataataataataataataataattaaatttaaacacgtacgcatttgctgacttcaaaacatttgcctccatttgcagaagactgatctgacagcttcaacctaagctcaaaccgcggccggccggctatatatacgtagctacctgcttcgtctcgccatgcaattgattaagctaattaacatctctcttagcgcttaattttagcttagcttagccgctttcatctcgatctgtctccccgtttgcgcgacacagcaattaacggcgatggcggcggcggcgacgacggtgacgaagcttgtgctggtggtggtgctgctgctgcatgtctccggcgtgctggcggcggcggcgaggacgctgcctggggaggagtggctgatgccggaggccggcgtcgtcgtacggacggtggtggagatgctggtcggctccaagtccaacggaagtggtggcggccattgctgctagctccgtcgttccaagatggaccatggtttgcacgagctgtgtgctaactggtcgaactgacgaattagcagatgatgcatgctactagcagcttgatacttctgtatatagatagtggagaacttgtgatgtctatatatatatatggatttgttagttaattctcaattcctttttgttacaaagatgaaatgacttcccccatgatatattatgggggatagacgtggggtcttacggctagcactacatgatatgggctagccgatctaggttaattcgggcctcactcccctcctaacaaattttgatataaaagttctcatatccggtgttttctttatatattattaattatactgttatttattaaggtactactccctctgttttatattcccttcgtcttataatataagggattttgagtttttacttacactgttgaaccactcgtcttattataaaatttgtgcaaatataaaaaacgaaaagttatgcttaaaatactttaggtaataaagtaagtaaaataaataaataataattccaaaattttttgaataagataaatagtcaaacagtgcaaacaaaaactcaaaatcccttatattatgggatggagggattaccaattaagctcactaaatgcatgtgtatatatgcgaaatacgcagaaaatgttattttcagccatattaattaggaacgcacaattttcggaacatgcaattcaattatcaaatgctttataaaaaagtgtcctgcatggtgtgcgttccaaacaaacctcgatacatcagtctgagtttgatcggttgcatagcaccagatagttttgcaatttatgagtgtgttatggtataattaagatcccagtttcagctgtacaattttagtagaatgtacaagcccaagcagctgtagaaatcatcatcaacctttaaaaaaaatccacgaaccgtatagaatcatatttcttctccacaaaatgggcttaaaaccaaatttgttatagtatagctcacgcatatcattgactcaaaatttaagctttaatcttaacttctttttttttttaaaaaaaaactcaacctgtttaccgagtgtggttcctatctgtactggctcggttgataacttaatgatttttttaaaagtaaattttaaaaataaatcctctgaaaaattattcagttctaaacctttttagccacggcattttaattggtataaccgataaaaaaagtcatagcatagcgagaacggtgcactaagaaagatccaaaggtctcttctggcaaacatcacaagatggtaggtagtcagccaagatcgagcctcactcctcttaataaacccctttcatgtttagcgttttttctgtatagtacgcattgaacgctttgtttcagtctctgttggacatgattcatgcatgattctttaatttaagtgtaacaacaaattaagaagaattatattcatcgatcctgcgggacttttcaagttcatcctgatctgcctacatatacatagcttcgtttaaacttctcaaagcgcgcgagagattaatttactaattaattcggtcagtttttccacgcacgcgtttgttggcgtgtgtctgaaactacaaaatcatctctgccttccgagttaggtttagctagctactcagtcttcagagtttgaatggttcatggcatgcacttcctgcataatcctgcttgtgcatcaagctagtaggctaattagctaagtaaagcgccagtgcgtcactgtaggaaaggtcacagaacttgtaattaag

SEQ ID NO: 46090 - DNA, 620 bp, Oryza sativa
gagggtggtcatgggtctacatggacactgtgtgactccactgcgtcacggcgggcggttaaacctcagaatctgaaatcatcaatgtattatttttttaagaaatatattctacaaatacatttttttataaatatataattacaaaatgtaggggcacatgtaaatcagggatcgatgtccagaatattcatgtcatacgtcctttttaaatatggggtgttattgatttttagacatgacgactcaatgcattataaaatgtactccctccgttttacgatgtaagtcatttggtatttttcacattcatattgatgttaatgaatctagacatatatatctatctagattcattaacatcaatatgaatgtgagaaatactagaatgacttacattgttaaacggaggaaataatacacgttttaattttgtactaaatcaaaattctctaaatttgatgaataattcctcggtccaaatccaaatttaaatccgtgtgggagaaaagaaaaatagcatgcagtcactctcaaggtacgaattcttggtcagcatcaagagaaacgaattgaacagaatccaggaaggaacggcttaatcaaaacctagcaggtaa

SEQ ID NO: 46091 - DNA, 2657 bp, Oryza sativa
gtaccttttaacaatttgaaaagtgtgcacccgaaagaaaaaagggatgacttagaaacttaaagcaaagaacacagaagtaatgctcccaaaatatattagttagaaatcaaatttgtgctgaaaaattaagcaactgtgatctctaaatcatatcaataatgttatttaaatcacaagacgtccatgcctatgcacacaccacattctttatactattttacatttaagggcccacattcactataattcaactatgaaaaaaatatgtaacttttggttatattttccgacctttgtgtccaattcaaaagattataaaattatggaaaaaaataatgatatagatttgatcaccgtatataacttaacaataattgaattagatatacgatgaaaaaactgaatggacctaactctgggtaatgttcccaaaaatactcctctcattccgacattataataagtcaaaataatattgttatatttgtagtgtacatattttgaaaatctactgtatacttataaatatatttatgaaaagacaaaaaaaagatacatcttaatcaatcaataaaggatttattctatttttatacaatgaagcaatagtaattaaaacgcattaaacttgtaaaataaatattcttatttatatacatacgtactctctctcctcctctcccctcattcaattctttcttcctctaaagcaatagtttaaaatattattttatttataaaaataaataattcaagatccatattacccatatttcactgtaaataatacgtcatttatagacaactatgcgtgtcaaccaaataaaaatatagaacaataaaaaatgataataactactatatcatcttaaatcattgtacatgctctatagagcactaacagtgtcacatattacgtcttaaatttaaaaataaaatattagaaattataagaaaaacatttgaccaccggtttcgacttaaatatgtagatccattattttcaaccattagatctacttaaatatgtagatccattattttcaaccattagatctacttttaaagaaatcttaagccgctaagagttactacatcttaatagttagaaaaaaaatatttgaaattttaggaacaaaacaatagatcatcggttttcacttaaatcatttataaaaaaataggaaagaaaccgcccacccctcccccaaacttcgccctcctcctcccatgcgcacaaacacaacactaccagtcccctcaccccctcggctcgcgatttcccttctacccgtctttgatatttttatagctctcaaactaaaagtagaaataatcaataataataaaatatatattatttttaagacacacatccgatttctaatctaaattgctctattcataattaaaccaacaattaaaagatccataacgcctatattttgaacttaaaataagagtggtataaaatataaaacaagaaatataaaaggaacatttgttcctacttttcactaaaattagaacaactactgcatgttccatggccataacatttttttaagtgattagatataacattttttaagtgcttagatattactggctttcatgacattatgagttccttcacatattattgcatatataaggcacaaaaaggttagcggtttatagttggttgagaagttatttttgtaattattaaactaatatgttcggactcatattgattaggtattttctttttttttttaaaaaaaaaagatactatagatcaccatatatcagggaagggtggtctacgatatacctatagaaatttatatgtaaatatgtaacaaactgcgtcaattgaatcaactaggatgactagcttggtggtacaaataaaacatattcattaacaataatattatttaggatttgctaaaaaaagaaagcccctaatcattttattaaaagacaaaacaccgcatggttctaaacaaatcaaatctaaatcctttctacataatgttagataattgtttatcgaatgtattaaatattcctataaatattgtctaacaaatatatttgaaaaattatcaaagcaacactgatgaggataagttatggataaacattacttttgaaatggcaagtgacatctggttgatattttgtcattttaagatttttttcaaacataatatctaatacatgtccacgcattgcgtgggctaccttcctatggccttgtttaattcccaaaacaaaaacttttcacccatcacatagaatatttggacacatgcatggagtattaaatgtaaaaaaaacaattacacaattcgccgggaaattgcaagacgaatcttttaagcctaattgcgccatgatttgatgatgtggtgctataataaatatttgctaatgatagattaattaggcttaataaattcatctcgtagtttcctggtgaaatctgtaatttattttgttattagattacgtttaatacttcaaatatatgtccataaaaattttctccaactaatcgaggtgtatatgaaacagaacagaacctcaaccgccgacttctacgcagtaccattccaattttcaccaccccaggggggcaacttttgcgaggcatatcatcagct

SEQ ID NO: 46092 - DNA, 3107 bp, Oryza sativa
tattttaaaatacttatatacaaaagtatatttatttttatttataaattaatttatagtattgaacataaatatagctatatacgtgtagattcatataaaaaagtaaaagtattttagaacagaggtagtataaggtgaagatataaaaggttcgcagctaaaatctctgcttcacaagaaacgatctcagggaaagcagaggaaaatttccttcccattgtattctccttaagaaaaacaaagaaaaaaaattccacccactccaacgtattttgttttatttcctatattttttcctttctcctgtccgaatatgtgttttacaatcctatctaatgaagtttcatttgtttttcaatctctggtttttaccatgcatttttatccttcttatgtgttatcactatatgtttttacaaacatgtttcaggaagagattttagctggttaagcaaatagtccttccttcccaaattaatcatcatataatgaaattcaaaatttcttaaattgatcatcatataaccgtatggacacggatttcatcaaaatacaattaatacagcatgagagaatatgtgcatgctaaggtgtaattggcatggtgttttaattgatgtatgcattgtgggagaatgtgtgcatggtgtcttgattgatttgatttaaattatccttagtgttggtgtataaatatatatgatgattaatttggaaaggagggagtattaaggttgacgttaaattatttgcatgtatgtgatataaaaatcacgcctagcaacacaactaccattgagcaataaatacagtagtcagatggatccgaaaattatgccctccatctatttgatagtcatatttcatcttggcataatgaccaaggataattaattctacttatcatccatttaaatatgctactagctattcctcgtaaacaagtgattcattaacatttacatttctcgatgcccatgtagccaatcttatgtggaagaatagagagtcacgtattaaatccgagaaagtcattaagagaatatatggttggattaaaatatgcctatcaaaagtaaatttttcagatttggaaatatgcttatcaaaagtagatggagtgagtagtgttctaaattctcatatattttgaagttgccgacgtgttcttaaggggaagattgtgaaatcaatattttttacttaaaagtttgaataaagtgcatgggcggtccttaaacttgtaatgatgtgtcatctgggtccctaaacactcaaaatgaatacccaagtcccataacttatcatagtgtgtcatctaaatcccaaatcgccacagccccttcaagattctacatggcgctgatgtggaataccacacggacatgacgtgacaaatgaaatccatttaaaaattttcatttttcatttttatttttttcttctctttcttttctccttctcttttttttcctttcttctcctttctctatgacccgagcagaagaaaaaagaaaaaaaagaagaatgagaagaaaacaaaaaggaaaaagaaaaagaaaagaagaaaacggtaaagaaaaggacacgtcatgtccatgtggcatgccacattatcgccacgtaggatcctagagggcctgtgtcgatttgggacctagatgatacactttgacaagttctgggacctaaatctgtattttgagagtttggggacctagatgacgtaatcctacaagtttaaggaccgcctatgcactttactctaaaagttttgtgatgaactattggttttacaagtgtttgaattgaatatggtgaagtgttttctttgactgactctcattctataagtgatcggcccaactgatcaggtatggccatacgataagagatgtatgtgtggttgttggatcaggttgcgcaatagcgggaccaacagactccaatgtggagttggtttccaatgtggagttggttttggggtaaatttgtgcttcctgatgattctttaatgtttataacctttaattgtttcatatgcttatcatatactatttgggtgctatgagtcacgttgagaaagaatttgtgttcaagttttttttttcatgtgtgaacatgtcttgaggccatgtgagtattatcgatgatggatcgggagtcaacttaagagaagttgatttctagatgatgaagaaaatcatacgagatgctcaggctaaagaaaaatatacattgaagtggagttttcatatggcatatatgagatgtatgtgtggaaatgaattaaattcggatagggatcaaagttcggaaagcttgagttcaattgtaaagagataaattgtatcttcgttgaagagggtttattggggaataggactactaatttgaattggcttcataatttttgagcagttcttttgggtataaatagatgagaagtttagactcaagagtaaaacttttgaaggagagaaatttagagtttagccatgagttatgacttgtattcatgagttgaaacatgggtactttggaggcactttacaaacacacaatttttatgatcctatcattcaacccttcttttgtagacttaaactgtgttcggaaggagaggttggcaacatctttctcgtgcatggaaaacggagttgtttgttgatatatgattaattaaatattatcttaaaattgaaaaataaattaatatgatttttaagtaacttttctatatttttttaaaaaacatttagcagtttgagaaacatacacatgaaaaactcccgaacacaactttagttattttattgggttaattagatacatgccgttataaatttaacggatttgaaatatgccattacaattcttgtatttgtaccaatgccattacaatttttatatagtttgcaacatgccacttgtatacacgtattttacctatattagacaaaaatgccccccctctttaacctctcgtcgttcatcgtcatcgtcacctcgccatcgctgcccacataggtcaccgccggcgccatcctctgcgtccccatcctcatcgccgattcccctcctccggaccatcgccggcttcc

SEQ ID NO: 46093 - DNA, 2580 bp, Oryza sativa
atgtctagcggcatggaggagctgagctagtagtacacacatgcagcatctgcaggttcgtcggtgtcgacggaggcgacgactgcggggatggtggccgcgagggccgtgcaggagttgtggaacggttcggacaccgagcagaagaggacatacccaccggttctgctcgccggagagggaggggacaacgactgcggtgtccatcactggctgcgcttgccactaccatcgctggtctcgtggaagagaggagaggggagaaagaggaagaagaaggaaagaagggcaatttgataaaaacaattattgtaaatgcatctcagtggcatatctcgaatatgtgtaaaattataatggtatgatccaaatacacgaatactgatggcatatttcgaaaccggcatatttttaattccatgtatctaattaatcctattttattcgatcttacaaaatattcctcttcccaccctgaacactacctccaacgacttataattcagatctaaccgtacactgttgtgctcaaatctgttctactagttgctaaaattaatatgcaaggcaagttgatcgatcaatatatccatcgtgcttcattgtatagcaacgagggcaaatggactataataaggtacaaacatgcacggttactaatttgcattgctccgatattcatcgcaaacattgactatctcctctatatttgtgtataatttttcttccttgtgttcccccccaaaaaaaattatatcttcctttgtttgtattgttcatcaaattaacttggatcaagaactcgatgtatcatcggctagaaatgcatgtgcaaaatggacagatatattcagaggctacattcaattaatactgttaattagcacgagaaagaaaaacaaaaaaactaggaaagagtggacaagagatgaaagaagaagctaggcatggccaagctgtatggtctattttggttagaccagaatctacagggctcccagaaacctgtctcctctttcatgctagctagctctccgtgacaaatctacagacatgccatgtcacatactttcacagtgaacccataaaaaactaacctaatacgatatgatacatcctaatattacgaatctagatataactctatttagattcattatactagaatgtgtcacattcagttttagattcgtctttttaggatggagaaagtatgtctatatctagatttatacagttcgacttttttttgtagaaggggtgcaaggaataagggtagatagatcggaaaacattcatggccatttgggttggattaatgattcaggagagaaataggcaggggtaagagaaacacatcattataaattagtcaggtgctatataggtccctccgttttaaaatgtttgacaccgttgactttttagcatatgtttgaccgttcgtcttattagaaaatttatgaaatatgtaaaattatatgtgtacataaaagtatatttaacaataaatcaaatgatatgaaaagaataaataattacttaaattttttgaataagacgaatggtcaaacacgtacttaaaagtcaactgtatcaaatatgttgaaacggagggagtatcatggagataaatatgtagggaatggcctcttaaagagaagggtctaggttaactgtattaaaaaaacagagaaaaataactgattggtcgtaactttggatggacagatttgttaatcgagaagaactcgacattggtcttgtttggatcctccggactattaaatagctctccggaatcttgctatttaggattattaaacgtagattatcgacaaaaccgatttcataacccctagcctattttgcgagacaaatctaatgatgtatattaatccataattagcggctgattactgtagcatcactatagcaaattatggattaatatacatcattagatttgtctcgcaaaatagcctaaaaattatggaataagttttgtcagtaatctacgtttaatactcttaaatagcaagattccgaagagctattaaataacccttcggatcaaaacagtgccattgtatagaaccagttaatggtacgtggcatgtgtgaatataacagatctcgagagaaaatctgtaaagataaaccatccattgtttgtcgcatatcacaagcctaaatcacgagacgggttaatatatcaatcatatgtacagttaattaaaattgaatatctgctctgcttcatatatatttttaaaactccgtgaactagtttttcacgtgtgagcctataacaccccaagtaaccttacaattaccagcccacatgcacataattagggcaattcattttatgattttcttattatttaaacatttttaatttcaaaaataaactctcccaaaacttattacgattctagacattttaaccaagtcagttagactagcatgacaaaacaatgtcatgtcaactaaactgatgcgggtgcattattagatcatgtcattctgactggcgtgatagtgtagtttcctcatgtcatcatgaagtacttgcag

SEQ ID NO: 46094 - DNA, 1801 bp, Oryza sativa
aaaatgttcagattttaaaaaacaagctatggtagagtttgttttgctaaaattacaaagtattttaaaaaaataagaaaaattaatcatttcatcctataatccatccgtcccataaaaaccaacatagtactggatgtgacatactaatactatgaatctggacatccatttgtccagatttattatagtagaatatgtcacacctaattttaggatatattttttttttggggtggagggagtaggctgtaaggcgcgtgtgagggagagaggggtttcttttgggggccgggcggggttgattggcgttaggtggagggtctcattaaaacggaggtgcctctgcctgcaaacacagtgacggtccttccaactgctgggatggctgtcccctagcggagataccaccacagcgacgtacctccaaacaaacaaaacccaacaacgagctttgctatacccctatagctagcaatgcacagacgacagctgggatgaaaagaatatcgatcgatcgatcgatcctcaattattttttctctggattgatcgatcgatctcacagttcgatcgattggtttacacgtgtgcttgttttccactggagcaatagtattttattttgtttatatatatatcctccttgtgttttttttaagaaaaaataatctcgatcgtacgtcctgatcgcgcttttatggaagatcacattttgtgacacccttttgatcgatcgttttctaatgcaatttattttgaatagaaatatgttaaatgtagtacagaaatttcttttgacctcttaatatgacttcagttgtcgaaatgttcctagaattcattaatccctactatcttataaacacaactccgtacttattccctttctctagaggaacaagagaaaaccattcaaaaaaacaaacaaaaaaatcattaaaagaaaccagtcaagaaaacctagataaaaatagggggaaacgggaaaaaaactgaaacttatccaacagaaaaaccgagaaaaaaattgcaagtatatgtttaaaattgcaagtatacttttcaacctatatttcttttctccaaaacatagctacttccaatgtttaaaattttgcttcaaaatatagctacttctcacacataccaacccagttcaacaaaaaacttgagataccaaggaaagatgagcaactcacttcatattttaacaacttctacacttaggttaagatttttttcgcttatgcttatgcttatcaaccaaaatttgaattttcaactttcaatttggagttgattttagggttttttttcattgaagtttatttttcaacaaatgctttttagatcgctaagaacatgtatataaaagttttaattattcacaaattatttttcgtttacaaatatgccgtttcgcttattccccgaatatacaaaacgatggggctttactatttcaatcttaaccaatcacaatcatctcttatatattttttcacgtacattttcatctcaatcaatcataattactttttatttaattttattgctctttaatctctataaaaacttatatgtataaatttttatattttaagatagaagtaaccctaagctcgagcttttgagttgtgaacttgtgaattgtgataggttggaatagtatggatgggtcgtcggccacccgcgcccacaataactgcagtgacgacgacgagaggattatcctgcaaataagcaacgtgtggtgctagccaccgcctcctgtagcgccacaaaaaccgggggatcc

SEQ ID NO: 46095 - DNA, 672 bp, Oryza sativa
ggtcaaacattacaagcaaaatatcaaaatttcttatattagaggacggagggagtacatcttaataacattttactttttccctctttgtattttaagctaaaacttttagaaccatatagatgacaccattatcaagttcaaaattgttctcaatttttttatgagcgtttgcttgaacttgaatgccttgatgtttaaattagtcttaggtgcttccaaccatgtaaactatgataaaaagtccaaaataattattgagaagtaatctgtaatgcatttaacattctaccaaaattagtgtgaactagagcttacatagagagagagagagagagagagagagagaagaaaataacgttagagagtaaagtgaatcattttaaatagttcacgatggagaatcagtataaaattaatttgagggttgggggtgttaaaatggaccttttttcaaaagaaaaattcaggtgaatttccaactttcatattatgagtgccaacttaacttgagattgaatgcatttccagttggaatttgagagcttttgttcagaaaataacgtgatgatgaatcaaactttcaacgtgatcttgaacagttactcagtagaaatgtttcgatcgtataaaaaatgagattcgccaaacacagtagaatggcctctggtc

SEQ ID NO: 46096 - DNA, 3123 bp, Oryza sativa
  unsure (1)..(3123): unsure at all n locations
caaaatatttttcttgttatttcattttgttccagttaattaatttatattgtatatttgggctgagggggttggtacagagtcatgtggggtagttgctacaaaacgagtggttaaaatccttgaccctagtcagaacagctagcatggatagtgttttttttaaaacaaaaagaaaacatcatttttggcaggtacgtttgtgtactttctacttttgtttgaaccccggacctttgaagcgttaaacgtgtaaaacaaccccaaaagcatatacataaaaaagactttgcccactacttattattatattatatatagaaatataaaaatatatgattttattgagtatcttttaaaattaatctatacatatagtctccatattttttaagataaatatttttaaaatcacttatactaaaatatttttaaagttcgacaccagtcttatccaaaacgacaagtattatcaattttaaagtttaacatcaatcttatctgaaaacgatgagcgagtatcgtcaaccaagagggagcagctgcaatgttgacttagttatgtgatttttttttactgcatatatatgtatatattatttttcaatgacaaattaacacgcatacttgcattggagctctactttgtgaaagtatggcccaaaatgaatatatcgtttatttgagtatgtgttaagttgcattgatatttgagtacagtggatgcatctgtgttgtgtgcgacgcacaatgatgcacactatttgcgtcttttatgtaatgctccaggaaaaaaatgatcttcaacatataaaacacaataatattatcttcatcaaactaaaactattaaactacaactacttatccagttgtatagctcgaaataaagtctttatgaaagggggattaaaaaaaattatattagtcaaagttaacgttattagttataaagaagaacgagttatatattacatattgatctctgtaataaacgaacgaatcaaaatgaattctgtccaatatatccctccagctaaaagttctaaagaaaactatgtatattttcctgaagtccaaagtaaactaatccaaaagcaaattatgctccgctaatcaactaaataacgggctcgagccatcgctgccaatgcttaggctagctagctgctcaaaaaaaaaaaaaaaagaaagaaaaaaggactgaatcaatattcaggaacagttcgtcgtcgtcttcttgtagctatctagcagcagtgcgtgcgcaggttgcccctcgatttcgcgccgccgagcatctccgtcaccatgccgatcacggcgccgccgtctgcctgcagcagcagcggcctcgccgccgccgcgccgccgccgatgacgctcatgacctgcaccaagaacagcagcagcagcgccacgttcgccatcgtcgccgccgccattatcgtcgtcaggctatgatcgtaattagcttcaatttggagtgctgagctgagcatcggagcaatggatcgagcttggagagaactctgccatggcgtgctcgtttatatatagacgatgcatactttggaatttggatggatatggtcggtgtgtgcgcactgtctgcatgcatgttttgaactttgaagtcttcttctgtggcgtccattcaattcttggctgcgtactgctttttattatggttgagattaggcctagtttctgatctcgtttgtttgtggctgcacacacacggttcaaacttcacacgcgcgcagagaaaagaaagggaggcattaatattcagttttgcaggactcgttcaaatctgaattaatctcgctccactgatcgatcagagtcatttatatgcgtttttgtctcccacgaggaacgattttcttttttttttgggcgcgtccgacacatttcaactttttgaacagttcgtgcttgtagcttgtgggactggtaagcagagcatgcagcaatctgggcagagtcaactggattattccctccggtaaaggttttaaaatattaatcatgtttttctaaaaaaaattaaatcatatgtttaatcataaaataaattataacaaaataaatactacctctgtttttttaatatataacaccgttgacttctctatatacgtctcactatatattcgtcttattaaatctattaatttaattattatttattttattttgacttgattttatcttcaaatgttttttaatcatgaactaatctttttatatttatatagaatttagggtaaattgcacccacggtgcatcaacttggcaggtcggtgcaacttgatacaagaacttgacaaatgagcgttttagtgcaacaacttagcatataattgcaattaattttgtacaagaactttataagtgatcgcataaatgcaacaacttgtaagatatgtacgattttgatataataagttaagtttaattatttggaacactttttttatacatattcaatttctaagtaattttgataatatactaacgtggatttgtatataagcatatttatatttttatcttaataattaataactgatagtcaattaaattggatgtataaattattatatttcggttgagatttgggaaggtgaagaaaacaaaaattcttgaaggcaattggatgtgcggtatgattattaaagattaagttcaatattataaagtaatatccgtaggattgctatgtaatagcatattgatatcatgaaaaaaaaaactcaccaagcatatgcttagctaagttgatgtgcaccaaaatactaaattgtcaagttattatgctagattgcacccacttgtcaagtagttatactcgaacgcttaattctcaaattcttatttttaaagataaatccaacctttaaattaggagtggcaacttaacttgagatctcaggaccatcagcacgcacctttatccttcatccctataaaaaatgattcagtacaagctactccctccgtcccataatataagggattttgagtttttacttgtatcgtttgaccactcntcttattcaaaaatttttaaaattattatttattttatttgtgacttactttattatctacact

SEQ ID NO: 46097 - DNA, 1556 bp, Oryza sativa
tttatcatgtgtactgtgcaacactaaccaaagggaaaccagagataatcttttctttaactatccttttagcactgcttgttggcagtttctgggaatctcatggaatactaatcttgaattttaccaaaggatagcttttacaagatggcagttcaatcagactggttttctggagatcttcttattggctacttggcacatctggaagcaacgaaatggcctcatcttcaagaatttgcagccaaccttccagtcttggaagtctctctttataaatgaagttcttcttgcatctctgcagaatgaaggacctcctcaagcaatctgttcttaatttgttgcaaactctatagggttttcatctctcttgtaatttcttgtaaatattccttcaataaataaaaatcacactgcagggctaagccctgacagcactttcagtcaaaaacttaacttgagatcgtatacatttccatcgggatattttggtagggacttttccaattggaatttgagagctgttgttcagaacattacttaatgatcaatttttcaatgtcattgctaacacttacacaatagaaaattttaaattctatatacaggatatgagatttgccaaacaattaaaagcaaattaatgacctccggcgttccaacaaaaacaaatacaggaggtaaggcatcagtcacgtacttgtttttttaataatgcacaagaaatctatgtgtcatagagaagaaaaaaaatgattgaattttattttgaacccctttttgttacccttattgtacaatggaacattacaccccatatccatcccaattaaaaggttttacgcaaggtaaagaaaattaaaaggttttatttttaagggtcacaaaaaggggttcaaaataaaaaaaggttcacctatattctcacactacaccccatattcatcccaattaaaaggttttacgcaaggtaaaaaaaattaaaaggtattacggtacaaccaactattccatggtagcttatttggccaatccatgtgaagttttcgtgctagctggttgagtctactcccttcgttcatagatttaatcacttctagattattttagagagattaagtttgaatgagaaacactatatgtgacacccctctcaaatgaggggtggttgagagtgagcttttttttttagatctttttattttttttaattttaataatagacattttcaaaaaataaatattcaaaaactgaacttttggccacgccagtcaaagtgcatggcaagggctggcgtacgcgtgacaggccagcactgctacaccagctgcgtgtggtacgacagacttatatggccacgccaggtggactggcgtggccaaaaggttcggattggaaattattttttggaaaggtcaattaataaaactgaaaatagaaaaggtctaaacaataaaaaaaattcgttgagagtagaggatggttcgggccttaggtaatgttggttgaaaaatcgaggatggttagttgaggaaaagagtggtataaactccat

SEQ ID NO: 46098 - DNA, 7990 bp, Oryza sativa
tttttccttgatcgatggaacaacaccctgttttttttatactactccatccaaaaaaaaaataatcctagcaatgaagctgtaccgtatgtgtgtttttttgattggttgcttggattggattttatgggacggacggggtatgtatgttaggaggggtatgtaacatactgaatataagatgtctcgtgtaaatgaaacaaagtgaattatgtacatttttttcttcctaaaaagttggaaagaactatgtcctttttcccctaaagtacaaagtaaactactaaattgatccaagagcgaattatgctccggaactaggtgcagtggcgatcgagtcctcgatctctgccgatgcttcaaggaatcaaggctgctcgatcccaaatctgaaccaacaatgttcaggaatttacagttcgtcggaattattgattttgatctctgctccctccctctaggggaagtgcgtgcctgggttgccgttcgatttcacgccgccgagcatcatctccgtcaccatgccgacggcgccgccgtctgctgctacctccagcagcggcctcgccgccgcgccgccgccgccgaggacgctcatcatgatctgcaccaagaacatcagcagcaacgccaccttcgccattgtccgtcgtcgtcaagcttaatttgctctacaccgacggcagagacgacagtcagctgatgcaggttctcagacagacaatttgtgcgtgagaaattgagagctgatcagctgatctgagcttaatttggagattgtattaacccctgcaatggcgagcttatatatagatgatgagttgattttgcacacatgtattggttggtgtgtgcattttttctgaaaacatggttttgaactttgaagtctttcgtcccgttcaattcttggcacgcatgcttaccattgtcatcattgaaatttagacctaagggtctgtgtagattatagccaaaataaacctggccaatattaacaagttggcaatattgcaaaattttagcatgatttcttatgtattaccaaatttagcaacaaactaaacgtagataatttttttataactttgttaaaaaaatggtatggttaaaaataacattaatctgaacagcccctaagtttctgatctcctttgtggctacacactgcacacatacacacggttcagacttctgatctccgtccaagactcgttcagtctgaattttcttttctttttttcctcccacgagttcttgaaccgtttgtgcagtcgtagcaggcagctaaattggattactgcatactaatggaaatgcacgaccttttttgaattacattgtgggtgatgatggcttactataagtttcatggtcaaacaaaagaaaatgaatattatgtacgtacgttaatttgattttcaacgggaggttgctagggttcaaaaaatgtgttcaacgagggcgtgaaatccgatggatggatggatgcatgcgtggggttgtttggtcttggtcatgaaagggagggaaccgggaaagttgcagtatgccagtatgtatgcatgcagtatgccgtgcctgctgctgcgtacagaaacggtctttctctgcagctctgctatgataaatataacaagtcaatagatcgttaatatcattggaaaaaatctcatgcactgtagttcttgatgtgtcaaaaaaaaacttgcattagtattggttaagagtttaattcctatatttatgtctatgaagtttttttttgtaattaagagttaagttcctatatttgtctaagtattagttcttggataagagtttaaaaaatacttcatgatcttaagttcctgattggccgaagaaagattttttttttttttttgcaattctgctagtattaattacagtctgattcgtacaattttgtccatgcatgaatattaataattattttttgtgagggaatattcataggtttgacatatatataagcatgcatgagaaaggtcgacgtcgtaactcaaaagtcacctgccggtctgctggttttggcgaaaatcaaagctgctatacccaataatattttagccgtcaaaaaaatcaaaagaggtcaaagatttggaacatgtcgtacgactcggaaacagcgactgtttccacacgaccaaacccaaaacacgtaatatctcaactctagctagctacttcgcctaatctaacccatcacctatatatatatctcaccaattcatccagaattcttcagctcatcaagcagcaaaaccaatcaagaacaacgaaagctattctgaacttctgaagaacccaactcaagctcgacagcaaccaatcaagatcatccctgttgatctctctcttctcatcgatcgttaatttctgtccgatatatatcaatggcgatgacagcagcgagggcgatggcgatggcgagggcggtggtggcggtgctgctgctggtgcagatcttgggcgccatggccgtctcggcgaggacgatgaagggggaagggtggctggaggacgggatcggcatggtggtcgacatgctcggcgagctcaagtctgggggcaactctcccacacactgctgctaactgagcagggtgtagtcagctaccagcatgtgtggtagaacaagagagatgatgcacatacggtggtgtacagaaattaatttctggatgatttgtttcttgatcaatttggaggtatagggtaggaaagatgcagagatttgaggcaaatttctcgagtctgtgcttcgatttttatctgtacattttgttttttgacatcttgagaagaaaatcaaaggtgtattgtgatggttttgatgatagggacatgattacatgaattgaattgattcattcattttgttcgaaaatgttcgtttatgttgtttctcattccgatgtcagagaacaaactgctcttgacagctaaatgtcactctgtttcaattccgtacatgtcatttcgtctttgatcgatcgagtttgtttaaaatatcgctctgcaatttcataattgaattggatcacaattcactacagttaacttctcttctacctgcaaaaagaaaaataataataacgacttctcttctgaaaagatagaagcagctttcctgtaatctttttctcccattatgttgctcttcaagtttggaaatgctgttctcaaaaaaagtttggaaatgcgacgacgaaaaaaaaaatgaaaatgaccgcaaagatgttctttaggaaagaaacaaattgacctgaaagtctgaacccctgtggttgttggtcatttgccaacaaccaaaactgctgaccttttgaggtgtccttgtaaagtcaaaaagtttgacacttgaattcgtcgaaaaaatgatattacaaacaatacatgtcaaggaccatgatgctgaacggttctacacggcttgtagtgcagcgtctctgactgttttgccgggacagaataagcagcgtgtgacacgtactgttgaattgtcggttctaattaattctaattccctcccatgatttactatttataatttgtggatttggtttgtataaaataaaatatagctatattcttcacatggtttgtatcaaataaattactgatatatttatgtttttattcaaaccatgtcgaaccaaattggtataaaataaaatttagatatgttcatctaaataggttacagataaatatttgcatacatctcttcaaaaataaactacaaccaaacatcaattcgtggtgcacaaatctgatatatgtttaagacataaaagacccaacgaaaaagtttttttgtttgaaggcccattggttttggatccaaagtgacaacgctatgtagtccttccgaagttaatgggcccaaagtggcaaaacgtacaggcctgtttagaattggaataagttcacataccgttctttaactttacatcaagtctgtctaagttccctaatctccaataccagaaatcttcacccctaaactatataaaatagtccaatttcggcccgctgacgtggcatcctagtcagcaaaataaaaaataaaaaagttacagggcccacatgtaagtaagaaaggaaaaaaatatggggtatgcctatcttctttttctcttttcttttcctctcttctttttactttcctctcttctcttctcttcaccggcggctgagaggggagaggcggccggcaagcccggccgagctccaactcgagaggctccgccgccgcacccgacgacgacgacaacgcacacgcgagcggcaggcgagcatggcagccgccacacccgacgacgacgacgtacaagcgagcggcagccgccggccgaccaaccgcgtggtgaaattggcgaagcggagtggcctcttgagcgaaaggatctttgtctcgccgttggcgtacgagagctggtggtgctcgtcgtcgatggctgcggtagagtgcggcgacgagtcgccggagtcggccatggtggcgacatacggcggcggtggtccaaccgttgggcgcagaggcgtggagcatgcacaagagcggctcatacaggttcaacagcagccagccggcatcctctcctccccctccagtgggacggtctaggctggcggtggttagcggagaagctcgttggcgatggcctcctcgagccaatcctcggcagcgccaagcaagctcgtcgggcagaaatggtgctccccctcctcctccgcctgccacacccccgccgcttcctcctctcccatcggcgcgacgcgtggagagggtgggagagggagaggcggtcggcaagagatgggggaggggaaaggcagccgacgagccggtggccggctgctgctgctgtcgcgctcgcgcatagccggcgctgaggacgacaccctcgacctcctcctcgatgcatgccgtggaataaaactagaaaagagaagaaagaaaggctgccatatgggtcccacatttttttaaaaaaataaatttactgactatgatgccacgtcagcgaaaccaggtatatatagtgctatgtgatctaaattggactgttttgtatagtttaggggtgaagatttccagtattgggatttagggatgtcaaataaactcatcgtaaagttgagggacggcaggtgaacttattccttcataatataggtccccacgatggactggtcctaacgacatccacaatgtacgtagtataaaactagttcataagcaatacaatatattattggaataagttcatctaaagtcctttaacttgtcaacgaatccgattttcgtccttcaaccagaaaacaagatacaatgggttttcaaccatcaaaaccggtgcaaaataagtcccgcaaggcggtttggacggcggtttcagctgacatggcgtttatgtggctaatttgactcttcatctggcgtggcattgacatggcacatgaagcaaaatttaacaattgacattgacatggcatcatcctccgcgcagatccaccggtgacggcggcaacggatccgcacctatctagggtcttatttttggggatttttatttttatttttatttttatttttgtgtacggacaacataagagcccacacatgaaaatcggatttttatgtacgggtgcaccacccgcataaaaaaatagcgattttcgtatatacttttgggcagacaggcgggtcaaccgcacgcaaaaatagctttaatgctttttgtagtagtgatattttcatcttcgatcaggtgcataagtattttcaatctttgtgcatattacaaaataaacatcacgtgtagtacattattttaacgtaattggtaatcttcaattgacaaaaagtttgggatagatttttagcgaatccatgccacaattcaaactgccgtcattttcttccaactccagcgagatggtgggatagctcaaccaattataggttggggttggaagtaggacgttccctgagtttagaggaatggttgcgggaggcggtagctcagtggtgcgcattggaacgggtgggtggtgaggcgatagtggcagcaggtgatgggccggtgttaagagcaggggcatagtatagtgagtggtttgaaggctgggacgccgatgacgtttctccaatggtgggaggaaggaaagccagtgtggcagggggcaccttgctgatgcacgctggcttgaggaggaggaaaggagggaggtctggcgggccttgttggcaccgttgagggaatcgaaggattgatgggagttgaggctgtgagggttgcatgaatctcaaagtagattccatattctagaaaatgtaagagggtatggttttaaaaagataaagaaaacataagagggtgagatgaaactttttcagcatgtttggtaagagaaggaaagggttttttgggagttgggggagggattcgcttttggagtgagtttcatatttactcttcttgctttgtttagtcatagagatgagaatcatgggaaatatcccataaattgaattttatgtgatgatttatgggttggtatagttggccaaaaggcctgaggcccgatagcccaacccgattggtgttgggcacatgccggcatggcccgaccgttggaccatgtctgggcctctgcctcggcgcggtgggccagcccggcacaacacagtccaaagatcagggagctcaatagacgagggagccaaaatagaataattccagccatgtatggtggccgaaggagatgagggatgcaaaatagacttactccagccatataagagatggccgaaagaaatgagggaggtaaaatagactttttccaagaaggagcacaataggctttcatgcctttgggctagcccgtcatggcccacaagtcttattgggctgtgcctggccgttgatctagcaagtgggtggcccggcccgggtggcccgtttggccatttatagttagggatgataatgggttgaggcccatggtccctttcatagcccatctcaaccctttaatatttcgagcattagaactactaaatttcagttaaatcctttttttacgtagccctcatagttttttagaccaaaaatttggatcaattatcacccatatgtacagttcaaatttatctcgtcatacttataagagaaattcccttccaaatacgtggtcatatcccggtattgaaaaagtgagagtttacacttgaactctttgtcctagtctctcctaaaactctcacgtccaccaacgaaatactagacttaatggtctcaaactctcatttctccataacaattcccccaaacagacgcatgcaccggttctatataggtagccgatccttctgctttactgaggagtgaggagagtgataaacctggtcagtgtccagtggcctcgtccaccggactgcgcggacgcatggggtgcgtgcacgtgcggtgctcgcgtcggccgtcgcgccgcgcacgcacgcacgcacgcatgtgcccaccctgtctgtcccgatgtccgtggacatcaaccaaaccatatgcatatgcacgcgcctcccataaaacacaagctggcaacgatccatttccactactcctcgagatccccaactcctctccctcctcttttatactcgatcgatcgccactctacctccatcactgatctagctagctactagtacagtacacgcgtacgtacacctacaccttagctagctagcttagcttgtcgtagagactagagaggcaggatagaagctctcaagctcaagctctcatggagacgagctcgcggagcagcagcgggtgccagtcggggtggactctctacctcgaccactccaatggcggccaccggcagtattacgcgcgcaagaatcacgagctcgacgacgacgacgacgacgacgacatggtctccgacgcctcct

SEQ ID NO: 46099 - DNA, 1465 bp, Oryza sativa
ctgccacaccggccacgacgacgacgacgacggcgacgacgactccggtagcagcggcgtcggcggcggctacagcacttgtacggcccggtcgatgtcgtcgaagaggagggccatcgccggcgaacacagcgtcgtcgacgcggcggttgtagtcgtgctgcgccaccgcgagcacaactgcggcggcggcgacgacgatctcgacgacacggcgagctcgtcgtccgccgtgtcctccagcctgcagccaagctgtgctttctcggcgaggcacttgcagcaatggtcgtcgacggcggcggttcgaggcacgagcatatactgcaggccgccggcgccggctacgcaatgctacatcgcaactgactagaagaagcatagactagcctagatgacaagactttttttgtgtgtgtgtttgtgtttttctgtctatagaattttcagttgttagctctctagctgaatgcaagcagatggaggctctgtttagaatctaactttttttttctctagacttctaactttttcatcatatcgaatttttctgcacagatatcgttccaatttctttaaacttttaattttagcgtggaactaaacataatgcagcatggtaactttgattgatgcgaattttgactagatcgatgcatatattcatgtgttgcccactgtgtgtgccaatatatggtcatctaactctgaatatctcactcagcggcgaatatattatcctgttcaagtgttcatctctgaacattctgaagagaagaaggaaaatggatatctgaagaagttcgttagtttaagccagtctctattctcttctctgtttttgctcagcgtatcctagctacaagacaatgacggcgcctaaatgtactgtagagcatatgttctgtagtcaggtaggattcagcagtgcttgcgcgggagttgattttaaactctcgaatggacatcacttcattatttacatgttatttaaatagttatgaaaaataattaaaaaatgagaagatagatttatatgtgatatatcactccacaaacatgttaaaatttaacttctacaagtaaaaaagaaattcaacaatagcttgttaattagaaattcaacaatagcttgttaacatatattggaaaggaattttttcattgcaacatgtagatgctaaattttattgtatgtttgttgagtgatctatcacatactcactccgtccaaaaattataagcatttttgaactttgacacgtcttcgagatgctattttaaccaataatatctataagaagaaaatgttttaaataaagcgtattatgatagtttgtttaatgataaatctattaacatcaaatttgcattatttacattagtttgtttataatcagctgcaaccaaaatttaaatttcaaatattaattttagagttgattttgatgtctttcgtcgtagt

SEQ ID NO: 46100 - DNA, 1643 bp, Oryza sativa
aggtgcatgtactactagtgagtcccaattaataagtactttctccgctcctataaaaaaccaataagtattagatgtgacccattctggtaatacgaatttggatatatctctatctatatttattatagatagaatttattatattcagttatagatttctttgtttagtccacgagcgcgcaggtgcaaggatgcttcctccttttcctctcctcgtgcagggccagcaacagccatgcttgaccaggtcgtccatcgcacggcgcatgcacgcgcgcgccgtgggcgtgtgcatggcgccatgtgcgcggacatcggcaacagcgacgcccgcccgccggcgcgcggccgccgggctgcgacccacgcccatatgccacgcggctccctcccagtcccatgcagatgcacatgacaacgccacgcatacctcacgtggcaaattgggccggcatcacgtggcgagaccgaccgctcgcgcgcccgcgcatgcacgacccaacccgcgggcgggcgggcggccgcgctactattgctagctagctgcatcgatctctataagagaaggtacaataacagtttataaactagctataaccacatattaaaaaaaaaagagaagagagagaataaagtgggctataaatttatagccggctgcaacacgaactctaatacgttatgagtgtatgagaggtaggaccgggtataaataatgtagtatatttttatagataattattatattaatggactattagattagctatagataatttagagttaacggttggctatactattgaacttgctctaatatctggcttgtgcagcgcccgccgtatcgtacgtaacgtgatcgagcgagcaccgaacggcgtgcgggcaaacacatgcgcgcacgcggcccgcgccccgcgccgcgcgttgcgtgctacgtactccatccatcctaaaataactcgattcttaagcttatgtgtctaacatttaaccatccgtcttatttaaaaaaattataaaaaaattaaaaagataaatcatgtataaaatattattcttgttttattatctaacaacaataaaaatagtaatcataaaaaaaatttcatataagatggacagtcaaacgtagtacacggaaacttaggaattgagttttttttatggagtttaatggcctttatccccccgggtctgcagccacgcgcgcatgtacctgatcgggctctggttacaagcgcggatgagatgaggtcgaatccaaggaaatttagaggatgaagacggcagagccgcagagggatcgaggaggagaatggaactgtgcaagtgtcgtcgtcgtcgtcgcgggtcatatgcactgcccggacacgggcacaggcacgcggggacggacggagttcacattctctatcataacaatatactatcattataactatagttactgatgatgtgtttgagtaataagaggatagatcatgtattaattggtagctatactaatagcaataagaggatgatacccaacttttgtatatactaatgatgtctcatgctttgccgcgggattatgttagatattggagaaatgatgaaataatttacatcaaaacaaataaatgatgaagtactgt

SEQ ID NO: 46101 - DNA, 633 bp, Oryza sativa
ttcctctatccaataaaaatatggtcattacaatgcattatattgtatctctcaaaaaaaaacaaatttcgttccttcccctcaacaaaataaaaaatataaccatttcatccttaaaaagcatggatggaccttaacacatcccacctcatattgaaaccaaacataggcataagttcaattcactcttctccactttgtccatgtgctgtcttccgtaatttttaggcacatcttatccctacttggattggaccgaaatccaggttcccgacccatccacttgtgtgggctgtcctagttttaaataccagcccatacatgttaatggactggaattgaggcccacctgaacgaggagcagcccattacttgtataatctgtgccattcggcctcctcggcctattacccctaatggccctgataatcaatactcatggctataattaagcccatgtagaaacagttgttcgaccgagccataagtcggccacaaatcccttgatacgtacgggactaaagatcgcatatgttcgttgtagccaccaatcgaaactaaagatcatctttagtcccgatttttaatggatttgggattattatggatttcgtcaaaccccgggggatccac

SEQ ID NO: 46102 - DNA, 664 bp, Oryza sativa
cattcagtatatagcgaatgatatgtttgtgcccgtggattgaacaaaggaaacccgagcgcatgcataataactgcattttaagacataatacaacattatattagatgccggcgtaaagagttatttttaggagatgttacctgctataaatgctcctttaaataactgatcttatcaaataggacaaatagtgatgcatatgatgtaacaaacaactctcagatgcatactgagaaaatatcctgtctgacaccattttcctatgatgcatgaacatacagagaaaagggccatggatgcgggccatttattatcactacagatatataatggatgatgcactataaggcgatgaactctgactactgcattgttctctcatataagatgccaaaaaccacgatgctgtttcccgtaacgatcctgatattgtcaaatttctcatggtgatggctctttgcaatacagttgttcctatcaaaaggtaagtggcatcttcttcatgttacagtactgaactttgaaaatacctgctgtttagttgttccttataactttcctaatctccagcaatgatggtactataacataccaagcacaatcacaagacgaggaaactttggtcactgctgcatccaaactaaatatggcgctcgtgagt

SEQ ID NO: 46103 - DNA, 857 bp, Oryza sativa
tgcattacgttccccccaaatctcaccggacacaagcatcagtagagttcgcagaggggctcgtggagtattagggggttcagcaacaaggttccaccaaagttcgacggaggggcagtcattctatttactcaattggaggtcagtttgtgtctattgttggatttcggcccagattctcttagtgactctacatttggccagtaggtgcagggctgactcatccgttacacagcacagggggccttcgcttcgttcttgtccatggccatgcctctactcaatatcaaactccaccaccaccaaccactcaagcagcacttccatcaacaagttcatgaaaaacaggttcctcatcaccggagacgcacggtgaaactcatggccgacgtaccaaccacactacccgtccttctctttttctaatctaatctgtggaaaaaaatattaatggtcgaagctaaaacagtaacaagctcaaatataaagcaacggatggagtaaagacatataattaaatcactgtacaaacgtacaaatatcaattcaatgtttgattttgtcgctactaaaaacaaagaaatttcataacccaatttcaaatatatgtcagaggagctaaaccttcgaactagctagtagtaggtttctagttctggctgctccgcgcgcgcattgggcaccggccggctgcgccccgaatccccggcccgatagacggatctcagagaagacaaaggcctctggtttggtttggaccatcgcgagctaccgccacagcccttgtcctgcctaccgcttgctccgcgcacgttccctctctttcgatattagcaagaaaccatggggggatccac

SEQ ID NO: 46104 - DNA, 619 bp, Oryza sativa
tgcccaaacgatgcaaaagatgtcagactatgcacagtgtttagtacatgtcctccattggcatgcttcctttgctctgggacggttactgttgtgcttctattatccggctgcatttcttcactatttttgaattcaacatgtaaaagcctgtacaatttatgttacaagcacttttacaaatattggtacgagtacgtagtactggatgttaccagctatagagcttgattgagcaaactcacggagatagcaaggacaaagaatgtacttcctccattccacgatgcaagggcccctttgaatcgcaggattgagaaaacgtaggaatataaaaaacgtaggattttgatagaaatataagaccttatttagatgggactaaaacttttaagtccttatcacatcggatgtttagacgctaattataaacattaaacgtagactattaataaaacacatccataatcttagactaattcgcgagacaaatctattgagcctaattaatacatgattagcctatgtgatgctacagtaaacattctctaattatggattaattaggctttaaaaaattgtctccgcgaattaactttcatttatgtaattaattttg

SEQ ID NO: 46105 - DNA, 693 bp, Oryza sativa
gggcccagccagcccagtgaaggtggagtactctgctcatccccacaagccacagttctccctccaaaaaccaaaaaaaaaaagttggaaaatactgcttccttctactaccccagcaatacctacagccctggaacattggccatgccaaaaagttaggctttctttccattcattcattcattcatcagctagcaaagcaaagcattttctcagctcaagttgcttgctcctcttctttctttcttcctcctccccttccctttcaggactcctccccccacatcagtagctttcactgcccaaaccctctttgtgggtggcaaccctagattattaatgtcctcctcctcatcatcaccatctcctcctcttcttcctcccctgcttctctctccagattctcttctcatctggtcccttccttcccctgctttgcttgctcaggtaaaacctctcccctccttgcaagattctcccctttcttggcatgctccaagatttttctttcctcctacatcgccggcaagatcgcttctgttaatgtttccgcgccatttttttttgtttgcagctagctgatcgcacgtgggtagggtgagtgtgtgtgcgtgtgtggatgggagtccacgcaatgtcgtgccacggcggcggcggcggtggcggcgaaggggcactgtcggggctgcagga

SEQ ID NO: 46106 - DNA, 736 bp, Oryza sativa
tcctgcagccccgcttcaacttccacccgctgcatctctctctctcgctttgtcttcagctgcatataacgcgcgaagagggaggagacggtgaggccggcgaggaaggcggggaggccggcagcgacgcacgaagagggatgaggcagggccggcgagctcgctgttctgctccgcccggtgctgtgtggtgagaaaaacgagacggatgacgtcgcggagcttccgctcctccccgatgttgagtagccgcttcaacttccacccgctgcatctctctctctcgctttgtcttcagctgcatataacgcgcgaagagggaggagacggtgaggccggcgaggaaggcggggaggccggcagcgacgcacgaagagggatgaggcagggccggcgagctcgctgttctgctccgcccggtgctgtgtggtgagaagaaaggagaaatgataagagaggaagggagaggctagcgtgcagacgtggcatcctgacatgtggggctcacgtgggtcccacgctgacacagtcgccacgtcagataaaaccgggtcaaaaccactaagagattaagtttgcactggttttgtaagttgggggatacgttgtatcaggttttatggttgggggatgatcttggaactcgatgacaaattgagggaccttcagtgtacctttttccccacggcgcatacacggctctacgcggttgcttgcttgcaatatgctcgtgcag

SEQ ID NO: 46107 - DNA, 712 bp, Oryza sativa
caagaatgacatatcctttggattgggcaccgatgccacgcaaaaacctgtggtgccaaaaccggagttgggaaaacctccgagacctcctaagaagaaggtgactgataaggcggaggatcccgagatgcataaggaaaatccagtgccggaagtgccaccagagattgaagtgctggaggtgcccatggagattccagtgctggatgtccaaatggagattaaagtggctgaattagaggtgcaatttgtggcatcagtagggacagaaatagaagaagtaccaggattggaatggaacggtacagagtcagaaatatttgaaaacccttctcctacgaaagaccccgaggtgcaagacaccacggttcctgagaaggccactaccagttctgaggtgcctagagtgcttaggagccacgactccaagtccaaagatgagaacaaggagaagttcatagtaaccgtcttcagagggggtaaggaacgtgccaagctcagagatgatgacccccagaaggccgctgaactagccgggccaacatactatgttggtgtttggtgcatgtgagtatgagttctaattaattatatgaaaaatatgtacaatacgaatacatgtgattgttactaacaaacttcttctataggatgcaatacatggatgctaagaagaaaaaagaacctatcggcttcttggatcaggctactt

SEQ ID NO: 46108 - DNA, 1000 bp, Oryza sativa
  unsure (1)..(1000): unsure at all n locations
ttaatgtcatcggtggtgagccttcnccgttaattaatggcganagatgatcttattttcctatgggttatatttgattaggcatgaaccttatatattggtttggttcagctaaatgctatatgtatgtttgcttagccatgcttagaaacattagctaattaaaggggattaaatataaattatattatattattcttattaaataagggtatatttaatggtagctcacgatgataattaaaacctggttaaggtgggttgtgagcatatggttttgatggttgtgctcatggtaattaaggaccggttcgcgagctactgttgtgaaacatttaccgtgccaaccacaagccagcatgggcaacggctttaccttttgtatagcatggttcattatagtgtgccagactgtgaagcggcgagaagtccgtgggggtcgctggggagtccatttgcctctggttttgagggggagattatgatccaggaacggtgcactgttttgagttgtgttgtgcaaagagtattgtcacgatttccccctttgcaatgccgtggtggtatttcggggcatggcaacatgtgtggaatcgtgtcttgtgggtacagtggtacacctctggccagagtaaaactattcgaatagccgtgcccgcggttatgggcgagttgagcaatgtttttcgtgattagtctcacactactcatccatgttaataatgtgataattaatttgactcctggtttggaatgaataattcatggtttggaggtttgatctgtacgaccggggttggttgttcaggtttggttgggcctaagcagcatgggtgtgctgtttagtgttgattaaaattgatgattaactactctactgttttacttatcttaaatctttgctaaatgcggtagggcgagtgctgcaactcgtccgggtagcgctggtgaagagtgccgatatccatcacacgacgggcaatcaattcaaaggngctat

SEQ ID NO: 46109 - DNA, 548 bp, Oryza sativa
agtctagagttgaaaaaccacctagtgttacctaattaaaatagcgaagcatctacctaaaatcatgctagtggtaccatgagaagagtgtccactagttggggttttgtttaatctagggtgaacaaggtaataataacaataacaataataataaggtcataacaaaggtaaataggcatggctagataaaacagtgataacgcgggaatttaaataaagcgataatgcaataatttaaagcaacataattttataaactgggtgtcgcgtcccaaaacgactctaaaatacatcctcaaaattgtgcatagaataagtaaaatccatgtgaaagcctccaacaataaaaatgtgcaaagttaaaagtcgaataaggcttggaggatttttgtatatttcctaaaagcctaaaatgcgtaaataaattttagtggaattttcagagcacaaataataattaagaagaaataaacaaagttaaaaaggttttattaaaagaaaaaaaccctaaaaagtctttttcccccttccccctcttgggccgg

SEQ ID NO: 46110 - DNA, 522 bp, Oryza sativa
  unsure (1)..(522): unsure at all n locations
tccaaagggtatatatttggcaccgcccgggccgaccggattgtggaatcccctctgtcaatgcgacctgttgtgtgttaaatataaggcttnccgtgagacattaaccggngggtgcataatatggggatgaaaaactgtgcgcctgtatgaaccacccatatttggcaatgggcccggtgtttccctttttcggggagaaaaatggctgtttttctatcaccccccgagatatacatttaaaacacccccctttccccctgtggtttgtgagaaaattaaatataaagccctccaatgggggaataggaacccccccttctttagggggcctttaataaacgcgccggggtgttggtggtgttatcctcaccaagtggacccttttaaatttttgtacggcccctatatgccccgcttcttttttggtttttttttcctttctttttttttgtcaccagatgccggcgttttttcctgccaaagaatttaaaaataggggggcctccctcttatggttcc

SEQ ID NO: 46111 - DNA, 4366 bp, Oryza sativa
  unsure (1)..(4366): unsure at all n locations
ccccctgcaaagcgcgtcgaggggaaatgatcaaggttctaacccgcgcagggttccgggtttaacgcataaaaaaattttttttaaggctatggaagccnacgtgattcccaccatatatgaacttttattgggttttgtaaggggaaatacggtcaacctctcattggcaggaataaaagcaactaagtttgatggtatgtaaaactagattatcagataagttctttaaagtaaaattttgagattatgcacccccaatttttggttttggatatatagatttagttatgatcaattcttatttacatgagcattaggctttaatagtgcttaagctgggtccatccggtctatgtatacttccgtgcggcaaagccgcagttattttctagtgcaacctgattgaaggtggatgaatacaagtgtatgtgttttaattctcaatagcaaatccagcaagtggagtaataatacatgcatattgccatgtcggtatacgtgctaaattaatgcatcaattggctttactcctctctgctgatctggttcatctctaataggttctatcataataaacctaaagaaccaaaagctaagtacccagccacttttacttacctcctacccttcatagttcatcacagggatgatgtatcttgcaggcctgtctgccttcttcctcctcttactaatttccaaaaattttcttggttatatcggcatgggagttgtcaggatatacagatggaggtgaatgttacagcccaggacgaagtagaatgaacaacgaagaacagttaccacaatcagagcctatttgagacattcctgcacgaggttgtttcttggaggaagagggaagagacttcgtggccatctccatctcgaggatgtttgaaatctttctgaacatgaacaaagcattcctttcactcttgaataaatttatcttgctttgtgtatagtgtatagatcgaccctgtcaggccatttttgagatggcacacccttgaaatatggtcatgaccaccaagatccatgttcactgctcgagctgctgctggatttacgacttattactctactcaccgataacttcaagattttactggacacgtgcaaagctgtcagccaagattttgcaacaattgagaactctctattgagtgttaactaatttacgataagaccttggacaaaggatcgtagcaattgaaaccacaaggataacgttgtgcattggttagaggttacatatataagtacgtcactcacaaaaataaggacaaaataattcgaaagaattcatcgtacctaagagaccacagtaccttccatgaatacaaaaactggtaggagggatacaatacggggtgaacgttatctcttccagatctgtttcccccatcgattccattttctccccgatcgagcagctagtcgctttgtcctactcgttctccattcgtcaactcctttggcccagtcaccatactcctccttcctccctcgaccctagaccatcatccccaacatcgatgacatcaccttaacctctttctcttctacagtggatctatggtatgagagagagtgggtatcattacttgatcatgtatggagccatcaacataaggaataaaggagatatgttttagttttaatgaggtagtggttaatgtataaaataagcctaacgttagcagaaatcctactgtatctaatggctaatatttgaatgaagaacaatccaatggctacgcttttgatgatgtggctacacgtaattgtagataatggcaacatatcctatgcacacagaccctcacgtgtacacacgtgcacaccaactaaaaaatgtcaccaaaaaatctagaaaaaatcatacatatactttcaattgtattacacctagggttaaaatcttaacgtcaaattcattatattttagctgtaacaaaaaaacaaaaaatctgatagttttaaggttgcaattttgtcagaattttatctttttttgttattctctatgtagaatgaatttgaagatgcgactttgcacgtagatgtaatactattgaaagtacatgtatgaattttcctagaattttttgtgataatttttagttggtgtacacggtgtgtacacgcgagggcctgtgtgcataggatacgctcccgtagtgtggctaactatataggaatagtagataactctgaaagtccaaagaaaaactcaagagtagatacaaagatgaatatcttatattggtgcctatattgtagagaggcgtcactctttatagcgttacatacatgttgctcacttgtgtataggaccatgtatcacatctctttactcctcccaacctcctatcttctctgctcctatttacacacccctgtttttaaccctcaaactttcactactccctctttatagttcacatgccctcccctcttttctccctcacttccctgtttaaaggttcagtgattcttagtcactatcaaccaatttcatattagggtgaccgatacatatatcaccaccacatgtgaaacacaaggtcgattacacaatttggcaagtctttgctgccgtcagttcattcattggactaaatcttaattgttaactataactagcctatctgccttctttctccactttcctccaattttctagggcatagctcatcagccaagcactgctggttcgatcggcttgggagttgtcaggagatgcagattatgaataacaacagagcacaggatgaaataaaacaaacaatgatgtggtttatttgctttgtttgggatgctactcgaacaacgaagcatggcgaacacgatctgagcctaccggggacacaatcgcacgaaagttgtctctgcaagcaagacaggttgcaaggctcattgtttggtttatctagctttgaccaagcctcataggtggttaccgcacctgctgtgtaagcggtgtatttttgccgtcgcaggagagcctcagtgatcaaccttttcctggttgttatgggttagattgccatcaaaagcaaggatttttatcgtctaccaaacaccataggattatccttgctcagatccaaacgcaccctacctagccatcattccttagccaggcaatattccttcaggcaatggattgttctgagtacataactttattttgcttgatgtatatactttgccaggcaatatttttttgagatattgcacaaagcataagacccaccaacatccatgttctttgcttcaagctgctgctggattaattgtgtgttcgtatcagacacgcggtgtgctgtgtgaaccagcaagcacatgcgcccaagcagcaacagaactcactgatgatgaaattgcaaacgaattatttaaataaaattttgaatgtgaacaacaaatttgagggaaattgaaaaggtgaggggaacagctcaacagcatgctgcctctgccgctgctgttgacgtcgctgcacacctgcacctacaccgtcgcaggagcgttgctgctatcaacttcgccggaggggcgcttttgcgtaccggccgtccattatagaaaatggataattagtatttttctgaaggaagggaaattagtacattacttatttgataaatgtatttggggaaagtgaaaatatttttttgttagaacaataaatcatacttcctccacttcatattacaagtcgttttgatttttttttctaatcaaatttctttaagtttgaccaaatttataaaaaaatatagtagtattttcaacataaaaccagcatattatcaatatattcaagactagagttaatgaaactaatttagtattttttttatgttgctgaacttttcacaaattttatcaaacttgataaagtttgactgaaaaaaaaaataaaaccacttatacagtataaaattaagggagtaaaataatcgatggctagagggagtaaaataattgtatgctgactcttaccttctccctagagcgataagatggagcactctaaaatgactcgacgatataacttgggacaaaggattgtaacaattgaaaacattcctttaaagaaagaggagtgtgtttggacctgagcacctggctcaactaaaccacaaggataacattgagaatcgattatgaggttacagagataaaacgcatcactagcgtataaaaactaagaagtcactattcattcataatctatgacaaagtaaaagaccatacactacgggcctattcggattacagggtaggaaaaaatgcaggaaaaatgcaggataggaaaaccgtangaatatgaaaggaaatcacgtagaaa

SEQ ID NO: 46112 - DNA, 1741 bp, Oryza sativa
  unsure (1)..(1741): unsure at all n locations
tgctgtgncccttttgttcactgtcgtagnccctggccacgaccgcggccctccgcggcccaggtcatcgtcgtcgcgagcctccgtgaccgccgccctccgtgactgccgccgtcctccgcgccccatgtctcatcatcacgagcctccagccctccaccgccgctgctgccgggataggatttggcatgggagaagaaaggaggaggaggaggaagagagacttacttgtgggacccaatgttaaattggagaatgtgaatggagagactgttggactaaaaggtaaatttggctctcaaattttttagatgactggccaaatgctcatttagagagctcaaaatagccaatctgttggagatgctcttacacctgatccagactagcaacctcatcttttcaattatacttatacttatcagccaaaatttatattttcaattttaaattcagagttgattttgggttttttctcaacgtcgtttatttttcagcttttgcttttaaatcgtaaagaacatgtatataaaagttttattcacaaattatgtttcatttgtaaggtccccatcaagccaaaacggcttattaggaaataaaaataaatttgtacataaaacttttataaatgtgttcttggtgacttaaaaaccaatattgaaaaagaaattactacgttgaaaatatctcaaaattaagcttgaaaattcaaattttggttttttctttggctgattaggccaaccgatgagagcctaaatatatagtttcattttttttctccaatatactaaacgatggggctgtatataccgctaatattgcatacatgccaaaggcctgtgtttactcctcccttctctggctcatcttttaactgtcgctcccatcgttttaaacctgaaccagctgatacctacgaacatacgcagccaattcacttgcctcttcctcatcttcttcgatcgtcatcctgttcgttctttgggtagagctggtcagcaaaaaaaccttttggtctcgatcggcatgagaggtgtcaggactcaggagatacagatgcagaagaatgtcgaagcttagtagtacatagaataaacagggctactggaaaatggaagtacgactaccactgcccgagcatgagacacgaatgcacctggaaatgttgctgtagcagcagcacacacaacaaagtttcatagccatgatgtgtgcgtctattgtttacaccactcatggatgtctatcggctcgtcagaaaaatccctttcgccatcttaccccttgttagtttccaactttttctttaaacttttcactattccatcacattaaaacttttctacacacaataaacttncagcttttttctttaaaacttttaattttggcatgaaaactaaacacaccccttattcttacgaactactactatgtaggattccaccccatgttttctctagctacaattgcangnagaaaatttttgaagcaagcaacaatcgttgcacaaccttctgttttgggacgagtccggctaaattcttgtaggaatgatcacttgtaatttcagaagtcagtcaatatagctacgtttggaccttgcggtcaggaaacacccagatgaacacagcacttgaataagtacagccattaaccttcaacaattatcatagggtgacctaattgggaaccaacgtttcattttagtgcactggggcaaaacagcccacta

SEQ ID NO: 46113 - DNA, 1031 bp, Oryza sativa
  unsure (1)..(1031): unsure at all n locations
ccctttcaaaattttaaaaaagctgtggataggctctcacagtctataatacacaaggccttaagcccacaatttcccgtgcaaggaattgcacttagaaaggcccaaatccaaaaccgggcatcttcttatccgacctaactttagtataattacccttaaggcccattttagagagttgcaacgggatcctacataaatacccacccggattaaccctttttatcctctcgggctgaatttggccccaaaatagccccacacnttggcccatccggtgtaccaaaaaatttcctcttaaaagtgagaattgtaaaggggttcaaaatttttaaagggattggttaaagcattaaaatttttgagaagaaaatgcaaacttataagtctgctgaaaagctttccggtgacagttttgaaggacatgtcactatccctattccattttattcttctgtagtacaagatatttgactgaccttgagatctgcaagaaaccaaatacagaaacatatcaaataaataatgtttttacctgttaaatcaaggtcaggaagcacccattatgcatttgaatcaatgatgaaaaaacatagcaagatgtattgttaaacttacccttcaccatcacgcatcctagacctaaatcgaggttctcgttgggatgcttgactaccaccccttgatcgcgccattctcttgcgttggacacttccaagggcttccttatccttctctatatctcatatagtatgccatgttttttttgagaaaattcgatccatagcacagaaaaaaaaatgcagtaccaaaaaatagcacaagaagtttccgctttcgattcatagcacagaccaccggtttttcttcgtcccgtagcacttccgtcgcattttgaagtaacggtgttagattggagtggagaaatttttcatcggactcatttgcccttcgtctcatctccaacgacggccgctcaacacaaccgtccgcctcttcatatccatcacacgacggcactcatnaacata

SEQ ID NO: 46114 - DNA, 737 bp, Oryza sativa
cccattagaacactataactaacggccaaactaatggtcaactaacggaatgggtatgtaagggatccaaataaaaactcaggggtatataagagatcaaacaaatttcaggggcgtagaagggattgggtgaaattacatgggcatatagggaattgccccttattattttaggaccgaggatcggatatactactatttatttatttatttattgtttctgataaagccgaacttaaaacttttggtacgagcatgaagtctgtttaaaagatatatttaggttgcgacttagtacctccatttcaaaatttaaatcttattttacaatataggtatttctatcaccatctacactacttattatatcatttacttttcattcaaatttcttctcatactacccccaatcatctttttacttaaccctctcaggctctcacatttattgatgaggcatcaaagtcttttcttctcaactttaatatctaatactaaataacatagaaatgcttatattttaaaacagagaaaatataagtcgtgagtcagatgtagcttaaaaaacagttctgaataagcttatgcttgataggttgatcaactacaattggtaacatgtaaaacataaatgaagcaacaaaacataatttacataaaaaaacttgtatatctgtgtttgttagtgggttaatagcctatgtaaaaaatagtctacgattaaaaaccatgaaacc

SEQ ID NO: 46115 - DNA, 1749 bp, Oryza sativa
  unsure (1)..(1749): unsure at all n locations
ataagaagcactaactatataaagatatgatgatctcttatacaaacgagctaaataagcaacctgcgacttattaagactacgagtttaaatcactacgagcaaacctcattacgagccatctgagccatgaatttctagctttttttccacctctataagttgtcgcgtcaacctagtgctctacaagatctaccggttgcctcttgtggctcacttagagccatcacatcagaatacttgcacatccagtgtctcccgccggaagctgaaaggtgatcgaggaggatctcaagtcttgatatattcaagcttggctagctaaagaaaaagcccccaaaaagtacaaaacaagtaaagaaaatatacacaaatatatgcaaatatctattcaaaagttagccattgaggaagtgggacaagtcgttgcttgcggatgaggagtggagtatgtggtatccttgtaccaagtgaggacacgtacgccatacgccgaaccagaggggggcgacggcatcggcaacgtgatgctcgccgtgactagtactacgaattcaccaccgacgagctctgctttctggcattgtgatcagtgtccatcagacgaccatgtctctgtttacctctggtttttggtttcatggccagggcactttgctctcatagatgggatgatttcggttgaattagtacttgcatgaaaagaagaacatgtagggctcattcggattgcaggctttttacggaaatttcatgggaatactgttcacttggatatttttcatatcctatcattcggatggtaaaaagtggttgtgggaaaactatagggaaaaaatcctttgctgccgattccacaggaaaaatggaggaaaattccatccactccaagctcttgttctctccctatcctgtaaaccgaatgctcttagcttctacattcctgtgtttttcaatcctctattttctacgtgatttcctttcatattcctacggttttcctatcctgcatttttcctgcattttttcctaccctgtaatccgaataggcccgtagtgtatggtcttttactttgtcatagattatgaatgaatagtgacttcttagtttttatacgctagtgatgcgttttatctctgtaacctcataatcgattctcaatgttatccttgtggtttagttgagccaggtgctcaggtcacaacacactcctctttctttaaaggaatgttttcaattgttacaatcctttgtcccaagttatatcgtcgagtcattttagagtgctccatcttatcgctctagggagaaggtaagagtcagcatacaattattttactccctctagccatcgattattttactcccttaattttatactgtataagtggttttattttttttttcagtcaaactttatcaagtttgataaaatttgtgaaaagttcagcaacataaaaaaaatactaaattagtttcattaactctagtcttgaatatattgataatatgctggttttatgttgaaaataggaaaaaaaatttttatcctttgggtcggatttaaggaattttgattagaaaaaataatcaaancgncttgtaatatgtagtgngngttccattcaggtggtcatggtggnnnnnnnnnnnnnnngnngggttgggtaagggaanccaaggcgaaaagacaccnanncannnannancggacgggngcggtagaganangggtatggttagaggtt

SEQ ID NO: 46116 - DNA, 1991 bp, Oryza sativa
  unsure (1)..(1991): unsure at all n locations
aagaagctgcctttaaaaagccaaaatgggcgcttttaaactcccggaaagattggacagttttggggtgaatataccccttttgggtctaacttcctggggacatttgttccggggttccagggttaattggggctttttcttccccagtaaatggcttatttttaagggaaaagctttaccaaaaacttaccaaaggctgttagataaagtgtgcagcattgcatcgcatgctttccggaaagcgtcagcttgaataaccaacatgctgagatcttgctactgcttagcattagcttgaataagcaatgcatgttataatgatctaatggcagacatgcttggcttcatgcattgaacaggtatgctttgaatgtgaatgtcgagcgggttaataatgttctattgcacaagaggttgcttgaccaggcccgtgaaccaatgaatgggctggtcttcgatgttcgtcgttcgcaggtgattaatgcataacatgacctgtctacctcttttctgaaaccgactaggcatcgcttgatgaccgtcgcatgctcgtatattggctagtgtctaggataagacctcaacattttcataaccaagtgctgttagacaccacagtaccatgtgacgtgttgtgtaatacgatgtaccttttgtgccatccttacaataatcagttaatcactatcctgtagaagtgtaaatcacatatccttgattttgaaactgcatttgttaactgctggttatttttattttatgtacaacagctgcttttgcttttctaaagcttgtctcactgtttcaatttgttctgttggaaagttactgagctataactttgttcctgcaagtcagagtaatagaaaaggacgatgattactatttttttctcctcctttttgtgcatttatctctttaatattttcatacgccataaatttgttacagtttgacttaacacatatatagagattattatcggattataatatgagaagcacaaacttatgaactgattaatgggatctactagcctatgtgttttgttgaacatagtttgatatctcattagaacatatttcatatcaactacgtgaatgtgcaccttttaggctgctactctggatggaagcactgaagttgagcaatcaacttcctttaagcatgaagtacaagatcctcagtgctcatcgttcacatcgagagaccaaaggtgattttgattccagcattttttgtcattgagttgagttacaaattgttttggatagcatcacatcagtacagattagagatggcaatggtgaattcaccgtcgggggtcaccgctgcgtccccatcaccgcggtgaaaaaatttcaccgtccccgcccccgtcaaccacgacgggggtacattttctccagccccgatcaccacgcggtgattttttccctgtggtgaccccgtatcaattagggattagggatcgtagcatgagctgaccttgcatcgtcactgtcgtagcttaccggggggcggaggccgaagccatggtcggccgtcggcggatggcgtgctggcggtggacgacgtgcgggcgagtgacgacggaaggcgctggcggacgtcgatggcgatggcggctcccggtgactacggctgcaggcgccgtgcctgactgcgcgtggacggaggctcccggcggctgccggcggcgcgtggacggaggctcccggcggtgcatcgacgggtgcccgcgccacgcgagagaaggcagcgagcggcggtgcgcctggctctcggcggattgacggtgcatggtggcacgcctgactcccgagcttcccggcggactagcggacggcggtggtgggctggtggctgcgtgcggatctggaggatttggtattttgggtggagaatttgaagttgactggnnnanntnnngnaaaagaaagagcccatttctccaggcaatccatcacacgaagggccgctcaaat

SEQ ID NO: 46117 - DNA, 3828 bp, Oryza sativa
  unsure (1)..(3828): unsure at all n locations
ggtttatatgaaagaatttacctgtagtcattagtattatttatagatgatgtatcttatgctaaagttttctaaaagggaattagtaaatattttttggaaaaaaaaactttcaaatacgactattttatagttatggtgtaattatattgtaactacattataattttaataaaaaaactaaaagttacttaaaatttatattgaagttatatgtgttttcaatatttaaatataagttataaaagttatagtatatagttacactatatttaaagttatatttaaaagtttttgaaaaaaacttgtggcagtttttcttaagatagtctcatttagagattctctgtaagttggctggtgcaaaaatgcaaattcttctatattagtatcacttgccactgtacgagcccattatcaattatatgctgaatatatttgactataataatacctttgacttgcttgcccgtattctttttcctagtcggtaggtttaacaactactccctctatttagaagggttagacatatttcatattttagtttttctaaataagttgtttttatttgtagtctcaatacatcaaaaatttaaatggagaggtaaattaaatatttgatcaaaacccaattagccattttaatactcattggttgtatgtatgcattttgatctttgctacatgtaacatgagttaatttcttcttagtcttggtaacaaagaaatatgtgtaacttttatggaataaatgagtatttcaatgacttatgcatattgattacgggggtgtttagatctaggggtgtaaagttttggcgtgtcacatcaggtattatatagggtgtcacatggggtattcgggcacaaattaaaaaactaattgtagaatcagtcagtaaagagcgagatgaatttattaagcctaattaatccatcattagcaaatgtttacttagtaccatattgtcaaatcatggagcaattaggcttaaaagatttgtcttgcaaattagtcgtaatctgtacaattaattattttttagtctatatttaatactttatataggtgttcaaacgttcgatatgacatggtgaaaaatttaaaggtgagatctaaatagagcctactataaagttcacaatgaagttaggatcaggagcatatccaacgcaagcgccggggactcgaggacacccctcgagatgcatggcccgcctcttaacccttcattcttctcatcatggatgagatcttgggggtgctgaaactccttcaaatatgaattattcctcatttttctttatccacagaacatatagaaatagaggtattctcttcgttgtcccaaaagaacgcagcctaaaatagaatgatatataatctattccctttgttccatgttataagtcgtttgatttttttcctagtcaaacttctttaagcttgaccaagctcatagaaaaatatagtaatatttttaacacaaaacaaacatattatcaaaatatttaatgaaactaatttgatattttagatgttgctaaatttttctataaacttaatcgaacttaacaaagtttggctaggaaaaaaagtcaaacgaattataatatgaaatggacggaatagtacaataaagctgaatatgtttacgtcttggaattttttggacgcagagagtacactatatagctaggcagtgtgtccaggttcacgctgaacctggctggaaaggtattaggatattgcagcattggaaacctttgtccagcagctggacaaactatcctatccacttgaacataatgcaacactttcctagtttgagagaggaaaacaatgagttgaaacttgaaagaacagtgtggcagcaaagctcgcacgttcctcggctgaaattaatattggttcgtcagtcgtcacatagtacattatttggtggggccaggtgtattttaagtgggcccacatgcttgtgtggttggatacttggatccatattccaaattacacctcaccataaactcttttgacaaatttgaatgaagttagggccagtgctccttggtttacaaatataagcattctaggttgtttggtagatgttttaagtgaaggtagaaagactttgatgtctcttattaaatgagggatggtttgatatacgagaatggtcgagatgaaaaaatcagaataaaagatgattgttaaagtaatactttagtaattcttatatttgtggatgaattctgaatgtttgaacatttatatttgtggatagagggaggatgatttagtcagaagaggatatatgatatgaaatgtcggaccatgcatgtaatagaaatatgttcgttgcatcgttgtcattcttcttcttcattaaaaaaagatggacttttggcctaataaaattgatcttgtgggattgggatctgatcagttggaataaataaatttcgattggatagtggactacttttccccattttgttgcacctctttatatgctcgggcttcgatagtatctccatccatttcttcttatctttctgaccaaccacttcacaccctagctaattgtgtattcttagtataaaaagaagggaaaaattctaaataccctttacaactcaatgctatttttattttttttcctctacgtacaactcaatttcatacactaacctccttaaagtcaatttctcttctaacttcccctcaacatctcatttttatctattccatttagttatttcaatttcttgtgttccatgggcctctagcatcatgggataataggaactcataccatctcgagaggctgggatcatataaactacagctgatgtacaactcaacaagtttaccatcgtgttttgctatcatcgatctcgcttatgcgggatttgggaaagcaacaagctggaacatgaggaaggaggttgccaaagacaccacgccaaaggcatatgatgcacgaagaattgaaataataaacttaaacaataaggaggaatcgataaaaataggatgtggagggaagttaaaagagaaattgacttaatgggtttgtgtatgaaaatgagttctagaaacacaagtgatttgtagagggtatatggaattttccataaaaagaaggatttaaattatcccatatattctctcaagaaattatcccatccaaataatggaatgattcattctacactatccaagttattggttaattagtactcgctctatttcatattataagtcatttgactttttaattcctagtcaagctttgttaaatttgaccaaatttatagaaaaaaatagcaacatttaaaatatcaaattagtttcaccaaatccaaaattgcacacattctgataacatgtttgttttatgttgaaaatactactatatttttctataaacttgatcaaacttaaagaagtttgactaggaaaaaagtcaaacaacttttaatataaaacggagggagtattaactattccatccaatcatatttatgttagtatttatataaacttttcaagcagtaaccattaaatatctaagtctggaggaagggctggtccaattacacatgttcgagtcgtttgttaatttgtaaatttcaccagtccgtctcatcaccctacattccagcaaaaatgattttcaaaatgcccaaaatggtcaaaatgtcaaagcgacggtgagcacgtgtttcatagtggcattttaaagaaacatgtttttgggatggcattccagcaaaccgcgcgttttgaacatggccaaagacgtcaacaanngaacatca

SEQ ID NO: 46118 - DNA, 1057 bp, Oryza sativa
  unsure (1)..(1057): unsure at all n locations
tattgnnnnnttttgaaccccttcgtgtgacggatagtcccgattttccaatcgggactacgaatctgggactcccggttcaaataaccgggactaaagattgatctttagtcccggtactaaagatgctcctgttggtgttaccaaccgggactaaagataatttttctttttttttctgtttttaatattgaatattgatttcacaccctcccctcccaaatccaaatcatcacatatcacagaacatctccaaatcctcaaatagatcatctccaaatacatcacaaactctttaaaaaaatagatcatctccaaatacatcacaaactctttaaaaaaatagatcatctccaaatacatcacaaactcttaaaaaaattacatcacatagttctaaaaaattcatcacagattcacatctcagacaaaaataaatcacagattcacatctaaaaaaaaatcggccggcggtcactgccgtcttcccttcttccctccgcgccggccgccgtcgcgtgggcccccgagccgccgtgcaagccgccctcgcgcggaccccatcgccgtcgttacaaccaaccatcacagtctacgggcaggtctttcttcgagtggtcccccccgccgccgtctattggccgacccccgagcctccttcgcctcgcctgtcgcctgctcccttttttgggaaaaaaggaaggataccaatgctcttttgcggtgaagggaaaaaacttgaagcattacgtggcaaaggccttggacgtttcgcatttaagtccttacatatcgcatctttcaacaggaatatcccgtgcctaaaacaccctatttttattctccccctggggtgttttaacccgcgacctaaataatcttaggggccttgtaaatggtcctcaccatgggattaaaacccgcgttctcaaaaattatttctttatctcccccttgtgttggcattctattgtccggcttattaattatctcaacccgggatcttaaaaagaacttttattgttgcggttttgtagcactccccacctctccctct

SEQ ID NO: 46119 - DNA, 637 bp, Oryza sativa
ccgcgcattgattgccgtcagtgtgatggatgtacgatcgcgtctccaacgccagcgttgatgctatgatgctaatgttcttttgttttactttctcaagattgttttttccctggatagcatgctccaagattgagtaccatatgatagctttgaactacttgtctagctatctgcacaaccaactagcgacctcggtgattaagtaccctccataagccatcgaggtggcgttggccgagacccttggccctaatgctggcaacatggccagatgctcggatgacaacgcgtgatgaccacctgttgaacatagtgagggccttggtggagacactatggtggacatatcgtagtgttatctgcatgtcgatagccaagctcacaccacggcacaacagccacagccacaagcggaggggtcggtcccttgaaagagtgtttttgttggatgtgtggaattgggtgtgtttaggagcatggacggcgtaggagccttcgaggctcgagggagcccttgtgtcaactgcttcccagctaccatgcaccgagcaccgatggccggtctcaccggaaattaccacccagcatggctcaaacatgaacaaacctagatacataatccaacatataacag

SEQ ID NO: 46120 - DNA, 1235 bp, Oryza sativa
  unsure (1)..(1235): unsure at all n locations
taaactgtttctttttaatactcaaaaaatatactccgaatgggcgagggggggcacaccaacccaataaaaaggtgcttagtgaaaaaagagtgttctccacacaaattcccggtggcagttgtaagttgtatattattccaacaagaaggggggggggaatttccacattttcccaccccaataaaggtgcggcactttccggtcttaaagggaaaatatttttggtggggggattaagcgggcccaaaaatgccaccccctaaatgacttctttgtgttgggacccccttgtgtcaaaccttttatacgaatcgagagcctgcttgtatttgcgttacttaatgataaggaagatccaattatatgaccgtttaaaagaagagttcttcttgaatcctttatataaataagaccctttgaacaattattgttctagcggacagagaaaagagggtacttagnaaaaagttatttaaagtaggtggccaggttcnaaaaggtgaaagggtaaaaatagtaattatttttatttaaattatttttcggtaaatgccaaaaagcggggaacctcgttttccatgatctccatgcggaatggcgcggaagaagttgttcttataagggccggcgtcaattaatttgagatctccggtgatcgatttgtcaatctatctgcaggattgaattgttcgcttgatcgcttcatcactagttggtcagtgggtgtcgtttttctttcgtatcctgtagctgtgatctcggctgcctgacagcctgaggcccttgtgcttctgaaacttctgattaatttgatgatccgaacctgagatgagattgactgccttgctgttagttcgatcattcaagatgttcgatcgattttgattgtctcatcaatgtgcatgatcgacctgctcgagtacccattaccctttgccttcatggtgaatggatttgtgcagtgtaaaaaattttgttcctaaattaccctttgaagattaacggtggataacaatttattaaggaggtacctcaggtaccttccaagcactgtaaaagacctcgtaaaagaatattttcatgtttttgttttatgtgaaaaatatttgttgttttttttctataatcaagaacaaagctgaagaagtttaaattagaaaagtctaatacaacttatgatatgaaacgaaatatagtagtgtccagtcgggtctaatattgcttcatgctcc

SEQ ID NO: 46121 - DNA, 1111 bp, Oryza sativa
acgactgagacacgattaaagtttcgaaggtttgtttccagaacgttaagaggagaggtcttatgaaccttcttttcgagaacgaaaccacgtatgtctaacaaatggcataccaaaaagggaaaagaaaaaaggtaggaagagtggctttttctgatggtacaaaaagtccaaatcgattcaagtgcctgtttcaaatttcaaattcaaatgctgcgtttgttcattcgtgaggtccatgctccacctgtttgtaatcttgtttaggaataagttgtcgtcccttaacttggtttgattgacatttctaatttcaaatatcagaaatcttcaactctaaactatacaaaatcgtacaattagagtcccatggtagtatagaccccatttcctcctatttttgtttacgtggcagatatctgagcccacatgtcaacatgctgagtcacccatgccgtttcaacgtgctctcgttggctgtttggcaggatgtcctcctacgcctgcagcgcgtccactgacatcgattgatagagacaccgacgctgtgatgatggtgtgcatgaactgcatctccctcagctcatcaaggtcaaatcaaatcattcacgtcgtaacgagcgggctagagccggattgcaccattcacgctgtaacgagagggctagtgctgggccgtcactctacctctagggccatcaccactacgctcaaggccatgccgccacatgcatccaagccgcctaagccggcgtgccattgttgcgccttgagggcaggccactgctacgcgttgggcccgcccagacgcgactgtgcctcaatgctatccgattctacgtgtcggggccaaccaaccgatgcgctgttgctccatctaaaggctgcaccgtggctcgaccatgaggctggggctgcccagccaccactccggcttgagatggcgaacttggcgctagcggtggagtcatcatcaacctctatgcaaacgctgctgccgtcaggagctagcaaacaggcaacgagagagctcactccgttgacacggcattggtgataacatgcaccgtgtggggcgacaaacactttgccctcttcccgattataaaaa

SEQ ID NO: 46122 - DNA, 2405 bp, Oryza sativa
  unsure (1)..(2405): unsure at all n locations
tggacggatgaggggggacggggagagaagaagaggacgagaaagggaggtatgtgtataaccagagaaaatgaccggaaaagtactaaataaaggggaaggagatcaccgaaggttataggantaaaaagattgngagaaaaaaaagagagtgtatattttgatacggaaaaagagatatanaaaattataaatggcgggcaacaagcaaggaaaaaaaaaagaggggtcgggaggaaggggggtcatatttttattttgataaaaaaaaaagagagggaatttagggcccaaaaaaaaattgtttttgggagaaggtgacattggacaaaggtggtaaaaaaaaaatttcgagaagagaaaaggggagaactttcccgagatttgaggggaccactataaaaaaggggggcaatgaaagagatacaaaacaattagaggggagaggtggaggagaaacacaatttggggccgaaggtaagtatggatttcaaggagaaaaaagaagggaaaaattttaaaaaccctttaaaactaaaggggttttttattttttttcctcgaagggcaaattaaatttgatacgcaagctcgtctaaatcaaattttttaagtaattatcaattcatattccatcatttaattcattgttaaatatatttttatgtaggcatataattttatatatttcacaaaagtttttgaataagacgaacggtcaaacatgtgctaaaaagtcancggtgtcaaacatttcgaaacggagggagtagcaaatatgtttgcgctacaaacacgctgctacatgtaaagcatcatctcatctcagactacagtttatcatacatcgcatattcaaaaccaaaaccagtttatcacactgtacttaataaatcatagttggcttcttgacctcaaagaacaaatattgtgagcattaagcatttagagttgctaatcggtgagcatgatgagcctgcttcaaattactcgcattgaagttcatgtgatcttgctttcggtgagcataaaagcacttcacaaataaaatgtagtgtttttttgccttggaagtattgtagaatacagttgtcttcagatttcaattcatcaacctctaaaaagatttcatttgttgctttgattacattctttgcatgactaatgacacaggaatagcctaccaagcaatatctttacaagaaactggattcaagaaccttgcatgcaaccataaaggtttatatattctgctgcaaactctaaggtatcattcatttatgcaagatacaagcaaccaacttcatctatttggatccaaaacaagtgcctagactatcaaccatattaatagtatcatgatgctgcgatcactagctgtctaactcattactgcaatgtgtgatgtgttatcaataaaatagaaagatccattatgatcaaagtattcaaagaaataaagctgatgccaagaacacaagaaaagaaagaaattttgcaaaggaaaggaatagggaacacagaagaatctgtccacaaaaagaggtacactagagggagaagtgcacacccttttgctgaaaacttcttgtgtaaaatcttgaagaaagtttaatagctcatgctcccttcataaatcaataggggtctatttgactgagtaagaattaaggagcttacgaaattgagaaagtaggagagtttggaactaaaaatgcattttagtaactgttttggaaaagaagagagtggatgctttgtatgggtggactatgcaagttaccatcaataggagcatgataggaaaaggacctttaaatttgcatgcaagccttatatatttatcaacaatccatcttaaaattatatggattacatatctagatacttatactctaattgtatctttcatgaaataatcagagggactgaatatgacatgtttgtgtggaattgcaccactgcggatagccagagagtccaacacaaacaaataatgccccaaaaatgatcatagacaagtcaacatccatgtagcattatcatgtaaaagtataaaacaagattaagcaaagattccagtgctcaccacaagctaacaaatctatccacaacatcagcagaagcatctttgtaaatttctatagtaattgagcctttggcagtatcaataacctggaggaagaaaattacaatagcattatgttcagtgaatgcttaagattgttgcattaaatattttatgtctactcagtaaggtcatatgcacaaattcccataaaaaaaggttatatgcatcagatttaatttcctatatttacaggcaatagcatacaatctacttctcttactaaaaaaatgcttgactgctaataattagcatccaaacatcataagttcatacg

SEQ ID NO: 46123 - DNA, 1331 bp, Oryza sativa
  unsure (1)..(1331): unsure at all n locations
ccaaccgggactaaagagagggtagcggcagtcccattagatctttttttttcattgttttttagctagagtttaatccctatattttctcccaaatcaagtgggatacatatcccaaatcaaacctcaaatcaaagtaacatcccaaaacattcacattacaaatcttaagttacttatacacacaaatcaaatacatcacaaatcttaaaaaaattacacacaaaccaaatacatcacagattatacatctcaggtcatgcaacaaatcataaaattatacatcttagtgaatcacaaattgtaaaaaaaaaaaagatgccggtagcggctgccgcctgccgccgctcgccactgggcccgtgcgcggcctagccggccgcctgctgggtgggaagggaggagggggaggagagggctgcgtgggaagggaggagggggagganannnccnnnnncngnnnnnganagngnggnggcggnnggggaggaggnattagacctatcagaaaagatgggggaggaaccacacctatgtatacgatgcgtaatataggcattttaaaatatttaacggtcaactaatggtccactaaccggaatcnnnnnnnnnnnnnnnnnnnnnnnnnnnnnnnnnnnnnnnnnnnnnnnnnnnnnnnnnnnnnnnnnnnnnnnnntgccctttcctttactgtcaacctccataacttggcgtaactctcggtcaataaaatgttttctcgctgtgaaaaagtggtttccctccccacaattaccccaacanancgagtccggatgcattaaacgtggccaaacctggcggttcgcccaatgagcggagctacactcaccattatattgggcttcgcgctcaacgtccccgcctttcacgtcggggaaaaccttgtccccgccgcgttgcctctattgaattcctctacccccctgcggcgagagggtgtttggctattaggagggcgtcttctctctccttccctacaataccattcttcccctccccacggtccggtctcgctcgggcggctgttcttttttccacccaagggcttcctctcttttctcaacttcttgnattttcgtctcgaattacacttctcacctaaatccctccccctacgctcactaacctccttaagagcccccttcgtcggccgtttctctatcatggtccctctccctcccgtcggtcccttctaactcccctctatcaaagccgggcgggtccacccgtcgccgcgttctcgacaccccagcttctcccccctaaaaccccctccgcttctactctacgccccttctctatcacccccc

SEQ ID NO: 46124 - DNA, 1158 bp, Oryza sativa
cgcgatgaccatcagctcatacctgcgaaaacttgcagtaacaggagggggggaaatgaaggaactgtgctccacagaagtcaaaaatataacttcaggtgattttcaaatagttaacggtaacagctcatacctattataatgtgtttccaagtatatgacttggtaacagctcatacctattataatgtgtttccaagtatatgacttcgccttttttcagcctcgcagaaggatataatgactttttcaatcccttgtctgccacaatgcttatgctgtatttcaacctgaagtaaagtaatcaggtacatggttagtaggagcaaccttagctcaacaaaaacctagacaaaggcttctaaaagctgaggagttgagcgctgaaacaaacaagcactcatatgcaacagaaaaggctgcagtacgtgctggatggaactttcatgagcaaatgagtagcatcagatggtaggtcaagaaagtaccatggctcgttgcagagattgtactgtattgtgacttccccaacaaatcttttgtgacgtaacgcattctgcatagaatatatcgaaaaaaaccttagtacagaatatagacaaagattgctcatgataacaaaaactaaatgttgcaagtgaagtaaaatgtctttgaaatgaaaacattgataacagaaagaggaagtggaaaattacagaagctgctgctctttgtgtcattgtgcgctcaaccgcaactcggagcagtgtaggcttcaccacttgatgtatggcttaagcgaagctcaagataatagttccaccacctttgtgcaaagcatgtatttcaaacttagcaaaaaatctatggagagtgttcaataaaggttttttcatcgcagattcaaccacacgaagcccttaaaattggttcaagcaaagaaaacacagtagcctatatgtatttttttcaacttaataccttaccatgcaggggggtttattggtaaagtaaaaccaaaccaacccgcaaggccgtgaagggcattggttctttaggttaagataacctcggaagcgcaccacaggtttaacagcccctctattaaccatatgctctcacctttgaggttaaaatggcacccaacaaaaagagactctcttttttgggcggaca

SEQ ID NO: 46125 - DNA, 1089 bp, Oryza sativa
ggtataagatacgttcatgattgactctagtgcaagtgggagactgttagtgatatgccctagagtcaatcatagagatgattgtatcacatactatgtttacatatttatccgactttgttccttgaaatagataaactcgttattggttaatgaatatgtgattctttcatgagactctttatgttatgtgttgctatttctaaaggatctctgatcaaatatcatatgtggaacaaatatgtttagatgatcagcacatgtattaattgatgatcatgtctcatagatcatggtatagagataccaaattaataatgtggacacatgttagtgaacatgttgttggatagacccaacataagacacggcaagagccatatgagttgtgtcatcagtgatctcattgagtgttggtgttgaatccttagacctaaaattatcatggttctcaacatgtgtagtagcttacttacggactgctaaacgctactccgtaattgggtagttataaaagtagttttcgggtatgctatgaaacatgtagtgggatatgaataatcaagatgggatttgcccctcctatggagagatatctctgggcccctcgatgttgtagattatggaagtgcatggccatgccaaaggtgattgaggagtcaatcacaagttatataatctatcaacaggttcgagtgaatgattgagctattagaggatggcacatatctagccttgagcttaatcgatatcgtgaggcaaaggggttcatacaagtatacactaaaggttcaggcgatatgatttttatgtaggcccggtgggtcaatatgttctgctaggggccgctgttgacccgtggaccgaaaaggattttcgggttacagccgagttttattgaccctacagggtcgacacttaatggggcacaaataaggggattggatggaaatcaatttagacttaattcgatagggatcccaataggagtcctaccggcccttgaaggcccaatggagggacaatttaattcctggagggtgggaacgggggagcatttgtttacattagaaaaccttagcgtcactt

SEQ ID NO: 46126 - DNA, 903 bp, Oryza sativa
  unsure (1)..(903): unsure at all n locations
cgcgcacntcgcnnagaacagcgcannccggccacatgggnaccagggcgacacncgcgaggcccgaaaaacgaacagacggagagaganncacggncgaacgaacggganacaggcgangcgcggggagaagaagaggagcccggagggagtagagagctgagagcgcganncgacgcggcggagaaacgaagcgagcccagagganagcgacaggcgagcgacaacagcgaacgagcgagaacccgagaaaggccgacgacggacgccggacacggngcagangaccggcgccgccgttgcggggccggcngctggcgggcgcggggggtgcggcggcgcgngcgggcggnggccgcggggggnggccgggtcccgngcgccgcgcggcgcccgcggcgccgccggngggcgggggcgcggcgccgggccgcggggccgggcgcggggtccggggggcgggcggggcggtcgtgcgcgntcgcggtgggccgcgggcgtcgccggcgggcggggnggggggggggggtggggnggggggggtgggtgtggggtgnggggggggnggggggggttggggggngcggngggggnggtggggggggggggtttgtgttttgtttttttttntgttntttcttttttttnttttttttttttntttttttnttgtnntttgttttcttttttttttttttnntttttttttttttttttttttttnnttttntttttttnntttntntttttttnttttnnnnntttntntntntnnnnnnnnnnnnnnnnnnnnnnccgagcaaaaggagactgacagggcatttgctccaatgcaaattattgtatgccttgagaattatgctcaattatttgaattctggcttagtgtcctttgatgagtaa

SEQ ID NO: 46127 - DNA, 1025 bp, Oryza sativa
  unsure (1)..(1025): unsure at all n locations
tggtccnnnntttagttcacatcttcaaatcattattttgtaacaaacaacataagaaatgccgaaaattattctcaattgacctaaaaaaatatctactagaactgctagcacacgtttgacaaacctcaatcagaagaaagaagacaacannnnnnnnnnnnnnnnnnnnnnnnnnnncnnncgnnnnnnnntnnnnttttttttttttttttttttntttttttntttttttttttttttttttttgtttttttttttttttttttttttttnttntttnntttttttttttttttttttttttttttttttnttttttttttttttnntgttnntttttntttttttttttttttttttttttttttttttttttttttcgtttttattttttttttttttttttttgtttttttttttttttttttgttttgttttggttgtgtttttttttttttgttgggggttggggtgggggtgtgtgttttttgtggngggggggggtttgnggtggngggggttgtgtttggggtgngngtggngntggttttggggtttgttttgttttttttgtttttgttgtttnttgttttttggtgtgggggcggntgggtgggnggcggcgnggggtgccgtgggcggggggtggnggctgcgcgcggnccgggtgttttttgtgttttgtgcgcgtggctggcgcgtttgggntgttttggttttgtttttttttcggggtgggtgtggggtgttgtttnctgtcggcttttttggcggnncggcgcgncgtgggntgttgnnctggttgtctgtcggcgcgccggtcgggcggcgtgggcggtcngcgcggcncggtcggctggccgtctgcccgcgccgcgcggtgcgcttgtcgnntttggttttgtttgtnnttgtggggcncggggtcggggtngcgcgtttttttgttttgctttnntttttggcnctgcggtggtgtgggcggnncgccggcgcncgggntgctggttgggggcgcgcgc

SEQ ID NO: 46128 - DNA, 734 bp, Oryza sativa
  unsure (1)..(734): unsure at all n locations
gcgcgcnnntttaatgactgcgtgcgacaacaaatagcttttttctactgcactttttcggaaacataagactttctcagatctttaatttacaccgctacaccctctttatagttcacataaccaaccgtatgtcttcttgccctcnnnnnnnnnnnnnnnngnnnnnnncnnnnnnnnnnnnnnnnnnnnnnnnnnnnnnnnnnnnngnnnnnngnnnnnnnnnnnnnnngggnnnnnnnnnnnngggnngggggggggggnggggggnggggggggggggggggggggggggggggggggngggggggngggggggggggggggggggggggggnnnnnnnnnnnngnnnnnnnnnnnnnnnnnnnnnnnnnnnnnnnnngnnnnnnnnnnnnnnnnnnnnnnnnnnnnnnnnnnnnnnnnnnnnnnnnnnnnnnnnnnnnnnnnnnnnnnngnnnnnnnnngnnnnnnnnnnnnnnnnnnnnnnnnnnnnnnnnnnnnnnnnnnnnnnnnnnnnnnnnnnnnnnnnnnnnnnnnnnnnnnnnnnnnnnnnnnnnnnnnnnnnnnnnnnnnnnnnnnnnnctatactggttttgatagttgagggagtcgctgtgtctggttttctagtggagggacgaaaatcggattcgttgacaagttaagggacctaaagtgaacttattcatagaaaatataacgaggaataaggagtgcatacaannngggcgtc

SEQ ID NO: 46129 - DNA, 1528 bp, Oryza sativa
  unsure (1)..(1528): unsure at all n locations
tcccttaagtttttcccccacaccccttttttcccccccgcaaatttagagatatgtaaaaaatctccagttgccccggttctccccgtgaaattctcggaaaaagcccgccaaccgaaaatgagccctcacttgttctttctttcaaggcaaggtataattccaccggaattcttcccttctattaaagccaaagttcccctgcccttgaaccccaaaacccagagtttaccaaaagacatgttggtctttatggacactgttcaacaatcccaaaaaacaaaagctgtcgggtggttaatttgtagtcccagtcccggcgaagcatcacgtttgccaattccgttcgccccccttttggttcgggcgtatggcggtacgtgttcctcacttggtaccaagaatacccccatactccattcctcatccgcaaagcaacgacttgtccccctttcctcaatggttaacttttgaatagatatttgcaaaatgtgggtatattttcttaacttgttttggactttttgggggctttttctttagctagccaagcttgaatatatcaagacttgagatcctcctcgatcacctttcagcttccggcgggagacactggatgtgcaagtattctgatgtgatggctctaagtgagccacaagaggcaaccggtagatcttgtagagcactaggttgacgcgacaacttatagaggtggaaaaaaagctagaaattcatggctcagatggctcgtaatgaggtttgctcgtagtgatttaaactcgtagtcttaataagtcgcaggttgcttatttagctcgtttgtataagagatcatcatatctttatatagttagtgcttcttatctagtgtcttttaattacatctaaattatttgtgtttagtgaattctttactagttagtgtttattattatgtttatctatgatataatggtaagtttgagataataacggtggtatagttgcgttaatgagcctaatgagcttaacgagccaactcacgagatgcgccgaattggctgagctcgttaagataacaaactcaaacaagtcgagctttaatgagccgagagctagctcattatctgcctaccagttaatttgtcaatgctcattagagagtagatgtgcccagtgtttttttaatcctcccaggtcccaaaccttctcactcaatcagacttattttgaacgggtctgagtcaaatagcagtgatacgttcaacaaatcagcttttttataatgcactttttaggaaacataagtctttctcagatgtttaatttacgccgagacaccctctttatagttcacataaccatccgtatgtcttcaagccttcctgtgtggtcctttagacagtatatttcaagtttcatgctntatctacaagaaactgataccatccacatgtttgtatgcacttagtgcagcaagccgataccaatcagatctatggtgagatccatcacactagcggccgctcaattnnnnnngcccagtgca

SEQ ID NO: 46130 - DNA, 3533 bp, Oryza sativa
tataaatggtttctcctccggtatacatcttaaccatcgtgtctcttgtttttattgctacctatttattatatgatagtcgagaaatatatatagggtacatttcctgacatgtgcatacaggagcatataagttatatatatactgcctccttttcctttttaaatgtatgacgtcattaatttttctcacaacgtttgaccatttatattattcaagaatttaatataagtatataaaagtataagttaagattatattttatttgataataaattaagccataacaaaataaataatacttatatatatttttaataaaacgaatgttcaaacgttatcaaaaagctagcagtatcatacattttgaaatggagggagcataatgttgtaatagttacttagttgtatgcaggggtggagttggaatgaaatagaggggagtgcctctcatttgttttactttgctttattccgagtttatgcaattatgggtgtccgagtttagattaaggagggtgcaaatgtggtaaaaatagataaactatgactaaaaagctttccgaattctttttcgaaaaatcacctctcctatatagctcggtcgtttctaattctatgtgcgtgtacgttatccatataatcgaaaaaaaaagaatgattctatggataaatgtgcatggataacctaataggataatctcttggccaggcagaagaaaaccagagcattgcatcctgtagaggcagaggctgtaagttactgcttcatccgtttcacaatataagttattttaacatttctcacatttatattgttgtctaatccttcatttcacaatgtaagtcattctaacatttttcatatttatattattgttaatgaatctagataacaatataaatatgggaaatgatagaacgacttacaccgtgaaacggagaaagtagtaaccaaccagaggggtagtgattgtgcggcggtggggcgtggaaggacgaatggatggatggctccggtggcgcagggcgtctttctcgacggatcgcatgggcgcggccatgggcgtttgccccctccgccggcgtgcagcggcagcggcatgtgcgcgcgcgcgcgccatcggcagccactcgttgctgcgccggggccatgtggcacccgcgtgggcatgggccctgtttccatctcgtggccggcccgcttgctctgctccggccctccgcccagccagccatccagatctctctctcccgcactcggcgcgcggcaggcaggggccccgttgccgtacgtacgaaccccctggatcgcgtggacgagggcttaattagcgtctccatcgctcactcgcatcgcaggcgtgtcttgtgttacaaggagtgaaaatgggtcatgaaatacgaggatacggatatgtgatataaggatataatatttttctaagaaacaaagatacgtggatacgtctatatataaaataagaataatatataataatatacatagaaaattaaatgtgtagaatagtagaaaactagacttgtttggcatacatcatgttcaactcagccagaacgagtagattgctactctctccgtattttaatgtatgacgccgttgacttttcgaccaacgtttaaccattcgttttattcaaaaattttgtgcaaatataaaaatatttatgtcatacttaaagaacatttgatgatgaatcaagtcacaataaaataaataaaaattatataatttttttaaataagacgaatggtcaaacattggacaaaaagtcgacgacgtcatacattaaaatatggagatagtactgtacaagataagtttggttgtttcttgcatctactgatacagaagtggaatcttcagttcgctgaagaaaatcagcaatctagcacaaccatgaaacactcaaagctatctcctccaattcaccccccccccccccctcgcgcgcattagaagccacactagcactaagaaggctagatgcctagatgcattacaactcaagcttccatcaaaatcaatcgcatctaactaaatatggatggcacttgtagtctctttgttcttaaaaaaaaatagcaaaaggaacatattgaagataaggctatgtttagttccacgtcaaaattggaagtttgaagaaattgaaataatgtgatagaaaagtcgaaagtttatgtgtgtagaaaagttcgatgtgatggaaaaattggagtctaaacagggcctaagcctggattggaagggaccaagtactaggtagcgcgggctatgcctggttcggagctgtggcaaccggcagccagcgatcaggcgacgcccctgcgtcagacggcggcgctaccggcggacggcggaggcactgcgacatacggttgcacagcataatgcccgtagacagtgaagacgctgcggcatacagcggcgcagcaacgcccgcggatagcggaggcgctgctgcatacgacggcgctgcgatgccccgcgggcggcggatgctcttccctcggtgtccagcatcatcgttactgcacttcgtgagatggttgtggccgcgtcgaggccagggggaatggcggtggcgcatcggacgtatcgagagcgtatccttaattattttgtttatttgaaaatggtgttaatcggagatacgtgtgggatacatatcaaagcgtatccgatataaatccgtatccgaggatgtatctgatacggacacgtgaggtgtttgccgtatctgtggaatgtaggttatggaaattcccaatcaacctagtgacgtccgtatgagggataccatttctggtggttatcatttttggctgtaaataaattttgttttttctttaatttatttctgcattgtattaatgttgagactaagtagtttaaatgataaatatggtcaattaccggtcgatcgagcgatatttcagaagagatgctactaattccgactgttttctcccctaattgtgtacagggtgagctcctgattatcccgtattgttaccgtcaactcgttatatgtctacttcaagggatgaaaacggtgcaggaattcttttttacgttccgatggtgttttcggaaaaaataatagtagatgatattattttcaatcactataaataacaactttttaatattcccttatttttacaaatgggctataaagagagccatctgtcaaaatgtacaaatatacaagaaatgttcaatcgaggcccttcataggtagacctgtcaagaagcctgtttacaaaaataagctattttcacatatggtggtttttcttgtccgcctcgaccacatcggtcgtaatcgttggtacctctcattttttttctctcctcgtctcccccacctctactttttcctctcctgcttcccactactctctcccattctaggccgccctccctgaccaactctctcgcctcgatctctctagtcttctttccctttcctatccccactcaatcgcctctccaaatccctc

SEQ ID NO: 46131 - DNA, 1165 bp, Oryza sativa
  unsure (1)..(1165): unsure at all n locations
cgcgtcnttgattcctctggaaacnncnnncnanaacanngagcaattcaatgggtattttctctcctgccttctttaggagattccgagcctgtgaactgttaggtaagatttcatattttcaaactgaagcaagacccacgttaattggatcaaaaaacaaagcagtacacatttgtatcaacaacaaattaaataaacaaaatttatacaatttctttggacaacttatttcatacctcattttcattgaaaccaaatctatacatgcatatgtactcctacatgttacaccaaccatgacgcatacctgtaacctgcttccacgggtagagaaacaatctttagtcggttgacccaaatccacaatagtcccggttccattaaaaaccgggactaaaaatgattttttagtcccagttaataagaggaaaatctttagtcctggttgttgttacgaaccgggactaaaaatcatctttagtcccggttggtaactctaaccgggacctaagttcataccaacccgggactaaagatcatttttagtccccgttgattccatgttaggccgtgtcagggccctaggatctttagtcccgggtaataacacccacccggactaaaaaatgggttttagggcccgggtttcctctctaactttctaaatctcttgcctaatatttaactgcccttcctttccctccttttctttccttttttttccttaaccccaaagaacccttgggttccttttttttttccccaaaaacctttcaaggcggccggtccggcggcgaaagcttcgagggccgcgccaaaggccgccgggcccgggggccaccccgaaggcgccttttgcgcaggattttgttggtgggcccgccccgcagcccttagagccctctccgggggaggccttctccgcttgtttcgggggccacccccctggtcgtctcccccggaggggaggagggaaaaccccttttaccccccccccgattttcttttaaaatggagactcgggatcatttttggcgctggagaagggaaattctgggtgaatcttttttacacacttcggcgcggaattctttcaaaaatttgtggatatatatgtggagaaaaatctttttttataaagaagtgtggggttctttgggat

SEQ ID NO: 46132 - DNA, 982 bp, Oryza sativa
  unsure (1)..(982): unsure at all n locations
aacggcctgcttttggccatgaatctaanctgagcccaaattgatgttcgtccaatcagtttctagggagaaaaaaggttcctggtcattcgggtggctaaaactaatttattagggcagcgtagtgtgcaacttttcttgtgaaagtcttgaactttttacagtccttctgtttttaactgacaaaaatccattactatccttctgctgttatctttcaataaaccaagggaattttagtttgttctaaaaatcaattttccctaggctacccagtcatcactcagctcatgatgtatcaaaaaaaatctctattatatttggaattactttcgtgattatgatattatattagagtcgtttagaataccaaactttttcctactaattttgtaggcttctaacataagttaacttcaaatataatcactctgtgaatataggtattgtgcatatgaaaatgatcacatttgaagtaacaaaaattttacaattttaaacttatgcaacaatttttcgatttatgctaagaatgaagtcatcaaagttacatcttattgactttttacagtctaaaatgatacatatttgtgactcgagggagtatatcatcattgcttaggactgtaaaaccactctgaattaaagcaagacttatgacatgcagtcacgcacccaagtcttttgtgtctctttcaggccaatattgttatgtgccagctgctgataatattattggttctcatcttgacttttatcaccagcttagattcgtcaaaagttatgacattcaaccacacacatcacacatccgttggcttcttccaaagagattcctacaccatctgctaaacactttcaccgatggcagaagcaatcttctcggcaattgttggcgatgtgatcggcagagtgatatcccttgttgtcagtaatttcaatggagatcacagcactgaagtcaagttacagaggatatgcc

SEQ ID NO: 46133 - DNA, 1078 bp, Oryza sativa
  unsure (1)..(1078): unsure at all n locations
tgatgatgtccctgtgtgcactctgttgtgcgctatcttgcaggatatgtgaatttgtcaaatttgtttaataacatgtgcaagggtatgttaatttttttttataaaatgtggaggatatgtttgcctttttaattttttttaaacaacatgtcgaggaaatgtaattgggaattagtgcactacttaataataacaaatcaaattttgtacaaatatgtttgtactaattaatttagcaaattagtttgtactaattaataacatttcgcaattatgtacacaaactagtacagtacttaaatttgtgcatattgtatattgttaatatacaatttattttttatttaaacaacatgttgaggaaatgttattgtgaattagtgcactacttaataataacatttcaaattttatacaaagttgtttgtactaatttgagtaatttaaaatgtggaggatatgtttgcaatatgtcatagtacagtacttataaattttttaaactatttttgctgagtgttaatatatggcctattgttaatatacagtttattttttatgttagaagtttgaaacgatggccgatagtaataaagggactgaagagaagagtttaggggaggaagagcagtcgcttgctgttgtggttgctccagaaccaacggtcccaccggaagatagttccgacagcgacgtagctgatgaagacaatgagtactcattgccaagcgatccttgtcaaagcccnaagccctgagagaaaggaaaaagggccaccggtgaataaaagcgacagggactacatttccccctatagaaggggtaaataaacttaatatgttaacagttcaccatgaatacctattacccgagctaattcgaaaacttgtattataaccttctttagggaaacgcgcccacggcgaccaaaaaggcagccgaggaaaaaagatcccccaaaagacaacaggtaccaacttacacaacccgcttaaagaaaaacgaacggtctccaaggcaaaaaaaaagaaaggcggaagaaacctaatttaaaggatgaagggttcattgtgtt

SEQ ID NO: 46134 - DNA, 566 bp, Oryza sativa
  unsure (1)..(566): unsure at all n locations
cgtttagcaggtgcggcttcgntctaggatgattagctgacctagccccgataaggactcaaaaagcctaatctgagtcctagaatattatannagcctgattggaatagaccccccttnagggccttaagcgcggggtggaggtttcgctagggcgttcactgcaaggcctagccggcctttgttttccttctttagcattgacggttccngagagctattgaggcctctaggagccataagtttgagcccccccctatccttatggtaggtcccgaggcccccttaagattncccttcggagccccntttatggcttgccactggacacaccctctgctcttnttatagancgccggcctggaataggggccaatttaannnaaccaaagagaaagccggtatgggctcccaaaaaggcctcccctttattagggctttttgggcccccccatataagtcctcattaanaggagatcccgcctcgcaaggcgcctctccccacaccccccccctgagggggggggncnccggggggagacccccccccctcctcccctcggaag

SEQ ID NO: 46135 - DNA, 542 bp, Oryza sativa
  unsure (1)..(542): unsure at all n locations
taaaaaaaaattnntttttnnnnnnctgtcttatctgtgttgagagannanaaaaaaatcctttcccccgnngnnnnaaaaaaaaaatatttttttttttttggatttttcaaaaaccccgcttgtgttgaaaaccttttgtgagggcgagcagagaaaattttttgaagggaggggcccccaattggcccccaaccccttttattcataaaggccagcaagatattgtctgggtgacaaaaaatacaaaagccagcgcgataggggttcncaccacttgttgacgactctcncattaaatctcagggtagtatagacgcctgttncgaagaaagcgacagtacgtacgcaggtcgacagaagccccagacctcaagggaacgctgtatcttatgtctgtcggttcgcactttgtctgagctcattttgtatgctctcagggcgaaacttatgaaaacgcagcaacgcgctttttacggtcttgccttttctggcttttgctccatgtccttctgcgtatccctgatcgtgtgatacgtata

SEQ ID NO: 46136 - DNA, 1621 bp, Oryza sativa
  unsure (1)..(1621): unsure at all n locations
gaagccttacatgcgcacggacggtgtgggaaaaaatgttaaagggtaatgattgttgagtcgcatgtaagcatctaagaagttagtagttatgtaatagtggtatataaggtgatgtgtgattatatcgcaaattgacgaacatttgcactcaacattttgcatattagtttgtactattttttatgtgcaattaccatttgtagggtaacatttacatttttttatattttaaaagttttatttaaaagaggcttaaaaatttagcccgagcaattttttatgttcacttaccacataaaaaattgctactatatgttttttttaaagtagtaatattaatgtttcaaacattgaagtaatatttacatttgaaaagtagtagtcctaaggtttgtctatttgtatgtacaattaccatttttattaaaactactgtagacaatttcaaatcacaaaaattaattaataattattatgaaataaatatactcaacactgtaaaaatcttcgcaggcgggcggtccgcctacgaagatagttatgccgaatagggtttacatcttcgcaggcggaccgtccgcctacgaagatcgtttccctatagaaggacaagctcgcggcaccaaaatttctaagtccaggcgggaaccctagaaattttggcaccgtcaggctgccaaattttttcgcctcccccgtcctccgccgccgcccgcctgcgaccttcaccctccgaccgtcgtcctccgcgcgccgccgaccttcgagctcgcaccgggcgcgcgctccaccgcgccgctagccgtcgatccagctttaccaccaaccgctcccgctgccggccgcatcgccgccgccggacgctccaccaccgtgctccaccgaccgcgcgcctctgccgccgctccaccgctacgccgccgccggcccatcaaccgccgccggccgctcccccccccggcccctccaccacgccgacggtctctccaccgccgccggccgctccacggacgncggcaccatctctctctctctctcgcagtagcagtctcacggccgaacggcttcatcggcctttcatcgtacacgagtgaagacgtcctcggccgaacggcttcatcggctggtcgtcatccatggccgaacctcgttgtcggcctttcgttcgtcgtccacgaccgaagctcgtcgtcggccattcgtcgtccacagacgtgtgtgcatgtgggtgtttctttttatatgtgtgtgcatgtgggtgtgagaggtatatatgtgtgtgcatgtgggtgtgaatgggaatgaanggggtgggagcctcnattaagggcctaacaaactggggaaaatgggtactttattgtcataatttggaccaatgtagccattcatcttgcctggctatcaccgcatatgtccagtaacattatggttcctcctcggctccggtcgggacaaaaacattaaaaatgtgtgcttgttcactaaatgtacaggccaacttncttggttcttggggggaagaatggaaattttatttccccttttgttcccaggaaaggaaaattctaaccgtatgggttaacttaaaatgtccttctggacagacatttccttt

SEQ ID NO: 46137 - DNA, 2629 bp, Oryza sativa
  unsure (1)..(2629): unsure at all n locations
tttttttttttttttatacaggaagttctcttttttcaanagggggtggcacaccatatgtgtttaaatttttattaaaaatggttttgaatataattaaaagaatttgggttcatataaaggggtcctaaaaaaagtttattgaaagaaacaaaannnnnnnntnnnnnnnnnnnnnnnnnnnngaaaagagaagaaagtccttttgaattctttgttggggtgggccacggccccggtaattcataggttttttcccatcaaataaataccccaggggggaagccggtgtattggtccaaaaccccccgcgcgttattttttgacttccgcgagtttccggttgttttgttatccatgantttatagaaanatctgcaaaactattnnnccccaannnaaaannnaaaaannaaaannanaaannnntcaagtctaacatgttacttattatatgtaagtgaccgacaagagacttagatcttcatttaatattctaggctatgtgaagagaatagaaaagtatcatcccttacttctaataacactcactttagtntacattngctagtgtacagttttattgaccaatacccctanncagtgccctcctagggcttcgagagaccaccccgggttgccgagtttcttacgacaacctgtcatggccgtccaactggggctaaatacggagcagtaacctccccagaaaattgtcttaggaatatatattaacgtagaggaatgcccgtactgagctgtcaccatcagcatcccacttctactgtcccgcatcatatatgcccaattaatgatatataataatctaagcaccatgcttatattgtcaaatattactctgtatcctctagaataatatagagcaatcatttgcatgaacattaaacccacaccattgcacctctctggtaggctagtcacacaactatatcaacacaaatacaatgtaaaaccagtactcagataaagtaaagtaccaaaggtatataaagaagaatattctattaattctggaagtcttacaaaataagaaagaaaaactactagagtcataccgaaatcttctgaagactcgaggactccgagaactatcctattctattccacttagcactagagcactaaactaaacttgagatagagatcaaagcttcttgcttgagtgtgtgatggaatgaagaagtgacccctttatatagcctcccaatgacggttatggcagttgaaattgtcagaaatgccccgcaatagtcattgggagtgcatctgaagcgtccacgtggagggacgaactgaacggccactgtcagggttcggccgaacctgggccggcccagtagacctccagatttggtagaggggttgacaggtaagtcctcatggcgtttatgatagttatggcggtatctaggatggttgcacctgacatgtgggcccctttatccttgagcttgcttaggagtgagtttttcttcatttcttcttcatttatgtgctaatctctgcaaacaaataatactctaagtacaagtggaaataaattattctaaaataaatatgcattgcaagcatagctagttctcctttatttttagttatattgacgatcgaaactggtctataacgatcgtcaacaaatccgcccaagcttgaaactttgcttgtcccgagtaaatgactcggaaaaataaacttggttgttgatcaggagtttctaccatgatgtatatctcaaatgtacaagtgcaaagtttgagtactctctcttatattagtaagtaagcacggtggcttacccataagcccaatccccggggaacacatgccttttcgtcactgttgaccgtcgctatcgaacaattttggccgtcaatattactaaaataaggaaaactagtttttcctggcatgccgatttgtgttagaataaaaatattttccactagcactaggctttcaaaacttttgtagagaataaacataaaatggaggagaatcgacaataatttgacgatcattcaatcggacgttatcgagaatcaaacatatggatggatgggccaagaactcagaaatgacatgaccaactgagccaaaattcacgagtctcaagtgaggaacagaaaaggaggccatcgaccaaattgtgggccggttgggccacccctgggttcggccgaacctacccagccgtagcgccaatcgattcaggttttgactagacggctcagatggactccctatgacggttggagggtattatcgacctttccaaccgtcataactcagctataaaaggcattcacctcacttcctccaacacacacctcaagcaagaagaatcaagctctctctctagtttactagtgttctaaagttagtgcagtaggaatagaataagagtcttagtcctagaagtcttcggaaggattcaggtatggttctagtagctctactctcttttgtaagacttgtactttttccggnngctgntacaagtgtcagcctnnnnnnnnggggggnnatttaaattccttaatgttgaatgcaaaaatgaagaggataagggattccttcttaatattacacatccctcttacgttccata

SEQ ID NO: 46138 - DNA, 2584 bp, Oryza sativa
  unsure (1)..(2584): unsure at all n locations
aaaaatagagagagaggggggggcgccaaataataaaaagggtccccccttggggtggggggggggggcacggggggggnnncnccccggngnccccncnnngtggtctttcagatgaataggtatgttttctccaccaacaaggtgtttttttttttttnnnnnnnntngttggggggngagaagagaaaagaaaaaaagatgaggggagaagntgtttgccggccccattcaaaaaaagggggatctattttttttttttnttagagcacccaaaaaaaaaatatttttcaaaaccggggtgcttctctttagagagggtgtctcatagtgttgtgaaaaaagagtgtgaacaccacaagagagacaagggggggttttattcaacaaaattttcttatttttttagggacaagggaatttgtcaaaaaagcgtgggttaagatattaaatccttagtggcaaaataaagggacaataaagtggattacttatgttncatccagtccgcattccttncgttaataaaaattctaagcaattttctgggagggtactggtcngtatttagcnccagttgacggccatgacgaggtgtcgtaanaactcgcaaaccgggttgtctctcgagccctagnaggcactgtaggggtatggtcaataacttgtcacagcaaatgtaactaagttgagtgtatatagaagtaaggaatgattatnttctatttctctttcacatagcnntaganttattaaatgaaagaatctaagtccttctgcttcgtgtcactctaccatataattaaagtaacccatgtttagactttgatatatatatatatatatatatatatatatatatatatatatatatatgtaatatatataagttattagcagatttctctttcttataaatcttccattgggattaaacaaatacgataccttggaatacttccgggtgaaatgctacaatagtatatccgtgcgcttgcggattacttctgtaaccataaatataccagggccatttccacaccattgctgggaattcatatttctagtaatgtcgttaagaaataccaatagctgtcagtctgaccgtcggtgtcccgccggttggaccgccgaacccgagcaaacacaaatcgaagatctctctcaaaatagattgaaactttattacttctctccgtgtttacaaagtgcaacaacaacactcttcacgaaaatctcgactacactcgaaaccctaacttttctctcaactcaactctctcaaaaacgataccaagaggacacaccctccctctctttatatacctgagataggtagcctaaagccacgaaccaaccttgtactagaagtcctaatcccatagaaaaccttcccgtataagaaataaactttacatactccaattataccaaatttggactattttcaaattcgactccacatcccatacgcacacaatatctccatcgtatgccatatggaatcttcaccaaccacgtgcattgatctttagtctaagcatcctgcatgatatcctgatcgtccggacgtcatcttctcccaagttgactcccgatccatcaccggcaacactcacccgaggcatcaaaaccacctatacatgcatcaaccaagaaaccatattcgagcacaagttctcaccaacctgactcattgttagcaaacaacagtattgcatattcatagtacccatctagaagtgataaacatgaattatccacggatatccagcgaaacaatccgaaaccgaaaccgacacagagttggctggtcagaccgtgggctggccggtctgactgcacgcatagctccgatctgaccggtccaaacagtcagcagcagttcctgttcatcacctacaaatcaatcatctccaaaaccacttcgctaataatcttcaaatatcaaaaccaataatatcaaatgccaattggtcatttaaaataaggaccgacacacttttgttttacagcattgattacatgctaatccccaactaggacatttcaccagttaggcttgccagaagtcattccttcgcctatgctatagtccctatgcacttaccgttaggtgttgcctctttatttaatcgnagtgcttatgatatgangtccgaatataantctattctaaacattatgaaaactacaagtnctgctcatcgactacattcacatattcatctcannactcaacatgtnntcttnctacatctcatggnaataggtctncgagggcatgcatttcagaagtaaaagctcntcaaactgatgtgnccatggatccaaccacgaaagctatcttgtacaantgacatcatggacacttgtataagcanggnncaaactangtnngaagggggaaggtcccanaaccanttaggaaatttttagcttccattcattagttnacattagtgtcaccgtccccttnaattaaaattggaaaatggtcggggctttttattgagatgaaaattaccgcggcacttgcgcattaaaagcgggggtggactcagttattccccccgttttttgg

SEQ ID NO: 46139 - DNA, 601 bp, Oryza sativa
  unsure (1)..(601): unsure at all n locations
aaatatgtccnttttgtaacctcgtaggngcgtgaaacttttgtctatccagccattacttccttaagcttcatcagatacaaggtcgcagataacttcgtgtgctttactgtacatctggcttgcagaggtgtctcaaaatcgttcatcagctgagtaaacttctcatggtccctctcgttgtaagttaggtcctcaacatcacgcaacattactggaatagtctcattattgacatccttccgatcaccagccaacgaggattgaacaaacatatcatgtttgtgttcttccttgttcagaccaccgccagctttatccccaatattctctagctattgctctctatgcttagtccaacatgagtaaccatccatgaagcctcggtagatcagatgcatgcgtgttttggcactattctaaagcatcttctcattcttacgatcaaagtatggacaagtcatccattcattgtttgatctgctcttgacttgctctacaacatttatgaaatcagcaacgccccttcaatactctatgctagatcggtcacttttatacattcatcttctattcatctgcaatgtatgaaatgaaatta

SEQ ID NO: 46140 - DNA, 1431 bp, Oryza sativa
  unsure (1)..(1431): unsure at all n locations
cattgnccctgttgacctccntngaanagccaaagcaatgggtgggccggaaaaatggcgaaccgtgtgatcgcacgccacgtcggccagccgtaccttgtaccgtgaggcctgctgcgcgagtactattgggctgcatcctgggcttccgcctgtttcagtgaggcggcccgcggcctactgccataagcttcttttccttctaatgctacaaaagtgtgcatggagtttgaagaaacgattttgctaaatatttattgacaaatttttctccaaaaatttaacagatgtaattacagtacaatcgtagtgtattacactgtaacttgcatgtaattacactgtaactatagtgtaacttgtatctaactttcaaaaatctctccgtaacatgttatttcggtaaaatggaggtcgtgggaacaaattctttcatatatgtgtgtgctatgatttgttttcttcctcaccaaaacaaatcttgtaatagatctaacgatttaaaattatgtgaaacttacatataagttatactgtagttacatgcaagttacagtataattatatataagttacagtgtaattacactatgattgtactataattatatctgtcaaatttttgaggaaaaatttgttttgaggaaaaatttgtcgacaaatgtacaggcagtcccacaagaacagctgggttaccttataggaacagctgcccaaacatggagcgtttccaccaaaaatgggatagctgaattcaacatgacccacaattcatgaactgggtcatgtttttttcatggcacactcgaacgaagacacgaaattgacaaccaaatcaaattagtctgacttcaatccaatatcagtcaggacaagactcaaacaacttctgcccctcaattcggagaaaatcagttcaaatcaaaccggaaatttcaacatcagatttttgacaaaatcatcaaaaggatggcataaacacagcccaatcctaacaaaactacaatggagcgcaaaataacagatggccatggcagggattgataacataacagatgcagagtaactaatccctgtccaatgttaagaaaacatttaacagatcgctcaaaacacccaagcaaataggatgttaagcgcaacaagaactcagtggtcaatgctcagatgatgacgattcaaagttttagtttcagtctgttcctcgtttcttcaaccactcaagtgccaaacacagcaagatcatcgccgggattacatctgagataaatagccaaaaatttcaccatattcacagccatcaatcaggccaccaaaacaaaccaagaactaagcaatttttttcttgtttcttcctactgcttaacgcaacaacacaccttggtccaaaataaacagctaaatatcgancggggcagagagtcatcatct

SEQ ID NO: 46141 - DNA, 1443 bp, Oryza sativa
  unsure (1)..(1443): unsure at all n locations
cagagtgantncagattatttatagccaacttctcttgaaatttagaatcttaaaaatgaatatagtacaaacaatctcacatcgtctattggaacacaacaatggcatatttgtcacgcgcactgtctgagcgcctcgcgccaaacttgtgccatgcatcggcatgaaccatgacgcgtgcaagggccgctactagcgtcgcacactagatgtcgtactatgcactaactcgcaaacccgctataccgagcactggacgaatcatgctgcgctagcaacgcgccatgctactccgaccatgcgccataattgcatcggttgtataccttgtggtcgctccgaccatgcgccataattgcatcggttgtataccatgtagttgctttggtcacgcataccaccgaaccttcgatgtgcatcaaactgagcattacattaattcccacatatcttgaaaggtatgctcgaaaaagaaacggtaatactcacatacatatttagtcctttgaaaggatcatccgatacataatgcgcttatgaaatagctgcaattgtgtctatttgacactacgctcttcccaaaccaatctagcaagatcacacatattggcacctgcacaatgagaaaaagcactaggtaccggaaattggtaatgaaacctattatgggcaatattctcttcatacaacagaaactcattggcattgacctatggttgaaaatcaacctgcaagttgacctatagttgataatgaatggctaaagatatttttggattgagcactcgcatacaagtattaaaagccccaaaccaagatgatgatccgaatatcatcatataaaaaataaaagctcactcttttggaacgagtttaagataaaattgggagaaacctatgttgcttaggcctgtaagcctacaacatgtgaagagtgaaccatactatgttagaatatgaaaatacataagttccatggacatagttcgccatttctagcaagtaacatggttctaactttgtccaaaccccaaaatcattattaagaagataatgatatgtgtgtcgcatcagcactgatagactatacaaactctacaagtcatagacatgcaagatttgaccattggaacatcactcgcactatgtctgaaaaaaatgatacacgcaacgagttttgatggttcacacttaaaagagatgcaaaatttagggggatattttgcatgtctattaacaaaagcttgatctgaataatcaagtacccaaaaccaattacaaaaatcaaagcaataatttggatagaatttggtgcaaaagaagaaccctcacgcatcccacaacaacaacaacaagaaagtcaagcctgatgtcaaaccaaaggctactaccaattttaaggataaaggcaagggaaaggccaaggacagtgactatcttcg

SEQ ID NO: 46142 - DNA, 1635 bp, Oryza sativa
  unsure (1)..(1635): unsure at all n locations
gcccacccgaccggtatcaaacggaggtggcgaattaaatgcccnctcataaacaatggcgcggtctattcacctgtaaaatggccctaactanncccnnnnnnaaggagtgtggcactgtggaaagcaccccncanacgattgggagaaataacccgcctaggcaannnannncagccagggtcacatcatgatacgcacgacagtgcatcactacaagttttactaaacggtagaatgaagcgccggacaaagggggggagcaaaacgaggcacattaggggcacgcaccgaaacaaaagcagcagctgcggaaaaaggctatcctagcggggctaaaggtccactccacaggcaaaactcaactaggggctgagcctgggtcctcgaagtccgtcttcagctcagaagtactacacttctgaaaagggggaataaaagcaagactgagtacaaccaccgtactcagcaagccacaccaacgatacagatgtgcaaggggatacaaggatggtttgtggctatttgcataaaggcggttgtaaaacattttattgagcaaaacagtaaaactgttgagtaattaaagtaacattaaacctccactgatcaacgctacaccacgttgaacaggcccaaccaacccacctgaactacagtgtattgggtcgatttattaagatgggactaatcacggtgaatctggtcgaccgcccataaccgccggcacggctattcgaatagctttactctgatcagaggtgtacaactgtacccacaagacacagccccacgacacgtttccgtgtgccgacatgccaccacgacatactggaaagaggccgtgacaggacccttcgcataaccccctctagccaagcacaccacacctcaggtttcacccccgtccccagcgggcaacgggcagtcccctctcgtacctaggtgaatccggaagcgacagaagccgtcgcagggcccgccccgctccatcacgcccacccttgcctggatgcgtcagctagaggtaagctacactacaagcccagcccgtgcccacgctggcttgtgggaagtacgattagttctttcaaggcattccgcgaacccgtccctaactacccatggtgcgaccagcaaaaccatgcacccacaggccaacattcagtcgcaatttagtggataattacgaccatgaagcatggcncagagtctcgagcacgcagctctatctgatactaaaaagtctcatactgtatntnccatcaactggagctatggtattaagcatggctatncatatantctagtagtcacataagtacatgagcggcgagcacaatagtatacctggtncctgtatnggccaccctgctatttattggaacgccaaacatcataaaaatggtcaccactccaggggggaggtggatggctctttttncactgactttgaaatttttcttgggaaaccaattccaaaagagttttaactctgccccaacggggaaacttttttaccccgggatgtctaagaggaacacaccgcggctcttttaaaattttagtggggggtcatcggtcgagaaaaaaataaattaaattgcccctaagtttttaattataacaaatggt

SEQ ID NO: 46143 - DNA, 630 bp, Oryza sativa
ctctcttatggaatgctggttggcatcaataacctttttcccacttgaaacccctccaaaacggcctggaaaccctgaaatcgcatgagatctcgccctatttggcatggggttaaaattccccaggcgaaaacgggtgccatgaactgtccctaatgccccgtgtaaataaaaacggcggaaattacccagggttggtgttaccaaaacaatatttcatcaaccccttggggatacggcgagttttcccggtcaaccccctttctgtgatttatgtggataaacccgcggaacactgcggggtatcactctcagacgggaaaaacgctcactctgtccttgacaatcgggtgactccggtgataactctctctattatccaccttcctcgtttctagcgccttttattctcgcaacaatcatccgcgtcgcaaaacttaataacggccgcaaacaatggcgtctctttttcggcggcacaaaaggccatatataccctcacgcgtctgatttagcaacgccccatcgcgtaaatccacaaactctttcaagcactcggatataaacactgagcggcgctgctagtattcaaggatcgctcttctttacatgcggatcttatcactcgcc

SEQ ID NO: 46144 - DNA, 2083 bp, Oryza sativa
  unsure (1)..(2083): unsure at all n locations
cttcttatccttcccccttttcgttctttcttcccctcttctcgagaaaagtgcacagtaagtagatgggtagcgattggcgcgcgcggtggctgacagagccgacgacggaatcttcgtgcgcttcaacatgtcaccaaggttgggttgtgggcacggtaagccggaaacccccggcttatcgaacggacggcatggtcaccgcaccggcgacacggccccgtggtggatgtccgagcacagctcccgccacaccagctcgagcgtttggagcgcgaccacgacggtgaatgtccgcagcggaccccgacctcgattgcttgatccctacagcacatcgtcggcgacgatacctcccccatcctcaccgccaagcccatcaccacggtctccaaagggttggttggttaattggtggtagtagcaaagcctatggcctccggtgatcagcttgctcaagctcatgctcgtggtgtgcctccgtgtagcactggcacgacgcaggggaagggcaagtacctgctgttaaagggaaaattggaatcatgtcattataattttataaaatttaagatatgctattctgacccacatgtcattgactcatgtgggtcctacatgttattgagataccgatgacatatctcaaacttagctaaattataatggcatggttctaatttacccgctgttaaatgacgagctcgtctgatcgttgatatggttttaccgaacatccaccatctcgttcatgaacaggtgggtaccacacattgtcgctacagtgttttttcttttttttaagttattttattacctgtcgaactgccctatcgaactgccccagtttgacaggtacccttttgaactgccccagttcgacagggtgctaaacttacgattttgtctaaccgacctataattttgtgattttctattaaaataatattatttccacaaaaaattcactatacataacggaagcaggcgaagctaatccagctgccatgtgtaagtgcacaagtgcataggatcctagctaatagtaatacctgaaataagaggcggtagacggcagcggcagcggcagcagcagcggcgctaggcgatcgcagagtcatgctgcacctcgtgccctactgccatcgaccgttgtgcggagtagtggaaggaaaatgggaagccggccgccggcgctccgatgcgtggccttgcgctgttgcgccgcgcgaattcggcgccgtgaggagaagatcagaagacgtgggcggtggcaatcgcggcatcgtgttctattcgccttctgcttgtggctttcgcgcacaatgcgtttgttcgccttcgtgctgggccaggcctcaggcctgaagatgcctggggtttgggacgggaggccccaccaccccagggggggggggcggcgtgctctggggtggccatgctgtggtacgcataggatgtttgtcttgacgtgcaaacataggttcaaagacgacgcctttcctgtttctctgatctcataaaacctgagtagtcaataagaagaagctaagncattactaaaatttcgaattcacttctatattatgtaaaaggcctgatataggcatgtaattttacccaaaaacttctacaatatacaaaccggtactttgatattgaacatctttctaaaaaaacgtaattttcgagtacattaaaggtacgtgctcatgttttcaaaacaggagaagtttgcatccatttcttagagaacctaatattaccctccctcccctaacacaaaggaataagtttggtttccagttgacccttattaatcaattttttgaaattaaaaaaagaaatgggctaagaccgtnnataatagtggcccaataaatatattatttaaaaattggaataaacatttgaactcagaaaaaatcaaacctctttgggggggggggttttctcaaaaatcaccttttataagaataaagggggggtgggaactttgggggggtttttcgggccaacaaagagggtttttttaaaacaaatatttttttgcttcttcgccgggaaaattaaaaacggatta

SEQ ID NO: 46145 - DNA, 973 bp, Oryza sativa
  unsure (1)..(973): unsure at all n locations
gtatacatatagagattaaggaattagtttcttaaaataaaatatatcatattaggtaatttaagtgaaaatcgacgttggatttgacagtgccacgtggtagttttggagcgtttgtagaagtgccatatggcagtttaagagtgtttataaaaagtttaatgaacttttagtatataatagatagatattttttatataacaaatagattttgccttcatagcgcaagaaagcagaggtatcaagcagaaacaagaaccagagtatagttaagcttgtcgatgaatgtcatttttttttaattgtatgcccttcatgacctgatctgcagagatgggataaactcaagattgtatatgttctattgaataagaattacatgatctattatgtatatttgtgattaaagtattcttatttctcatttgagcaatatctaatcaatgattttgtataaatgttgtaaaaaatcttagacatatcctttgtttgaaatttcaaactgtacatttgacctttaattgtcagtgtatacaaacagttagtcttgttttgatgcataactccttcaattgacatatataatttatttctataataaaaaggggtattgcatattaaataaagcatcttatcatataatttttggatttctatttttgacttcttgaatacataataacatggtatttggatcttcgaaacatttttttttctgtgtttatcaccactgtgttcatatgaaaagtcaccatagcgttagcacgggcattttactagtaatataaaaagtaccagttatttagttggattaacacagtgattgcgattagcactggattaacactgtgatcagcacacgaagcaaaatcaacattatcaatggtaaaatcaggtacatattcatgtgtccattgtgcatatagaagtgcaataagaatttatccatcacacaacangngatcaactctg

SEQ ID NO: 46146 - DNA, 646 bp, Oryza sativa
  unsure (1)..(646): unsure at all n locations
aagatatgaaacaagagacgaagagacgaacgggaggaaaaangagagacaangccgacgagatagcacagagatagacaggagagcagaggacagaggccgngcacacagtaaaagnggaacgggngcgngngnnnnnngnnnnnnnnnnnnnncnncgnnannnnnncgcagcagancnncnngacgnnnnnnnnnnnnnnnnnggcgacacgatcccgtagatattcttgtgaantnnnnntntttnnnnnnnnttnttttntnnnagnngcngttgtagtatatatacatagtgtagacagagatattttcttttcgngcaacaaaacacatgtttgtgtagaaatcatctgtagtaggagagaatattttgtaggagaggccccaagtacccacaccctttatatgtagagcagagaatttttcgggacacaatattaagaacgaggtggataggggtgcccaaccggtgacgcctctccgcgttaaatccgcggttatataaaacctcntttcaaaggaaaaagcacagttcgtatacncaggtgaaaagaagcccagaagttttncggggaacacgtgtgtttatatatcnctggggtttgccacccatnaatagacggtcattatgtgagatctgtca

SEQ ID NO: 46147 - DNA, 2643 bp, Oryza sativa
cctccaccttggatgacggcggtttcgtcatggcgaaatcgaagttgagttgacgttgaacggatctccccagcgaagtcgccaaaatcgtgttggcaactttttgtgataagttgacaacaacgattgcaacaccttatgccttgcggtgatcctattgtcacgaaccacctcgatctagcaaagagccaaacctagatgggttttgacaaataaaccggctagcggagccaatttaagataattacccgtctcgtgggcaaaacggaaggttttcaggacaaacctacaaagagatgttgcactctcgcagcggcggcggacggtttacggcgcaaaccgacaaagatggacaaactaagagaaaactaaaagcaatatgaaaaacgattgaattgattgattgtagattggtttcttacaatagaactggccatgtaccttatataggggttggtcttgccctctacaggccctcctccatgtccaacttgggatagaaactaaaggaaacctgaaacatgccttcccgagcaaggaaacctcgagacctgacgaaacacagtcggactcggacctgccggtcagaccggccacacaccgccagtctgaccggccctcaactggcggtctgaccgcccaacacacggctgtcagaccggccgactcgaaggaaaccgatagacttctaaattttggcaatctttcttattttgatcctaggtgccaaatttgggtgtaaacacgtacttagtaccattgaaaaaaattgatgatctttaaatatgagtttctattatttaaagataaaacatacgattctataaatttacgtaaatatcattcatgaaacgtcctataaatgatctcaaaccatcatgtgttacttgtacaaacactactagaccaccacgtgacactgtcattgtataaatttacgtaaatatcatccattaaattttctatgaaagctctcaaatcgccatgtgacacttatacgaacgctcctaagctgccacgtggaactgtcaaatctcaccgatgattttcactttagcagtggatccgatattttaaaccattatattattatattagatgtattttattttaaaaactaattccttaatccatatatgtatatgggagaattatataactgtactagaaaaaaaatacttgtccattgctacggatgaaggctattttaatcttattcttattatacggtttaactaggatgaaatttactctggaaattcgcttttttttttttgaaaatcattagctgcaattaggagtctgactttcatctcaagttagcatgcgagtttgtttaaagatattttttatataactatttttgtacttccaaaaatgaacgaacataaaaagtgactcaaacaagaatcaatattttcaaaaacgaacgaaattaataaccgactcaaacaagaatgacgtaccaaaatatcggcaaaaaacttctttaatttttataatagtggagaagtatccatacatacgtacgactgaaaaaaacaatgaagctttacctactgttcatctaaagaaacaaataaacttacgcacagacttactataaagatcaataaagcataaaaaaaacatacgtacttagtaccattggagaaaaatgacgatatttaaaatatgattttctattatttaaagataaaacgtatcactctataaatttccataaatatcactgttgatttcatttaaattgataggcccgatcgattctttagaacattggataatgtatacattatatactaaaagtccattaaacttcctaaaagtgctcctatgttgtcatgtgttgttctacaaatgatactatgttcatcacgtgtcagtctaataaattactgaaatacttaagaaatctagaaaaaaacaaagcaaattttcattaaatttgatggacccattatttataactattggattatttttttttagaaaatcatctccttaacccgggcctacctaaaccagtacgtataagtttcattttttttaaggaaaaaacaaacgaatatatgtatgtatgccccctcttccctcaattcttttctctacatttttacccattccttcttctatttgcatgctttattagttagaaaagcaacaattatgtgtaaaacaataaagcatctacatcatataaataatttttgatccgttatgtaaaatcaaaggtgtttttgattattattctgtgatgaaaaattggcattgaagattattggttttgttatttagaatttattcacgaagtggatttcagaggtgattacaggttcattatttcatgtgaccgatcagaccgggcaggtgttgccggtcagaccggcgtgtaatgcgcggtcagatcggcgcagcccgcggtctgaccggccgactctgtgtcggtttcggtttcgagttgttccgtgattatgtcatgattatgggcttctagatggatactatacgtatgtaatactgttgttcgctactaatgagtcaagtttgagataacttggtctcggaatatggtttctttgtttatttcatgtgtaggtatctacttagaagcccatgaagccatcagtttgtcaacaatct

SEQ ID NO: 46148 - DNA, 552 bp, Oryza sativa
  unsure (1)..(552): unsure at all n locations
ctattactaggctgtaggattatacatcgtggatgaagtccgtccaagntgcctgtgtgacngaccccccttaagacaaccggatgtctaatcagtactatcctttagcacaccccgcagaacgagttttgccttgcacaacactgtcactgaattacaaggggtttaacgggcccangtctgaaanggccaatacaatctcttaaacaaattgtatggctctgcaccttactggaaagatggcccttaacggaaaccaccgtccgggtttttgttcgcccatcccaagagtctaaaacttttttaaggtccccggggaaaacacggaggtggataaaatagtttactttctaaacacgaagagacctatattttgttcagaacacaaaatatttgtttttntgtgttgtaatacacagggcgcccggacgcaagaatttcgccggttttaaacaaaacgaaaaaactccgggttggacacaggggttgtttttttnnnttgnnnnncnnntaaaaaaaaccccacaatctatatgacctataggacgtcta

SEQ ID NO: 46149 - DNA, 627 bp, Oryza sativa
  unsure (1)..(627): unsure at all n locations
aatgaatcagatcgcatcactacaaaccaagagagacggagtaagagttgagagcagataggagcccagagatcggatatttctctcgaggcagcgcgagggaagggcgaatgcattataantttctcatcgcgaatggatttttaacanatntnnnnnnnnnttgtatcagtaagatatacctggaggtgtttgtataaaannngtaattatatacaaggtgtttatatattatgatatcccgcggacatctgtctcccgcgcggatgttttttaacacatcatgcgacagtctttgtgntnttataaacacataatagggggcttnggtttttagaaagagtatctttattccacaacctcgttttctcgggcaccagaaagaattctttatttttgcgagatagccgcacaaaaccgccacagggttttgtcgcagaaacacttctttcagagattgtccacagccaacaacatgtgttttaggagcccgtttgcgccccttanaatacttgtagcgnccacatacctcntagttatatctgtaccagagagtccgccaagagaataantgtttctcgcgggttgatccaanacattattccgataaagcccacgggtcggtct

SEQ ID NO: 46150 - DNA, 998 bp, Oryza sativa
  unsure (1)..(998): unsure at all n locations
tatcgagtatgcagcattgttcgaggaaacgcatattttttggagacacttcaaggggagtgttttcagcgagcaatcaacgggaagtacttgaagaaatacttcccgagcgtttggcaacacgcttaaggaggtactatgacaagtacttggattatcgtcctaagaccaaaacatgttctacgcttttagattcacgttgttcatcaaaaaggcaggggggcatgtgttaacacccaaatttggcacctaggattaaaatagggaaaattgccaaaatttggaagtctatcggtttccttcgagtgggccggtctgaccgccggttgagggccggtcagacaggcggtgtgtggccggtctgaccggcaggtccgagtccgactgtgtttcatcgtgtctcgaggtttacttgctcgggaaggcatgtttcgggtttcctttagtttctaccccgagttggacgtggaggagggcttgtagagggcaagactaacctctatataagggacatggccggttctattgtaagaaaccaatctacaatcaatcaatcgaatcattttttcatattgcttttagttttctcttagtttgtccatctttatcggtttgcgccgtaaaccgtctgccgccgctgcgagagtgtgatatctctttgtaggtttgtcctgaaaaccttccgttttgcccacgagatgggtagttatcttaaatcggcttcgctagcctgtttatttgtcaaaacccatctagatttagctctttgctagatcaaggtggttggtgactctaggatcactgcaaaaataaggtgctacaatcgttgttgtcaacttatctcaaaaagttgccaacagtacgtatgatcgtgcgctctgaagggttcaaagnggacatggggggggnaaaatatgaaaccgtatagagagttgagggggatgcggcataccgctaaaagagagattacggctctaaatctgaatcagcgaaggggg

SEQ ID NO: 46151 - DNA, 2401 bp, Oryza sativa
  unsure (1)..(2401): unsure at all n locations
ggcatccaatgcattagctcacgctcggctcgccggctagctaggaatgcagctagcagccgcagcgctgctggacgagggtgcacttgccggcagggtcgcagttgaaggtggagctgcagctagtgagctggcagttgctcgggttcgccttcgagcagcaccggcactgcaggcacaacggcgccgccaacgtccctactacgccgctgccgccgccgccggcgatggccaccaccaccggcttcgccgtcttcatcggcaccatgtcatccagctgatccaacgcccatgctagttaattgatcgatatacatgcatacacacaacatagtcagttaaatgtcatccgatccgtcagaaaatacagtacaagttcatagaagaaaccagattgagcttagaatacctcgggactgcacggcgacgacgatgaggaggacggcgaccaaactcgagagaggggaggtcatcctcctgcggcagttcgccatggctgtttcggtcgatccctatatataccacgctgttgaatgataacaacttgggaatgccaacgcttgaggagatcgaatggcgagggacgacgagatgtgctcgtttatatatagcgacgacatgttgcatgccgagggaacaatataattcctaacgtccatatgcatacatttagagggctgtaaatctatctatctatctatctatctatctatctatctatctatctatctatctatctatctatctatctatacctctctctctatatatatatatatatatataacatatttaactaaaaactttttatatgtaataataataacaataacaataatatatatatatatatatatatattaattatacacttttcaggagctttaataataataattattattattgttattattattacatataaaaagtttttagttaaatatgttggttatttatagcggcttaggataaaaaagatttcatttcatttataactttcaaattattaattttagaattaaattaatagggagctattaatttatgaaactcatatttatgaattcaaaattatttacgacctatagggtttaggttgaaaacaagactcaatgctatcaattacaatttgcaattatcagtttagaattttaaatcaaattaattttatattataaatcattttgatctttcttctagtcgaacttatttatgtttaatcaagattataaatacttcgtatatctattaattctaagttctagaaaaaacaaatcatgatagtccttagttttgcctatccttaccttgcctctctcccctctctgttgcgatgcggtggtggatcgggtgagggaggcggttgctgatccgacttgttgtgtcacgtcctgttctttaaatttttaaatttgcctaattttagaaattcaaattcgtgtttattcatgtaaaatagcttaaagaaaacttcataaaaatggcctaattactaaataaattaattaatgccgtgctagtattctttcttttgttaattggagttatttgactaaaatttcacattcgagaacaattactcaacgattccaaatcctccaaaatttgaaatttccagagaaatcctgttcctcatctttccttcctgcttcctcccaatacgtcctgttcttctggtggtctttcattcttctncccccttcccccccccccgacacacacatgtaattctatcggttaggctgatttgatggggcctcaccggaatgcttgaatttcgaaaatttcggtccgaaattttcaaaattttgaacaaaaattagttgaatttgaacaaatttaccaaaatttatgaaaaaatttaaaatttcgggccgagtaatatcgtatcggaaggggtccgacttttcaaccntggacacacacatacgaaacatttctattttcgacccgctattcttttatttcccatcacctaaagctttcctctcccccggcatatcacaattttcctcccttcacaatcaaaaaattggttcttattattaccccccggccgtgttaaaatttaaggcgccatgtggacaacccttttgccgctggttgcggttgcaaaaaaaaaaaaaacaggggtgttttttcccccaaaaaaacaccggttcttgtttgtcaaagaagtctttgataaacccacataaaaatttccccttcccaaaaaatttttttttnaaaaccacgcgaaagggtaaaacggggggggggttttcgttcccacccccaaggggggaaacccccctttttgggggcccccccccccaaaaaaaaaaaagcgggggtttttttttttttctgtgggggggggggggggggggggggccccaccccctttattaatata

SEQ ID NO: 46152 - DNA, 690 bp, Oryza sativa
  unsure (1)..(690): unsure at all n locations
ggtaagccgacggtggtcttatcggaacttttgtctggaaccactcgtagacacaatattgcctgccgtaccactggtacacgttttttaccagggatggagggggctcccaatcttgagggggcctcacaccggccccttaaaacaccattggtgttgtgtctcttaacccttcctctcaaagaaggttgtttgtctcaaaaaacacccggagaggttttgtttccgccatctccgaaaagggaccaaaccttgtcttattggggggcggaacaaaaccaaggattgttgatttaagaatccctccctctttagcaccccaacacacccgtgtattttttttaagaaacaaaaaaaaaaattgtgtcttttcttcggtttaaaaaccatataagcctttttggcaacaaatatcttctgctggtgtaaaaaaagagaaaaaaaaccctcgggggaataaaacaatgtcctaggagctttatatataaaaaaaataangcgcgaggtggcgggttgnngnnngccccgggggaggcgacgattataggnnnnnnnnnnnnnncnnnnnntnnnnnnnnntnntnnnncnnncctnntnnnnnnncnccnncccccgcgcncggctctcgtccgcgcttctctaccccgtgtccgttgcgcacacatctcccctgaaggcgcgtcacgtct

SEQ ID NO: 46153 - DNA, 1189 bp, Oryza sativa
  unsure (1)..(1189): unsure at all n locations
atatgctattgtggattcatgtaactatgtattttctgatgaaaaagacagtatagatcacacatatcacaagtaagtgaggtataggatatgtctttattaatttactagcaaaatgcccgtgcgttgcactgggtaatgtcgtgttcgataaatgttgattgaatgatttttttaatcacaaaggttttaaacaattattccacgtgtacgtgtatgatatgaactatgttcatgactcgttagcgtgatgattgtatcatgggaggaacaaacggtgaatgccttacgtcacttttacgcaagagtagatggacaaaaatttgtatgattaaaaaaattgtatttaaaataggtaagtttattataaaactaatgaaaaccagcttttgcatatttactcatagtctcgtagtggtgacacgtggatgatatatagcgcatagactttaatatgtcatgtttcgtagaaatttttatctcaaacaaatattagagtaaatatttcgatgattatgatgtgaaaaataaaaaaatagttaaaaaatatcactcgtctgtgaagtatgtacctgtacacttatttttcaacggaaatcaatttggtggattagcaaactataggaaattgaacgcaattaacaagtctactataattgtagntttttttaaaaaatatcaattgcctggttagataggcttattcctctcgctacacattgcgaatgtcgaatgaaaagggtaatgagatttttattatttggatgctatacactatatttaaaagttgatgaaaattttttcttgattttgcaccgaaggccatttctttcttctatattagcctaccctagattgcctttcctgttttcccaaataaaacttaaaattcggataaaaagtccaaaggatcaccatgggcaaattggccttggcggttaggaaggcacggtcgaaaaatcattccttctggaaaaaacgccaaaaccggccaaacaaaaaccacgcccaaattatcggccctgggttttttattggtttttcactaaaattttttttgggaatgataatattcccccttaaagggacaaaaagcccaaaatttcttatcaaaaatttttggaaaataaaatttttttgcctttttaacccccaaaagcgccccttttaaaacacctgtttgggggag

SEQ ID NO: 46154 - DNA, 1712 bp, Oryza sativa
agtcgtgtctaaagcgcaggagaatcgacatcaactcaaacgataaatcgatcggacgatgtcgagaaccagacttatatatgaatgggccaagaacttagaattgacacgacaaactaggccaaaattcacatgtctaacaacagaggaggccgccagccaaaccatgggctggttgggccgctggatgcagggtttcttctggacggtgtggattagctcccaatgacggttggagggtatttccgaccattccaaccatcacaaccgtcattggaaggctatataaaccctgaccttctaacttcactcacacacctcaagcaagagctctctcatattctctcaagtttagtttagtagtatctagctagtggaataggaatagagtagaaatcaggagtccggaagtcttcggaagagttcgggtatggctctagtagctttcctttcctcttttctaagctttgtaattttattagaatactcttctatatacatttatggtattgaaatactttccgagtatatgaatgcctactttacattatgttcatgttatactaaatatacggctagcttatctgggagatgctttggtgcgggtataatggttgcttatgcaattactctatgtcattacgatgatattagagtagtatctggtagtttagacatggtgtctagattacgggatatcattatttggggttatatgctgcggatgagagtgggccgctgatggtgacagctcagtacgggtattcctccgcgcgtgtatataatcctaagttaatttcctggggagggtattcctccgtatttagccccggttgtatggtcatggtgggctgtcgtaaggaactcggctgttaggggtggcttctcggagtaccaggagggcatcgaatagagggtattagctagtatataggttagctagaatgtatgtatactatgtatattagaagtataggaatagattatctttctcttttctttccacttagcttagataatatattatgagaatgagtaactactgcttgtgtgtcactctacccttggattattttaacccctgcttagaatatgattattacaagtaatatataaattattagtcaagttctctctatatgatcttcccacgggataaaataaatatgatacccttggaatactctcgggtgaaatgctacaatggtatatccgtgcgcttgcggataaactctataaccataatataccaggaatatttatgcgtcattgctggaaattatatttctagtaatgttgttaagaaatatcaacagtggctataggtgggtacttctattgccaccgaaacatattggatgctataggtaatcccctatattgccacgatgatggcatcgttgctaaaggtggcagtactagagatcttatgatagatgacgcttcatttacgtcacaaacattgaatttttcgtcacgttgcaaaatgtgacaagtccattgcaaaagcccataaaggcccaaacattgtaccacaccattttgagcccgtcataatatattcatttatattaatatcaaataataagtgggctaagcccatatatgcccaacaatcaaacacgataacaacccatatagcacaacccgacgaacatccaatacaacataaatcttacaacctagttaacaccagcaagagaaacaattcg

SEQ ID NO: 46155 - DNA, 1616 bp, Oryza sativa
  unsure (1)..(1616): unsure at all n locations
gaatcctgtgttatttgatcgtaagtgtgtttcgcaggttagctacttacacccttatagatcggtgagcaccaacgctagtctgccattgccgttcactggtctagtccacattgtgtcgtcttctcgttgggagctccctcaactgcgggtgagtggtgccctcagcgtcgtcattgggtggcgagcttcaccgcatgatcgccattgcatttcttgcgccaccaccatctacgagagctcgtgctcctttgccgtcttctcaatccttcccttcgctaggagacgtcgttgttgccatttcttggcagcagaacacctgtctatactatgtcctacacccagggatattttacttcccttgggttgctttagcagctctagggaacagtttaaaactctaggggatcgatccatggaattctcgtatagacataggaccaatttaccataaaccccactgggtttttggtagtagtgtagtaggaatcaaatctaaccatccattgctatgggtttgctatcgtttgtttaatgccaagatttattgatgagatgaatcaaatctatacaagcttatactttcaacacgaactatccatgggtaaccatgcatcagttcatgcatcagcatcagtagctaggcttgcagctagcagccgcagcgctgctgaacgagggtacacttgccggcggggtcgcagttgaaggtggagctacagctagtgagctcgcagttgctcgggttcgtcttcgagcagcaccggcactgcaggcacaacggcgccgccaacgtccctactacgccgccgccaccgatggccaccaccaccggcttcgccggcttcgtcggcaccatgtcgtccgccacctgggcatccagcgcccatgctagttgattgatacacgcacacacaccgtggtaaattaaatgtgtaatccgtcaagaattacattacaagttcagagatgaatccagatcgagcttagaatatataccttgggattgcacggcgacgacgatgaggaggaggacgggggacgaagctcgagagaggggaggtcatgctcctgcagtagttcgccattgctgattcgatggatattacgctgttgaatgatgtaaatttggaaatgggaatggttgaggagaccgactggcgagtgacgacgagatatactcgcttatatagcgaggaggcgtttgcatgccaaggcaagaatcattcctgctaacgtgatatgcataaaattagaggggcgttgataaattaatctattctaatttgagcaaaacgctacttcatcgaatcatgaagctttgcgaatggatcgattgagctcatgtngatagacgattttaaattnaccatcaaagctcggctaaangatagatncggggctaatgctgatcttgacagnttcatacaagcttctcttgtctgaacactatttttttgagaatgcaatagatcctctattggaaacctaatcattcttagaagaagaactacttttggaattcaaacaccttagggggtggggtaataaaccctaatcaattgggctagtttgaaaaatggcattgagggaaagaacattgttccccaactggc

SEQ ID NO: 46156 - DNA, 700 bp, Oryza sativa
  unsure (1)..(700): unsure at all n locations
aaaatggggtgaaccttaacaccccctgggcccataagaaatatggcgccaaggccctatccctttcaaacggggtgtttttttgtccccccggaatgtcccattgtacttcccctgtgaaaggacaaaaaaaatttttcctctttagggttttccccggattttggccggaataatgggcgcttaacttgtggggcttttcttgaatataatatttgaaaaaataaaaaattggggtacgccttcacaattttgctcattattttgcccccccctttatggggttctaatagggcccccacatttattttcccctggccctctagataataaaactcttccccccccgaccatataaatttgggggagttttggggctcctctacaataagggaccctttttttttttaacaccccctctcaaaagagagcgccaagagccttttgggttttaatagggggtgggagataagagggtaataataggctttgcgcaagaagaccctatataaaaaaatttgtgggggtcctatttttagnccgcaggcgcactttctttggtgttcatctccgcgcgggtggtaaaaaaacaatctctccccaccctctctctgttgtaaaagaacatatcacccgcgggtagaagaacccctcttctttgtgtggtttcccgcactataaaaaaagagaatctctcccg

SEQ ID NO: 46157 - DNA, 1146 bp, Oryza sativa
  unsure (1)..(1146): unsure at all n locations
aaacgtacacacccgctttctatctttcggttgttaagatataatccatgatttgttacatattaatataactgacggtcaacttaattcctttacttctctcacgaaggcaaaaccggttgccaaagaaattctgatgcatgtcccatgtacggtgatggatatgaggttcatcggtggttttatgttaaatttaaacgattatatttctattaaattaacaatttgagttccataattagacaaatgaatttttatcctaaaccgccacgtgacgctctaataaatcctaaaaattctataaataaacaaaatatctaactgttggttttgatttaatctgatggacctatcattattcgttttcaccattatatctatcttaaaagtcaccaattaaatatatccccaaaaccgttgccactgatcggtaagtaggaaggaataaaaaagtacggtacgtacataagcacgcccagccccacgtctttattttcattttttcttctttctcacttattagattagatgaaaaacaaaactaataatttaagctcatatgtaaaaatatatgttattttgagttgtattataaccatatttatgctatcggatcatacataaaagatacaaacaaatcgaaatatagattaaataattgtatatcactttaagaaattagacttgcattttcaaaattaaaaattacatagtaaccattcccaaatgtcacttaccctcatttaaaaaaatactgataccattaaacaacattactaaatactgtttttgttgccccagactctttctacccgntntgtgactactactctcttgactactttttttaactcataccttcattccttcttgntcaaaccggctaactgnaccaaggaagttccgattctatcgcaacaaaacactatacagcttcaataaatttcttagagttttggttgtgttacaaggggaataaattgtgcctgccctcaaacctgtgtccaagtgaagaggtgctagntcataggatggggcctttctagttttataccccatacccgctgggaatttctcttttctcgggaggccacagacgcnacaatgagaactattcatatttttccccccccaaagaaacaaaaa

SEQ ID NO: 46158 - DNA, 699 bp, Oryza sativa
attttgaaaatgcaagtctaatttcttaaagtgatatacaattatttaatctatattttcgattggtttgtatctttatgtatgatccgatagcataaatatggttataatacaactcaaaataacatatatttttacatatgagcttaaattattagttttgtttttcatctaatctaataagtgagaaagaagaaaaaatgaaaataaagacgtggggctgggcgtgcttatgtacgtaccgtacttttttattccttcctacttaccgatcagtggcaacggttttggggatatatttaattggtgacttttaagatagatataatggtgaaaacgaataatgataggtccatcagattaaatcaaaaccaacagttagatattttgtttatttatagaatttttaggatttattagagcgtcacgtggcggtttaggataaaaattcatttgtctaattatggaactcaaattgttaatttaatagaaatataatcgtttaaatttaacataaaaccaccgatgaacctcatatccatcaccgtacatgggacatgcatcagaatttctttggcaaccggttttgccttcgtgagagaagtaaaggaattaagttgaccgtcagttatattaatatgtaacaaatcatggattatatcttaacaaccgaaagatagaaagcgggtgtgtacgttt

SEQ ID NO: 46159 - DNA, 582 bp, Oryza sativa
gagtcaagtttgagataacttggtctcggaatatggtttctttgtttatttcatgtgtaggtgacttgatacctcgggagaatatttgcggtgatggaccggaagtcggcttggggataagacgacgtccatggtggtcaaagatcatgcgggatacttaggctagagttgatgcacgtggttgatggagattctatatggtatacgatggaggtattgtgtacgtatgggatgcggagtcgaatttggaaggagtccaaatttggtacgattggttatataaagtttctttcttgtactaaaaggtttcctaaagtgtttaagactcttaatatgagtttggttcgtggctttaagcttgctacctcatgtataaaataaagggggagcgtgaagcttagcggtatcgctttcgagagcaattgagttgaagtttgagttagggtttcgagtttagtcgagatttttataaggagtgcttgtggggcacttttgtaacacatagagaagtaataaagtcgtcatctactttaagagttcttcgatttgtgtttcattcggtttcgggcgtctaaccgatga

SEQ ID NO: 46160 - DNA, 1199 bp, Oryza sativa
  unsure (1)..(1199): unsure at all n locations
cagctgtttactgtcatattaccatgtttcttagttctatgcctatttccatatatcgttctcatattatatacagcattccattgtataacggttcatttttcattttattagtggctgccaaactgatggacaaccttcttgtggtgagcaacccatatagtctgataagctcaatctgcctcacacttcttccatggccacagaaacagctagccaggtaggataccaacattttcgtgtttaccaacattttgttcagctttcactgatatagctaatatatttgttgtcacttcctgtagatgaaagaaactgtatctgctgatgctaaaaagaaaaggtatgcttctatatactgcagagctagctaagtcatgtgtgttctttacctttcacgcacatttcctttcctattatcattgctgaatatcctttttcccttttcttcagcgctgcttcggctcctgcaaccacccgcacccctaaaatccaggcacagaagcgaacctaaactctgaaatggtactgggtatgcacctagcacccataagttcttaactcattggatgacatattattgacaaggaaactttacactaatggcatgttctatttagcactttaaatatgcaaatgaaaaaactatcagagagtgatgatgacatgtatttacaaactgtttgcatttaatttcagaagcaaactaagtataaggatgctccacccactgcaattgatcttttcaaggagtgccattgcaaaagcaagatgggtttaatgagcccgttaaagaatgtattggattacttttttttttatactttggaaattatttaatgagatgaaatggtttgggattcttaactcctgtgctaggttggaagaagtatcatgtaatcctgccaaaagggaaaattatgggcttttgaattggccagagaaaaattttttttatatagaaaaggggactttgtttctcaccaccaaactaaatgtttaaattatttgaaaggttggtttggagtacaaatgaaaaatattgttttggtgtcccgcgggcctaaagggggatcgggggagggggctaaaggcttccccttttttattataaaaaatatttgagggccaaaaggggcacatgggctttggttttnaggattcatattccgggaaaaaattggggaggaaggcctttt

SEQ ID NO: 46161 - DNA, 567 bp, Oryza sativa
  unsure (1)..(567): unsure at all n locations
ggagatataggtncgcgactctcccgnagtgtntcagggataatgtgngctgataccccntatatgcatgtgccgcgtcgtttgggagagatgtgtctctccccggaaagtatcaaacgccccaccgtgtctagaaataaatnnagccgatgggatagaccccttctgccttattcgcggggtgtagtctccgggaccttcttgcccgcctagccgtctttttttcctctcttgcagagcggtgcncaagttataggagcctttgagctaaattaggcccccaaaaacatgagagataaagcgcccaaatgtncccctcaagcacctaatgatttcaaagaacaacactcggcttttatagaagngggggctgtaatatgtaaattatatnaatcnaagataaggggtggtggggggagagaggccccccttataatgattttgnccccgccgaagagccttnnnnnccgagcccgcgccgcgcgcgtgtccttaattacnccgggggnggggnnnnnnnnnnggggggnnnnnnnttaatgtatgaatcatacttatatatattat

SEQ ID NO: 46162 - DNA, 669 bp, Oryza sativa
  unsure (1)..(669): unsure at all n locations
taattgacttcgctttggcttcgggccgttccgggttgnggggtaggcgggtattaagcttccacttcaaaagggggtgaaataaccggttttttcacacaggaattcatggggattaaacgccaagagaaaggaacattgtgtaagccaaataggcccttcataatatggcgcagggaacacgtataatagggcgcgccgctggctgggcgttctatctcataaaggttccggtcctccctgtgccatggcttgaccaaaaattcgacgctttaacgttaaaaggttggtgcatactctccacaggactctttatagaatcccaggcgttctctccccttgaaagcttcttcggggccgttttcatgttcacgaccctctcgttttaccggaaaactcttgcccgctttttcccttcgggaagagtgggctcttttcttatatcatacccttgaggtaatttcaacattgaggtaagtggtttggctctcaaactggtgtgtgtttgcacaaccaccacgttaagactcanaccgttggcctctaatcgntaacatattgctctttggtctcacccgtgtacaaacagtctttattgctctgtggtatcncacccttgttataaggatattccacaacgaggtatgttgacgcgtgctttgcatatct

SEQ ID NO: 46163 - DNA, 1158 bp, Oryza sativa
  unsure (1)..(1158): unsure at all n locations
atgcgcnattagatccccatgtatgtacacgcaaaaacatctttaatttttagaataataaagactagaaaagatgtatgtgtgttgcaactgagggaggtaaaatagacatataaaaaacaagtgagaagattcgagctcattgtttcatgcgcaggcctaaactcgacccatagtaaaccaagtgagacccaaacacatttaactctaggccacattgctgccagcattgcagcccaaaccaaaatgtgtgtggatcaatgaacctgtcagttcaaaaataaagagaagcaacgagcatgcttctccttccgacaggatctccgtaattgattcatataatgaccctaaattttaaaaccagatatccaatccataaaatttataatactgtttatattgcctctaaagtggttttggaccttagttgtacgaattttaaagtttaatcgggcgattttgaaaatactaacatagtatacttacatatcataatcattggcccttacatatcataaagtttagtactctgtagtgatgttatatgctagtattctttatataagtgtgagataaggggataaaacggacatttaagtgaagatttacatgtactatgttcaatgtgcatatcacatagtaaaactcatccaacatatatgcaacccacattgtatgccaaatatatagacattttgtaaaatcaccataaaggattacangaacgatatttataagtttaggtgttatatgtccggtttaaaattcaagtgtttgttgacttttattctaaagttaggttatatcatggacttttccatcgaacaacgaaatgtgtgtaaggcaataaactgtgcggtggactattgcccggccatctcaaacttcttttgatggcggctgagaatcaagcttatcccttgggtccacttcctcttttgtctggctgccgaatnggaaaaaaaaatcaccccctttgggttatggcggggctcatttctttaacttttaaaaatcccacaataatatttaaggtgtggcccatcataaagatttatgtggccgaaaaaaacacctcccctttttttttaattcgagaaaatattggcgccacttattgaaagggtgttataaaaaatttggaaaaaaaaaatcggg

SEQ ID NO: 46164 - DNA, 1269 bp, Oryza sativa
  unsure (1)..(1269): unsure at all n locations
gagttataaaccaactataaacttatgtgaaagaaagagagaaaaatgaggagtgttgactctcgtgcaagagttaggctatacacttgcgaaattgctaattagcacaagtcgcgcgcgtttctggcctacgcagccctcaccctcgtgcagtctatctcttccctttttttgtttttcttgcttctctttttccgccgcggggagaccgtgaaacgtttttttgctgatttttttattttagaaattgaatctttcatctttaatttttgctgaaagttttgaatttgatttaaaagttttcaaggtttaagttgaaattttttaaatctgagttgaaagttttcaaatctttagttcaaagttttggaatcttgacttaaatagttgaaagtttttatgatttgaggtgaaagtttttaagtttgagttgaatgtttttgaatctgagatgaaagtttttaaatctaagttgaaagttttcaaatctttagttgaaagtttttatattcgagttaaaagttttcaaatctgacttgaaaattttcaaatcaagatttgaaagttccaaaatctgagttgaaaatttttaaattggaggtgaaattattcaaatcttgacttgaaaaattttaaatccgcgttcaaattctaggttgaaagtttttaaatcttagtggaaaggttcccaaccccggataaacttcgctcgaaagtttgtttccctcccccaaccaaggggaggacccctccccctggggggtttttttcctcaaaaaaagaaacccccagaaaaaccccccttagcccttttttggcggggaaggggggccccccccttcccttcttagggcatacccccggaaaaagagaaccccccancaaccttcttttaaaacatgttcccttaaaattttgttgggggaaaagtggcggggagaaaacacctaacccccccctctttntgaccctatttatccccccttacttctttttttaaccacaagccactacgtattttcttctttaacacctcttccaaatggtggcacccctttttttgtctccccctagcccactcgggaggtctgcacatttttccctctcgcgcggtggctttgttccccctaaaccattatcttgccttgcggggtaacggccacaaccttttggttgcgccgccctattttaagcaaaactttcctgcgccattttgtgaagcgaacacaatcgcctattttctctcacaccagctccaactttttagct

SEQ ID NO: 46165 - DNA, 596 bp, Oryza sativa
tcgggttccggattgaccaccctatggtgctacgggtaccgggcttccggtgttggtgaaaaagtcgcattccttaaaccccccgtcgacatgatcttcaaatacgcgcttttgcgctaagttgtccgggggaagatatagggcctgcccggaaatgtcaagtggacgcccctctgcgggggtcgcttaatccggggtgtttggtaagttaggttcaaggcggaacgtgcaattttccggaaactctggagaacggcgcgtatcgtgcgtatccggggaacataggcaatatactgggtgtttcccgagattcatctgatatatggcgcatctcttggggatacgggtgtatcactcgggctttcgggggtcttaagcagtaatctcgcgacaccgcgccggaagtgcgcggagcattctctggagatgactctgccactcttgcgagcgatgctcgctactcttttcttggaaatatattctggtcaaagctggagaaaaaatcacgtgggtcgataactcgcgataatatctttcgcgctatccgtgagtgatctctctgggcgcaacgagcgcgggattaacacgcgccccgt

SEQ ID NO: 46166 - DNA, 667 bp, Oryza sativa
ttgaactcccaggaggttgccacacagggcccaaagggtagaatgtcttcacatagtcacgcaaactaggcacgaagagctcttttagagcttttgcccactctacatgatcagggtccttgcttttgtactccacaagcacctgaaggtaatttcatttgatattagtaagattaagcctattcaagatttttcgccgggctgaaacacactggacaaccaaggaggaactaactaagaagaaagtgtgagcgtgtcaagagtcgaacatgggaccacgaggttgaagccgcacacccctaccactacactagatattggatcttggctattcaagactttaaaaatgtaattttaatttcccacaataagtaatccgtataaatacgcccgtcatcgattaagtatgaagcaggaatcaatgcacacttgcatagtatcctcatcttttcatcaaaaggttttgtcaatgttttatttctcaagtcttgaacaaaggaagtgcctatgccgtgttactgaaattctgcttttcactctaagaaaaaaataaaaaggactgctcaggttcttggttcttttaaatctctgaacaaaggaaaaatcatgggcattaaccgaatgtctgttcttgatctataatgttgtttcaaactgacatcaatcc

SEQ ID NO: 46167 - DNA, 566 bp, Oryza sativa
caccaatatctcttttttttttattctctttacacggggaggggggagatgttgttatattttgtgtgtttgccgggtgaaacaaaataccataattacccccaaccgcctccctttccggtgttttggtgttctccccaccaccttgtgccgggttggaaccccccaccctccaagaaatttaaaaagcgctatagtgttaaaataacacccacccctccccaccttaaaaaaaaggggaaaaggtgtccctgttttccggaaggggggaaaaaaaaaaccccccaggagtttttttttttaaaaaaccggtttttttttatatttcccggggtttcccccccccaccttggaggttttttctttaaccccccccaggggccggaacctttggtgaaccccttaaacccggccctttttaaggttgtgtgcctataaaagggccctttttttaaaattttttttcttgggtacccccccattttgtggaaaaaccgatatccccccttaataaagtaaaaccgccccccccaacccaacgcccaacgcaacaagttatttattaa

SEQ ID NO: 46168 - DNA, 1222 bp, Oryza sativa
  unsure (1)..(1222): unsure at all n locations
cgactcttatcgattattgtggaaaggatgactttgattacaaaaaccgtttctattttttagaataaagtaagatacgactttcccccttccaaaaaaagatacattaagtttattttcaggacaaatccatatataattgggaaaatataggagcgataccccattttaaacccaaccccttttgtttttttggccttaaaaaaagaacccttttggaaaaatgtctccgcaagagacaaaagacctacccctgggaggggtccgttccaaatccggaagtttaagcggacccnntcttttcattatattattctgttgaaaatttgcaaataaacaggccggttccccgtgtcatgttgtttttgccttccccnccggaagganaggagaaggacgacccggcggctaaacgtcttaagaagctccgaggacgccgcgctgctcgtccgcgtcacggtcctcgccggcgacggccccaggctcgccgtcctggacggcgcccccgacctggccggcggcgacacgatggcgctgccctcgtagtcgagcaggctaggcggccgcgccgccgggccgaagctgacgcggcgccgcggcccggcgcgcgagccgacgatggaggaaaggatccaccgcgtcgcgctgaaggagagcaggaaccggaccttcttgaccgccgtccgaaagctgccgaggagcgacgacgtcgtcgtcgtggacgatcgcctctccggcgacgccatctcgatcgatcggtggagacgttgaccaccggcgaagacgacttggcgtgcgcgcctgcacgaagcttagccgcgcttactttgtcctcctctttgtcgttgaggctttcgagtcgtgacaagcaaccgaacgcgggccgagcgagagagagacgaacgaacgatgcgtttggttaacgcccgaaaggtggtgatggaaagtttgtggagagcaagaggcgttcccttgtgtgtgcatccgcgttcatatagcggagagacgcttggaaatgtcagccctgatgtatgttggcgtgtgcagtaaataagttactcggtgtaaagaaactgcacggaatgtagcgtacgtcggtacatgcatacacgtcgtgcgtgcacgagtacttggtcattacgtcattaactagtagtgctactctactagtagagtattgctgtctccgctattacctggcaatcaagcagctgctagcaag

SEQ ID NO: 46169 - DNA, 1011 bp, Oryza sativa
  unsure (1)..(1011): unsure at all n locations
ctgggcccgaggcagaccttaggctatattcttaaggcatatttggggtatgcttgggacccaagccaggtcccaagctacttttatgcttagagttttgagtcatatacgcaatattcccccttaggtagggagaatcccatatatgaaatcttaggtgggcccaggacactccagagtgggcccctagctacgtcaccctagggttactttttaatttttaaagacattctcagcatgctatttattttataatgatgcttttgccggataaatgggtacctcggttcctatttcaccgacacatagtataagatgttttggcttcttcatttctaatctagattcattaattttctatgaatttaaactatatatatatatatatatatatatatatatatatatatatatatatatatatatatatatatatatatatatatatatatatatatatatatatatggatatatatacattttaaatgactctggaaactttctcacattcctcagctttactcacttaatacctatcctgaccgggttcaggcccggtcgtaggtagattgtgactgtttgttgttaaacttcgatacctagcaattaactatgtatgcaattaacgtaatgcgggcaagaaaatcaacgccctgcgtcgatcccgtgtggacttgcacgctgttctagtcccctccatctttacccttgcgattatatccctcctcactgtgggcattttttcatataactctttgtaactctccaaaaaaacgcccctatcggcccgcgtcaagagagcccagtgtctcactcccaagaatctttctccttcgttcggaaatagtaactcccgattcgttgcctcctaaaaaattgcgtgtaaatttcctcaccagcgcgtctccatagggcngatacacgcgcgctcaacaaggcacgcccacaagttcctttctcctgcgtcttttaaagaacgcggggcgggggcgctctctcttnctcccca

SEQ ID NO: 46170 - DNA, 2827 bp, Oryza sativa
  unsure (1)..(2827): unsure at all n locations
ttttataggtaattgcaaacaagacgggcaggttctccatacttgagaatagatgtgtaggaaaccaaagttggataggaaatgnaaaaanaataatggttctatcaacccaagggtccatcaatttattctcgcgttaatcgacggtttttcggancggtcttaataataacggcagtttttttttctcgcgttgattcggacagtttctcttacctttgtttagaaaagaatggtttttttctcttgttaagtcagacagtatttctcaaccgtttttagaaacaacgattttttctcatgttaaatccgattgttttttcaacccggtttttttataaccggtattttttctaatagtttttcagaagcggcatgctttttataaactgtgtttttttcttgtgtggttttcccaaaccatttttcagaaatggcacatttctttctgacttttcttcctagcatgttctttttttttttgctttttttactgacgacgaaaaccagatttttattgttttttcgccactttgggaaaccgactttttttagttattttttccgctattttttctcgggctttttttcgtttttaaggagaatcggttatacgctatttttttttcttcgctttataagagcaatcggacttttttttttgcttttttatttttgttggacgaaggaaacattttgaatttttcaagtaagtagagactagaaaaaaagcccgtgtgttgcaacgagtgatggttattttaatcttattattgttatatggtttagttaaggttatatggtttagttaaggtgaaatgcactattggaattcgcttggatatgtattttttagaaaatcatgagctacaattaggagttcgatcatttcaagttagcatacaaattttttaaaaagatttcttatatgacttcttttgtatttccaaaaatgactcagatacatatctgtatttctaaaagggaacagacttaaaaaccgactcatacactgatgacttagcaaagtacaagcaaaaacatctttaatttttagaataataaagactagaaaagatgtatgtgtgttgcaacgggtagggccaatataatttgtacatatgtgtcagtgcataaataacagtggataaataatcacagtccattgtttcgtttattcatgtgcttatccgattcacttattaccaaatcctataatactatacaagtgatccccacttagtgtagttattaggattttgctactcaaatacggatctgtatttctaaaagggaacagacttaaaaaccgactcatacactgatgaattagcaaagtacaggcaaaaacatcttcaatttttagaataataaagactagaaaagatgtctgtgcgttgcaacgggtagggccaatataatttgtacatttgtgttagtggataaataatcacaatccattgtttcggttattcatgtgcttatccgaatcacttattaccaaataaaagactatttgtgtgcaaatattttatatacatgttcttagcgactcaaaagcaaatgttgtaaaataaagtacaataaaaaaaaccaaaaagttgaattcagaattaagttcaaaattttaaaatttggcttataggaataagcataagccaaacaatgaggacttcaaacacaagctcgatttgttgtccagctttctctcaagtcgggcaggaattgatgacggacggaatcaacaacttcgatcgttctttatttcagttggcatgttctttttgaaagtaaaatttattcttatggattatttgtaactgtatccctggtagtacgtacgagcatgtgtaaagactaacttgaaatcatgctaacatgtctcaagaatcggatgatccgggcaatgacgtacgtgatatccacacggactatgcgagtttcattcgcttgatatccacattgcacggactctctttcgcagtttgctcgcgagtgtcacttcgccatgaatgttacgcgtgacgggaatcgaatatggatgacgtaccatagttttgacaaaacaatcttcaatttttaaatcgtgcgcgagggcgacgcgatcccagtaagacatgcggcaagggcagatcgcgcttgtgagggtgttgcgggcctagtggggcatgtaaaaaatcgcgagtgagaggacgttgcgggcccaatcacggcggcgcgcaaaggcacatgtggaaagcagactcaggcacgggcccgatcgctgtgtgcgtgtttaaatgtgctggcccgcccatctcggataagaggaacagtttggcggtgtaaggaaaaaaaaaggaaatgatttgacagaaacataaaattaaaacttattcaaacacggatgatgtaccaaaattcgagtggaaacatcttcaatttttataatagtagagactagaaaaaatacatgtgcattgcaacgggaaaatgctattttaattttattattgttatacttttttttagttaaggtgaaatttactatgagaacttgtttggatatatattttttttagaaaatcaggagctataattaggagtccgatcgtctcaagttagcatgtgtgttttttaaagagattccttatattattacttatgttttttataaaagcaatcgaacttaaaaacttacttatgctcggatgacgtaccatagtaccgataaaaacatattcaatttttataatagtagagatagagatagagatttacaaactctcaataaaaagaatcaataaagttgctntctcgtgagncgatctgcactcaatggcacgga

SEQ ID NO: 46171 - DNA, 7586 bp, Oryza sativa
  unsure (1)..(7586): unsure at all n locations
cggctcgcgaatagaacgcgtatatgtagaaaactcgcccctccccnccccacacgcccccataataaacgggagcgatttaatgtgttgtccccaccgcaacacgagacgagtatagacgcggccggccaantagtttaccaccacgcggtgtgtgtgcgccacatatataggcgcgcgcgaattttgtgtgctctttttctacgcgcgccaccagaaagagcaaagattatatgttgccgcgtcttctcccttcttataaagaggtttgtgtgaggaggccccccctatttgtgttatacaaagcggcgtttttgtatntgtttttgagacccaccaatagtaattgtctatatagtttccgctatagaaaagggatatgagcttcccctcccccaccccgttaaccccgtttatgtgcgcgcgttttccgccctttccccaagggtagagggtggaggagttaagtacgcccgtccccccgcttatttacattccctttgcaatcccctttgacgggcctttattcccctttcggaaaaaaaaaaagtaaaaatgttgtgttttttagaccaaaaagaagtttatttgcttccagctttagggttaacccatcccccgttcagtccactgcaaagggaggcctgtcgttgtagccaacccttacgatcggctcctcccccggaaagttcttcagcggggagtccgcgcgccggtcccacgcgcgcaagcagcggcacctcgacgagctccgcgcgcacgcagggcaggggcgggggtaggggcggaggcggctgggggcggcgggcgccgagtccggggctggcgggcgcagaggagaggccggagacgggcgccaaggccgcggctggcgggcgcggaggcgaggccggcggcgggcgccgaggcctcggatggcgggtgcggagacgaggctggcggtgggcgcggaggcaaggccagctacaggacacccggttcggctcctccgccaccggtcgcccggtagcgcgggcaagctccgcctcaacagtcggacgctcgggtgagctccacctctgccgccggccgtcgagcgcatgtgctgcctcctcggcagtcgaccgtccgagcgcgtgagcgtgagagagagagagcgtccgttgccgctaccactcctaccgccatcgccaactgccaccgccgtcgtcaactcggttcggagagagatagagctcaacaccttctccacctcaacacctcttggatcttggaggtggagggatcgatgagcgcgctgcgggcggctcaacctctccgagctcggggacaggcagtggctcgtcgtcgtcaccctcattcccccccgccggcgactaccgccgtgcgcgtgagagagactaagagagtgaggatgagtgagagagagagtgagtgagagagaggggggaatagtggaatatgagtatgacaggtgggtcccataatttttttataaagagaatgctgactggactgcaacgtgtacggcacgtagatcaaaaccaccgcggattaagtcgagggaggtaattcggtcagtattcatagttgggggtgaagaatatccggttttggggttcgggggggggggcaattcggacgaccgtgatagttccgggggaggggggttattcgtactttttccaaactgaaaaccggggtacactattcagatctcccctgtcgtttttcctcccggctgctcctgcacctgcacctgcacggacggaaccacgtttccgcatgcgcaccgacgacttttcgccgcatgaaaaccccttctcaggctcccaggcaatgggagaaatcgcctcccaacaataggaggaaagcaacaaccacctgacccaagcccccagtccaggtaggaggagtccactacacagtagtagtacacactaatagctgcttgctcgggccggcgtacgtgcgtgctcgcgacgaagcttcgttggggcggacaaattcgttcacctcactgtcttctcttctcggcggagatggagatgggcttgtaaaataataataataataaaattctccgggtctatcgtttttaacgactaataggctgtatttgagaaggagatagagaagattgaaaagatacgcaaaacgaggtgagctattagtgcatgattaattgaatattaactattttaaacttcaaaaatagattaatatgatttttaagcaactttcctatagatttttttaaaaaaagtaccgtttagtagtttgggaagtgtgcgcccggaaaacgaaacaaacaatatcacaatcacccagcgccgaacgcagcctaaagacggggacgtagaaacaacgagctttccggggacagcaacgcaggggccatcaggcgatggatgaatcgatcgatcgattgttgggacccattcatacatggcgccactataatgtgattgttgttcgctagttaatctatagcgagctagtcgctgcaacttgcattgaatctcgtatcgatcgtagtacagtattagcaacttgcttctcctgcaatggcgatgcataatttggttggtgcgtgatataccctgctcccctccggcccgtaattgtcacacctgacgtcatcccatcttttccaaatgtgcaaattttcctacttgaaccttattaaaacatactccctcctttcccgccgttgatttttttaaatatgtttgactgtttgtcttatttaaaaacttttatgaaatgtgtaaaactatatgtatacataaaagtatatttaacaataaatcaaatgataggaaaaggattaataattacttaaattttttgagtaagacgaacggttaaatatttttaaaaaagtcaacggcgtcaaacaatttgagatggaaggagtatattactaccacactatccactaatttcacctcacttcgtggtgagccagtggaggatattcggggggacctttttttggctgcatatatacttgcaagtatgctcacattgcaagaggtcaaatttccatctagtggtgaacattgaaggttaagattatgttgtcataattctctattccgttgtacgattttacgatcctaatcaaaggacctatggttttattattatttatttatatgatttgcggatcctacctagagatctctaattctaacatgtacacttgattaaaattaacatgcatttaagttaatccctttttatatattctcaccaacttgggcttttgagattgagctgattagtgcatgccacttaattaatagtgttgatgcctcttgttttttacctttttttttgtatgactgaagtgaaattaacgctctttttctattttctatattagtatagtttttttttgaaaagaactatattagtatagtagattcttctaattaaaaaataaattgttggcacgttgacttgttggaattattatttttcagatttcctatgtaatgagaaatgcataggggttttccggctagctccacaaggtggtaggctagatgatctgggttcaaagtctcactctttctaattatttgatattagttttagatttcctagctatgtgatctcggctgacatctctgatcttttttaccatcggggccttgcgattgtaatttcctagcagctgcagcgaacattcggtaaacttacccttacctcgcacataattggataagcatttcttaatcaagaagcattggactgttacggaatagcagatgacaataagagttgcaaatatgcaaagtttttttttattgttttgcttttatgcaatgattcttgcttacataatcgatgatattagccaagatcttttgattccttttggctgcttacatgtgggcttgttgcccaatgctccgtttactcgcgctagcgagcttcacaaagcaaattgctcgtagtgggtatcgatagtatgtctccctgcatgtgggtcccgtctcagagatgctgctgccattttcgaaaagggaaaaaaaacctaatattctactagtttaatatatcaagaactaattttggatcaaacaaggttaagctcatggtattaaacaaaagctgtggttgaaaaaacggaagcacacaaattaatttagagcatcaaacaagtcgtagcagcaaggtcggttcagctcacagttatttaaacagaataaattatattatgttcaaatgctcaacgcatacatatccaggtcacaacagtgtagtgaagtgagacttagcaaaacaaatttatattgtccaatgagtaaccatttttaaaataatttaacaacgggagtctagataacaggatgatgaaggataatagaataggaagcataaggtggccggcaggcatcagcatcggcaaagcccctccatcctaaaaatgaaaaggacaaaagtttcaatctaattgttatggcactaattaaacagggtttatatcagtgtgaagagacgctcccaatggatgctagctccttaatcaggaaaggccaggcgctccattaatagaagctatatggttctatcaccaacaatccatgtgtaaaataaactcacgcagtacaaaaatacgctcttttttaaaggacagggcaatagcactgtgttaataaccaaatttgataatctgagtatcggagatgaagatagaaacggggtggaattcaagatgaaaatcattccggaaatagagcaaggatcggctaaattccgaatcggctgcgaccagaatcggcaaagtccgagttggacaaggttagccgattgagccaaatccgataatatgacacggcatacattgtcgggttgagttaatgtgtttcatgaggattgccacgcatggatagagtcctgagaaggcaattgtatctgttaattaggatatttcatgtaatttccttagagatatgtttgggcaaaattctgccacaaagacttatggtatcttagagtttgttagagataagagtcgtatccgacacggacttgttttgtaatctcgggtataaatagaccccgagccccatgtaattaaacaacacacgttcaatacaatctcggcgcatcgccacccttttacttttgttttgtttcgatgagttcttgcttttggcttgagctgcatcagtttcgatcttcaactagaggtaaaacttgttatggcggcttgcgttctcgggattagtgcttccatatttatgatactctaatcttgtttatgtaattcatcgaattattatatgttttatataatctctggcaatattgctatctaactttcaatcggctaacgtctgtcattagaaggcagccgattaggttaaataccgacgttgacttagattatataggatatctaccactctatcaaacatccaacggcttgattgtctagatattgtccttttttttcatacttatagctgcatcagatgttcgaccttataagtcgtgattagaatctcgatctctagccttcttttggttgccgattagggtagcatcggggtttcagccgatcttacctgatttaactatatttatcttatatgcttgattgacatgttaaatctgccctttatattaagatcttgttgcatttaagtatattaggctctcgtttgatatattctacttgctttgatatcttaatatagagtggtatcggagtattagccgatacatgctagatctatctgatcggctatgctatgaacatatatagtcttgttgttaatatatatttcgatctaagtgatttatactgtctcggcatggcgactgatctatcccaatcacttgatttaagtatatattgacataaggatcatatattgttaatatctacagccgatcgagtagatttagttctttcttactcattcatgattgccgatcgatttacatatgacatcggcttaaagataaatgatatgtcatcggcaattagccgatcggctatcgtttatggatttaaccgcggtttctttgtctttatttcttgttgattgcaggatcaaatcaactggcacgctcacgaatctaaaggcaagcttttggacctgcacaggagttaagcagatctcctaggcctcgtgtttttacatcaacacactgccaatcaaattgtgaacagtgaacttagattcaacatgcgtttggttgaagggattgaatagaataaattcggattatccgttttttacggtggttggtttggaaacaggtgagatgagatgatcgctaacgggcagatccaggcctcgagtcacttgcgctgtggcctgaggccaatgattgttcacccactatgcccaacaagatttcacaatgtaactcaaagtatagctaaaagcctaatgggttgacccatactttgagcctattctagatccgcaataatcacttagggcttgtttggttaatcctttcacactaggattgaggaggtttagaggaaaataattcctcatttattagggtgtataattaatcctccttgatacttttgttcggttaatctcaaaagaaaggaattggaggagattgtgaaagatgattaaccgaacaagatctaaagggaaatattctcctaaggtgtgaattagcttcatatctcaaaaactgatgtaccaatccaactcacttcctctctcttattgacatgtgggccacatccttccatcccttaaaaacaaggattattacatccctcatgccaaacaggtagtgggatcacccattttgaaaaacatgatgtacctaacacattccatctcattttcaaactaaacaaacgtggttttaatcttttatcttatgagactccttggttacctttgtagtaaaaaatctctatgtaaatagcagtggcgtagcaaggatttaaaggaaaggcggcccatctatatatactaggtcaattaaaaggtggtccactatacaatttttattatattaactagtacatatactatagttttaatcttgatcaatttttaggtggtccatggaccacaacgccacctagctagctacgccactggtaaatagatactccattcaaaagtattagacatatcactaagatataggaaaaaaataacttataacgaagaccaaaaagtgtatgcatgtatacaacaaataagaattaagatagttgttctagttcaacttttagtggaccatttaattcatctcttcccatcttatttgaaaaactataaaataaaatatgtttaacacttttggatgaagagtgcactactacttccatatgcggctaggggtagaaaaaaaaactcgaaactcatgacctaactcaactcgtgtaaaactcggctcgactcaactcgactcgggtagttaatgagttgagttgattttgaacttttactcattttcttaatgagccaactcgagctagctcgttgagctcatgatgtattaagacggaaattaattgtctatatatttacaggtgtaaaggtcgtgttaactcataattattcattgtagcacaatcctatgagtcatgatataca

SEQ ID NO: 46172 - DNA, 574 bp, Oryza sativa
  unsure (1)..(574): unsure at all n locations
cgtagattgatataagcgaacacattctatttaatgatgacgtatccattatatctgcgcaaaaattanatataaaaacccacatagtgttgttttttttttatgttgtttaaccccagattattatttccaccacccttccataaatttgtagggaacctcatgccaaacacaacccccagataggctatattcctgttcacccatgtagtttaatgccaagttgtaaaataacatcttttatataacgcgggtttggtatctccagcctgttaattttcccgatataagccaccagcggttcgggctcgcacctgaaaggtttcagttaacacaagcccaattttagaagcgatacaacccttacccctgaatttagatatccttccaagggttatgttattaagaaaagtaccaacctcttccaaaaagggaagaaaagtcggtccaggaaatccgggtatcgccaaggctcgaaacaagaagaggcgcccgaaggaagcttcccaggggaaacccgcttagaatctttataggccctttcagtttttccctcttttaatttaagccgtga

SEQ ID NO: 46173 - DNA, 611 bp, Oryza sativa
atctaagtgatttatactgtctcggcatggcgactgatctatcccaatcacttgatttaagtatatattgacataaggatcatatattgttaatatctacagccgatcgagtagatttagttctttcttactcattcatgattgccgatcgatttacatatgacatcggcttaaagataaatgatatgtcatcggcaattagccgatcggctatcgtttatggatttaaccgcggtttctttgtctttatttcttgttgattgcaggatcaaatcaactggcacgctcacgaatctaaaggcaagcttttggacctgcacaggagttaagcagatctcctaggcctcgtgtttttacatcaacacactgccaatcaaattgtgaacagtgaacttagattcaacatgcgtttggttgaagggattgaatagaataaattcggattatccgttttttacggtggttggtttggaaacaggtgagatgagatgatcgctaacgggcagatccaggcctcgagtcacttgcgctgtggcctgaggccaatgattgttcacccactatgcccaacaagatttcacaatgtaactcaaagtatagctaaaagccta

SEQ ID NO: 46174 - DNA, 2634 bp, Oryza sativa
  unsure (1)..(2634): unsure at all n locations
cgcaataacgcccataaaaatctgactttaataanccccgataaacaccctccccttacaaatgagacttaaacgtccttctatcacccccccccaagggtttgacactgttgaacgcgaaaaaaaatgtcaaaaaatcctttgtgtgggtccctgagactcttgtttttccattttgatgttgttatattgcttttcacccacccgccttattcccttatgaagagaaagttgactaaataacaaatcaagtacaagatgaagaacccgagtgtaagaaagttattgtttgttacaactgcagtgaagaagggcattactccaaaaactgtccccaaccaaggcaaaatcgacctccacattaccgccaatttacacgaagcagacattccaatcgtattgtggtcactggagcaaacgccgtacccgtaaggcctcgtgttaatcagaacccatagcagaaacaatgcaccaatgctcctcctgctgcacctgacttggcaataaatcatagcaaccattctctgcatcgacagcctcagcaaagaattgtcgtaaatggaagaagttgtgtctcttcccgacctactccaggccgagccaagggcaatcaacctccggagggcgataccaagcagaagaccgtcatccgcttcaaccagcaatcagaaggaagcttctcctgtgaatgatagcattatgcagtcctgtcacatcatcacagaaccaatcaaggatgcagtcactagaacaatgccagctatatctctccagaatcaaaatgagcagccatgtttgtggtttttagttcgctacttatcatggtgtaatcgaaagtttgcagcaatcatgtaattcataaatataatcatgtctgtaaacagtgagcttgctatgtttagagatgattcatgttgaggatacaatgtaccgatgataagcaccttccctttttgtttaaggcagtgccttgtattcgtgtaataagggagaaatgtgtaatacagacaagttccctgaggattcgtttgaaagatgcggatatgtgatcatgtgtataattgtttactgacaaaggagacctagggtctcgtgtcagaggaactatattctaacctcgagttaataaccaacctgtggatagaaaagaaaaacaattaaactgtgttgggttaaaaagccaacgagacagtagttgaggataggagtttggatacgccttttacagatcaagataaggattgttggaggaaacccctaagggtacccgccatgcctctacattgataagatcggatatacctgccaacagttaaggagatccaggagacatcaatatttgagaacataatagtcgatggttggtaattagtttatctggtatcagaaaaaggtcaaaggtgatgtggcagaagaacaatttggatgctccccatctcgaggaagcactaaagatgaccatcggcaattaaaccctagtggtatagatacagatagcaggcaatgtatttccctaaaggtagtcagtgcagcttttgacgcaccacatcaaggtttcactgaaaggcagcaagccaaaggacctcatcgtccccagaagcgtccgcaatccacattaaagaataccacctgttagagataagccgaaagatgattgataaaagagattggcaaagatgttctctagcatgaaagaagtaggccgaaaggtgattgataaacagaaacatgctctgcatcgctcaaggacgacccctgatagtaattgccccgcaacagtcaccttgtcattaagtaagcgagatgacctaggtaaaaatgtttctatgaaggcaaggagtgaaatcttcaactcggtatcagatgctacacggagtgaaaagtgcaagcaccggttaccaggtaatgccatgtcttgggagatgatccaatgggaaagaacacatcaagggcaaaggtgtaaaggaatacgttgaatgctaaatgatgacaagcatggtatcctagtaatgacgagctgatctcgacgcatgacatgaagtgggtaacttgtatgaggttgactccaaagatatgaactatgcaaagttctggaactgaagccccatctttaagtgccgcaacccaatcgaagtcagctaaaggttcaaccagggacaagtcaagtgaagagaagaatccatctgcaacaggagatcgagccaagcagtccagagtgaagaaagtttgttaggcaagtttgttatagaagaccgagcgaaagaagtcagacaagaagagaagaccgnccaacctatttctttgttgccttcttgaatttcggggacgagaatttgtgaagggggtggaattgtcacggcctgataattcatcccaaataaaaatcttcttctataaggattatggaattattaaaattcgaagaaattgcaaacattaaaatcggttagaaaaatccatgtggcccgggaaatttggtaaatttccctgggtaaaagaggcctcaaattactgtaatttcaagacccgaaattttattaacaaaccaccattttaaagtttattaaagaaaactaaaatcctctcttcttcttgggcaaacaatccaagaccccctctccctttttttccccc

SEQ ID NO: 46175 - DNA, 757 bp, Oryza sativa
ccatagaatcctttttccatgcccgtgctttgacctctttctacgcataagttaatgtcgatccaaaggaagccatttagatctgagttcaggaaggaagtgaatttaagcaagagagcgataggatagatataaagcttagaccaataggcatcttaggaaagccggtttttaggaaaaaaagtatattagtatactacctcttggagtttcagttgctatccattctgtttgagtgccatatagcttttcctattcagttctagaactagtggttacagcgaatgagcaatcttgtgtatatccaaggtaaagggcaagagactctgtcaattcatccaatgagtaagcaggacagtgaagttagaaatcctttaagtccctcttgaatttaagtaaactccggccctcaaaagtaaacaagttttcaagggtaggggtagcgtttactagccagcaagtaagataacaaagctctttttttcaataagaaaaagtagtagtattccacgggtctcaatggaggagaactttcctgttcatcctactgcataggcaagatctcatccttctttgaatctacgggctcaaaagagagctccccactaccggaaattggggtccaaagactatctattcgaccacctggacacggcgaggcgaccccacaagagagatgccgaagaatatgccctcctcaacgggtcaagccctcgctcagaactaaatcatcctgcggcactcactgcatgagctc

SEQ ID NO: 46176 - DNA, 568 bp, Oryza sativa
  unsure (1)..(568): unsure at all n locations
caaccggattaaactccactcaaagggcccgtaataccggtcaccccccagaaatccagggcattaccccccgaaaagcacatgtntaacccaaaggcccaccacaaggcccagaaacccgtaaaaaggccgcggcgcgcggcctcttccccaacagctctcccccccccgccgaagcataacaaaaaccaaccctcacgccaaacggggccaaacccccccacggactattcaccgacccaagccgtttccccctctgaaacatcccctcggcgcctctcccggtccccacccttgcccttaccgcgtacccggtcccctttcttcctctcggaacggccggcgcccttcaatacctacacccgaagcaacccacccccggtaataggcggtcctccacatctgagccgtggcccccaacccccccttaagacccccccttgtccttaccggccacttactctcggagcccaccccctaaaaacccatcttcccccccctgtaacgcaccgcgtacacgacttctctacaccccgctcttagccgttccccccacacctttaaagcg

SEQ ID NO: 46177 - DNA, 523 bp, Oryza sativa
tttcatacttttggagaacttccagctatcaaagagacaaaaagctaggcgcacctctcctaactattgcccataaaaaataatatatttaatattattatatattatatatatttgcccttataaaataatatatttaatatatattaattcaattttctattgtgtgaagtaaaagaagaaaaggtctaggctccgtcatgacggaatctaagataagaacctaacagaacgtaaaaaatgaaaaaagattctagactgttaatgtcttggctctggaaggagatcgcgtgcaagtaaactaacgtcgttcgttcggcgaccccgcctcacttcacttaacagaaagggggccctattgagaattacgagcatcgcataacagaaaatctatttacaagctactgattctccgactaccaattctcaggtctgtgcttcggttggagtcttggtccgcgggtggaggttcgcgagggggatattctgaaccagacgctatggcatattgccagcccgatac

SEQ ID NO: 46178 - DNA, 3539 bp, Oryza sativa
  unsure (1)..(3539): unsure at all n locations
tttgctgatttccctttctcttgtcaactacgctatttctcaggagtgcctacaaagcataacgaaagatcatgcgttttgattccatttattctcttgatttgatgacaggaatatatatttccatgatagacttgatctagtaggtggagcagcacaaacctgtgatctttcactggattcagcaggagataagtggaatgtgttgctgtgtttcatatagatatagtagagtggcgggaatagtatagtaagctatcctccactatcaaactagggggctatcccttttaggctttggattcttatcttcctacagcaccaacttcctactactatccctttattctgggactcgagggtcttggatggtaagatcactaacccccagcacccttacccttcggcttgtaggattccactacttgacttgagcttgctttccccactagatcagtctactatacggcatgcagatacaggaactggatactagaatcccgcttttcttttccctttgctgctaacttctttgaccttcttgctctgcctgctttgaattacatcttgcttgggtaacacattttaagttaagtaaattctacatgtcaatggtctgaaagagtgttattgtacctactaaagaaatgaaaggccgattacttctccagataccggattctaggaaacaagcaatacttttccagctccgccgaaaaataattcaaatatatagagataggagataggggaaatcttcccttgcgaatctcttcttttagttgatagagtgaggtccacatatggtgcatttgactcccgtgcatgctattttcgtgttcatgatccatcttagccttcttttggattcccctattggtagttcccactagcagatgtgtgtttctatggcataaatagttcctggacttcccttttctttgcacttacttcgacttcgatctgtccctgggtctcaccacttccttcctcaaggcgtatcaatagtagacctagctcgtagtcacttgcatgcttttgacttctcttctctgtgtgatatcgctatttgattttctccatctgcagaaagatgatacgtgacttccattgtctggctttgattgtgtctgcatctgtattcgctgattctttaatattgtaatcagttcagtgtcagtttaccagagcttctgcttccccctgcggcttgagcataagattcgcctttattatttcggctttggctgccttcatccccctttattattgctgctattgctggaagtcctgtttcattttggctgggagttctctgtcagctagtgggagtcctgctattctcattgtaggcgtagttgcttctttcatccagcccagcacgccatagaatcccttttccatgcccgtgctttgacctctttctacgcctaagttaatgtcgatccaaaggaagccatttagatctgagttcaggaaggaagtgaatttaagcaagagagcgataggatagatataaagcttagaccaataggcatcttaggaaagccggtttttaggaaaaaaagtatattagtatactacctcttggagtttcagttgctatccattctgtttgagtgccatatagcttttcctattcagttctagaactagtggttacagcgaatgagcaatcttgtgtatatccaaggtaaagggcaagagactctgtcaattcatccaatgagtaagcaggacagtgaagttagaaatcctttaagtccctcttgaatttaagtaaactccggccctcaaaagtaaacaagttttcaagggtaggggtagcgtttactagccagcaagtaagataacaaagctctttttttcaataagaaaaagtagtagtcttccacgggtctcaatggaggagaactttcctgttcatcctactgcataggcaagatctcatccttcggcgaatctaggggctcagaagagtgctccctacgacgggaaattggggtccaaagactatctcttcgacgacgtggacacggggaggcgatccgacaagagagatgcagaagaatatgccctcctcaacgggtcaagccctcgctcagaactaaatcatcctgcggcactcactgcatgagctcatagggcaagatgaagagaaggagaaaggctaaagagatcgtcaacttcaccttggcatgcttccatcagcgctgaaaagacagcattgaacgagaagagaactaaggcaaggctggtgatgtgccactgtacggggagctctgagaaagtagaagtgctttccttcacgctgagcgtgaactctcgatttcgctatacgaggaagattgcttatgacatcaatcagctaagtccgtctgtcgaagaatttctcattgcattcgatgtttagagtaatagtatagagtgtttggtctcgcttttaagttgtatcggctggcaatatgccatagcggctggttcagaatatccccctcgcgaaccttcacccgcggaccaagactccaaccgaagcacagacctgagaatgggtagtcggagaatcagtagcttgtaaatagaatttctgttatgcgatgctcgaattctcaatagggccccctttctgttaaatgaagtgaggcggggtcgtcgaacgaacgacgttagtttacttgcacgcgattttcgttcagagccaaaacattaacagtctagaatatttttttattttttacgttctgttaagtttttattttagattccgtaatgacggaaccttagactttttttttttttaatttgacaccatttgaaaaattgaattaaatttatattaaaatatatttatttggtaaaggggctatttattttaatttaattataattcttaaagttaattattttttatggggcaataggttggaaaaggggcgcctagcctttttgttttttttgataagtgggaagttcttcaaaaagtatttaaaggttgggaggggtttgtaacaaacaatttttggggaggtttgaattctggggaaaaagacctaggactttttcgcaaaaacttttggaatttttcaatgggtgaaaaagaattgtgggcaaatatctattaaagggaggaaatgccccttttggttttataaggaaccgcaatttttttaaaatattaaaaaggggtaaggcctacggataatttgtaagtaaaagggggcaaaccttaaagcctaaaaaaagcttgtgaaaaagaggaatattattcctctaaaaaattattctaaaaattgttgtggcttaaaatccggaaaaatgtccccaccaatattttttctccctccacgcaaaaaaccggccgaaaagaaaatggcgtcctatttaagatctacatggggagagttggccccctcacaaaatttattattggattttttggggcacaattttttgaaaaaaaccncgctctttttctttttggaaaagaaaaacacctcacaaacaaaaaaggggtgtggttgtttatcaacacttactgg

SEQ ID NO: 46179 - DNA, 526 bp, Oryza sativa
  unsure (1)..(526): unsure at all n locations
cgacgaagaggtgtaggagatgagatggagagcggcgacagaaggagcgggtgggggntcgtgcaggagtggagacaaaagaggggggaggacagacggactgtattgtccttcgatgaaagaaaggggagaaannagtatggtgtgcggaaggaccagggtatgctccccgagaaaggtcagggaaaagggtgacgcaaagaagggggaagggcgccgaaaaagagtgaaagcgccagcccgagggggagtaacggtggcggtgagattggtatagagaagcccgtggggggggtttttcgaccagactgggggagggtaagcttggacaattttgtggaccgggtggtgacaggggggggggtgaggcttatgagaaagaaggcccggcaacgggggcctatttgtgggggttcgggggccgtgatgggagcctaagtagctcaaatgttatggtcgtgcgttaaggccgtggattgtggggggcgccagtattccccgctaggagtggaggtgaatcccgttg

SEQ ID NO: 46180 - DNA, 650 bp, Oryza sativa
ggggagcacctctatatagaaaagatgagtgagtgtgggtgtccaatgatacaagagcgctcattatggggtggcgctcggaggaggggaatcacttataaagggaagcgcgccagggaacaacaccaatatatatttttggggtggaggacgatgtctactatagtctcccacaaggggcaccctttgagactagtcaggagacacgtccccctggtcaaaaaagaagaaaaaagagaaaggggggggactgtagtcttacaatatagaggtccattggggcaacaccaccccctcgtgtttaaaggcccataaagggaggtcacttcccattgggggtgaatattatttcccacagaacacggtgaaggggttttttactctattcggggggggaagagcggccttttttcccaagaacggagccggcccctgcacaaattggtgtgtcaaagggccatttttcccccaatacgccccccgggaaatgtcagggaaacttttattacgcaagagggcacagcacgggggtttccccccggccgccgggaggtcaatattcattttggaaccccgaacaaaggataaaggttttttttttagaggtggaacctttaccccccgaaggaatggctgccttcttttgaaaa

SEQ ID NO: 46181 - DNA, 596 bp, Oryza sativa
  unsure (1)..(596): unsure at all n locations
gagtgttattgtacctactaaagaaatgaaaggccgattacttctccagataccggattctaggaaacaagcaatactttcccagctccgccgaagaataattcaaatatatagagataggagataggggaatcttcccttgcgaatctcttcttttagttgatagagtgaggtccacatatggtgcatttgactcccgtgcatgctattttcgtgttcatgatccatcttagccttcttttggattcccctattggtagttcccactagcagatgtgtgtttctatggcataaatagttcctggacttcccttttctttgcacttacttcgacttcgatctgtccctgggtctcaccacttccttcctcaaggcgtatcaatagtagacatagctcgtagtcacttgcatgcttttgacttctcttctctgtgtgatatcgctatttgtttttctcctnnctgctggtgttttccagagggttcatcgtggnnnnnnggggggggggggagttgataccgacgccacttttcgtgggcggggcgagtgtggcggaaaanatttacacgggcccttttagctgcggggtatttgca

SEQ ID NO: 46182 - DNA, 1192 bp, Oryza sativa
  unsure (1)..(1192): unsure at all n locations
tgatttatcgagaaggattctctgtcgtacactctgctggctaaacctttccggacctgacccttgtatctttctgacccatgtatggaatgatttcttagtcaacttccgagaggcattgaaatgatttctggaagctataactgttgccttaaattaagtaaaaccattcttgatccatgttcacaccactagggtgttgtttccggtcactattttccacataactttcaaggttatagagttctaataatccatatatgatatcactctcaaatattccatccatcttttcatcgtcttggggtacccctaacactgcacctttattgggagaactttaattggttttcaatttaatttaattgatttaatgaactttgttttatttaaaattacttcttgagctccaaaaattcaagagaaatttcagagaatatttagggcacaaaggatattgcaaaaatattttcggccatgattttaaaaggaaattttaattccctcattaatttacttgataaaattaacttttacataatttctagatatgcgctatttaataatttttgatcccgaacgaaaattagggtgtgacaaagagagaccaagaaagatgggaacggtggggagtgaagggatgagcggtggggagagtgaagcgataaggataaggtggagagagatggcagtttttatatgtcgtgtttttaataggattaattggattaatgccattgcaaacatgtcatatataaaaaaaatgccagtattattcgtgaaacatagtgcgtgccattgaaatttttgaaaatttgaaccatgccactccgtcatgatttctgtcatagagatagatgccaagttgttgctatatcaccgattcaatttcatcctttctctctcgtcttgcatagattggtttgttcgtccgttcgtcgtgcagcataggggatcaagaagagaagaaggatcttgtgctgttggtaaatccgaccaagaaggaaggaaaaggatgggggagaaggttactgaagcggagagaggagtggatgatgaggatgaggatgatggctcggtagtggcagcatgcctggatggattcagtactgcagcgaagctagcgagcatccctacaagcggtggtggcgatggctagcggaggacatgtaagccgatcttcaatnggacg

SEQ ID NO: 46183 - DNA, 1168 bp, Oryza sativa
cgacagtttttcgcgggttcacccatatttgtggaaaaccgtatcccgccctgaggaaagttaaaacgcctccccccacccaactcccgaagccaatagatatatatttacagaaaacggaaataagccccacataacgcgaaacgcctctctccccgggggtgtgtggcaaatcttataaaaccaggtggcacgcacaagtttctcccctcttgaaaaacgggcccatgtgcgcccacccacatataatttggagtgtaaggtcccccccattagggcccccacgggtctttcacctcttaaatctttcggggttcgtatatgttgtgttgaatatgtgtaacgggaataacaattttcaccccaggaaacaaagttaatgccctatgtttccgccaaacttattttgggttcaccttataaaatactccaagcttggcctcaagctggggaccaagctcgggttcaattagaaacggcccgcaatggtgtggaatttttccaaattcaaaaagttatccaatacctaccggaaagatcaaacccaagtttcctgtaaaaaaatatatagatggtagtcatttgaacgtgttacatgtgtaggtttgggcgtccatatatgcctatataatgggcacggtgatgcacacaataatcaaacaagattcacagaaactaccatcaataacaggactcctgcacttcatacatggccactgccagctctataaacaagaggtttagcctcgccggtgccacggcgcttgtcaccggtggcagcaaaggcatcgggtacgtataatcaacttaccaaatcaaactgactaattgtttggctcatacgcttcatcattccagtggtgcaaatttatcgaagcatatcatatgaattattaaccatgtagccgcgccatcgtggaagagctggcgagcttcggcgcgacggtgcacacctgcgctcggaaccaggcggagctgagcagatgccaggaggagtggacgtagggctaaccaacccgtttgagttgtaacacattagccgattcctggctcagtgtggtgaagcatcggctatagacgctctgaaagttaggttattctggtaatctctgtcctatcgtcgagttccatccattatgcgtcatgaatgcgcggacagaagggtgac

SEQ ID NO: 46184 - DNA, 512 bp, Oryza sativa
gttattcgggtaaaaattgtgttatattagactaacccgataaatgtatttaaaaaaggccattataccttatgtttcttgggcattttaattgtctagctcttaatgttggaaaggataccctctctttatcggttttgataaaggccgtttgattattagtgttttcctcaaattagacacctaaattttgcattggtcttttttattgcagcatttagtatattatttcgtttttcttcggtcactcgtcccggctattttccttgtaagttctaaatacaaggagctctcttcatggaatcatatatgattttttaattgacccttactccgaatactatttatttgggagtttgtactacaccggtgttctattactccactttaacggtttctccatttttgctcgggatacgctactctatttatgtttctcatctttacatggtacacactttatctatccatggctttatcttctttaaacgatactatctcatttccgcacc

SEQ ID NO: 46185 - DNA, 723 bp, Oryza sativa
cgatgtatatgagacggtgtaataggcggagcgcgttgaaaagagggacgtggttatagagggaagtaggggagagaggcacaagtaaagaagaggaaaggtgagcgaggtagaaagtaagaggggtggatctaacgaaggcagtagtgataggagtatagtggtagggaggagtaaagagaacggtgagtaggttaggagtgtgaagagtgggagatatagagaggagaattagggacgggtagtagtgtgagagagaaataagagaggaagggttggggggagtatgtgaagagaaggagaagagagacaggaagagggtgagtgggggcggggatgaggggggtatgaggagggaagttagggggaggggtgaatgggcgggatagaaggtgggggtaaggagggtgtatagagcacgctaatgggagtgaatagaggagagttgtgggggggggtaggagagggggaaaggggggtgaacgccaggtaggcggcggtaaagagcgtttaagacgggttaaggggcgggtaacgcagtcatataggaggtacagcgtgtgacagcttgaaccggcgagtaggcgccacagggagaattagcgggggactatgtctggcaagagaggtgcactgccaagggggttaacggcgtgtcggacgggagtggcagtaaggacgctatggcgatcaacggcatgtcgatatgggcgctgtatttgg

SEQ ID NO: 46186 - DNA, 593 bp, Oryza sativa
  unsure (1)..(593): unsure at all n locations
cgccanccgcccgcctgggcgtggtccagaggggaaatcactgaacacgccgcgtccgacggaagtgtgaaacccccatggccaaatacacgatcctgctgtaaaaacaaaaatctcccggtgaacctacaacccaggagcgcgcaaatccggggacacgaaacgtagcctcacaactagaaacacccagtttacagccaagcaagtccgcggcacccgcgaacagcagaaaacaaatagtcgatactactacacccggacgaacaagcaatattaaactccttagacgaaacgataattcttgctcacatacaacaaagctaagcctcaacagttccacatgtcccgcacaataccatcacacacaaatccacatgtctctcttctcatacactccagcgctatcacagctcacgaagatcttaacgacttcggtacatcacacagcgactctttcatacccctcatatactacaccctgtgctcccgcagcacacacactcgcgtntagcacaagtcaaacatcgaactcacctccaagaaatacagactactcacactacatccgccttccacacagacatataaccact

SEQ ID NO: 46187 - DNA, 1748 bp, Oryza sativa
  unsure (1)..(1748): unsure at all n locations
cctattattctanctattanttatatatcttaatattgtagtacttctatcattatattttttnttacttatttctagtangtagtttatgattcnnctccncccccctattgnanttttntatctattanccccncnnnnnnnaanagaacaagaaggacgaacaaaacaagcacaccaacaatttttttttttcnactactttttttttttacgaccatactattaagtgattatttttttttattagattttattacttcttttttatatgtttttatttagtattaattaattttatatttattttatatttttttatatatttttttatttttattatttttttttttatttattttttttttttatttttttttttttttttttttttattttttttttttttttttttttttattttttttttttttttttttttttttttttttttttttttttttttttttttttttttttttttttttttttttttttttttttatttttttttttttttttttattttttttttttttttttttattttttttttatttttttttatttttttttatatttttttttttttttttttttttttttttttttttttttttttttttttttttttttttttttttttatttttttttttttttatttttttttttttttttttttttattttttttttatgtttttttttttttttttttttttttttttttttttttttttttttttttttntatattttatttttaatatatattttatgtattttatagttctattttattttatatattatttataactttattataagttttatatttatattttatatttatttttttatttttatttaatttatttttntatttttttttaattttttttattttanatatttgtttaatttataattgtatattttaggattgattttctgtattagttaaatttattttaaatttatatatatttattttctattnttatttttttatattcactatatttattatttttcttctaatataaatattttttttacatttttattatatttaattttctattatatattaatggttatattttttatttattaattttattatttattattatttttttattaatttatttcttatattatttcttaatttttatagttttatatttaatattatattttataatttttatatattattaatatatattttaatacttgattatattttnatattaatatgataattatgtatattgtaatttatatctattatatttttatatattatattgtttagtatttttatgatatttttttgatttatctttaagattattttttctaaggttgtataatttatataaattattattttttttatagtattnagattatttgtttatttaacatataataggatatgtatatttgttttttttatcttnattattnngtttttatattttatggntaaatgaatctataattattgtattatgttatanatagtatattanttttttatatttatttagttattaatatagttttatattactttttttatattattaaatatcttattattgtattataatttaatttggatatnataaattttgcttatttttaaatatatatattattctatgtatagagttttctatgangaattttttatatggtatatcttttatttttttatattttttatatattt

SEQ ID NO: 46188 - DNA, 653 bp, Oryza sativa
  unsure (1)..(653): unsure at all n locations
agggaagaaagacgtacagaagagagggaatgaggattaagaggtagaggtcgtaacggngttagtcgtagcgttgatagagaagagaggatgagagtgatgaatataagagaagtagatttaagagataaggagttaggctgtatacgggtgatcatgagagctatcaaaggtaatacgatatagcggtaagacatacgacagagcagtaagaatatatagttaaaggcgaagagtcagcgcatacgagagaagactaaggcgtaagtgttagaattcgcatagagcgtttatgttaatgataagaggatagagtacgaatagagtaagagcgggcgattgaatatgggtgacgtaggggtgataggtacaggagaactgaataagagatctcagtaagtaaaaataggcgagatatttattaggtccgggaaggttttcaggaactatatattagaagaagagaaattttgtgtaaccctagtcaacggagagactaagacgttgattagagtagccacaagcaacccgggccctgtttaaggggtacggagcctatttgcgggcccttttgacacaaattgtctttaccagagttagcaccgtaattttggtaaataacggtatttaccgcccttgaattgatcgtaaag

SEQ ID NO: 46189 - DNA, 915 bp, Oryza sativa
  unsure (1)..(915): unsure at all n locations
tgaagagtttctggtccttcctctacttctcttcctcgtcgccgccaaagctgccgcaaccctaaggaggaagttagtgtccatggcatctgcggcatgggcctcaaggggtggctctgctttgggccgcatgaatagcaatagcagcatccacgagcggtgacgtctttgatatcggggcggaggctcgaggtcactggcgagacagcttggcatccatctacagagtgacatggttctaattttttaaaaattctagcggcacgcaacaaatttcaagaatagtagtggtatttttttagtatgtcatatttgcagtgacatggatccaattaaccctttttaataccgtgaagcgttttatttatcacgcaattgcgtagcagaaccgatggtgacaaaatattttcaaaagtagttggctaggaagatagcttgtgaaaatggggatatttttacaggcaattgttttaagacgacaactagtgatcattaaacaagggcgttcagttatattttcacaagtgtttcgaattttatccactagaggaaaaaaaagaaagaaggtgccaagaaaaacacattttttattagtgcctcacttataatataatttgtgacacaaagtccaaatgcaatagaatgaaacaaaagtagatgaaaagaagacgcgacgacaccaatcaaatggaataaataaatggaacaatataaatgagtgatgaaacttccctactatacattcatgcttttggtatcgtatattcttgattcttctaaccggcatgttgcagagaaacgcacgcagcaactgaacaacggctgcgtagtggatcggcccaaagccgcgcggagacagcgagacgcgatctgcgggcagtcatccatcacacgncggccgagcaatcagcgctg

SEQ ID NO: 46190 - DNA, 2482 bp, Oryza sativa
ataactgcttcaacaaacgacactgtatatattatgtcaatcggggaagaaagtgctgctagcagctcctaattagttggccaatctgtcatgcgcgtgcatcatatggaaacatgcacttgcgtggctgtctgttgatgctcatgatgatcagaaaaataacttggcgactgacgtccggtcatgccgatcagagaaacaactcggcgacgacagtgattggatccatcgcttaaattaatcttgccggctagattggatccaagttggagaagaaaagcttagcgaattcgtcggcgacgagaaagttgcagctcccgaagtaaagaggaagccggcgactcgtgaagttgattccatcgtacttgtcgatagaaactcgacgcacccctacctagcgcgccaactgtcgaaacatgaattcggcaataataaaagggggtagcgcacgagacctaaaagtggatggatgcggagacaaggatttaaacaggtttaggccctctcaatgagaggtaataccctactcctgtttagggatttaaatccgccgggtgtagtatagatctgacgatcatatgtgctcatgccccctagagggcctcctgtccaccttatataggatgggagccaggattacaagatagaaaccttaaccaatacggtatcggtttcctaaatctattttacaatattgtcaaatcaggactttaggtcgctccataatataaaaggaaacgtaatacccaagtcatgatttgttacatattcctttgatataagctatcccctatgactagtcagataaccatgccgtatgggtatgaggtacccataatctccacatggcaaacacataattgccgatgaccgcttctctgtcctctgatgagatagcatgatcaggttctctccaaaatgttaggaaaaaatttcaatggcaaccatatatcgtaaacaggatacttgtttgatatgcaatgcccaaaccattgataacaggtaaagagtactatgatctgctcgtcaaagaccacgaagaaaaaatgatctacagatgtctgtaacacactaattcttgaggatatattagcaacaataaccttttggtatgcacttgtgttacaaattttataacatcgaatgaataacaggaaacctaaccattaccagaaggatattaatagtgtcagcaaataaagttgggtaaacattgcaaaaatcatctctcgggatcaaggtatattgcaatcatgttatcttacaggaatcctataaaaaaagcaaaataccagggcctatattgtccatgttggaagatttaaaaaattggttaaagcaaatgtaattggcacattaaaatgacaggaaggaataatatgagatatagcttaggaggttgacaaattacagattaattagcattctttaactgtagatagaaataaatgtaagatttgatgcagacgcctactcagtgctcatattacttccatagatactctccatgcactttagcttgttttcacttatagaaaatcggcatccttatgagagatttagagtctcatgggagcataaatctctactatctcataaccatttgtgataccttttttttcgagggtgctcatacctaaacacaaaaaactaaaatacattcctatccttgaaaattatcaaaggccattgatatgcagcttgaggtgccatggtagaaattaggcgagattccccatgttgatacatctgctgatgatctgcagttatgcacccatccacaacaaagtcaattagtatacctggggatactaccagctttttatgaatgataatcaaatagtgtgttcccaaattagataagatatattgagcactcaaccattgggagtttatatattgaaggacaataagtacaacgtatctgagagcatatttttagagtttatgaaaaattgggcggcgaccggccggcgatggaatcagtctgcggcgcgatgtagagagaccacttaacataatggttctagcatgtagatcatagaataatcaaataatttgatacccctggatacccctattctggaaatagtacaactgaataaattggctagactacagtacaaagaagaataattgaataaattggctagactacaatacagagcataataactgaatatgttggatagattatagtaccaaccaagtctaggtataattctgtccaacagaattaacagtgcacatgctattctctttcaaattcacatgattcataccaaaattaatggttcagacttagtaacattttaaacatggaatcaggtaggggaacatatatacatgatgagagttggggagaaacaaagacctttctagcaacttgtgttagggtctggcccgtttggcgtttgccacccaaatttagatccccaggagttcgaaaaagccaccatggccaatcccatggaactggaac

SEQ ID NO: 46191 - DNA, 2299 bp, Oryza sativa
  unsure (1)..(2299): unsure at all n locations
gacggcaaagccggtgaaggtggttgagcggcgcagcgacggctaggacggcagtggtggtctgctgaagacggcgtatggtggtggtggctcgggcgtgtggtgaaagtggcactaggcggttgttttggaaaggtggagtggcggctggcgtgcggcaaggtgtggcgaatgtggtgnaggcggtggtccggcatgaggtggctgggaacgccggcaagaggcagccggagaccgacacaggcggtggcggctcgggttgatggcgaagctggtggctcgggggtggattggaggattggaccggctgccggtgtgcggcgtgaggtggtaaagccggtggtggtggtttctcgatgcggcgacgacaggaacggcaacggcgcgctgttggagagctccagcgagcggcgcagctcggcctcgcgcggggagagcgggagaaggcgcgacgggctcgggaaatttggggaaatgggagaggagagcacgaggatcgtttttatgggctcggggtggtgagatcgtggctgtggagggtggaatcggccggcaacggccgacgacgtgggtgacattgtgggcgaagtggggactcgatttggcgcaaaaaattgcggaaaagtgggggatttggtggaggagatggaggggaaccgatttcactcggtttgggcgcgagggcgcgggtgggagggcgccggattcggcgggacgtgggcggcaacggccggccatgggcggcttcggcctgggaagccgaaggtagtaggaggacctgacaagtggggtcgccgggcccacctgtcggggagggagagaaggaggagaccgagggggttattcagactttgtgcgaggggaagtcgatcgcgccgagaagggtggggtcggcccgagagggaggagggaaggagagaggggcgagcaggctaaggagggggaaaagatctagggccgaaaatggcccaaggagaaaggggagattatttgattttctttttatttaattggttaaatgatatttgtaatagtaaaattagatattgagcttcgaaaattcgcgggaaatttcagaaagttcattagggcacaaagaatattacaaaatattctcggccatgatttttaaaggaaaattttaatttcctctataatttcacttgattaaattgatttaacttttatttaatttctagaaaatgcattattaaatgatttttaatcccgacgaaaatcggggcattacactatactattaatatatggtcccacctgttatacatatattacgtcttggagtccgcgctgcagctggctatatatctgtaacccactgctcttctctctctttttttatctttttaaaatatatgtttatagctggtttatagcatgctattgtacatgctcttagagcaccacaccatagctaataagtgttcctagaaagcttaataaattttaataaatttttatcgtatggtatatactccgtagatagaagataaattccgtcgacggatatctcgactcaccagtatggaaacaggagcgtatggtagtccatcattttctccgtgtgagacagaagtgtgacacccttgtttaatacctagggcaggccgccataaagtccgaaaataacatcccacctcccaaactaattagctaacttcctgtctgagctaggaatcccacaccggtattacctgagataacgaaaattcttcgcctcggacgaccggcgtgggggagcgaaatcgggcactcttcccccatgcgacacgcatgccagtgggccccaccatttatcttgccttcacctgccacgtgcccctatcaaacatgtttcaccaaaggtattcacaatgtttcactatgtatatatataatgttgtagtatattgaaatattcttttgcaacaaatcacccacatattttggaaaccctttattaatgaaattcgtttcattttttgttccacccaaatatgttcacctagtgtactcacaatgtttcactatgtatagatctattgttgcagtgaacgaaacattctcttacaacaaataacccacatattttggaaaccctttattagaggatccgttttatttttgtccaccacaaatgttcacccagtacctagaatatttacttggataagactaatatgcattgactgaaacatctttccttattgttgaacttatttttattaagtaaaccaagcccgattaaaccatagttccaccaaaagttttacccantgtcctcaaaatattactttggttc

SEQ ID NO: 46192 - DNA, 523 bp, Oryza sativa
atttgacttcaagaccaaaagcataggtggctggtttggctatgtggcggcatatatgggccaaggatccgttacccctcgagagcatgtagctttcttgctcatgtggttagaaaagttcctcttctgtggatccagttgtggccctacaaccaactggcaatttctagccgaagccttagaatcaaagaaagaatttcctttgggcaaaatccttctcggctatctgtaccaaatgttgaacaatgcatcggctaaaacagccgtcggctcaatagttggagcaggtggaccatggtagctgctgcaaacttggttaaacctgatagtcattaaggttgtcaatcagccatctgtaacagaaactgaattcccaagattagagccgactgttaacgatgacggagaggaactcactcatcggagatgcacatcatatggagagtacgcctctacaccaactgatgcaggagcaaaactatcggccgatctgctcaaagattggttttgtagcttttatgag

SEQ ID NO: 46193 - DNA, 740 bp, Oryza sativa
  unsure (1)..(740): unsure at all n locations
ctcgtggctgccatgtggtgcgcccgcgggcagtgcgcacgtagaccgagtccaccgtgtattaatgaacataattcctatgcttgatgaaatcattgtcaaatgggggagaagtaatgtgaaaattttggattttatgaaatcattgtcaaaagggggagaagtaatgtgaaaattttggatttttggagaagcatggtgaatttttgaagagttgttgagaagagcatgtttttggttcaattgggaatttctttcttttaaaaaggggaagaagttttcttttggattttttagcacgatgtgtacatttgtacgaagtgtgctttttatttttccaaacaccaaaacatttttatgagtttgccaatgtgttcatcaagggggagattgtaaaattaaagatgtttttgattattattctgtgatgaacaattgggcattggagattattggttttgttatttggaatttattcacgaagtggttttggtgatgattgggtttacaggtgaatcgcaggattgttatttcatgtgaccggtcagactgnnnnnnnnnnnnnnnnnnnnnnnnnnnnnnnnnnnnnnnnnnnnnnnnnnnnnnnnnnnnnnnnnnnnnnnnnnnnnnnnnnnnnnnnnnnnnnnnnnnnnnnnnnnnnnnnnnnnnnnnnnnnnnnnnnnnnnnnnnnnagnctcgacgagtgtagcttcctatgaagaattcgggatgagtaccgg

SEQ ID NO: 46194 - DNA, 2028 bp, Oryza sativa
  unsure (1)..(2028): unsure at all n locations
ccgtcatgatgctctagnacccttgcannagncnngnncgacgagttcttgctttcgggttgagctgcatcggtttcgatcttcaacaagaggtatttcttgtttttacatgtaagtctctcgagtcaacgtataagtgcattgaagaactgcacagctagatgatactgaaagtgcattaatccccctagtgggttttggtgattaatgacaaatgtggttaagggactaatgagttcattgagtaactttcaggtgcattagtccaaaggtgtggaagatggatgcttggagaccccccaaaagtacaaaatcaaagcggactggaactcgagaagtgcataggatagtttatcttttgaaatcgagtttttaggaaaaaccgtactattaagaggggttccaggtgatgctctgagatatgtcaagtgctcttagtgtgaaccaagtgtcaagtttccctaggagtcatttctgcttatactccatctgtccaaaagtgcaggtccggaacttcctgtcttctaggtccggaagttccggtctgatgaaagaatttttccaaagtgttatccggaagttcctggcttccaggtccggaacttcctgtctagtttccagttcaaaattgtgagtaacggctagatgacgtcacctagtcattatacatatacagctcgtttccagctcgttctttggccattccactttcacttttcgaacctagagctgttgctagcctctcccaagtgtttcttgccttctccactcaatctagagcctaattcttgtgagatagagagattgagagggagagaagaagatttggagtggtgtgaagactaggaacttgtgtgagcacttgaatatctcgtgggctgtcatctcggtgcttattatctcctagacggttaggtatcacccgcgagaatccgttgcatattgtggatgtcccgggtaagtttgtgaaggatttcctttcctccgaaagggaacgaggtaagttagtgaagttcttgtgctgagattctagaggtcttccaagtagagcaacccacacttgtggtggatttttattagtaggttgagttggatcttggtggttacttaattttaaaaatttgcctaagggtgtttgggggtgaaagctgtggattttctttgggatttttgcacaagtgaagcaaggggttaaatgagaaccaatttttttggagcttcttaaagggagagtttgattgggagatccgaactttgggaaaaaaatgcttttggatctttctgggaagtttattggggatgaatttgggaaatattctttggttaagaataattggtggacaattttgtgaaagtttggctttaatattttggttttgaaaattggaatttaatttttgttcttgttacccggaaatttctgtgtttaaaacaatggaagttccgggcttgggaagggcggaagtttctggaatttcttttccaggaagttttcgagttttattttaattttaaagggttggaattttgtattttaaatatttaggggagaaacttatttaaacccgtcttttaagggttatattaaaaggggggagaaaaataaaataattaatattttaaggcatatgagtgtggctcagatatgaaaaatttaaacaagttttgggagaataataggtatataaaaagtgtgggtgggagacttttggcaattttattcaatcgggagaggaggggttttataaagatgtttgtttaaaaaataaaacaggtttaagttgaaaaagaaatgtgatatctacaaatgggtgtgtaaacacaaataaaaggtgttaaaagaaagaataaaaaaattttatatctggaggtcttaaaaagaaaatatacataaatatgggttttataatatgggaaattcgtggctgtgggggggcgtttatatggtaactagatttgtacaaattgtagtaaaatgggggttttttgtgggtaataaaaaagtggtgaattaggtatattggtctg

SEQ ID NO: 46195 - DNA, 549 bp, Oryza sativa
  unsure (1)..(549): unsure at all n locations
tccaaagaaaaattgtgcaaacctgctttctgtataaaacagaggatgattcatatggtttgtcatggcttatcacttttggggtgatcttgctttggttacggcgttgatgtgcaagatcacccccacacttgtctttgtatctgggatgctttattggacacaaaaagaaaaaacaaagacaaaagtgaagcggaaaggactcacttggttggaagaccaaggaggcgactttattttattttattttattcatgaaagctagacctaagataactagaaggaggcctaaggactcatggcattaaaaactaacgaatcaagggggacctgaggactccgggtagaagctaaaagagactagattcacaacatctatgtgacgatcaacttctaacggatcaaggaaaacttttaaacgatggccatttaccttaaagatgttaccttcgttgtcgcgcagagtgacagctccatgtgatgaagcgtcgactacggtatatggacctatccatttacttcanagtgttacatgcaggcgtcacattg

SEQ ID NO: 46196 - DNA, 1139 bp, Oryza sativa
  unsure (1)..(1139): unsure at all n locations
cttgcatgtgatagatccatacccctcttaacaaccgtgttatggggcaatgggctgttttcccggggaaggttaaaaccggctcctgaagaagcggaattcacaaaccgattttaccaccgatgaagtatnacacccttaagcccngatgagttgaaggatctggttacagtccagattggcgtgtccntgcaaagggttacccaggaccaaggaatgtgttactcggcacttatataagaaaagtggtgcctnaaagattttacagaagnagactgtgtatggaagttgattttgcgatttggtaacggtgatggtaatttcggcaagtggtcgccgaaatggaaaggacgtttccaatttattaaggttgtgtctaagggagcatatatgtgcaaagggcttgatgggtnaagtctatggcgagcgcttcaatggcaaatatttgaagaaatattacccgagtgtttgagttaatgcatgacagccgatatgtttccatcgccttgagatggccgatatagttatatcacccttagttgtttttatggtgtaatcggttgtggtttgccgatgaccaatggccgatattgttatatcgcccttagttgttttataattttatcaatgcttttgacattgtaaaattaggggggcacatacatatcaaaatgcaatgcagcttacaaattttttgagcacatatcaaaatgccatgcagattgtcaagacagtaaagtattataacgtcttagccgattacaaaatttgtaagttctattacatacaagttattgagacaagtattgctggatagccgatatagccttctgcctaatctgttccacttcttctatggcttgggcatcttgagcgtcagttccagggataactttcaaggacttggtcatatcagcgacattcttgatagccgattttagctttgccttttgttcttcaacagcttgcgggagatcggctagctttttgtgctccatatccagctcggcgttgcattcttgaagttgtgccatgagatcaatcttacgagcttcaagccgatcgatatttgacttgattatgccttcagacagctgatctagataaacttctcgacatgcgtagcacaagtgtaatag

SEQ ID NO: 46197 - DNA, 1528 bp, Oryza sativa
  unsure (1)..(1528): unsure at all n locations
aaaactattggttattttttcaaaaaccgtggtcaaaataagaaatttgtctcttaaaagattaaagttgtttaatagtatgaatcaggggtaggcnttaacctttagacatttcactccaaatctttgattcaaatatttctaccgatggccaccccccttataatttttgtatgacaatggtgtgcacacaaattgttgctgtcaagatgtacgctccccgatccacgtcatggatattttactacattaagacgtctctgttatttttctgtgttaaacaccatctcaatccctttaataatcgttgtcgacatatatacttgccccaacacatttttctcgccctgaactaccgccattgacagattagacacaccctggtcatcgtccgttggccacaaattcataactctcgcctcgccatttcaatttgtcgatagagggtgtgtttggatcccagccattgaatgccaacactcctgtggcgagccacgccatggcgtggcattccaaccgccaaccaagcagccctagaatatttgtggtgtgcgactgatcgactaatgggccttgcttgtcgttaatcgaacatgtggatatattcagtagactgttaacggaaacggatcctctgcagtcgaaccaatcatatctacttccttcgtttcacaatgtaagtcaatttagcatttccacattcatattaatgttaattaatatctatctagatttattaacatcaatataaatgtggaaaatgttagaatgacttgcattgtgaaacggaggtatattctttttggaataattctattttgcctccctcaagtcttgcctctgattgattagtatccctcaactgcaataccagatgtaaggcctcctccatcttcaaaaaccggagcaaatcgaatccctcgactgtttggatagcggttttatcctatgtggcactcatgggacccatatgtcagtactaatctctttttttttctttttactcacatccctcttttcctattctctctcctcgccgacgagcagcaacgcaatgacgacgacgaccaggaccagcattgccacccgcacaacatcgatgactgcgacgacgaccagtgcatgcgttatctcaccgaagcatgagtgcataanccatgttcgcttgttttccaaccgtccctaacgtcaggtctcgagggccaacatttgcggggttccggtagaccaaaggtcccttctcttccncaccccgcgggtgtgtcgcgttgaaaaaaggttgccagttttggctttcctatccatgctgtggaagaggaaggagcccatttaggggcagaatgggagaaaaaccacaggaagtgggaaacccctggcttttatttttccattggcaccctaatgacctggggtcccacggttttataaacctaaaggcccgtaaatgccctgttaaccgaaacccacgttcaaaaccgctttgggatttatttgccttggtggaaattcatgacaaataagagaccca

SEQ ID NO: 46198 - DNA, 963 bp, Oryza sativa
gattggatatgtttacatgttgatttgtataattcaataaattatagataatatttaattcttgcataagtaattatttctacttgcatgttgagctttagattgagtatgttgtatttttataatttatttaggtatattcataaaacattgcgtgaaaaatagtatattttagtgtgcgctagaaatgttactatctaaacaatattgtgttggtctaaaatgtccaattaataggcctagcagctcgggcagacatgattgggccagagagagcccagtctgctgtaaagaagcgaccaggcccagctgcagggagcaagtgcttcggaaggaaaaactccatcttgactccctcaagtatcttaatagtaaaaatcgagtacattgactcactcaactattaattaatactaagcattttaccgagctcattggtttgcgaggtggttttggctgacctggcagcctaagcatttaaaaattaaaaaatagatgtggggcgcacatgtaagtgacagaaaaaagaaaatctatagccacaagtccgacatgaagaacttgagatagaagcttgcccaagcgggggttgccggcaagccctcttgactccgaatccaacaccatgtggtgattgggataactttgtgcagcaacagtaggctgcagaagcaaaaatagaggatgcttggggtaaggatcacccaatgggccagattgaggaaaaccctaggccaactgattgtgttgcctaatcaagtgttagaagaacataatctgatggataaggatcaacaggtgcagctttttctggctaggctcaaaggagatagctgacagggaagggccaaagcatccatccttttatcctatggaaggtctattggaaaagattgatcatttgtgcaaagctagaaatcatgcatacaactttgaattctggcccttcagctctgccctatg

SEQ ID NO: 46199 - DNA, 3458 bp, Oryza sativa
  unsure (1)..(3458): unsure at all n locations
ccgcgcaattgaanctcttctnaatncactacaatataaaattaatttacatatattatagaagtaacttaaaacaaaatgaaggtaacatgtcacaacattagaaataaatccgttgtgggggtaactatgatatattgattaaatctaatttctggatagatttatgtttttacccccacaatagatttcttttaataccattggatgggtttgttgacataaaaaggaataagttcacctgtgcttcctcatcttaacatcgagatttttttctcttaacaataaaaaccagaaatatatacacctaaactcaaacaaatagtcctatgatagtatggggcccacatatcttatttctaccagcaaaaccacccatatatactgcttaggatcttgattgcacgatttgtttgagtttagggatactcatttctggttttatggttaggggacctcaaaaatctcgctgttaagttgagggaccttcggtgaacttattcctcatagaaaaagctatgaggttggacctttaaaattgatttctcgatttagggaaatattttacctcgatagtgatgagcacgggttccgatcttgtaaagataactgttgatttagcaaaaacatgatacacattacctcacttcagatcaatattatctgaaccctgcaatcgtagaaccatgtcccctttggttatcatttatctcgccgagaagactaatttctacatgtgaatcgaataatacaagaaaaacatggtagattaaaaaaatattgtttagtttcgagtttacaattcattaataattttttcttcattgggaaaatttaacatctcggtgtaagatgaatattatatgttcaaaacttgtcgtcaaaaattaaaaacatagagtgaatctttgtccggtggagggatgccaccaccgccttgacatcggccnnnnnnnnnnnnnnnnnnnnnnnnaaccacctaggccacttctccatgactgacgccctcgaggcctcaccgacaatgaccgactatgtggctatgcggccgcactccttgctccctatgcggctatgcctcatccttgtgacgcaagagcgattatgttgtgttgttaccgtgctctctcatgtggtatgtagagcaccatccttttcaaaacgatatctcactcatagaacataaaggtcgtaggacaaaaactgatttatatggttggtctattttaaagataaaatattgttgggctgggcataattcttttattttattatataaaactaaagttacatgtggtgtttgaatctcctgaagatgaagatgaagttttttacgcaaaacgaggtggtaataacgtgtgattaattgagttttaattattataaacttggaaaatgtattaatctgatattttagaacaactttcatataaaaaggtttcgcatgaaacacaccgtttagcggtttgaaatacgtgccatgaaaatctttatctccatccaacttttgttggactaacgaacagggatatttacattgcacaggacgcaaggttcaaggaaagatgtaactaattgtccacagtgttttgtaaattgttcttcattggttcattccatcagtatgtaagagaacggccttctttttaaatctctggaaccatttttttgtggcacatcccctggaaaattaaatctttcatatgcttccaaatatgccatctaactagcaaaaagacctgcataaaacctgttcggttgaattgcattcttgcgagtaacactaccagaaagaagtttaattagatatggtattttctaagtattattctgaaaataatatgggattgcccgacctttatgtagaatcactccacagacctaaccacgcaatctgtgaaaatgtgactatggaaatgtattcctctgacattggcttaaacgttgtagacgtgtatgtagttcacttcatctctgccgttgaagcaatccgggggcattccaatcctgcatcttgccttctgtatcatgcggctcagtagcgcaccacgccgccagcaatggaaggacaaaatctaattcgtgcgctctctctgtattgccctatcgcgtgacatgttcaccggccgtccgcccgatcccacaagcactggtgcgtccgtctaaaccacacatggcctggcgattcacgtatgtggcattatcgagaagaatctgaatctgaagccatatgatgctctaggctacacctgcgagagggacacatccacctatacacctctacttcaaaaaattttttttcttaaactaatcatctgatctacgatctgattacaccgttgtgttcgtaagaattgaatctttataaaaagatctcacatgattatattttgataaaaaaatataaattacttttataatatatctaaattacttttagatttcactaaattacttcttagtcataaaagtaatttacccatattatagaagtaacttaaaacaaaaagtaaaagtaaagtaacttgttatggtattaaaagaaatctattgtgggggtaaaaacataaatctatccagaaattagatttaatcaatatatcatagttacccccacaacggatttatttctaatgttgtgacatgttaccttcattttgttttaagttacttctataatatatgtaaattaattttatattttattgaatttatttttatatgtctaagattcaacttaatgaaatctaaaactaatttatatttttttattaaaataaacatgtgagatcacgttataaagatttaattgttatgaacacaatggtataatcggatcaaagatcggataagtaagttaagagaacattttatttgaagcataggttttcttatacatttataatgttgtgagttgtttattttataatcatttttagttaatgacgtaatttatgctgatttaatttaatttctatatagactcatgtttttacctcataacggatttacttttaatgtcatgacaagttactttctttttgttttaagtttattctataatatatgtaaattacttttaggctttattgaatttacttttatggatccaagaagtaatttagtgaaatctaaaagtaatttagatatattataaaagtaatttatatttttttatcaaaatataatcatgtgagatctttttataaagattcaattcttacgaacacaacggtgtaatcagatcgtagatcagatgattagtttaagaaaaaaaattttttgaagtagaggtgtataggtggatgtgtccctctcgcaggtgtagcctagagcatcatatggcttcagattcagattcttctcgataatgccacatacgtgaatcgccaggccatgtgtggtttagacggacgcaccagtgcttgtgggatcgggcggacggccggtgaacatgt

SEQ ID NO: 46200 - DNA, 1143 bp, Oryza sativa
  unsure (1)..(1143): unsure at all n locations
acgtcattgannnctggctgtctcttcctaattttgtgcaccacttcctgattcatgctcatgatcttcatgttctagattttgtgcaccacttcttgatccttgatctccatgcttcacccaacatgtgtagcccttcatgaaatctctttgtatcagattagcgtgtacgtccactctgctgtaaaacatattctcatttttgcaatctgcacatggacaacacatgcaatcgttgtttcttcttttcctatcctcctccgcggcgttaataaaattcaatatgccatttctatacaccttggtatgacgtcgcatagttttcccatacatctaactttgatccatccccgagcttcataaaagtagaaaaatattagatatacattttgtaggtaagtatttactaaatttttgagaattgactactatttttcaattaaatttgcaatttatgattttcttggagaaaagagacaaaaatcaccgcctcatactcccaccaaaatagtgaacagtgggataaccattacactaggtagttggggtatttatactgtgcaataaatatctgtaacggccaaaaaaaatacgacggtaacaggtattttagttatctttgtcgggcctaagtaaaagctcatcaccgataacattcatcgtgatgggcctaatataatagttatttcaaccaagcctcaagttggagcccgtcaccaatgatggacatcagtgacgtgcttcttgtagggccccgacaagaaatcatcaagtatcttttgtcgccctcaagttggagcccgtcacaaaatggtgtcattcgtgaccggctcgatttttatgcacaatctaacatgtcttgtgcaagtattatctttgtccgcccttggtttgggccttgtttgagatgacttcaattgtgacggccccggaaaaacttagacttgtgaggagccgtcaccagaataagaatgatctgtccttgtgtattaaaagggaccgaatccaattgaattgntggattttttccaatcccgcagtgaataaaccctattatggaatcttaggtcaaaacaaaatcaagggctcattccataccggttnggttcaaaaaacccatgggaacgtgtaatttattttctt

SEQ ID NO: 46201 - DNA, 625 bp, Oryza sativa
cgtttttaattctcccttcccgcggggagtagtctttccctcaaaacgcggataacgctcgacagaacatggagtgaatggcccggctatggcccggacccgaaaaaggccggcgcgtggcgttttctataggttcccccccctgcagggattacccacggaagacatgtgtgctatgggccgcacaaggccccgaccggtaaaagcctggccgctcgcgttcctcaattccccgtcacaccgggcgttttgatcctttcaataatcccctcatcacttcccttcttcccggccggtcacgcgtccctttatcccatgggctctatgttccccctcttttcgcgcggggttccgcccctgcgtcggttctgggctacatccccccggtttaaccccggcgcggtccctattggggtaatatacgctctgggacccacccggacgaacaccattttccctctctgccgccctccttttatccggtgtttccttaccgggttcttggccggcgcttctcttacaaatcccggttatacacgggggctccaccaaaatatccccttttgctcttcgcggctgatcacaatcgctcgacataaaacatcgtgcgctctaatcatcaccg

SEQ ID NO: 46202 - DNA, 1086 bp, Oryza sativa
  unsure (1)..(1086): unsure at all n locations
ttagatgtctacactaagcatacagtagatgatctcgatgacaagcaaggtcaaggtttcatgtcagccgatgatttggaagaaatagacataggtccaggcgatcggccaaggccgacatttattagtaaaaacttatctctggagtttagaaccaagctgatnnnnnnnnnnnnnnnnnnnnnnnnnnnnnnnnnnnnnnnnnnnnnnnnnnnatatataattcttatgtcgatatatacttaaatcaagtgattgggatagatcgatcgccatgccgagacagtataaatcacttagatcaaaatatatattaataacaggactatatatgtttatagcatagccccatcagatagatctagcatgtatcggctaattccaagccctcttggaatgaaagtgcaccggcatcaccttatttgaactgattgatgaagcgatgagttctccttcaaagatatgatccgatatgagtgcccgatgatgataccagtcttgctcggggacgccaggctccactatggcgatgcagacatcctcatgacgacgaggcggacattgagggacggtaagatcaacacacagcacgcgcaagttaccaccgtgatgaaccacttgcccttgacgaaaaaaatgtngcggnnnnnnnnnnnnnnnnnnnnnnnnnnnnnnnnnnnnnnnnnnnnnnnnnnnnnnnnnnnnnnnnnnnnnnnnttgagtatttttagngccacataaatagggtggcggaaaaatggacatagttgttttctgtgagaaattgtaatcccttacantttcccacaacattacgagccgggaataattaagagtaaaccctggggcgcctcatgagtgagctacactccaattaatgtggtgccgctcaccggcccttttcaggnaggaaaaactgcctgcccgctttaataattaattcgacacccgcccggggaaagggnggtggttattggcccttttccctttttttattaatgaattaataanntcggggtnggggggggggggcggttttccttctttaaaggggtattcgtgttcccaaaaagcgggggaaagcga

SEQ ID NO: 46203 - DNA, 542 bp, Oryza sativa
  unsure (1)..(542): unsure at all n locations
gagtttggttcgtggctttaggctgcctaccccatgtataaatagagatgtgaatcgaataattcaagaaaaacatggtagattaaaaaaatattgtttagtttcgagtttacaattcattaataattttttcttcattgggaaaatttaacatctcggtgtaagatgaatattatatgttcaaaacttgtcgtcaaaaattaaaaacatagagtgaatctttgtccggtggagggatgccaccaccgccttgacatcggccnnnnnnnnnnnnnnnnnnnnnnnnaaccacctaggccacttctccatgactgacgccctcgaggcctcaccgacaatgaccgactatgtggctatgcggccgcactccttgctccctatgcggctatgcctcatccttgtgacgcaagagcgattatgttgtgttgttaccgtgctctctcatgtggtatgtagagcaccatccttttcaaaacgatatctcactcatagaacataaaggtcgtaggacaaaaactgatttatatggttggtctatttta

SEQ ID NO: 46204 - DNA, 1088 bp, Oryza sativa
  unsure (1)..(1088): unsure at all n locations
gtgttggagtcaccgtggatggacgctcgggttacggagaatcgcacgatcgntatttcatgtgaccggtcagactgggctctggtagccggtcagaccggcgtgttatacgcggtcagaccggcgcagcccgcggtctgaccggccgacactgtgtcggtttcggtttcgggttgtttagttggatatccgagtttatttcatgattatgacttctagatggatactatacgtatgtaacactattgtttgctgctaatgagtcaagttagagatagcttggtcaaagaatatggtttctttgtttgttccatgagtaggtgtctcgatgtctccggagagtatttgcggtgatggaccgggagtcggcttggggataagacaacgtccgtggtggtcagagatcatgcgggatactagggctagagttgatgcacgtggttgatggagattccatatggcatacgatggagttattgtgtgcgtgtgggatgcggagttgaatttggaaggagtccaaatttggtacgattggttatgtaaaggttctttcttgtactagagggttttctaaggtgtttaggactcctagtatgagtttggttcgtgggtttaggctgcctaccccatgtttaaattgaaggggagcggtgggctttcctgtattgctttaaagagcaattgagttgagttttgagtaagggttcgaggttatcgcaaaatttttggatgagtgcctgtggtgcactttgtcaaaccgtgggatcacttaaggtggcatctactttaaaggtctttcacttgggttaccgggtttcgggggtttaacgggacctaccggggggcaaaacgacggcaatcggacgtacaccggtgggaacagggcggtaaaaccgctgggtgcgatgctcaccacaagccaatccgggggtataccggtaataaaacctgtgcaaaactgcgctctctttgtgtaaaccggttatttactttgtgtcgaccattcttatcgaaatgggcggaattttattttcctttaaacgtttggtgttggtgtttacaaacatttacccttccctttctggtgg

SEQ ID NO: 46205 - DNA, 1986 bp, Oryza sativa
  unsure (1)..(1986): unsure at all n locations
gaatcacatgaangcctagtgacacctctgcgtggcgcggatgggtaggggagggttatgtggagggtcttgtcacgatttccccctttgcagtatcatggtgatactccaatcactgtcgtcgccgagttgtttctctgatcggcatgaccggacgtcagtcgccaagttattttcctgatcatcatgagcatcaacagacagccacgcaagtgcatgtttccatatgatgcacgcgcatgacagattggccaactaattaggagctgctagcagcactttctttcccgattgacataatatatacagtgtcgtttgttgaagcagttattctcctcaaattaaccgtccagtgcgcacaaacctcatacatgtgaacttcaaagatatgatccgatatgagtgcccgatgatgataccagtcttgctcggggacgccaggctccactatggcgatgcagacatcctcatgacgacgaggcggacattgagggacggtaagatcaacacacagcacgcgcaagttaccaccgtgatgaaccacttgcccttgacgaagaaaatgttgcgggttagggttgagatcagccattgtatgcgaggtaaagttttggggattagattgaacagtgttcttgggagaggaagggatacggggaaaaactgccatctttttggccggagaagatttagctctccaaactagattattccgagaaccatgtttcggaaacttccctgcagattgatgggctgcagcgggcctgggggctgaacagtaacggtccatatgaccagactccaaacaagaaaagcaccgtaaaggcctaaaacaattagaagcattgtggcccttatccaaacaatgcgtacaggaagacaatggatttgaatttaaacaacgcgcagaaataggatcaccctccttgattggctccaccggcctggtcgctggagcatcatcggagctagggttctccaacccctaaagcctctgaaaaacagaccttcttttctggagaggagccttcaaacgctgaaacaccgacttgatcgagatgtcccgatgttgaacaacctgggcataagattttcctttctgaaccatagaatttttgtgcactgatgtcttcttagaggagaccaatttccgttcatcagcacaatcacggctccaggtctcgaattctcactgccaaatagggcccccatttctccagagataaaagcgaaggtcaaaatcatcacaggtaaaagatctaacgtgataaatccacagcccaacttgcttagagcaaacatcaaaagagaaactacgatccaacaaatgctgaacattgaaacccgccggagatccaccaatagtggctcataaagcgaaaatgcgatggactgaacttcgagaagaagtgcaccggagatcaaaatcgatgctgtgcttcctccctaattgcaacgccaggggagaagtcccagcctcccggcggcgcaggcgttaccatcacagcgatcaccggaaatcactcatatcatcgcctccaaaaaaaaccggtttttgtgtttttatgtgggtggtttgttgcaatggagtatgtgtgtgaagacacgtggcatggacaccatgggggcccaaggggcaccttctcccccccttttaggagtnttnntctttnttttctccttcctnctcttcttcctttttctctcctttcttcctcttctnctctcctcctttttttttctctcttcttttcctcnttcctcctctctcctcctnctctccttctctctttttctcnctttctccttcttccttttctctcttctctcctttctcnctctcctcnttctccctttntctctccctctctctcttttcctttntcctcttcccttctctncntcttnctctctccttnccctccttatccccctttnccttttcctccctntctcttcttcttttcctcctccttctcttcctcc

SEQ ID NO: 46206 - DNA, 2668 bp, Oryza sativa
  unsure (1)..(2668): unsure at all n locations
tttgannnattggacggccgccgtgtgatggatatgcaaaaagaaagaaaaaaagtgctcatacaagtatggagcatgatgatgagaaaaaaaaagaaagaaaaaaaaagagatagccatgcacttttcaaaatttcaaaagagaaaataaatggaggaggtacacaaaaggagttattattttcattccttttcacccacaaattaaccatccacatacacatgcacatttttgaccagaaagtatgtctcgtatttctgtggatccattatttgactttgtaatatatgtgatgcaagtagtgctctactcttttccacaccctgagctccacataagccttattagatggtaggaaaagaaaggggcatttgcaaatttgccaccggttttttcaatattgtaaggatgccactcaaatgacagttctagtggtatttttgcaattttctagtggcagttttgcaatgatgattcaaagtagtttcagagaaggcgcaatcatatgccattgtgaggaatcatacactttgagtgatcgagagaatcaattgagcaacaaagcagagttataattttgtgttacatgaaaaaccctaagttgttcttcatgaaaagttagggtgacttgagtcaagattgttccatttctcaattgctcaggattgcatggaagacactataaagatccacaactataggtatgactttgaataatttgtttgcatgattattagtaagaaagtcataaccctgttgtagagtccatagccttcactcggacgagtgaaggttaagtgtggaggtgttgttgacggtccttaaatcataatatttgaccgtcaatacttgcatataatgaaataaaatatggtatccaacttagtggtaggttttattactaatcatttccactagtgttggtgaaatatgtgtatgcgggtattttgaggagaaaacacatctgtcatgcgacaaaatgcacctccgcatattcaggacgcgtttacactgattcgagggccccatatgtcaaccaaaaccacttagaattgagccaaatcaaagtacatgatgttggaggcccaataagctacctacccgccaaaggagaggccgggaagacatttttttggtccggccgaaccgttgttgtggctgttaatcaccagccttccacgtgtacgctcctgatttcatcccaatgacggttggagggtagtttggtcgtttcccatacttgtactatcatatggaggctataaaaggaggagcttactctcattccaacacacacaactttgagctgaattacaagaggctctattgtatcttttgtacattagaataaggtcgagagtgaggggaagctctggaggagtgcccggaagtttggtgctcatccgacttctacctcgacgagtgtagcttcctaggaggaattcgggaggagtaccggagctgtcggtatactctgctatgggttcggagaaacttcttctattaagtaagcatccatgttcctttcttatgttatttaattactttgtgtaagtaggatatattttcatctttgtgggttcattgtttagtattcatactaagttctctagtactaggactccggaaagagaaggaagttcctgcgtaagtattagagtagtaattaataacttagacatggtgtctaggttagagattacctttgtttgttgtgtatcccatggatttgtcaaaggtaggtggcaggtggtgacagccctgaatcccgtcctagtaatcctccacgttcgggtacatcatagagctatagccggaaacacgctggcagaccagtaggggttggtgcccgaagcaacagataggaaattatctttgcttagcttagatagttaaaacacatagaaagtcctctctaacctacctaccattaggtagattacacacgttccttgagttcgatatccttttagggtcacccgaaggtgaagtgctacagcggtattccgtgcacttgcggatttatatgtgatcgtaagaaataccaacagcggctgacgcggcgacgggctcggggacggcgtgaaggaggtcggtggaggacggcggtcggctcggggatggtgtggaggtcggtggaggacggcgggggacgtcgatgcggcagtagcaaggacggtggcaaggacggtgggggacggcgtggaggaggtcgacggcggccgacgcgggctcgaggaccggtgccggctcggtgggcgacggtgtcgggctcccgaccgaggtggcggcggcatgagggctcgggaacggcggccgatggcggcggtgggcttccaaaggtggccgtgctagggtcagagagtggcgaacttcaaaaattttcatctagatctgacgagagtgaccctaatcaaatatgggcaagcatatctcaatcgggctaatctagacccctgacggcattaaagtatgcccgtagagtgacatatatctttgagcttaactaaagccgtacgatgaatatttgtgagggcctaaactaatcccctaaaataagtatttttttagctttctttaaggccccccggaagatttgccatttttcacttgaccaattttttttatatggtgctttttagggcctgtgtcaaaaattacttataa

SEQ ID NO: 46207 - DNA, 2199 bp, Oryza sativa
  unsure (1)..(2199): unsure at all n locations
agcctagttttaaaaatcaaagacgctctatatataaagtctccgggttttaaatgggggtttcttaaaacccaaccaaccgcataagaggagttgtaaaaagaaaggtggggtgttttaaacgaacgaaccacggttcttgtggaccggccggacccagctattctttttgtttcaaataattccggccccaattggtagataaatttcttccagaggtaaggtccaaagtggttgtaaccatgctcaaagccaaaaattggaaatttgggattgcccaaatgacccgaacaattcggctttggtgtttccgacggtattccgtcctttaaactaaccgtcactgaaaattctcacccgtgatttcctttccccggtcaaggaaaccttgtctttttctttcgggaattcttccaacgcaaaaaggacttccaggggatttattctggggaaatatttcggccgcaagtaatgtcgtcctcccccaaccatttaataccccatcagcggagtatgttaaggtaagtcttaaccggttagatcccctttcttagaagcagttcgattttctcttatctaacatccctctctttttccgggttgtttggaatntgtagcatctctccaatcaagtcgcgattccaagcctctcatacgaaaactactattttctcggcccagtggacaaccctgattccactgagtttattattggtaaaccaataggatccccttcagattaaccaccccagatctaggtcactgaaagaatactttcaaatcttggcggtttatagagaaagtcccacctgaaaaagttggaccacatggttcaaacgtgtatcagcaagaaaaagggttcactgggatgaaattggaatcggccaagaatttgccctcactatagtaaactcggccaaagatgaacccttgagggcaactgctttttatttggggtcaaacaccatcaatgcctttttgtttaatcaagggccgatgactccaactttaatcgatatcaccatgataagtggattagatgtaacttcatcggctaaccctatgagtatgaacaccaagaactaatttgacttcaagaccaaaagcataggtggctggtttggctatgtggcggcatatatgggccaaggatccgttacccctcgagagcatgtaagctctcttgctcatggggttagaaaaggtcctcttatgtggatccagttgtggccctacaaccaactgggaaattttagccgaagccttagaatcaaagaaagaatttcctttgggcaaaaaccttatcgggtatctgtaccaaaagttgaacaatgcattggctaaaacaggcggcggctcaaaaattggagcaggtggaccaagggagctgctgcaaacttgggtaaaactgaaaggcaataagggtgagaattagccatttgtgaaagaaactgaatttccaaagattagagccgactgttaaagaagacggagaggaactcacctattggggaagcacattatatggagaggacgcctttacaccaactggtgcgggagccaaaatattggggcgaactgtttaaaaataggttttggtagcttttaagaagggggttcaaaagggggatttatggggaatcaaacacatttggaaaaagcaagcgggatttagaattcgaggacatcaccaatgacaggatattaaaaggcttgagaaatcttttatttggaaaaacgccaggggttctttcagtggggagtaataacgggggaaaaaaccgaggtttccaacagtgtttataagccaaggggtccggccgacaatttgggaagggacaaaccgccaaaggggtaatatttggcgctaagaaaaaaaggccgggagaaaaagtcataacttttaatagaggggcgggtgggttaaaaaacaaggaacgtcctttgggtgggaagggagacaaaaaagaaggggaacgctttggggagcaaaatattttctaaggtgggggtggaaagaagctacccatttatttaccacacggggtgctatggtgaagaaaaaaaacatttcataaaaaagacctctccgcaagagcccccacacacgtgcggttgtaagagagaaaactcagcggggtgcggagaccgttacaaacactctttccagagtggcgcacaaaaaaaattagtactccc

SEQ ID NO: 46208 - DNA, 1274 bp, Oryza sativa
  unsure (1)..(1274): unsure at all n locations
attccagcagttggccccgtttgtgctccgcgcagccatcgccattgtcgcgggaagggagcacggcgcgtctgtggtgctcgtcgtcgtcggtctcggagcccgagacgtggcagtcgtagcagatctctccctcctcgatctggtcatcgtcgtcgacgtttgggcggcggcagcggtgaccaccctccatggcgcccttgctggaattaccaccctccatggcgcaaatattcttggcttcttcttgttgctctagggctccatccaatggatacgatacggctcgcgaaagctagaggaagaatctactcaggctagggtttgttccactaatccgctcggtggctgtgggcggccgcagcgacgcagtgatggttaattatatatatagcggcgtgcgtgttgcatgcgttttttgcggcgtgtctgtgtgcgtagagagagatcgagagagagaggagagaaccactcggatacggtcgggctcccttcctcccaacgagaacttagaaagtttgcctctgttacgaatcgactgctgagagagagagagtagattttatggtgggacatatttttccttaatatttaaaatcttttagagattgtatgtggtagatatgtagtgtttaaaatttctgagactgaaatttggtttaagattgtaccgcaagaaattatttaaggaaataaaatgtctgatagatggttactccacgataaaaaaatggttagatgtttaattaattaaataattctagctttatggatattcctaaataaaaatggtttaatttcaataattaacctattaaacttttttgtctgcaccgtaagttgctttttgggtttttttggttatcatgtggttcattaatctatgtttaaaatttttctaaatacccctcttttcggaaagttttttgccaataatgtgtttgggctatgtctttaaaaaattattttttttctttattacacacactccttcctttgtgtgagaacattacaccctcttgggggagtttttttttcttccctcaagacgcagttcagacgctgggagaagagtatcattatgngccctctaatttggcacccgagtcgaaattattcccttactcacaaaattggtacccgcgttcccacatctttaaaacaccccaaataaggccctatgcgaatatgtgttcacggtgccacacgggccctcccaaggataatggcctcttctgaacaccttaaataatttgaaaacgtccccagaaaag

SEQ ID NO: 46209 - DNA, 2066 bp, Oryza sativa
  unsure (1)..(2066): unsure at all n locations
gacagcggtgaccaccctccatggcgcctttgctgaaattaccaccctccatggcgcaaatattcttggcttcttcttgttgctctagggctccatccaatggatacgatacggctcgcgaaagctagaggaagaatctactcaggctagggtttgttccactaatccgctcggtggctgtgggcggccgcagcgacgcagtgatggttaattatatatatagcggcgtgcgtgttgcatgcgttttttgcggcgtgtctgtgtgcgtagagagagatcgagagagagaggagagaaccactcggatacggtcgggctcccttcctcccaacgagaacttagaaagtttgcctctgttacgaatcgactgctgagagagagagagtagattttatggtgggacatatttttccttaatatttaaaatcttttagagattgtatgtggtagatatgtagtgtttaaaatttctgagactgaaatttggtttaagattgtaccgcaagaaattatttaaggaaataaaatgtctgatagatggttactccacgataaaaaaatggttagatgtttaattaattaaataattctagctttatggatattcctaaataaaaatggtttaatttcaataattaactatttaaacttttttgtctgcaccgtagtttgctttttggttttttttgtttatcatgtgtttcattaatctatgtttaaaattttctaaatacccttctttcggaaagttttctgacaataatgtgtttgtgctatgtctctaaaaaaatattttctctttttattacacactcttttccttttgtttgagactttgactccttttggttgtttttcttttcttcctcctcatgcagttctcatgctgtggaataagttcatattaggtccctcaatttgtcaccgagttcgaaattcatccctacatcacaaaactggatacaacgcatccccaaacttataaaaccacgcaaataaggtcctatcgtagtattgtttcacgtgttgcctacatggcactccactaggtcttcgttccacgtggcgcttacatggtaacttgatccgaaaaaataataaaacccacgggacccacgtcagctatacacaaaaaagtaataaaaatgatgggcccatgtggccccacatgtcatcctccctactttttcattctttcttcctcttttgcttctacaactatatgttatccagccactgtcgggagcgccgcgctagcggagagggcagacgggaacgccacgagggaggaggcgagatcgtcgggccggctgacgtgggaggagcggcggcgctatccagccggcgggagggagggaaaggagcggcggtgcacggggtcggtgttcggaggaagggcaggagaggagtgacaccgcgtggggactggtgggagagagcggcccggaggccggcgggagaggatcagcggcgcacgctggcccggagggtcggagggagaggaacagcggcgcatgccgtgccgccggaaaggtcaaccaacaggagcgctgcaaaggtaggaagcgagctcgtaagggcagccagcgagagaggagcggaggtgcgcgggggtctgcggccggcgggagagcggcggcggtgcacgaggaccggcaggagggagcggcgcgcgcactactacaaaagtgatttatcttacgagaccccatgattttttgcaaacggaccataactagtggcgtttataaaaatcgatggtcatttttgcatgcagccccttaagtggcctgtatggaaaaatcgattttcccgtacaggcctcttaagaggacagtatgcaaaaatgagatcattttcgcttgcggctcacttaagcgaccgcatggaaaaatcgatttttccatacggaccacttaaggagccgtatgcaaaaataaaatttgaaaaatttaaaactagtttatctcactcatatgaactttaaattagatgattatttttcctaaaagtttctaaaatcatgctctatcntgttnntgccacttgcattcatntcatggcca

SEQ ID NO: 46210 - DNA, 2232 bp, Oryza sativa
  unsure (1)..(2232): unsure at all n locations
gattgcnntttgttgancncccnctngngatggatttctaagtcgaatgctttggtttcttctttttcctctttggatgttgttgacagaaaacacgaggcctaggagatttgcttaactccagtgcaggtccaaagctcgccttcgggtgcgctagcgtgccagttgatttgatcctgtaatcaacaagaaatagaagcaaagaaaccgtggttaaatctataaatgatagccgatcggctaggtgccgatgacatatcatttatctttgagccgatgtcatatgtgaatctatcggcagttgcaaataaacaataaaggactaaatctattcgatcggctgtagatatttccaatatataattcttatgtcgatatatacttaaatcaagtgattgggatagatcgatcgccatgccgagacagtataaatcacttagatcaaaatatatattaataacaggactatatatgtttatagcatagccccatcagatagatctagcatgtatcggctaatactccgatactactctatatcaggatattaaaacaggtaaaatatatcaaacagaagcctaatatacttaaaaaagtaatatcttgacataaagggcagatttaacgtgtcaatgaagcatatagagcaaatataattaaatcagataagatcggctgacactccgatgctaccctaatcgacaaccagaagacaggctagagattgatattctaatcatgacttaatagatcaaactcaactgatgcagcattaaatatgaaaagaagaacaatatctagacaatcaagccgctggaagtttcatagagtggtagatatcttatatattccgagtcaacgtcagaatctaacctaatcggctgccttcctcgatagatgttagccgattgtaggttagatagcgatattgctagagattatgtaagatatatgataacttgacgaatcacataaacaagattagagtatcataaagatggaagcgctaatctcaagaacgcaagccgtcataacaagttttacctcttgttgaagatcgaaaccgatgcagctcaacccgaaagcaagaactcgtcgaaacaaaactaaagtaaaaaagggtggcgatgcaccggaattatattgaacgtgtgtttttaagttacatagggctcggttctatttatacccgagaattacaagatatgtccataatggacacgattaccatctctaacaaactctaagatactataagtctttgcggcagacttttgcccaatcgtatctctaaagaaattacataaagcatcctaattaatagatagaattgcctcctcagagactctatccatgtgcggcaatctccttgaagcacctcaatccaacccgacatcacacgtcaagttgtattatcagaatcagctgtatcggcttttctaatccgactcagacccagccgatcctagtcgtagccgatccggactccagccgattccttgctctgtttccgaactcgatctccgcctccaactttgcttcgatctaatcttctttcctgatgctgatgttaccaaatctggttggtaacacatgccctccaagtccagaatatttggaatgtttcggatttgctgaaatcgactccgagcaaatttcgcactttgcttgtttccgaccgttattgccgtgctttaaatactaaccgtcaccttcgagaaatctcacaccgtgacttccatttncaccgctcaagcgaaaccttgtcctctttcttctccgccattnctncaacgcanaagcgactttcaggcgacttcatcttcggcgagatttccgcccgcagtgatgtcgttctccaccaacccatttgatacgccatcaaccgagtatgctgaggtaagtcctattcgggtagatcccctttcttaacaagagatcgaatttttcctaattttacacccctctcttttttctcggtggttgtgtatttgaagcaatctttcacatctagatggggattccaggctnttattcgaaaaacattaatttttgggcccggtgaacaaccccgtttccactgggtttattattggggaaaccaaaggggccccttcaaatttacaaccccatatttgtggcggggagaaaacccttaaattgggcgccctttagaaaagactcccccaaaaaaggtgcccctcgtggtaaagattttttaaacaaaagagg

SEQ ID NO: 46211 - DNA, 1528 bp, Oryza sativa
  unsure (1)..(1528): unsure at all n locations
agtcggtgacacttctgggacggagatccacttcacatagcggcgttcaccggccagagatcggaccactcggggtgaacattaaagtttacgctttcgaacactgtcttcatcgttccagcttcggtaatcaccgtcttcgaattcacggtggcgaagaatatggcgccgaagagttcggcacttggctcaaacccggaagtccggcacgcccagtcgaagatagcgtccggaccagcgccgacgggctcaactgcgggagctcaacctggaaaaggcgaagaatctccggcaacaacgtgttgcacggaaaccagagccccgcctcaaaaaatacggcgaacaccactgtccggttgtcgatgggtttcggtacaacggctttccccgaggcgaaagcctgtccctcgactaaagccccagagctgaccaactttgcctgctcgccatcgtctatgagagaaatccctaaacaggcggtggtgtcgttgtcaatccggccggggtcgggccctttcgccgaagaggggttaggcttgcggggagccatgacgaaggatgtatgaagtggcgaaaggtgtgtgcagtggcgaacaaggggagtgagcgagaagtctaaggggccaaggggtgccgtgagagtaagaacggaggaagagagcgcgagcggtgaaagtggcaagtctggcagtgaaaaggtaacggggaagcatatatagcccaacaaggcgacgtttcgcctacccaccagtaataaagcgccacgtgtcgcgagggtaggcaaaacggtaaattcccatcgaccgagctgcacagtaaaaagcccacaaagggaagacccatcactgttcctttccgcccgataaaaaatatatatcacagacaacgaactttatttgcaggaacaatgtaggtttcggcaggagcatcggtcgaaggggggcgccacatatcataccacataccacatggtttgaatggtctcggccgaagctccaatctcacccttgcccgtgagaggcttgttggcggtatggcatgaggcccttcgaccaaaatctgccgaaggctatgtgaggagtggggagccaagcccgagacgtcaaaattagtcggggagaagccccccccatggcgaagactatggaacaaggacggcgcgagaggcgaaggatcgtgcgggtactctgctaagccggaggcctcttgggcaaaggatgcagggcgaagagtacatgccgaagggagacgacttcgccaaagcaagcgcgcccccgcgagggccagagaagccttttccggcccatcaagcctagaggccattgggccggcgatcgcctaacggcccatcaggagtccataaacctctattacactatatacccatgtaaatgtccctttcataagggtaaccatgtaaattcccctgtataaccaaaaccctagtagtaagaacctataataggggctataaatagtccttatagggccnagccgtctctcaccagtcgtcttactngggctcata

SEQ ID NO: 46212 - DNA, 575 bp, Oryza sativa
taagtatgcggaagaaggttctgatattcctcacccctaatattcattcaagccgcctttaacttccctatttcgctaatcgtaattgtatggcccgattatgaatttgacttcccctgcaacggttcatatacgtcgagtccttcgttgtttacatccgcgtgtgctacgcatcgttacctgcccttgggccctcgccctttcctctctaccttcccttttcccctcttttaccccgtttcctcctacgatattattcgccgtcttcttttgacgtctcctcagtcctctcttcgaccctaatccctataatcttgctctggcttcggtgacatcatcatcactatactctctcctacctttccctcttttgacattgtctttctcatctcacaattactcttctctctctctctgtatactgcatcctccctgttcctcactatcttcatcttatttctctctcatcctcctttcttcatattcaccttactctctcatccactctcattctccccatcgtccgctcactctcatctatctatctcccgtacttactccattctaccttcacc

SEQ ID NO: 46213 - DNA, 2129 bp, Oryza sativa
  unsure (1)..(2129): unsure at all n locations
acacgagcgcatggaaggggttggagctcgtttggacctgtttggacctatatgacaccccaaaacaagttcaaggatccgaaaatgcattttgagagtttaggtacctagatgacacacccgcacaagtttagggaccgctcgtgcacttcactcataaattaaattatagtacctcctctatacatatgttcctcagcataggtacctctcttgaaaaagggagggtaattgctttataaataaaatgccacatgcaaacggggaaaaacgtgattcttcttgtacgatatatttgtcaatgcctcgtagtcaactcaatttcatgttttttaagcttttcatagaaggacttgtcaatgcgttgaatgcacgtatcagagcaggaatacccatgacccgaaattaataaacaaagcgcgacatgcaaatatcaaaaccccatttttctacacgtatctacacaacctagtcgattggcaaatttcttccctccaattaacaaaactaggaaggaagcctggatagatacgtaggcaatttatttatctatctatctattattattatatattaaaagtccattaaacttcctacaaacgttctcatgccgccacattggactcctacaaacgctcctaattaagccgccacgtggtaatctaataaaccggtggacccactatttcagatttttagttattagatttacacttatttggtggacccaataatacatggaattagttctattttttggtaaaaaaaaatccacatcccgcttggtccgtgcgtacgggagatcagagatacacgccctccctcccctctatccctttaattctcacctatttccatgctatatgatctctcttatttccatgctatattagtttctattttcatgctatatgatctctcactaaatcactaaatcaccgtcctatacacatacgtacaaacgtacatacgtactccctagctcccttctgttccacacccggtgttccgcctttctatattgattatgtaaaaaacggaaaacctaaaaaaaattataacatataaatcaagctgctaatttaaattagagataatccaataaataccattgacaagtgtccaaatctaagaaatactatcgataagcgtgaattccaagaaataccatcgtacaaatgattttgtctaaaaataacatcgccgttagggttctgtccatcccgcgccgttaaatacactgttcataacccaacgagacaataaactctaaaaactataagatccctttttaaaggttcgggcttctaaaaagtaaaaaaaaaccaataataattatgtttgaatttaaaatctcaatgacaataaagaagagcggcagcaggcgagccgtggaggagtatagtgacaaagtcccgggcgttttggcggaacttctagaaagtaaaaatggagaagatgcagtggacggccgtagaggagtataatggtagtgtttgacgaggcttctagaaattataaaaatgaaatccaacaggacaataaactttaaaaactataagatccaacttttaaaggttgcaaggagaatgaatagaaacagtggtagatcgagcaagcaaacaaagaaggatatgacagaagtaaggggtagcaactagtgtgacttttaaaaacaataaaatttaaaacatgaggatgataaggttgggtttacaatgtcttgagancacaagataccatttaataaatnttagtaaaacatataaaatatttatattttatatggatgctaaccgcgccaatgccgaggcccaccaactagttatttgttaaaagttattaaaagaagcacgtttcttctattcaccatagnaggatatgtnttaatatgcaggaagaaaatttnatttataacgtgaatagacatagaccttaaatcctgaaagtaatgcttatacatgccaccaaaattactttgtacttttatttgtaactggtttcacacatttttgggaacaataaaaaaaggtngggttttttttctttttttccacctaatcccctttgcccctgtaccgtccaaggaaaaattttattggcatttatttccgctaccttataacctt

SEQ ID NO: 46214 - DNA, 1405 bp, Oryza sativa
  unsure (1)..(1405): unsure at all n locations
aaaaaggtattccaagtgagggtaacaaaaggtgacttttaaccaataaattaaacatgggttgataggttgggtttacaattcctgacccaacaaaaacttttaaaattttaaggaacccattaaaaaaataaattttatagaagctaccggacattgggaggggcacccattgtttttgtgtaaaagtaattaaaaaacccgtttctttcaaaaccacataaaaagaatatgttatattaagcaaaaggaaatatttatttaaacggtgaaatagacaaaagcctttaatanactgaatgttaatgtctatcacatgcaaacaaaaatcactttgtcactattatatgtaaactcgtctacaaccatcattcgcaaacataatataggttttgtttttttctttcttttattatacatctaattcacttatgccatggtaacgtacgaaggaataatttatattgtcatattatttacgctaactattaatactatttacatgagagcggcataatgcagtttcttgtgccatttaatttcgatcttggactgaactgttagtgctgacatacttgataaactgataactcactttgctgacaaggaattggtgcatcttttgcactgactttcgtgaatcctcatatgcttactttgctttgaactactcttgacccggaaacaagtatttgaagaagttgcttgatcggcatttcacctggattacgatttctccctgttcttctgtaggctgaactgttgacacggcagcccgggtgtacacgttagatttaaatctgttaacttggcaataggcttctttgagctataactgttctttccctgcttatctgaacatccaattgaaacggttacggggcatgacaaaaatcatcttcgagacttacccttaaaacaagtggttgagcatttgcctgaccgtgatcaattaaactgctatccttgaaaataaccaaacttcggttattttcctggaaccctgacttggagaactcatcgcttcatcaatcagttcaaataaggtgatgccggtgcactttcattccaagagggcttggaacataacactgatcagttgttgacaggaagttccacaaaagtgactctcattcagtttccgaacatacagactcttgattgacctttccatctgcatgactgttctgttctgccctgacttcggtgtcaactggttgaacgggctgcttagttgatatcttgaaataagcactgatcacttaatagatcaagctcaaaagattatttcctcgatataacatttcacttctttgcttatcctttattgactcctctgggttgatagactataagctctaaagttgctttccnncgatnnctgcgagaggtgatcataagggcg

SEQ ID NO: 46215 - DNA, 512 bp, Oryza sativa
cttatagaacttatcctaatatgttttttcgtatttgttgtttcactgattcaatcatttcaatcaaaattcaacaagagttattttcccttatgtgcaaaatctttactgatactaaatataaccccttcatataaatggttctactccatctatctgttcatccatttctccttattttagatgcccaaaaggacactctagtcgacattctcccccctttccgagtgaaggatctacagcgcattgacacgacaaacctctacagcttcgccaacgtgcttgccaatgtagtcgccgcagcgcggctgtcatcagggctcatactcaacaccttcgacttcatcgagggtgacaacatttgcaggatccgcgacgagctctccatccctgtgtttgccattggtccactcaacaaactcataccactcgtcggaagaagcagctttcttcccccagattgtgattgcctgaggtggcttgacacacaagcccctagctctgtgttgttc

SEQ ID NO: 46216 - DNA, 1149 bp, Oryza sativa
  unsure (1)..(1149): unsure at all n locations
attgaaaccactggtagatagctnccggcgtggaacggagctaggcagcgccgggccgggaagaggaggtggcagcggccggctggtaggagactttgctcactgctcttctctctctttttttatctttttaaaatatatgtttatagctggtttatagcatgctattgtacatgctcttagagcaccacaccatagctaataagtgttcctagaaagcttaataaattttaataaatttttatcgtatggtatatactccgtagatagaagataaattccgtcgacggatatctcgactcaccagtatggaaacaggagcgtatggtagtccatcattttctccgtgtgagacagaagtgtgacacccttgtttaatacctagggcaggccgccataaagtccgaaaataacatcccacctcccaaactaattagctaacttcctgtctgagctaggaatcccacaccggtattacctgagataacgaaaattcttcgcctcggacgaccggcgtgggggagcgaaatcgggcactcttttcccatgcgacacgcatgccagtgggccccaccatttatcttgcctccacctgccacgtgcccctatcaaacatgtttcaccaaaggtattcacaatgtttcactatgtatatatataatgttgtagtatattgaaatattcttttgcaacaaatcacccacatattttggaaaccctctattaatgaaaatccgttcattntttgttccaccaaatatgtttcacctagtgtactcacaatgnttcactatgtatagatctaatggtgcaatgaaccgaaacattcttttacaacaaatcaaccacattttttgggaaacctctattaagagatattgttttatttttttgttccccccaaaagtgtttcacccaggggccccaaaatttttcaactttttaaagattcaaatttggcggggcactggaaacattttttcgtttttggtggaacatatttttatatataaggaaaaacaatgcgcccgtttaaaccaatatttccaccaaaatgtgttcccccgggtccccacaaaatttcacacttggttgagataaaattggcgggggcctgaaatctttttttcctttttgttgaaaaatttt

SEQ ID NO: 46217 - DNA, 550 bp, Oryza sativa
ttgtgtaaagtgactacctatccattctgatccagcacctgtgcgatagaattcgatctgaacctttaagtcgcaatggctttgaaaaaattagtgttctcttcacccagcagcatccacctattcgtgcaccttttttcgcaataaagctttttaaactcaaggagcttaaaagtttgcgacttgacaatttctctgaaattccattcaaacatggtcaagggcctatgctcttctattaggtctaggaaattaatcacagcattacaattgaccaagagagcagttaactgagacaagtttttactcaattgcagcaaactttttctcaaaaattttagcttgaaactgatgcatcttgccggatcttcataactagtgtccattgaccaaactctgctgacaagctcgaagaagccttccatttcaacccaataattctcaaatctaaaaattggagactttgggatatattgtgggccaggggatgaacagtggtgtttggaaaagccaaagtccaagatggacttgtaaaaacccatcaaagcgc

SEQ ID NO: 46218 - DNA, 4080 bp, Oryza sativa
  unsure (1)..(4080): unsure at all n locations
gagaacacaagcaagtgagtagaagatgcaatctgaaaatattgcaaatataagatgaatctgacaagttggggttccacagatcgaactagcagcgttattacacttttctgaaagtatttttttaggcggcgtgtgctcttaggaaaatatttaacggagacatcttagcagccgggcggcccgcttgcgaaaaaagccaaaacgtatcttcacaggcagacccccgcctgcgaagatccgcaccctatataagggcagccacccccgtgccaaattttctaagtccaggcaggaaccctagaaaatttggcaccgttaggctgccgaaattttccaccgccgaccacctgcaatagctcggcggccgtcctccgccacatcctcctctcctggccgggccactccttcgccgactggccacgacgctgcttttctcgcgtactacgaccgctcctactcttcttcgggccagcaccgtctcctaccagccggacgctgccacctcctcttaccggcccggcgctgactagctcctaccgtccgaccgccgccactaccttcttcgtggctggcgccgcctactccaggccgaccgttgccacctactccttcctggatgacgccgccttctcccgggcgatcgccgccaccttctactcccgcgccagccctggttcttcttgggctggcgccgctacctcctcctcctggcagaccgccggcaccctcatcctcccgggccggcaaagcctcctctcgggccggcgccacctcctcctggccgaccgccgccacattctccctggccgctgctgaagactctattcgactgacattcggccgatcgtcgtccccgactttacgtccacgaccgaacgtcgcctcggccgcagctcgtcctcgtcatcgtcaaccgaatgaactcatgcatgtgtgtgaggggtttgaatggtatatatatgtgtgatggctttggatgacatgtggggccggtttgggttttttttgggatgatatgtggctatgtgctatgtggtgatatatgtgttttatgtgttatatgaaatgttgaatgtgggtgatatgtgttgaaatttttttgatagggcatgtgggtgttatatgttcaacttcttttcagatgacatgtgggtgagatatgttcaatttttttatatgacatttgggagatatgttcattttttttacgtgacatgtgggtgatataagttcaatttttttaatatgatatgtggaatttttttacatgacatgtgggtgatatcagttcaaattttttcatatgatatgtgggtgatacaagttcaatttttttatatgatatgtgggtgatataagttcaaatttttggtagatgatatgtgggtgatataagttcaatttttttgtagatgatatgtaggtgatataagttcaaattttttgtagatgacatttgggtgatatatgttcaattttttaatgacatttgggagatatgttcaattcttttttaatatgacaggtgggtaatatatgttagatattaattatcgttctcattcttatgtttatagtactaaacgatggctaatagtcctaaaggagatgaagataaggatgtaggggccatcgtggagtactcacagctgatagtcgagccttcacaacctaccgtggagccgtcatagcctatcgtggagccgtcacaagcaattgtggttgcttcgcaacctaccgtgccgccagccgatgggtccgacagtgatgaagctgacgagggagattcatatttgtccaagcccgaaatggcggacgaaagatgatggtgaagaagacgacgaagactacgtccttcgcaagaaagtggtaggtttctataatgtcatttgagttgcaactgtacgagtgataaatagtagttcgtactaactcaaccattttttaattaatatcgtaggaaatggggccacaaagatctagatggcatccgaaaaaagccgcccaactcgatgaagtcccaactacgacctccaactccaagaagaaagcaaagtccaaagagcttaccaaaaagagaaagggcaagaggagcgtgaatagaatagacgatgggttgtacgttgtcacccacataagtccaaatggtgagccgctcgcgccctccactgcacgcgcaaagttcagctttcagtgtagcgcaatagtaagcgataagatcgcagtcatgatcaaggactgggatatatagtgtgtcagcaggggacaagaaaactctttgggatgagatgaagaaaaggttctagttccctgagggatcagaagcaatgacaaggaattgcgcattgcaaacaatggacaaggcgtggcgcggatagaaaaacactctgaacacacaattcgtgcacaaggggaaggcaccatttaagaaatatgggaaaataacgctgaaccaatgggacaaatttgtaaagttcaagacctcgccggaagaaatggccaagagtaaaaggttgtctgacttggccaagcgaaaaaaatgcaccatcgactgggctccggtgggtacgcacgtaagattgcactgtggaataaagaggatgaggaaatgaagaaggcgggggttccggtgccaatggaagaatggaacatacaatccaatcattgggtaaaagaaaggaccccgaagatcacatcggaagggaaagtgttatttgaagaccccgagctgcagggagttgccgacaagatagaagatttatctagcaaggaaaagaaaggagaatttatcccacagagggagaaagatgtgcttagccaggcgttgggaaatcgggagcacgggggtcgggttcgaggagtgtcctctaagctgagttggaaagaagggttcaaacaggacgcctcctcgtataagagacgtgacgcctataaggaaagcttgagggacgaagggggtaagaaatttgaaaaacaaatgatggggttttgcataagacattttctactgcctaagacagaagaagagacccaacaaccggaaccaaattatccctttgatgacttggaggagactacaccctgtaggttgcatgtaccgagtggacgagctggtaggagacttgaggctacgaccgaaattgctatccctggtagaacgtaccatgacagatttattgattctggatatgcgaaagtgcaatcgcaaggggtgaataaagggtttaagtcgtacgacctagatatcccaactcctgatggtataaccgtacttggggatgcggtcggccttatcatattctatggcacaaaaaggatataatctttggcactggcaccgatgctccaccgaaaccaacaagacctcctatgaagaaaccgtttaatgataaggtggaagaacattagccacctaaggccactgaaggcccagaaaaataaaaggaggtgcaaattgcaccgaaaaatgaaccagtggtgcaagaaccggatgtgccacaagaagatgtgcaatttctgtcatcagttggagtagacatcgaagtcgtatcgggtttggaatgggacgatgcagaaccagacgtctatgaggacccaaatcttgcaaaagatgtcatggaccaaaccccggttgataacaaggaaaccgaccgagaagtctgaagtgcctagagtgctcaaaagcctcaactccaagtctaaggatgatcaaaaggagaagtggagggtaaccgacttcagtgggagtaaaaaacgtgccaaggaaagaaaaggccggattatgcaattgatgagggtccattggagatgacatgntacataaatgtncattgacaacagcattgtaaggctaacctattaaacaatcggatcaacactgatgctgtcggccagcaaaagttcttcttgcttaatttcgtggattgcatgccatcatcggncggaaaagatggatgtaactttttcgtgatgtggcctattaattgatgcccattttcattcaaaaaatgtnntaatcttaacactggttaattattacaagctggtttataggataccaaatatgatgtgtgaagg

SEQ ID NO: 46219 - DNA, 537 bp, Oryza sativa
  unsure (1)..(537): unsure at all n locations
tatcgcnggtggacgnctcctttgtgacggatactatgatctgctcgtcaaagaccacgaagaaaaaatgatctacagatgtctgtaacacactaattcttgttgatatattagcaacaataaccttttggtatgcacttgtgttacaaattttataacatactcgatatccctgacgttgttgctttggtgaggtgccgccagccgatgggtccgacagtgatgaagctgacgagggagattcatatttgtccaagcccgaaatggcggacgaaagatgatggtgaagaagacgacgaagactacgtccttcgcaagaaagtggtaggtttctataatgtcatttgagttgcaactgtacgagtgataaatagtagttcgtactaactcaaccattttttaattaatatcgtaggaaatgacacgtcgccgatcatcctacaggcttcggcgtcagcctggtcaagggtcaacactataaaaataaagggagtagccacattaagcgtcgaacaaagcaaaataacaaagcacaga

SEQ ID NO: 46220 - DNA, 584 bp, Oryza sativa
  unsure (1)..(584): unsure at all n locations
ggagagccatgatgaccncttgtttgagctgcttggaatttggtgatagcgtcatggtatgctgtttttgacagatccttgttggatccagatatccgatagattgctttgccttcgcagcatccatatattgtatcctataaaagcagcttgttaataataataacatgtttatgtattatatcaattttttgtatgataaatgtgcactcatactcataggcaccatgcaccgagaaagtttacatccatcttttcccgacgattgatggcatgcagatcagcgaaatttagccagaagaaacctttgctggcgacagcatcaggtggtgatcgaattgttaaattagttaggccttcaannnnnnnnnnnnnnnnnnnnnnnnnnnnnnnnnnnnnnnnnnnnnnnnnnnnnnnnnnnnnnnnnnnnnnnnnnnnnnnnnnnnnnnnnnnnnnnnnnnnnnnnnnnnnnnnnnatacttttgcatgtgttcgagtgcttcgacttcttaccccttccaagagttcgagcgacacctcgcgcccccccttcgttcccggagaacgtcacccttggtgagtta

SEQ ID NO: 46221 - DNA, 1185 bp, Oryza sativa
  unsure (1)..(1185): unsure at all n locations
cagtccttgtgaccctgtanancnccnnnnnnnnnnngnggnncgatgctttcttaataaactctacatatacaaaataaagatatatcatgtatcataatatattctactgaattggatccgccgctaccgaccgccagcctcttggctgcacgcggagccgatcgcccgcactgatcacctgtcccggccgcttgcggcaccgccgcatgctgtacggcaccgcaagctgcctcaccagctcatcgcttaccaccgccactgctgtagcaacagcacagcgcgagcgagaaaccctaacgaaagaataggaggggagaggggaatggaggttgaaatatctgaccggtcttaaccgaagatctcatcgaaattaagggtaacttttatttccgctaaaagttttcggtttttgggtataccaaccattcacccccctctggttggcttagttcttgtaattcgatcctacaagtggtatcagagccttgttttcttctttggatttttatcgatctagagtttttgccatggctactcccgctaggttttcaactaagccttatgttttcgatggaacggatttttctcattgatgtagtaggatgcaatcttacattatggctgaagattatgatatttggagaaaagtttctcatgcttatgtgattcctgaagctattaatactgctgctgaaaaaactgcttttgaacaaaattgcaaagctcgcaacattcttttgagtggtatttctcgttcggaatatgatcgtgttgctcatcttcaaactgctcatgagatttgggttgctttgagtaattttcttcaaggaacaaataactttaaagagcttcgttgagatctttttaaaagggagatattaaatttgtatgaaccctgcagaagctttgatgacatctttctaggttaataaaaatttagtgaattagactgtggatcttctattgaactaatttccacatctgagattctcgtactttttgatggctcgacaggttttttggagatgaaggtcattttttaggagcggtaacaggtaacttccttgaatactcttacaaacggaaaccatggaggaaggtttttctcaaaggactcaagcgagcttgggctttcttttcctctgagggggcagaaaaccgagccagagaatgttacctccg

SEQ ID NO: 46222 - DNA, 500 bp, Oryza sativa
  unsure (1)..(500): unsure at all n locations
taccgcgccatacaaccctgcaggtgtagtgggttactcacaccttgaccagttcactttgccacgcccctaacgcgtagcttcatcaggatgattcacctttcctatctcaccacctcgcctgctcttctccgccaacactctaacagttgggacttcctctaggggacacgatacggcgcttaacggacctctccctccaaaaactctggtctgcgtggcacagttacttaagtggcccttgctttcagaatgcgcgctactttatccttggcgatcgcgagacccagcctgtaagtaggagttcctctcccaacctaggcacacccgcaccccttctctgctctcnccttgattcaaaagggacattgccatacaccgctctagtctataaactaaacgtgtcctcacaaacctgttactcatatcacgaagctatcctaagccttcacgttacgactcgcgctcttatatgccgatcgcgcaacgcgtaatccact

SEQ ID NO: 46223 - DNA, 1976 bp, Oryza sativa
tatcagagagacaagagagcatctttttttcttctgccccttcagtcagcagtgctggcagcatttgggaattgtgtggaactctagtcttaatttctttcaggtggtggtttcggcccgcattcagttcaaccggaagggttttttttggaaattttatttattgctgcttggcacatttggaagcaaaggaatgggaaaatctttcgaaatgagcttccctcattcagttcttggaggcctttattcaaggccgattttcttctgcatatgtgtagaaaaaaggatcccctaaaacacacagtttttgattggttacgaacagtgtaatcattttgtttccttctcggtctctcgtaatttgtaaataacctatttattccttttataaaatcacactgcaaggcaaagtcctggcagtatttctagtaaaaaaacaaatcacccacatattttggaaaacctctattaagtaaattcgtttcattttttgttacacaaaaaatgtttcacctagtgtattcacaatgtttcattacgtatagatctaatttgcagtgaattgaaacattcttttgcaagaaatcacccacatcttatggaaaccctctattaagggaattcgttccattttttttcaccaaaaatgcttcacctagtgtacttataatgtttcactatgtatggattaaatgttgtagtgaactaaaactttttttcactatttgctaaaatattttttttatataaggtgaaactgcgcccgatttaaacgatcgaaacattttcgatctacttagtgaaacaattccgatatacttggtggaacaacgtgcaacatttaaaaataattcaataataagctaatattttttcatcggaatatatacgcgtgtgattttgttttaaagatttaattgcaacgaatttaatggtgcaatcggattatgatttagataaataatttaagaaaaaaaatagtttaaagtagttttacatgcatgacgtgggtatgacatcagcatgactgtgggcgcccgattttcccacccccggatcgggcgcccgatgtgtatttgctttcaaatcttcatctaaatctttcggggccgggaatgatggtgaggaagtcttagacgattgctttcagtagcaacgcaaaagactcataaaagatatagataggattggttcgactgcagaggatccgtttccgttaacagtctactgaatataaccacacgttcgattaacgactagcaagccccattagtcgctcagtcgcacggtactccacaaatattctatcgacaaattgaattggcgagagttctgaatttgtggccaacggacgatgacaagtctaatcggtcaatggtgatagttcagggcgagaaagatgtgttggcgcatgtatatatgtcgacaatgatagttaagggattgagatggtgtttcaacacagaaaataacagaaacgccgtaatgtagtaaaatatccatgacgttggatcggagagcatacttctcgacagcaacacttcgtgtgcacatactgcacacacgtcagccaaaaataaaaggaataagttcattttaggtctcttaatttgtcatcgaatttgcaaccagtgcaaataaaatcccaaggcggttttggacggtggtttcggctgacatggcatctacgtggcacttaagttatgaaaaaccgtgggacccacgtgtcattgagtgcccgatggaaaataaaaaagcagtgggtcccaccttcattgtttttcttccacttctgtcctttatttgctccttctctttcacagcatcggatggacagccacaactcgccacccttctccacgccgaccagccacggggtgggggagaggaggggaccttggtctgacgggagccgccgatgctgggacctcgagagctgacgctagggatccgtcactaagagtgcatttagggtg

SEQ ID NO: 46224 - DNA, 539 bp, Oryza sativa
ctgttggttgccgtttattcaataaggttccggcctccttggacaaggctttacaaaaaaatggacttttaaagtttaaaggtgggggaaaccccgcccggatttttaaaggattcctgggggtttccccttggaaagttacttggggggtcttcctggttccaaaccttgcccgtttaaccggataactggttctcccttttttcttttggggaagagggtggcgcccttttctttagctctaccccttgggggatcttataaattgggggataggtgtgtttcgttcctaaacgtgggcttgtgttgaccaaatatcctcctattataccccccacactggggctctttttacgcggaacatatctctctgggagtccaccccggagaaaacacaatattattcctcttggggggaaactcttggtaaacagttatttccctccccggtgttttttgcgggtgtctctccacaaatttttataattgggggctcaactctgggtgcactatagagaaaaacaaattggtccttgtcc

SEQ ID NO: 46225 - DNA, 1199 bp, Oryza sativa
  unsure (1)..(1199): unsure at all n locations
cgatgtcanggtgaagcgcctgttggtggcgnnnnnnnnnnnnnnnnnnnnnnnnnnnnnnnnnnnnnnnnnnnnnnnnnnnnnnnnnnntgaaaattttggatttttggagaagcatggtgaatttttgaagagttgttgagaagagcatgtttttggttcaattgggaatttctttcttttaaaaaggggaagaagttttcttttggattttttagcacgatgtgtacatttgtacgaagtgtgctttttatttttccaaacaccaaaacatttttatgagtttgccaatgtgttcatcaagggggagattgtaaaattaaagatgtttttgattattattctgtgatgaacaattgggcattggagattattggttttgttatttggaatttattcacgaagtggttttgggttcttcgtgctagtcgagtcgatgattccgctcgaagggaacagtgcagtcccgaagagagggggaaggggaaacgggccggcccaaggaaggaatctaattaaggtaattcaaccagataaggcacctagccctgatgggattaatgggtattttcttaagaaatgttggcccatcatatcacacgaaattttactgggtagcagcacactttnnnnnnnnnnnnnnnnnnnnnnnnnnnnnnnnnnnnnnnnnnnnnnnnnnnnnnnnnnnnnnnnnnnnnnnnnnttgggttttctatagtgtccacctaaaataggttggccgtaatcaatggcaattagctgtttcctcgtgtgaaattgtttttccccttcacaaatttcccacctacattccaagccccgaggccataaagtgttaaagcctggggttgccttaacgagcgggcctaactccccattaatttgcgcttgcgctccactgtcccgttttccagatccgcaaaaccggtcccggccacgctgctttaatagaaattgccccacccccccgcgtggaggcgcgtttttcttatgggccccttttctcgcttcccttcttcacttaccttcttgaccttcggctctcggctttcgctcgacggctttatgacttccttcaaggggcgtgtacgcgttattctccataaatataggggttaccaccggggacaaaactcttttcgtcataaatgccccctcactgggcccccctccctcttaaatgccctctcttctttcct

SEQ ID NO: 46226 - DNA, 708 bp, Oryza sativa
  unsure (1)..(708): unsure at all n locations
aaaagaaaaaaaaagagattagtactgacatatgggtcccatgagtgccacataggataaaaccgctatccaaacagtcgagggattcgatttgctccggtttttgaagatggaggaggccttacatctggtattgcagttgagggatactaatcaatcagaggcaagacttgagggaggcaaaatagaattattccaaaaagaatatacctccgtttcacaatgcaagtcattctaacattttccacatttatattgatgttaataaatctagatagatattaattaacattaatatgaatgtggaaatgctaaattgacttacattgtgaaacgaaggaagtagatatgattggttcgactgcagaggatccgtttccgttaacagtctactgaatatatccacatgttcgattaacgacaagcaaggcccattagtcgatcagtcgcacaccacaaatattctagggctgcttggttggcggttggaatgccacgccatggcgtaaaatgtgaaacagagaatgagaaatctgaggatagaagctgaaaaatgtgttagtaaaggaggatcatcagacaccggtctacgtaactatgataccccgcgtattcccggagnnnnnnnnnnnnnnnnnnnnnnnnnnnnnnnnnnnnnnnnatatttcttaaatggtgccttcccctctgcacgaattgtgtgttcag

SEQ ID NO: 46227 - DNA, 508 bp, Oryza sativa
tctggaagctataactgttgccttaaattaagtaaaaccattcttgatccatgttcacaccactagggtgttgtttccggtcactattttccacataactttcaaggttatagagttctaataatccatatatgatatcactctcaaatattccatccatcttttcatcgtcttggggtacccctaacactgcacctttattgggagaactttaattggttttcaatttaatttaattgatttaatgaactttgttttatttaaaattacttcttgagctccaaaaattcaagagaaatttcagagaatatttagggcacaaaggatattgcaaaaatattttcggccatgattttaaaaggaaattttaattccctcattaatttacttgataaaattaacttttacataatttctagatatgcgctatttaataatttttgatcccgaacgaaaattagggtgtgacaaagagagaccaagaaagatgggaacggtggggagtgaa

SEQ ID NO: 46228 - DNA, 527 bp, Oryza sativa
ggaatttatcattgaatctcttaaatctgaaattgataaattaaaatctcttattcctaatgataatgattgtgaaaattgtgaggttttaatgaatgagatttcaaaaattagagatgttaatgctgcacatgatttgaaaaatagatcttctcttgcttgtagttttgctttgcacacacgcacattggatgagttgtttttaactaaaaagttgttgcaaaaatatcaaattgcttttcatgctagtttgatgtttaacatgatttctgctaaaaagttaaaacaacctcatgatgttttggattgctcaacatgtaatttgaataagatgaaactaaaagatgctttaggtcgtgttgagtacatggaagatgttgtgaaaaacaatgaactgctttcttgccccaaatgtcgtaaaagcaaaggtgtcatggtagattgtgaaaattgtgctaatttggaaaaagaggtttctcatttgaaaaattctttgctaagattttctgatggtaaaaagaacctca

SEQ ID NO: 46229 - DNA, 733 bp, Oryza sativa
  unsure (1)..(733): unsure at all n locations
aatgaagtacgatccnttttagctaaacgcccaaggccaatggaacatggacgctgagagcctgagaaggtcagtggttccacgctaagcatagctccctgactttttaacttccatctggactttctttaccaaatgatgatttaataaatgtttgtcacatgccaggcttcttctgccgagaagggcctccatcagcgaccgcataaagtcatctcttctgttcaagagagagaatcgaacaggctgtgtttagtttctgaaattaaggagaagtttgaagaaagttggtagtttaaaaaaaagttaggagtttatgtgtgtaggaaagttttggatatgatgtgatgtgatggaaagttgggagttggggggaaatttggtgtgaactaaacagggcccaagtatgcaaacttcttaatcatttttttccattcttgctcttatataggatccagttcaccaagcttaattgatttgtttttcttgaaggatgactccatctctatcggagcaaagctcggaacagctagatgaagccagctctcatccgatctctaccattgtgactcctctccctgtactgccgctagcaccgagcgcctctcgaaccaagtcacccagattggtccttgaccatcttgccaaggcctaccgagtactggagaccactgcccaggaagccccctttgactcaatcatctttacgtggagatgggttcggcaggggaca

SEQ ID NO: 46230 - DNA, 977 bp, Oryza sativa
  unsure (1)..(977): unsure at all n locations
gggggcagagaaaaagagggggaggggggaaaaagaaaaaggggggggaagaaaaaaggggggggagaaaaaaatttancnnccccnccccccgaagagatgaatgagtagagaaanncacnnncnnnnnnnnnnnnnnnnnnnnnnnngagaaaaaaaaaaannnnaanaaaaaaaaaaaaaagaaaanaaaaaaaaatttttggggaaaaaaaaaaagnaaaaagaaagggggggggggggtaaaaanaagaaaggggggggggaaaaaaaaagaggggaggaaaaaaaaaagaagggcggagagaagaataaaagagggaggagagaaaaaaaagagggagagaaaaaaaaaaagaaaaggagggagaaggaaaaaagagggggaagaagaaaaagagagacgcgggaggagaaagaaaaaaagaagggggagaaaaaaaggaggagggggggaagaaaaaaaggtgggggagaaagagaaaagagcagggggaggaaaaacaaagcgggggagagaaaaaaaaagaaggggggagaaaaaagaaggggaggaaaaagaagagaggggggggaaaaaaaaacgggagcggaaaaaaaaaaaagggggggaggagaaaaaaagaggggagaaaaaaaagagggaggggagaaaaaaaagggggggggaaaaaaaaaggagggggggaaaaaaggggggggggggaaaaaaaaggggggggagaaaaaaaaagagggggagaaaagaaaaggggggggagaaaaaaaaagaggagagagaaaaaaaggaggggaagaaaaaaaaaagagagaggaagaaaaaaaggggaaggggaggaaaaaaaaagaggggggggggaaaaaaaaaacgggagggaaaaagaaaaaaagggaggggaagaaaaaagaaaagggggaagaaaaaaaagaaggaggaagaaagagaaaaaaaaaggggggggagagcagaaaaaaaa

SEQ ID NO: 46231 - DNA, 662 bp, Oryza sativa
aaagaagggcccttggggttttgtggcctttgcgggttttgcccattttttttcattggtttcgcccgttttgtggtttccgggaagccctcttaggttgggtagaaccgtgtgccccggcgcggcgaccgaggccacaggttcattgtttgttaacgaaaagggggccattccccaacccccttcccccgcgggtggggggttcctttttcataggggccgcggcggttttttttttcgttatggaacggtggcggcaaccccaattatttttagtgtgggtagctcttttgggtcgccccacgcgttgcttttttttgtttccctcccggttttttattttggaatggtaggcggaaaaccttttttctttccgcgagcggctagttttccgtctttcgtccagcctttttttttggccggtttatattactccacctttttttccaacttttttgcaaggttcggtttcccctattaccggcggccagttttgtggagattctccacatgttataactcccggtaatacccctactttttcctgtttgtgtgcgggattttaagttttctcttttaagtgttccgggggttatatttttttaaaaccctttctggtgtattctcggttattaacgtttcccggagtgttttttttgggg

SEQ ID NO: 46232 - DNA, 532 bp, Oryza sativa
  unsure (1)..(532): unsure at all n locations
cgcgccctgaggcccgcggctgggnccnnncnngngtgtatagagagagagagagagagagagagagagagacacacatatatatatatatatatatatatatatatatatatatatatatatatatatatatatatatatatatatatatatatatatatatatatatatatatatatatatatatataataaaaatataaatatatatatatatatatatatatatatatatatatatatatatatatatatatatatatatatatatatatatatatatatatatatatatatatatatatatatatatatatatatatatatatatatatatatatatatatatatatatatatacctatatatatatatatatatatatatatatatatatatgtgtatagatatatatatgtatatagatatatatatatatatatatatatatatatatatatatatatatatagatatgtagatatgtagatatgtatatgtataggtggggatgtgtggaggcgcggggtaga

SEQ ID NO: 46233 - DNA, 597 bp, Oryza sativa
  unsure (1)..(597): unsure at all n locations
aacgacacaaangtccacggnataagtaagaacaaaggtgaagcagatctttgagcgtaaccaaacctcatcataatatccactaactattccgatacctccaccccccccnccccagacagcnaagtagaacgnctgatagnaaccnncnnnnnnnnnnnanngaannaaaaanaccnanaacaaccacaaacacnnncaaaaaaaaaaaaaaaaagccnncntctttttttttccccaaaanaaaaaaaaacaaggggaacaaaaaaatacgaaaaaagagaaacaaacaaaaaaaaaaaaaaaaaaacaaaaaaaacaaaaaaaaaaaaaaaacgaaaaaaaaccgaaagaaacaagaaaaaaaaaaaaaaaaaaaaaaaaaaaacacgacaaaaaacacaaaaaacaaacaaaaacaacaacgaaaacaaaaacaacaaaaaaacaacacaacaaaaaaaaaaaaaaaaaaaaaaaaaaaaaaaaaaaaaaaaaaaaaaaaaaaaagagaaaaaaaaaaaaaaaaaaaaaaaaaaaaaaaaaaaaaaaaaaaaaacaaagaaaaaaaaaaaaaaaaaaaaaaaaaaaaaaaag

SEQ ID NO: 46234 - DNA, 857 bp, Oryza sativa
gcgtgtaatatgatacgactggatatatctatatatatatacacacacacacacacacacacacacacatatatatatatatatatatatatatatatatatatatatatatatatatatatatatatgtgtgtatatatatatatatatatatatatatatatatatagatatagagggggatatagagggggatatgggggggtatggggggggggtgtgggggggatgtgggggggagagggggggggagggggggggggggatgggggggtgggggggggggtgggggggggggtggggggggggaggggtggggaggggggggggagggggggggtaggggggggggggggggggggaggggggggggggggggggggaaaggggggggggggggggggggggagggggcgggggggggggggggggggggggggggaggggggggggggcgggggggagggggggggggcggggggggggggggaggagggggggggggaaggggggggggggggaggggggggggggggggggggagggggggggggggggggggggggggggggagggggggggggggaggggggggggggggggggggggggggggggggggggggggggggggggggggggggggggggggaaggggggggggggggggggggggggagggggggggggggggggggggggggggggggggggggggggggggggaggggggggggggggggggggggggggggggggggggggggggggggggggggggggggggggaggggggggggggggggggggggggggggggggggggggggggggggggggggggggggggggggagga

SEQ ID NO: 46235 - DNA, 735 bp, Oryza sativa
  unsure (1)..(735): unsure at all n locations
ccatattgaagcaagcattattgtttgcagggattgcagatttttttacccttaaggttaatctttaaagatactattaatttttagtctaagtttgctttagagtgtgaatcaccattcgatctctttaaattgaattgaacttgctagttgttctgttatgaatgatgaagctgcgtaggaactatattgagttccggtggttgtagggaaaaaatgtagtttgcgaagtgatgtgaaaatcattttgtttcttatacgattgtacctttcagcaatttgcaatttttaagtcagcttgtggtatggctgcaaaacagtgattcatgcacgaatcaaaacatttatttaaaaaaatcgagtactatgtgaatgcactgatatacttaaaaaattagcgcgccaagaggcgctcattatagcccgtgtctactttctaattggttttcaaaattcaggtctacaaaaggttggcaaatgaaatattcgatggtgttattaaccgatgcaacaagtttagctaaattagctcctatggcactcctgctaaaaatagtaactagtacccttcaagaacaaccatcaaaaactggatagaaccataactaaatatttttacatgaattcactaagataaaaaagcctaaaaataccatagttgttttcagnnnnnnnnnnnnnnnnnnnnnnnnnnnnnnnnnnnnnnnnnaggggcttatcaaggttcaaacacct

SEQ ID NO: 46236 - DNA, 3325 bp, Oryza sativa
  unsure (1)..(3325): unsure at all n locations
cgctgtcanattgatgtcattctnnnnnnnnnnnnnnnnnnnnnnnnnnnnnnnnnnnnnnnnnnnnnntcgaatgaccgatgggacggcagctgtattccctcgccctgtcagtttgtcaggcggcgtgcggcgtgctccgtcctgtcccatcacaataatgagggacttcacatcctcttaccccggtcagagctggtccaaccactctaaactgaccccgggcttccgttttctggtgcgaacgagaacccgaaagtcctcatccattgaatggcaaatgacaagggcgccctacatgatttgatgggccccgcgcagtagctgatgtgcagatagcttcttggctaaggcacaagacatatagttaatatagagaatattttcccttctccctaggtagcactcgcagcacatgtgtatccccttagagtataaaaggaggaccatacctagcgggaagggggatcgaactctggatccccgagccaaagcttctctaaccctagcttgtacatcggaaattcaaaggctttgcaagcagagaagaatcatcatacacacaggagtagggtattacgcttcatagcggcccgaacctatataaatcccttgtgtctcttttgtctcaaaaacctcgaatctcacccgctgccccccgccgaactcaaaaaaggggggccttaaggttccctggtggaggagatcaccctccatcattcacttctacctacttttggaaatgattgaaaacagatgattatattgtggacggaggtagtattgaaaatcaaaacctagttttggaaatgaataaaactgaagtggtgtataaaatgaaacaagacctctacaaaataataattgagatatcataccatatggaaatgaataccctccgtacacgtacctagtgccccaatagtaggtgtggcacctccatatacaggataagcgcatgttcaatggtagagacgagtatggtctcttaaacagtataagattatttagagaatgtgtctttacaatagttgagacgataaaggctctaatcattaactcaaaaaatattccttttgttaatattcttttcttctttttaccctcatgcaaccatatttccatattgtagtgattaagagtcgttgttaagccattgttatgcatgacaacgatgttttgtctctcctgtttctctttcttccatgttaacaagtattcctaattagcaacgctaagagaccactattgacaaccattgtacatgccctaagtctggatcgtgttggtacggggcatggtttataattatagaagtgtgccgataactttttaaagtggagtatgttacgtaggagtagatctcttcctccctgcactgatccaccctaccccttaaaactcactcatcgttttcatatccctaaaatttacccgatcccttttatactcctgaaatttcaacttgatcccttccatgctcctaccgttatattttccctcatttcactgttacgtttggttgcaaatgtctattttgtccttgatgttttaggtttgaatctaagcttaaaaaatgattgaaaattttgtttgagtacatagtatgtgcatttatgaaactaatgaaactaaataattagtgtataaaattttggcataaattttgaaaataaaaaatataataaattaaaatttttatttgaaattttaataggacaatggatttttttacgggagcattcataaaaaagttattgtgagcattggtagtcctatctttgtatgaatgctccttattttttatgactttttgaaaaaattaaatacatatttttatttcattatctaaaataatttttgcgagaaataatgcatcgcacaacaaactcataataatagtctcatgcgacaaacttttatatttttaataatgtaattcataaatttctatgttcatcgaaagggtaaaattgtcattattatagagattagacggtcaactaacgttcaactgacgggaggggtatggaagggatcaaaatcaggggcataaaagggattaactaaaattgtaggggtatgcaagggattttatctttaaaatatatttgggtatgcaagggattttatctttgaatatgtttgggtatctcataagcccaaactggttccaatatgcttttaacgcttcatgacggaatagctttaattttttcgattttgctatatctcacttgaaagattttttcttatctctcacttgattttctcactcaaatttacagtgcattttcttgtaagttacagtgtaatttataaatcttacattgtaacttttgtaagttacagtgtaatttttgaatcttcgcatgtaaattttaaattttatattggatttggtctttttcttgaggatatggtaatttagtgtccattatggtgtttcttaattgttttttgctttttattatatcacggattttaatccaaagattaaaaatctgtgtgatacgatcataaaaatcttttgaaagatgtataggtactccctaatttttttaagctgcatttttaagctccaaccctaaaatattcttggagttggatttgaaactatattaaggttagtagtgtagacatccttttcatacttcaggctcgtcaacactctattattttagggttgaagccatgccaaacaggaccaacattaagttgttgatgagcaacccggcctgaccatgctaggattgggccctaaatataaattaggaacaagttcaattaggtcccttaaacttgacagcgagttcaaatttcattcttgaaccgtaatatcagatatagcggtccctcaattgttaaaaccgatgtaatataaggtccaaggcagtttggatggccgtttcagctgacgtgacgcttacatggctaatttgactcggttttcatatgacatagtacatgaaccaaaattgaacaatttaaaaattaaaacaaaatatataggttcatatgttcaaacaataagattaaaaaatagtggaagctacatgccagtgggccccacttccttcccctcatcctctctcttctttatcccctcccgttctccttcttccctctcccctttctccttctctaaatgcggcaggtggcacatggctgaggtggcgggcagtggtggttgctgtgcgcgacctatgatgaccaaggaggggccttcactagacttgagcagcaatggaggagaggccttcggtggacctggggcggtaggtgcactggtcgatggcgaacccgatgacgctgtccatggccc

SEQ ID NO: 46237 - DNA, 1885 bp, Oryza sativa
atctgtatccgtaaaaaaatatatgtatccagactatccggttctgtatccgtattcttttttctccgggcaggcggacggttttcgtgtcccgaatacactttgttttcatccctaggaccataggacgaggagtacgtatgtcagccaggtggagccacgttaagggttttttctatagacctaatggtggtaaaaaacgggtccaccaaatttagggtatgtttggttagagggatatctctatatgggagatagtgattcagctttcgtgtgtgtttagctagtagtcaaaggtggatagtatggcctgaagatgaaatattcccctgaaatattggatgagcgtattcggccaaattggccagataagaatatccaccttttctaatctcgatcattagtactccgtaattgattagcaatatttaatttttaattagtaaccaaattatcaaaattagtattgattagatataattattctattttattggtaattagtataaattatgcttatttaagggtaattaacatatatacgctgcagtccaacagcactcatgggcccggaatgctgaaacccaatttgctcatggttaccatgttgacatgctacatgagtagttaagagacactactttagaggaaaaaaaatagtagcaaacgtagaaagggaatttggataatgctaaacctattagtggtaaatagttaaatttccccatctaatcggcaaccaacactaatccagtgcacgtcataccatacgaagacgaaggtacgtatgtccatacttgcttgattttctttagtgtctccctatttttttcctgtgcaaatgtccatgacaatgtcatgcttgtattttttttaatatggatttaatctataattttgcttttgcaaaacatgccaatattttcaatctacaagttccagtaatggtgctgagacccaacaaattaaggttgcccagaccccaacaggtcttaggcacatccactcggggaaaggcccaatcccaatctccctgcatctgcccggaccccaacaggtcttagtcacatccactcggagaaaggcccaatcccaatctccctacatctgccaacagtttttaggcacacccactcggggaaaagcccaatctccctacatctccccactcggggaaaggcccaatctccactcatagcctacatcttcccactttagaaaaggcccaatctccactcataggagaagggtggcttactcctcccaagctaatcaaggtgaccctaacaaattaaggttgtgcggaccccaacagttcttaagcacacccacttggggaaaggcccaatctctctaaaagactagtccaataggggaagtgtggctctcccttttaaggtggattcctcctcccaagctaagtaaagtgagattattcagaggctcatatggtcgctgcccgactacaactgaaccacttggtcctttgttgcgtctttaccagcgggtaatagtggaggatattctcataagaagatcacagggtgaattatcttaagcttagacacattaaaagttcatttttgagcgctgatgtacacgtactatataaaatcgattttgctatatctcactcgaaagatttttttcttatctctcactcgattttctcactcaaatttacagtgtattttcttgtaagttacagtgtaatttataaatcttacattgtaacttttgtaagttacagtgtaaattttgaatcttcgcatgtaagttttaaaatttatattggcttgggatttttattgaaaatatgggagttagtggccattatggtgtttcttaatgtcttttgcgttatgggatttaatccaaaaataaa

SEQ ID NO: 46238 - DNA, 1090 bp, Oryza sativa
  unsure (1)..(1090): unsure at all n locations
aggcttgtnngnattgatgnccnccttgaannncactggatatccngctnnnnnnnnnnnnnnnnnnnnnnnnnnnnnnnnnnnnnnnnnnaaatagagggacacaaagtgaacgtattccaatccatttcatccttaaggcttcctttgcattagtggatttctggaggaattttagaatacttcctatcctttggattaaaaaaaaccacaagaaaatcagagaaaactttcctttgctgtcgttttcgcaggaaaaaggaagaaaaataatctatccgctccgagctattttttttcccttcagataagatcgagaagatcaatcactaaaagccagtttaataatatagctaattactatctctaaaaaactcaaatctattaccaatccaatagttaacttatacaatatctagttatagatatatagtgcattgttaatacctaatatacttatctttctcacgtactttcttcgtaaaaaaataaacatcgaataatgatatatcctagtatagcgaatctagacaaactcttaggatttgtgggatagatagagtattttattagagcttatactgtagctatatataaatctatagtctccttttctctcctctcctttccatataagtacaaatgatatggcaacttgtataacctgtttccattatcttattgcacttagcatcagtagcaggaacaagaggaagaagcagagcacaagtgcacaacagcgcaccggcgatccaacatttgcttgtgcagcagcttagttctccccgccgtcatctagcgttacgacctcctcccgcagaagcacgccctgtgcatacaagttttccggtggcccagccccctcgagcactccgcagccaagagtcaagagtagagatgaaaatgcatcgaatacggtcggaaaatagctatatcatattcgttttcatattttttttctcggaatcgaaatcggaatcggaaataaggatacgaaaacggaatcgaatactatcgaatacagatacggagcgaatacagtaacgaaatattatcaaaatatcaagatcccttgaaataagctttttaa

SEQ ID NO: 46239 - DNA, 859 bp, Oryza sativa
  unsure (1)..(859): unsure at all n locations
gcatgcgcnntttgaattttgatatgcgccttgctccctgcatcctagaatgaggaattcggtatcccctcatataaacaaaaatatgttttgcgtgaagaaaaaatagtatcacgatttgtttcgaaaaacctctaggttttggggcaaaattaatgtttcaagctgaaaccccatgtttaaacttatacatttatttttttcgtatatttatgcataataattgcagcaaaataataagaggtatttctaagtaaatatatacatgttagccttatttaacgagcatcaatatgattgtttatatatatacgtataagtaactgattaatgtgtaactattagtagtcagattgtgtcgtggtttctcaatcgtgcaatgtaagagtaggaagaaataaagtatatacgagtgatatatattttgagtctagtaatgtgaatatatactaaaaatgttgtataaaataatgaaattatgatatttaatgtaaacatgggatttctagaaacattttacctcataccctagggtttctcgaaacaaatcataatacatgcactactggagaagtgatctttgttgggtcggatgatttccacaatagttagaaccgggactaaagattgtttttagtctcggttaaaaaaattttgatctttagtcccggttggtgtttccaacccggactaccgttcatccaatatcagaggcatgtcagggggccgaggatctttattcccggttgatactaccactttagtcccggttggtagtaacaaccgggactaaaaataaaaatctnnnnnnnnnnnnnnnnnnnnnnnnnnagctgcgagcaggcgtcatcatggggcg

SEQ ID NO: 46240 - DNA, 1420 bp, Oryza sativa
  unsure (1)..(1420): unsure at all n locations
acggcnattgtagattgacttacnnnnnnnnnnnnnnnnnnnnnnnnnnnnnnnnnnnnnnnnnnnnnnnnnnnnnnnnnnnnnnncagtatacctagtgcaagaacaaccaagactaacccatgcaagctgagagttggaacctaaaatgatcatacatttatgaacgaactgtcatcaccaataatattttccctacgagcatcacaatatgcaacctggtgaacagagaggggtgtagtaactaagaaggttggcatgctcctatacaattttgttcatacaaaacatgttcgcctctcttcctttcactttgatgtagatagtggagagcacaatgcttcacaaaagatggggctcacgttccataattttggctcacatagcacttgtgctagaaccacaaaaaagagtaattaacaagggatctccatgtaccatgcactataaataagaagttaaagatgttcacagggcagtgaagataaatgtccagctaacgaagcactctacgcatcacaaaattcagttcagttgtaaagaaagaaaaaaatccacatggaatcaggggcggatccaacttgggacatgggggttcagtcaaacttttgggtgaacaaacaaaaaaacaaacaaactgttactagctagttgtattaagagaggtttaaggctctcaaattaacaaggaggaggagaagagcttctttcagatctagaagagaagctagtagggttaacgaacgcaagcgaattcaaggtcccagtggggtgggggagagagatgaatcagaaagaggctcaccaggatcccctcccctactctcctcgccagatggagatcggcagccgcgactcgtcttggcggcggcgcaaggagcggaggaagagccaacgagacgggagatttctctcttttacgcgatatactcgactactgcccaaatgggccgcccggcccggcagcgcccaagcacgaccggacctaaggcccagtcaaggccccttctctttggacagtgccttataaggctgcactaagtctattttgggtccccaactatttttctttgacttatataaggctgaattgagtctatttaggctggattttccggattgaaactacaaagcggtatttttgtttgaagctatgggatcaaagtccagtgtcctcgatgcaaactttgtctgatgaattgacaacaattaatcagataatacagttgcatatgaaaattactagttatgtatgtgcgcagataaagagatacaaaaccacacatcaagtgtttattctatccatatactgtcaggtttatattggctgtgtgtgacggggcaaatatcgatcggttgtgtgtggcggggcgacttatgactacaaaggtggagatattagggatggggggagagaaaa

SEQ ID NO: 46241 - DNA, 1877 bp, Oryza sativa
aaagaacgagtgatgagtgaaaccacttgctacactatatggggaatagatagaggtagagaaatgggagaggtttatcctctctttctcaaaaaaaaaaagaaaagaaaagaaaggacccaaccgtgatcaaccactgcctcgattcccttggtcctccgagaatctcgccggcgatggctgggagttggttactgcgccgcgttctcccaccccagctggttatttatagtgcggcggcactcctccattctcctccattccctaatttgtataatggttctctttgcaaaaaatgtgctggtgaccaaactaataggagaatggttagggagtctaagattcaggaggtctcttgtggataggaaacatttggaatgggttaaacttaatcaactttgtcagtcaattgaactgactggggaggaggataaagtggtttggaaactgactaaaaatggcattttcactgttaaatatttctataaagcaatgatgattcaaaacactggctttcaattcaagaatatttgaaatttaaaatttctcctagagagaaggttttcctgtggctgatgttgaaaaattgcattttaaccaaagataacttgctgaaaaggggatgaaaagggaaggaggcaaaaaaatgaaactgtggagcatctttttaaaatgcccaatttcaagactcatttaaaacatagtgagttgtgtgtttgatttgaaaccaatccataatatacatcacttgtttgggaggtggctttaggattttcaaaaaaaaaaaaaagataaaaactttgtggtggtgggaattgcaggcagctattgtttggactatatggaagttcagaaatgctgcatgtttcaaaaaataaaagaacacaagatcctttagagctgatatatgctgtttgctcctggatcaatctttggtccattttgcagaaatcgggggacacacaagacaggcttcaacgggacgcggctttgttaaagacggtggtcactgacttctacaacacaagatttggatagaatccatatgtgatgcggatacaggggataggatgaagatttatgccttctagtggctgcagtttctgttttttttttctctgctgaatcttgttcccttttgctgtaagactgttaaagactttgtattcttatttcgttaatgaaatgggagaggtctatcctctctttctaaaaaaaagcccaaccgtggtcaaccaccgctgcgattcaaaaatttcaactcaaattttaaaattcaaaactttcaactcagaattcaaaaactttgaaatcaaattcaaaaattttcaagtcaaaatttgaaaccttcatatgaaaatccaaaacttttaacccaataattattcattttttattaaaaggctaaatgataagattagagaagggattagacgacctaagcatatacaggagtatcgctaagcgctaggattagtgcgcgcagctagcttaccgttgtggcgcgtgcgcgcgcactggcagcccccgaggtttatcctttttttaaaaaaaagacaaaaaaagagggaaaaacaaccgtggtcaaccaaccaccgccgctattccctggcgcaccgggaatctcgccggcgatggccggtagtttgttacggcgcctcactggctatttatagactacagtgcggcggcagtggcactgatcccattctgcgtcgagctgcctagctatcgatcttcgtacgtaaatacgtctccctcgtctccggcgagccaccggccgtgagagatggcgccgccgtcagccatgaacacgtcgagggcggaggagaaggccatcgacgactggttccccatcacctcctcccgcaacgcca

SEQ ID NO: 46242 - DNA, 2224 bp, Oryza sativa
  unsure (1)..(2224): unsure at all n locations
ggtatatatatatatttacatataaatttctaagtagaccacccttccctgatatatgcgtgatctatagtatcgtttattttaaaaaagaaaatacctagtcaatatgagttagaacattctagtttaacaattaaaaaataacttcttaaccaactgtaaagctaactttgtgtggcttatatatgcaataatatgcggaggaactcataatgtcatgaaagccagtaatatctaagcacttaaaagatgttatggccatgtaacatgcaatagttgttccaattttagtgaaaagtaggaaacaatgttccttttatatttcttgtttaattttatacaactcttattttaagttcaaaatataggtgttatggatctttaaattgttggtttaattatgaatagagcaattagattagaaaccagatgtgtggataaaaaattgtgtatgttttaatattattgattatttctccttttagtttgagagctataaaaatatcgaggaagggcagaggggaaagtgcgagccgaaggggactagtagtgttgtgtttgtgcgcatgtgaggaggagggcaaagttttctgtgtgtgtgttgggggggtggttctttttttataaatgatttaagtgaaaatcgatgatctattgttttgtttctaaaattttcaaatatttttttttctaattattaagatgtaacacctagcggcttaagattttcattaaaagtagatgtaatggttgaaaataatggatctacatatttaactcgaaacatgtggtcaactgtttttttcctataatttctaatattttatttttaaatttaagatgtaatatgtgacatatgtgatactgttagtgctctatagataatgtacgagatttaagatgatatagtaattattatcaattttttatttttctatttttttgtttggttgacacacgtaggtgtctacaaatgatgtactatttacagcgaaatatgggtaatatggatcttgaattatttatttatttataaataaaacaatagttcaaacgaacttgaaaaccagatataacttaaaagatagtcatttagttttctaattgctgtttgtttatgtattaagtttttaattagttaaaatttagaagaagaaagaattgaatgagaggggagaggagagagtataataagaatatttattttacaagtttaatgtgttttaattactatcgatttattgtatgaaaatagattaaatgctttattgattgattaagatgtatcttttttttcttttcataaatatatttatatgtatacactacaaatttaataatattattttgacttattataatgtcggattgagaggagtattttttgggaattaggttcatttagttttttcatcatatatatagtttaattactgttaagttatatacagtgataaaatctatatcactctttttttccataattttattattttttgaattggacacaaaggtcagaaaatataaccaaaagttacatattttattcatagttgaattatagtgaatgtgggcccttaaaagtaaaataatataaagaatgtagtccgtgcataggtaagatataaatcaggttcgacattgaaatcgaagcagattcggcaaagagatggattcgaagaacagagtatgcatcggctgcgaaggcatcggctggagtctgcatcagctgagatggatcggatagaaaacagccgatagaggtggtgcaaccgattccgacggtgatggcttcaaggatgtttctagaatcaatcaacgtgcttaacaaggattgccacgatggagataaagctcttagaaaggcaattctatctattaattaggatatcttacgtaaattccttagagatatgtttgggtaaaagtctaccgtaaaaacttatggtatcttagagtttgttaaagataagagtcgtgtccggcaaggacatattttgtatctcgggtataaatatgacccggacccatgtaatcaaacaacaacagttcaatacaatctcggcgcatcgccaccctttttactttcgttctatttcgatgagttcttacttttcggttgagctgcatcgattcgatcttcaactagagggtaacttgtcacttggcatggcnggattgcgttctcgggatagtggttccatttttattgaccctttaatcc

SEQ ID NO: 46243 - DNA, 3200 bp, Oryza sativa
  unsure (1)..(3200): unsure at all n locations
gtgcgccaacggcacgctcccctcctcctgacctattcattgctacttctcccttcgcacacatcgttgtcgctcctactctctccacgtgtgccgcngcccccttctccctccacatgcaggtgacgtcgctccctcgttccccgcccgtccgctacaccagcctcccaatatgaaaggggatgagaagaaagttggagataggattgttgtgtactcatgggcattttggtacttttggctaataaatacatgctttttttttgtttttttatatacaaaaccttaacgtgtaatggaaacacggtcaaatgataacttcaattttaaaaaataggatcaaatgcaaacatgaaaatgtgaggttagattggtagaataaggtcaaataagcaattatcctaatttattattcttcttagagaaaggtacctgaactaatttaatggttcacttagcccactaaagttttttttttgccttatcttacccctaaactgttaaaaatgtttcactttgctccttaataacatgtacattttcttacccgtcatacaagttgcattttaagctaaaatgtaccagcggtattttaagctaaaatttgttaggagccatagatggcaccattaacgaagttcaaaagtattttcaaattttttttcatcgatgtttgcttgaacttaattttgatgtttgaatcactttcaacctaagtaaacagtaagaattctttttttacaaaaaatgttgaaacctaaattgtgaacgcatctatgttctaccaaatttccagagcaaaattgacttagatagagagagtaaaaaatactgctaggggggttcgaggtgtaaaatgagaaaaaaaagtttaggtggttaagtgctatgatgaaatggtaacttttttttcttactctttattacgagccacctatcttgtcgtcatctagtccaccactgttctcacaaattaaggattattaaagcctattagaaacatatattgtttgtatggactttgggattaattagttagtaaacaaatgttaaaaaataatgtaaggttatactctctccgtcccaaaatataataagtggctattaaggagagaggtaaaagaataatgcatggttgcctctccttgggatgaatggagtatagccgtataggcctggacaaattggggctataacaaagggataatatggttaatttagtggtaaaagtcacattttataatactgggttgctttatttgggataaggtttaaactattttatgatgcaaggagcagtatttttccaatgccctagctaagctagggcctattctttttagatgacgcagcatattctgataatataagataacttacttataacaatgaattaaatattacattatagagttaacaaatagcttcaaaaagttaccaagcaaggctaatgaataattatttttctggagcattgtactttgaagcatggcaccaataatgatgtattgataatcagccccagttaattagctcattccaacagggcagtcattcagagccacaggcaaatcttcccaaaatataagaccatgaaacgtcaggacaacaacaatgaaggaatagaagtaaaaggaaaaaaaaaaggatcgatatttgaaccttggagccctagactttaattagtaatccatataagagctaagtgtataggttgacaaggaattaaaatacttaaaaagaaacatacaaaatatgtgaaaaaacaaatttccaaaaactatgtcgaattcaagctgggagtgctaaaattgacaaaaatggttcctaaacttcctatcgtccgttcgacaagaagcccaaatcccaaacgctttaactaggcgggtctcaccgaatctttatctactcaccaaacaccatcaacacatatatttctccaccacacactccaatcttatcccatctctcccttatctctctccactacaacactacctcatcacgagcagcgacagggctcttgtcctcgacggctatctccttagcttactcaagggcagcttggtcagcctcggcttcctcaacgacaacgtggcataacatcagcggtcacttgttcccaacagctacgcgatgagcttgaacttggcttccacaatgatccatgctttcatcaagtgtggcgccgcataattgcagcatactagtgtcgagttcggcgacagtcagtcactggagaggagaaataagtactttagactgtttttttttatgtttcagccaatatgtttttgatgttcctttgtattggatcaaaatcttgcagtgaggttttttgtattgtttcatattctgtccttgaagagtgagattcgtggatgtttcaaacgctacactaaaatgttttaccatatgattcaattatgtttcaccaaaatacacaatgattatagcactttgcctttgcttaagcattggagtatttatgtactccctaccattgcatgtggctgcaaggtcagtaatcacagtaacctactctactagaaaatgcatttttcccgacgtggaggtcttattttcacagtcggacatgactcttggagccaaatgaccgtctaaaaaaaatataaatcggcatgacgttcgctgtccgcctgcgaaaatctattttcgcacgcgcctctattttcacaggcacaccttatgtggtctgcctgcagaaatagtacctaccaaaaaaatctagtcatcctcatccgtatcctctcctccaccatccttatcctctcctctccaccactcgtttcccttccccttctctctctctctctctcccccacacttagaagaatcgcccggctccctcctttcccacgtncacgcgcccgcgncttccttcttgacgacgacgacgaccgcgacgccgccgacggctccatccactctagatccgcgtgctgccggctccctcctctcccacgtccgcgccgctggctccctccaggacgacatttgcgcgccgccgcatccctcctcaccgccggtggcctccctcctcgacgacgatgacgacgactgcgacgacgccgacggctccctccttttccacgtncgcgccgccggcgcccttcatgacgacgtccgcgcgctgncgnatncctcctcgccgncggngggnctccttctcgacgacg

SEQ ID NO: 46244 - DNA, 1326 bp, Oryza sativa
caattaaaagtagaccgggctataatgagcgcctctgcgcgcgctaattttttaagtatatcagtgcattcacatagtactcgatttttttaaataaatgttttgattcgtgcatgaatcactgttttgcagccataccacaagctgacttaaaaattgcaaattgctgaaaggtacaatcgtataagaaacaaaatgattttcacatcacttcgcaaactacattttttccctacaaccaccggaactcaatatagttcctacgcagcttcatcattcataacagaacaactagcaagttcaattcaatttaaagagatcgaatggtgattcacactctaaagcaaacttagactaaaaattaatagtatctttaaagattaaccttaagggtaaaaaaatctgcaatccctgcaaacaataatgcttgcttcaatatggtatacttagtcatatacatggacattctccaataaaacattttgttttttttgacgcaaataataaaacattttgtaatctacagctcataactcaaaccatattgaccatctcatgaaaagtcacattacacatcacaaattaattccagccacaacttttagttcatgtgctcacaaaatgaatttgcatgaaaggggcagggctgagtagcaaattgacgcacagtaacagcagatgcagatccagtagagtgaagggagcaggattttagtgggaatcaactttcgtaactgtggcatttggggagttcatataattctaaactaacatggtaggttgtctgtagctcatatacaaataatctgcacccaaaccagtgccaaaatatacgaacaaatgcagaaattcgcttaggcaatactgcaaacaccttaagtgcgcaaaaaactgaagtaaatttaaacgatgtaaatggagaggaatgaacctgcagatgtcacagtgttcagtgcagatgtcgatggtggcaccgcgatgggcagaaggcgggcgggccgcagggcgctcgacggcggcgagtctctcccacgagctaggtcaccgggcggcgctacggcgcatcgatgggcaatgccgcagcgggcgacggtcggccgtcgacaaaatgcctccaaatgctgtacatcctgtagtgtctgaggatggtaggtgggtttggccaccaaccaggcaaaaccacacaattcccccatccttggccttgcgcttgcgcattagggtgagccaaaaagaaattaaaaaaaaaaacaactggaggttcttttccttaacacataaatacccgacaatgccctaaccgctcgacgttcataccgcagcata

SEQ ID NO: 46245 - DNA, 699 bp, Oryza sativa
  unsure (1)..(699): unsure at all n locations
gtgtcccaatgaatgcnnnnnnnnnnnnnnnnnnnnnnnnnnnnnnnnnnnnnnnnnnnnagtggattttgtcctacgtggcagtctagtcagcaattttttatttaaaaaattagtggggcccacctatgatattctctcccctctctatccttttacccctctcacctatctctatctctcttttgcgttggaggctgacaaatcccacgtgtcggcggaggccaaggatgagcggtgcgccacagttacgagcctcctcaaggcggaggccgagaatgaggcacacaccaactgtggccagcccgtcaagctcaccatctgggcctcgtcctcctgtggttagggaagcagcagctagcgctggacttgcacgagaaggcagccatggcgggggaaataagacggcggggaagaggggacaacgcaatggggcgcctgaagaggacggtggcatggaagcggaggagagggcggcgcggtcgaagccgaagatgcagtggcgaagatggccatggtggggaaatacgatggtaggggagacagctagacacggcagggtgcctgcaaatcccggcggcatggaggcggagctccttggccgatgactggcatcggcgagctgtggaacattgatctcgaggccgtttcccctaggctcgagctctaccaccgaccgacaagtccaaagtcctcctg

SEQ ID NO: 46246 - DNA, 692 bp, Oryza sativa
  unsure (1)..(692): unsure at all n locations
acttttactgccatcttttttttagcgctgctctcacttgatttgcaacatatcaaaggatatttttcttttcggacgaaataagatgaatttttttgacaaatttatattcgtccttcaataaacagcaacatttacatgtagccaccaagtgtccttttgatcactcaaaagatcatcatttgagcaagtttaataggatagccaactactagctccaattcaactatagccaatccaatagcttattcatacaatagttatatactacactattaatacctggtcccacttgtcatacacacactgtctttgaatccgtgctacagctggctacaaatatatagcccgctactcctctttcttctcatttatatttttaaaatatgtttacagctggcttatagcctcctactgtacctgctctcaaggctgctgatcgctgacagaccgacgagcgcgccgcaacaacgaatagccgttggatcggagacatcgacggtccagatcgaccgatcccctccccgccttcctcttctcccccctactgcgttggtagggttttacgcctcactgcccaccgccgccgccgtcaccaccgggcgcggccgccgccaccatgagagccctcgtgnnnnnnnnnnnnnnnnnnnnnnnnnnnnnnnnnnnnnnnnnnnnacgncagcattaat

SEQ ID NO: 46247 - DNA, 702 bp, Oryza sativa
  unsure (1)..(702): unsure at all n locations
gcgctccnttttgatgacatgcnnnnnnnnnnnnnnnnnnnnnnnnnnnnnnnnnnnnnnnnnnnnnctcctaatgtttgttataacctaaagaaccctgtgctttctttttatgtattgttattgcttctttataggcttgtagctttacttgtgtgcttcgcgtagtcttcgtcgttccggaggttcctgaagcgtggtttgcggtcgtcgccgaaggttcggaagaatatccattgatagcttgatttatctcaaatttatgttaggggtgcccatcgatccgctagaggtggaagcggttttgctcgatatttcttgggttttggttgaagattgaagcctacaaggtaaatattcattatttctcaccccgattcacacccgctcgttgaattgaattgccatgtggtaatacatgtaaaatgcactagtcattaatttgtatggatccataagtcattcatagatctgtctcgggtgctatgctaaatttgaattaatcattttttccatctatgccatcatcgntaatgtttcacattagccaaatatttttttgcattgacgaaaaatagaattttttttatcttttcgttagccatgactatctagttaaggtgacgtgaatgtgtgcaaaaacctcaattttatcgtagggtaaaatgggcatttcttcgttgttttattctaatgtgcctg

SEQ ID NO: 46248 - DNA, 1989 bp, Oryza sativa
  unsure (1)..(1989): unsure at all n locations
ctaccggatgtcctcactccggctgtctaccttgagcagcatcagaagaaagccaacctaagactagccgaacgtcgggagcgcaaggatattgagccacaatccaagccaatcggcagcttgtgcacgaagagaagtccaagcttgatcagctatctgagggcccgatcaaatccaacattgatcggctcgaggctcacaagattgagctcttggcacaacttgaagaatgcaacaccgagctggatatggaacacaaaaagctggccgatcttccaaaatctgtcgaagaacagaaggcaagactaaaatcggctatcaagaatgttgctgatctcaccaagtctttgaaagtcattcctagaaccgacactcaagatgcccaagccattgaagaatttatgcatacaggtacatagttgttccatgcacgtacaaacgcatgcgatgaccagtaattgctggataagtttgagcattgatatagctcgcgtgtgcccgtagccatacgtcttcattaaaaaatactcgagctgaccaagtgaaaattgctgcttgtatgtactgctccgtgtttttgattttgcatgttgagtcagccgagtccgagattgatccaatcagctgtcttatgcaactagccagccgtggttgtctctcgtgacgatcagatcagctgtcttatgcaactagccagccgtggttgtctctcgtgacgatcaggggactcggagggcacagccaacaatcagtgcaggcaagacatagattgatttaattagtagttaaatctgaggccaatctaataattggtagattggaacggcgaacctggtcattgttgtaactacaaagtgtagctcccgaagcggagattttttgcggagatacaggagatatcggtggcgatgacggttgaagcttccaacttgatgacatagatctttgatcgccgttctctcgactgggtaaaacccaagtcggagaaggagagattgttgaagtcgtcggcagcgaggaagtgaaaactcacgaatcgaagacgaagccgacgaatcatgaaattgattccatcacactcgttgacaggaaactcggcgaacccctacctggcacgccaactgtcgaaacaaattttcggcaatatgaaaagggggtagcgcacgagacctaaaagtggatggatgcggagacaaaggatttagacaggttcatgccctctcaatgagaggtaataccctactcctgtttagggatttgaatccgccgggtgtatattgatctgacgatcagtttatctcatgccccctagagggccttctgcccaccttatatagtatggggggcaggattacaagatagaaaccttaatcaatacggtatcggtttcctaaatctattttacaatattatcaaatcgggactttaggccgctccataatataaaaggaaacgtaatacccaagtcatgatcggttacatattccatagatataagctatcccctatgactagtcggataactatgccgtgtgggtatggggtacccataatctccacacattgtctacttttttccaaaaaaacaaaaaaaaacacaattgagtgctacaatctattacaatctattaaccacatttcacaataatttcattaatgcaccacatttcatcccaacataaataaaccacatttcaacccaacataaataaaccacatttcatcccaacatgaataaaccacatttcatcccaacataaataaatctcatttcatcccaacatgaataaaccacatttcatcccaacatgaataaaccacatttcatcccaacatgaaccacattgcatataaataaagttaaatgatccacatttcatcgatcactacaatcatctatcaccaaattcataaatgcaccatatttcatcacaacatcgacatnnnnnnnnnnnnnnnnnnnnnnnnnnnnnnnnnnnnnaacatgat

SEQ ID NO: 46249 - DNA, 744 bp, Oryza sativa
  unsure (1)..(744): unsure at all n locations
agatgtgtcttgtgggtaaagatgtacacctctgatcagagtataacctattcgaatagacgcgccctcggttatgggcaagccgagcaatgtacccaagttagtgttttaattcttaaaatttgctcaacaactaaaatgtggaatggttggcctgggttggcttgggacgagctgggacccagggtcgggttgccagttcggtctgaatcatcgtaggccttgggttaaggcaggttcgtgtgggtgcacggccttgattaataatactgtgtagctctaggatcgtctttttaaaattggctttgggcaactaagtgacttttaaatgctgtttactgcaaaacctaacccttatattattaccccttgtctcattcttgctcaatctttcccccccccccttcagtaagagaagctttggagatgaagtcctaggtggagtcctggcttataccccagttgagcgcctgtgaagatggagccgtaggcccgctagtccgctgctgtttatttttgattgtcaggccttaagtgcctttgtaataatgtaaatattatcgatataataaagatgtgtcttttatatcatgtttgtgtggtgtaccctggcttttcctgggatggggattaatacactagcgttcgggaaaatgtatttttctcgnnnnnnnnnnnnnnnnnnnnnnnnnnnnnnnnnnnnnnnnnnnnnnnnnggctaccataggttctacaaannccgtt

SEQ ID NO: 46250 - DNA, 718 bp, Oryza sativa
  unsure (1)..(718): unsure at all n locations
ggggggtagncctgananccgcactgagnatcgtgctnnnnnnnnnnnnnnnnnnnnnnnnnnnnnnnnnnnnnnnnnnagcagtagattagcactactagaaaaaagatttttccaggcggtccaaaaccattttcgcaggcggaggagaggaccgccgctaccatctcgactgtgaaaatagaccattttcgcaggcgggccacagcccggctgtgaaaatcatctcaggaaaataaaaaaaaccatggggcgccgccgccggcctcaccacgggcgccgacggcagcggacggaggggaggagaggaagtggccggcggaggcggcgaggagggaagccggcggcgcgcggatctggagccgtcgtcgtcgctcgtcgtggccagcggcggagggatgcggcggcgtgcggacgtcgtcgtggagggagccggcgacgcggacgtgggagaggagagagctggcggcgcgcggatctagagcggagggagctgtccgcggcgcgcggatctagagcggaaggagctgtcggcggcgtcgcggtcgtcgtcgtcgtccaagagggaggccgccngcggccaggaaggatgcngcaacgcgcggacgtcatgaagganggcgcccgccgccccgacgttggagaagaaggaacccttcgcgttttcgcagtcgtcgtcattcgtcgcgaggagggaggccaccgcggtgaagaggaa

SEQ ID NO: 46251 - DNA, 1115 bp, Oryza sativa
  unsure (1)..(1115): unsure at all n locations
agggtgtgaaatgtatcgcctgctagctgctgcgtagatgctggtannnnnnnnnnnnnnnnnnnnnnnncgattgagatttttcctcacatcagtgacctttgcccattgacgggggccttacccgatagtgatgatgctttcagcccgtcacagataagcgatcctgttctagtgtatgggcttcacaatttattttttttgaaaagtatgtcatgtttattttgtagtcgtattcgaatgctaaccatggttattttgagctacgatcgacgagccaaattttccacttcttccagattaaataagaccttggaacgtcgtgacaatgaatgaagaaaattaaaactaaatttaaagaggttggtgtcaaatccatattagggactcataatatattatatattccataaaaaactctgaactttagttaatgaaatgttatatattatatatttcaagtttttctttctttttagttttctgaactctgtactgaacatgtggtaatttgcattttgttaatgaaatggggagcttacgctctctttctcaaaaaaaatccataaaaaactataaaaaaattcgagcacaatttgaagcttgaaatcaaatgcctaaaactgtggtttggatcggactaacttttattgccaatgttttacgttgaactatctttatctaatatttttacttcggactagataaatctacctttattacagtttgaaccacaacaactcttttctcaagcacatcaacagcctcaagcgcacttacatccacatgctggcaatctctcacacttgtgttcaatctacttctttaccagagacgaagttgtatgtggctaaaagaaaatagagttaggatgtgtttagttccacgccaaaattgaaagtttgaagaaattgaaatgatgtgacggaaaagttggaagtttgtgtgtttaggaaagttcgatgtgacggaaaagttagaagtttggaaaaaaaagttagactctaaacagggccttaaaatggtgcaaagtgaaaatgttaccttaaaaggaggtccagggttcgnaatcgntcgggttggntttgncnaactnccngaagtgcactgccaat

SEQ ID NO: 46252 - DNA, 729 bp, Oryza sativa
  unsure (1)..(729): unsure at all n locations
tagtgctttatctntgaactagaaaggtagcaagcgcacatgcgtgggcatcttgtttaacatgtttgaaatttgagcccctttacgatgctctatttgatcgaagggtttagatctatttatactataccatcctaaatagcagcagtagaaacataaagtgacactactgtaaaaaaaagtgcgaaagggtataattatcatttagtagttactaaacctatttttattcctttttggcttatttcgatggaatatgagcgatgctagcacaataaataacaacagattgatcaatctagctgcaaaaaaaatatataaatgaaaaggttacccttaatcaatgtattagtaaataacgaacatatcagatcatttctactggtagtataatactatcagtagagagatcaccattcaaaattttattacatatgtatatgtgtgagtgattttttattgaaatacctttgtttactctattctaatttatttgggattatgttggttatgattttttaattacccttgcatcatatgaattgtaaactaaaattatgtgaaactgtgaagtcttgaatttataagaaaatatggtgtcgcaaccatggaattggtttgtatgaaatcatatataatnnnnnnnnnnnnnnnnnnnnnnnnnnnnnnnnnnnnnnnnnnagcgnggatntcagtgnnnntcaaagnggntatcaggnctacatccct

SEQ ID NO: 46253 - DNA, 750 bp, Oryza sativa
  unsure (1)..(750): unsure at all n locations
gagtgttctatgataaatttaaccttgcaaaaatatatgttatttcaagttgtatactaactaggcgcatgtcatagaaacatcgataaaaaaatcttaaataaatcaataatatatatattacataattgtatatcctttaataacatgcatagtaaaattacatttacattttcaaaactaaaaacaactccagttgtcccaaaaattactcattacttaaaaaatactgaattacatattactaaatttatcatgagtgtatttttatgtattatgtgttttatttattcatatataattagaagttgaagatcaaatatattcttttggcaccatttctatgtcctttatctcgtacttaggcatataataatacacgtaccaacgtacgttggagtgctcaatttcatgcgtggcgctatcggtcgaaaggacacggccggctgtatgttcggaatgcatcattctcatcccaagctcgtaaaactcgtgcaactactacgtgcctaattagctttgaagattttaaagcacctccagtctagattcataggagtacgattttcacctgtctttttccttttttttttttgggaagacagacctaggaaacctttattttttctcgaaccactactagaaaacactttttttttnnnnnnnnnnnnnnnnnnnnnnnnnnnnnnnnnnnnnnnnnnnnnnnnnnnnnngggatgaggttcatcatgagatctacaaatnnccgtg

SEQ ID NO: 46254 - DNA, 721 bp, Oryza sativa
  unsure (1)..(721): unsure at all n locations
agggaagttngcctgatancnccttgnanncactgatatcngctnnnnnnnnnnnnnnnnnnnnnnnnnnnnnnnnnnnnnnnnnntattttcataaattatactatattttatatgttataatatcagttagatatgtattataccaacactgttgtacatgttgaacttaattagcaccgtctagtctatgataaaacttattatataacatgagctaattatgcgtgatgttatttgtttctattagaagtttagttagtggttttcgtgttccgagtaatatttgtttccgtattcatatccgatcatattcaatcctatttgtattcgagatcattcgtatttgtttccgtatatgagttattcgtattcgttttttatctaacaaagaaaaataaaatatggtatgagtattatccatccatatccacttcatttttatccctagttgtacaacttcatcattgcgtaccacccatactgtttttttttggacaaagatgccttgtttgtgacattttgatttggtgtcatgatatatttttttatggttcgttttaaattcatcataacaacgactggacgatgctacgtactagtctttgtgacattatcgacaaatgaaactcatcattaatctatgattttttttatatatgggattttcgtcgtagaatgtcatttcttgtagtgcatgcatggtgcaatttactcttta

SEQ ID NO: 46255 - DNA, 880 bp, Oryza sativa
ccacgcatacttctaaaagaactcatatgtgggctgtacatattcgtatctcatatatacatatatatatatatacacacacacgcacacgcacatgcacacgcgcgcacacacacgcgccaaattaagatgtaaaagtacgtgatgatttagacatggcaacggtacagcactatagctaatagtacgccaaactaaattgcaaacaagccaaattgagtgtgtatcatgaacgcatacttataaaagaactcatatatcgtctgtacatattcgtatcgtagtgttataaaatattctatccaatactagcttcttatattttgagacggagagaatatcatgaaagcttcttgtgtgtattttcatgctatctgtccatccagctatatataacgaccgacttattgattttgtttgttcaataaatcgatctctatgaaatgaaaattgaattcctcaggatatttttgtcaccaaaaagatatagatatactgtatcttctcagtactcaacacaaacgtactaataggtaccacacgttaaaactttaagctatgcagattttagaagttacgggtcattcagattattttcaccaactacggatggagatttacaaatagatttcaataattttttacttggttttgttttgatgttgctggaatattctgctctcttgagagaattttgtagcaaggggttatagctctagcttctttggatgtaaaggctgagatttatttctattattaaaaaaaacacttaagctatgcatggtacctcgggacagtaccttttataagtaaaaaacgaactaatttcgccaggttttaaagttatatatgtaacgacctaacctatttgagcatgtga

SEQ ID NO: 46256 - DNA, 1018 bp, Oryza sativa
  unsure (1)..(1018): unsure at all n locations
ttttttttaacagagttaacaatagtagaaaaacacctatagatgccaatctttaatgtattcattacttgtataacagaattggttttttcaaaacagtacatcttttaataccgatgaattttaaatgatctcgatcaaagttttttaatggattttaaactaagtaaatcttnnnaaccgtgatccacgttgcatccgcccctgcatccacgaatctcactcttcaaagacatagaatatgaaaaaaaaaactcactgcaagattctgatccaataccaaggaacatcgaaaacatattggctgaagcataaaaaaaaagtctgaactacttatttctcctctccagtaacagaccgacgccagaatcgatactagtttggtacaaccatgcggcgccacacttgatgaaagcaaggatcatcgtggatgccaagttcaagctcgtcgtgttgccgttgtaaacaagtggccgctgatgttgtgacacgttgtcattgaggaagccgaggctgaccgagctgcccttgagtaagctaaggagattatcatcgaggacaagagccccgtcgctgctcgtgatgaggtagtgttgtagtggagagagataagggagagagagagaggatacgattggagtgtggtgtggagaaatagatgggttgatggtgtttggtgagncnnnnaagattccttgccaaagatngttttaacccttttaattgtccatttggggcttgtttgttttgtaaaaccattataagacccattgtttggatttctttaaactatcaccttaaaatcagcatattcttgggtataaagccctcccccctataccctaggttcctccccagttatataatactcttcctatccttgcccatttctctgttatggggtcgtctcaagatatggggtctctggtttaaatactactctttttttctgttgttaacattctgcctttttaaaaatttttatgagcctctctcttttagacattaagatcccact

SEQ ID NO: 46257 - DNA, 1461 bp, Oryza sativa
  unsure (1)..(1461): unsure at all n locations
cccgcccattgttgacatagctnnnnnnnnnnnnnnnnnnnnnnnnnnnnnnnnnnnnnnnnnnnnntccttgatggggatgctcaggatggagccgagcgctcccacctcgcaccagcgtgcaattttgcagaaaaaacccacgccactttaaaatttacctcatatgtagggcttttgcttaggcatacgttgtaacttttatagagatacttttcaaatatatattactactccatccgtctcaaaatataagcattcttggatcctgaaacggtttccgagatgctactttgaccaacaatatttatataagtaagatgttttaaataaaaaaaagttgcatattatgatagtttgtttaataataaatctagtaacatcaattttatatgattgatcttttttatttttttgctattaatggtcaaagtttaaaatgtttgacttatcactatgctaaaaattcttatattttaggacggaggggtatatgctaagcaactagatatattaatatatgctaagcaactagatataactaacgcaaggcatatctttacaagtactggcataaatttaagatgtttgggggcattgaggataaatattatctactcaagaggattggcaagggttaataattttttttttctctttttacattgatttgttatagttgctgcacaattttatgcatattagaaagttttatagagacattttatgaaatgcctcttctcttctagagataattcgccaaaagacacttgcaaaacattcttcaaaatacctctataatactgtagaggcatttaaaaaagtctttataatactagaaaaatatctctacaaaacagttattttatagtgatatcatcaattaatcaattaagagaggtagtttatacaatgtattgcctctaaaacactacctccaagacattgcctataaccttttagtttatccactttcatccaatacacactactctttctcttttccaccttgaagtttgtgaagagctttcctcttgcataagggttggttctttctctctcctctcctctctcctctacctcacattttaatcatatgtgatatctcgtagcttgcacttggatgcttactatagtacttgctttaatatttagttgcacaaatgcaactttccgtcaatcggagaatcttaaactcaaattggacaacatccaatttgttggtggttattggttttaacccaaactggaaaagtatgaacccaaaaactatagcatatgcatgagtttggacagttctattatattggggctggggaaaacaactttgaaactaacgaagtcatcacgagcatctcgttgttgataggtatagtcgtctaccactgaannnnnnnnnnnnnnnnnnnnnnnnnnnnnnnnnnnnnnnngaagccgataatcaattgaagaaggggccat

SEQ ID NO: 46258 - DNA, 798 bp, Oryza sativa
cttggaaaaggcatcgtgcctttaacaagccaagctctcccgtagtcggccgtcttgcaagcgaatccctccggatttttggtcttgcgacatgtcgaggggagagggatcgcgctgtcctacggggggccgaacggggccgagaggggtttggccgaacccctggtttggccgaaccagggagctcgctgatgggctccaaatttgctggggagcctggcactgttgcaaggggctacgcccacagtgcatttaccccttccatggtgtagtgctccaccgggatcaattgattcgccggtgtcggctctccgtcgaggttgtatgtggaatttgaggaggagccgatgaatgggatcaaagatttgtgtcacgaccggaattaacccaacgggcgttccttacgtgcgtgtattattccttgtcccaggaggcaaggtacaccaaaagtttatacatttcagagtttatcaagcggaagcgtaaatagttaatttattacatgggcggcgaaggcccagcacacacaaagacaaacgggaaacagcggaagactagggcgatgaccgcaggcgcttgacggcaggcacgagctagacaccaaaggctttcatcttccaggaactcctcttctgagtttggaaaaaattgagcaagactgagtacaaccaccatactcaacaagacacacccataagtgcagaataaatgcaagggagtacaagggggttataatataaagggttagggtttgcagtaaacagcattaaagacacttagttgctcaaagctattttg

SEQ ID NO: 46259 - DNA, 1290 bp, Oryza sativa
  unsure (1)..(1290): unsure at all n locations
tagggtcggtcctttattggaccggggacggtactagcttttccaagataccacccaaatcctccgtccgcnccagtagaaaacaattgtttattttatttctcctttcacaaatcatgtcatcaacatcatggcaatgtggcgctcatgtctccacatgccgcatttgataaatatgagtatgcatgattctagaatggcatttctaagcaattgtcataattgactagggactcatacgtaattatggttacaaggattttaagggtaaacaataatcaaggcatggcataatcacaagtaggatgttcatcattgcatgcaattttatttgtaaacaaaacaatttcgcacttgggatcaacatgttcaaaggacagtgatgactcgccttgctcaaagtcttgcgggtcttggccttacgcttggatccacaaatccctcgggttctatgtttacgtgcaaaatttgatttgaattccgttagaattcaaataaaaatccaaataaatccaaatgaaagtcaaatgcgaaagtcgattcctttttattaactttactatctgcgaactacggcaaacccaatttcgatttaaactattttgcgggtataattattttgttgtcataagtttttaattactccttcccgagcattatatccatataataggttagaaatttctattacgagctaaatatcggacgaaatcctagaaatattatacaatttaattcagtctatgactaaacgattaaatataatacacggctaacattcctagtaattaaatccgaatttctaccgtgaaccgatgacttatagagattaccaaaaataatctataataatctataagaattcatctaattgtttagttattaattatatctaagttactaccaattttaatctaatctgtttaagaaacatatttttataattaactcggaatttcgaccgaaatactattatgctcgaggaattttcgaaaataatctatgattaaccccgaccattttttttcctaaatcctcctaatttctcccccaatttcccttctattttctcattttcttcttttctattttccctgtttttctctcctctctttctttttctctcttttctctccctctctttctttttctctcctttttctctcctctctttctcttttctgccggcctctcttttctttttcttttttccttctcttttctcctcccgnnnnnnnnnnnnnnnnnnnnnnnnnnnnnnnnncgaacgcaggagcatatcagtcacgg

SEQ ID NO: 46260 - DNA, 720 bp, Oryza sativa
  unsure (1)..(720): unsure at all n locations
tgcaatgaacagtgccgttttctaattaacccgattttagtgtattttccatataaatttgattccacaattcctaattttgcatatatgcattttactcaatatttgtgttatctgaactaatgaattcaccctagattaatattactcatattttatttttatataatttatttgagttttaattagggttaattcttattccatcgtatttaaatttaattgatccaaatatggttgcgataatattttatttatttctatccccacctaatctttattttaatttgtatttattttaccaatttgtttttgaggtttattcctaattaactattctttactcacgattaataatcatcgagatcaaatccagataaaatagacgaataagatcggcatgatgcaattagtttaaaaagtttttggaaatccatatttttagagttttgattttgtcggtcgaattttcagggtgttacataaacccgaaccaaaggggagaggaaggggaggaaaggtgcaggcctcgcttctagctccaagaaagctagatctaggcaagggcaaggaagagactaagggcaaagaggtcaagaagaaatacgtcgctccacaggagttccaactaggtatnnnnnnnnnnnnnnnnnnnnnnnnnnnnnnnnnnnnnnnnnnnnnnnnnnnnnngctatgaggttatatcaatcacaaagccct

SEQ ID NO: 46261 - DNA, 803 bp, Oryza sativa
  unsure (1)..(803): unsure at all n locations
ggggcctaacttcgagcccgtcacagatgagtgtcatcggtgacgggctataggaatatgcatcccgacgagtacatatacaatggcaaaaatttaggcccgattgagatgacttcgttctgacggcccacgttgtccaggcatgtgatgggccgtcacagatgagaggatctgtactagtgatataacaatatgtgtttctaataaatagttttttttcattgttttattcatgatcctacttgcttgagagagaaaggacagtggaaggtcgaactagagggacaatataggctcttgtcaataaattcaataaacccataattaattttgataatccatgcatgtcatatgatatatattccaaaggaaatctcgctttctttgggagagtcccttgaatccatgtgtcgacttacttccaaattagatttgtgacatagacctccaaacgaccacacaacgaaattaatttaataggaccaattcatgattaattctcatgtgcccaagcgtacctgctgccaatcattaagttgaaattcataaatttcttcctagctagtgctgtacatgcatatatgcacatgtagcgacagtaacatgcacgataatatgctatatttagttagcacaggagtgtactttatataaatttgtgctttgctaaaagttgatcaagatgactaattaatcaccagtgtgatgcacatattcgttctagacacannnnnnnnnnnnnnnnnnnnnnnnnnnnnnnnnnnnnnnnnnnnnnnnnnnnnnnnnnnnnnagtgatctacaa

SEQ ID NO: 46262 - DNA, 718 bp, Oryza sativa
  unsure (1)..(718): unsure at all n locations
cgcgcccttatttaattgtnnnnnnnnnnnnnnnnnnnnnnnnnnnnnnnnnnnnnnnnnnnnnnnnnnnaaaaaagtttctttatgttttgtgtagacacgattttgcttatggtattaattagtactgcttaatttttttattatacaaatacaatgtaatctttagaaatgagtgaggttgatcactaaaaatatatatagctaaacaaacatgtgatcatgacaatcttcagagtatcatttatatgtttgataaagatctatattttagcatctagtgtgtattcgtcacctattgttcataattgcacgagacacctttactaattttaaaaatgactttcagtggtaggcaacgtacccgtcgacagcgagctatacgtggtaacttcgtcaatgtcaaaatatgtcagcctagtctctcagaagtactcataggggtatgtgcaagtgtgcgttcattaggttgagtgtgcgcgtgttgtgagcgcctgcgtttgtaccttgtttctcaaaaaaatatcaaacactatttattgtttctcttttagtttaatggataaaacaattgagagaggacaacagtgttttgaacttgtaaggttaaggagtgtggtgaaatttatttttctaatttttctatgatttaagtgaaagtcgatgatggggtgtttcatttttttctaagaatttttaaggtttttcctgttttata

SEQ ID NO: 46263 - DNA, 1020 bp, Oryza sativa
acttcggccaggcccgagaggaagaggggagaaaccttgggccagacttggcccaaagggaaggagagggttaattttaggtttttctttttaataaactctgataattgtttttgttgcttaataattatttccggtgctctgaaaattcgagtaaaatttgagggctccttttagaacaaggagaatttagcaaaaattctccgggccacatttgaatttttcttgtacgcattttagtgtttgccaatttcttttcgaattttaattaattctattattccttttagaaaatgatttttatttcgggatgaatttatcaggacgtgacagagacggcgaccgacggcaacgaccgaagcgacggcggtgcccgactggacacccgccggcggcagcgacgcaaagaaccacgcggaggcggtgctagagaaggtgacaggctagggcgaaggtggcggcgagaagaggaggtcccgggggtccttttataggggtctaggggcgtcgatggaggcccatggccagcggcaagaagatggaaggtctagggttagaggagagagattgatccgaatcgaactcaaatccgtcgatttccaaacaaaattagccggagtttccaatagagaaaaggaagaggagatcccgaggatcatttcccctctatcaatttgatcggagaaggaaaggggcggccggattttggaaggaggaggcggcttgcggcgcggctaggcgcggccagaggttgaagacgactgacaggtgggtccacgtgtcaacggcacagagagagagaggagggaggggcggcggactgggccagatgggccgagcacgcgcaggccggggagagagagagagacttgggctgactttcggcctaaagccaaaagaaggattaaaaacatttttctttttaaattattcatgaaatgatattccctttattaaaaatatttcctttgctcaataaatcccagaaaaatctaggaactataaaaacaagagaagtat

SEQ ID NO: 46264 - DNA, 1062 bp, Oryza sativa
  unsure (1)..(1062): unsure at all n locations
ggaagtactgtgcttaaccatgggatcctttcagaaataactggggacagggatcaacttgcatatatttaccttaacaaaactaatatgaaaaatgcgtaattcttctatttccaagaggtgaagggtgtcattttaattttcatgtgtgaacgatcgaaaaaaaaaaagaagcttgtgttatgttggtggagccaggacctggccaccatggcagttgcccgggctccaccgtccatgcagcagtagattaggatttaattactgtgattactgaccttgcagccacatggagtacataaatacaatgcttaagcaaaggcaaagggctataatcattgtgtattttggtgaaacataattgaatcatatggtaaaacattttggtgtagcgtttgaaacgtcaagtttcaattgttgaaacatccacgcagggacagatccagaacaaaaaatggggggagggggctcaattacacggtttctttaacctccagttatataggaacctttagtttattattcatggtgaaaaaactaaaggggtactccgggggtatccatagatcttgtgggtgtagggnaatnctnaactngcntattccggaaccaacaataatccttgggaggatcagtggctcctttaaacctgatcgaaccagatcaacgatcccgggaagagggaacttgtttttgacggaaactttattgatggctctatacccccgtacatactttttggcttggccttattctccaaaaaaatcaccggtttacccaatggggaagtcctaatccgtaatgaccccctcctctttaaacctctttaaatggcggtttgactttgggcaatttattttgtttgccctacatatatgggacccttgtttaaaagaaatggttttttgggacaaataactatctctttactcaaaattttgcgtttggtgcgccctacacgggtttttatttcggggaaacacatttagcgaaaccttttgacggttttaaatttttccaccacccccaaaaaactaaaattatggaactgggtcaaaaggg

SEQ ID NO: 46265 - DNA, 1748 bp, Oryza sativa
  unsure (1)..(1748): unsure at all n locations
cggctcccnggtgaacaatctctgcgcgcacccacgcgtggggagctctgcggctccaagcttattgatttacaaccctgcatatccatcccatttcctatgacccatttaatattattcttgtacctaaaaaaacacaagtcatgacatataataagtttggcctcagttttgctcagaaattatgcttcaattatcatcatttgcaactgccccacccccaaaagaaattaagaataagtgtagagggtctgtccttatgcaaaaaagaaacaagtgtagaaacccacatttaaacctaaacaagaacaagagtgaggccggcccaacaatgcatccattttgcaaaacatcccatactgccactcccccccaaataaaatgaacaagtgtagatacaaaacagccataaaaaacatacaaaaactcacaattcccccaaaataattcaaccatcacagcccacatcaattcatccatcccattggacccaaaatatcccaaaaatggtatgttcttgagcaatcatcactggccattcatccatcatagcccacaatatttcatcatcacagcccacatctaaacaattttcccaacatcccattctcccccaaattcacaaattcatccatcacagccatataaaaatttatcactagctaacacatataggaatgcacaagtcatcacagccatataaaaattcaccactaggtaacacatataaaaatgcccaagtatcacagccatataaaaattcatcactagctaacacatataaaaatgcacatgtcatcacagccatataaaaattcattattagctaacacatataaaaatgcacaagtcatcacagccatataaaaattcatcactagctaacacatataaaaatgcacaagtcatcacagccatacaaaaattcatcactagcacaagtcatcatatgtagacattagcatctaaacattgaatcaacaaataattgcactatcacattatcgaatttaaacattatcatcgaatcatcaaatcatcacatataacatgtacacaacaaatcatcacattatgcatcatcatcggtgaggagtacctaccttgcacggtggcgggctcggtgaggaggttgacgtgggctcggggacggcggtcttgggcggcaccgggctcggggacggcgtggagggaggcgccgggctcggggacggcggtcttgggcggcgccgggctcggggacggcgtggagggaggtggtggccgttggggaggccggatcttgagtggccccggcctcggggacggcggtcttgcacaacggcggcggtcggcaatcgatagagggaggcagcggcgtggaggaggtcgacgtggcggctagcacgaggtcgacggccactgggcatagatctggagaggaggatgtgggacggccgtggttggtgaggccggatcttcgagagaggaggaggcgacagcgttgaggacgaggaggtagcggtcttgaggactaggcggagaggaagccggcggtggcggtcttgggcgtggaggacacggacttggaggaggaggaggcggcgtcagcggtggtggaggaggacgaggtggcggcggcggtggatctgagagagtgagagtgtgagagagtgagaggcggcgtcggnnnnnnnnnnnnnnnnnnnnnnnnnnnnnnnnnnnnnnnnnnnnnnnnnnnnngagcaatcagatatactaatccgcgc

SEQ ID NO: 46266 - DNA, 698 bp, Oryza sativa
  unsure (1)..(698): unsure at all n locations
ctgcccgatttaaaattgctatgacatttgatttatcacatataatgaacaaatgtcttatttacatagttcaaaattcctattaattttttaaaatcatataattgacaattgcctttctcacatatagtttaaaattcctattaattttttaaaatcatataattaacaattggctctctgacatatagtttaaaattcctattaattttttaaaaccacataattaacaaatccatttcttcaaagagttttaactggaatggcatgaaacatatgcaattcattcattaaggctccaatacaaattaaatacatcattcacagtgatatgccttccgaatggtctaaacaaacgtaagccacttcgtcttcgggatcatcgtcaaggtcgatctgaggtctgacatgaagattcttgttgtattcttcttcatcgacaacgttgtccacccccacaattcttcgcttgccatccctaacgacgtgcatcttcttttttgcggggtcttttatgtagaaaatctgttcgacctgcttcgctagtacgaatggttcgtctgcgtatccaaccttggccaggtccactaatgtgaagccttccttgtcgaccatgacacctgtgcggatattcaggggtaccgaattcctcgcccctagactagcatagcacgccgcgtcganagcnnagcaatcaa

SEQ ID NO: 46267 - DNA, 916 bp, Oryza sativa
  unsure (1)..(916): unsure at all n locations
ttattgacnnnnnnnnnnnnnnnnnnnnnnnnnnnnnnnnnnnnnnnnnnnnnnnnnnnnnnnnnnnnnnnaagaaggaactaaatctactcgatcagctgtagatattaacaatatataatccttatatcgatatatacttaaatcaagtgattgggatagatcggtcgccatgccgagacagtataaatcacttaaatcgaaatatatattaataatgagactatatatgttcatagcatagccgatcagatagatctagcatgtatcggctaatactccgataccactctatattaagatattaaagcaagtagaatatatcaaacaaaagcctaatatacttaaatgcaacaagatctcaacataaagggcagatttaacatgtcaataaagcatataaaacaaatatagttaaatcaggtaagatcggctgaaaccccgattctaccctaatcggcgaccaagaagcaggctagagattgagattctaatcacgactcataagatcaaactcaactgatgcagctataagtatgaaaagaaggacaatatctagacaatcaagccgttggaagtttcatagagtggtggataccttatataatctaagtcaacgtcgatatctaatctaatcggctgccctctaccgacagatgttagccaattatagattagatagcgatattgccagagattatgtaagatatatgataaatcgacgaattacataaacaagattagagtatcataaagatagaagcattaatcccgagaatgcaagctgtcataacaagttttacctcttgatgaagatcgaaaccgatgcagctcaacccgaaagcaagaactcgnnnnnnnnnnnnnnnnnnnnnnnnnnnnnnnnnnnnnnnnnnagggcgatgncatccgcggc

SEQ ID NO: 46268 - DNA, 1518 bp, Oryza sativa
  unsure (1)..(1518): unsure at all n locations
gatgtccncttgatttgcccataccatgtanaacccnnnnnnnnnnnnnnnnnnnnnnnnnnnnnnnnnnnnnnnnnnnnnnnnnnnnnnnnnnnnatattcagcaaatagaagtctacgtaaaaagtcaaacaataattggctatcatgacttgctgggccattggatttttctagtgtgcatgggtggatgtttcggaagtgttcaggttgaggcctcctgaagaatcatgatttttattagggactagctatatttatgacaccatatttttcaccaaaaaatatttggcatgtatttacattgtaagtctctatattacatatgtaattttagtgtatttataatgtaagtcctaaaattacatatgtaagttttaaagttacatatgtaaatcctaaaattaagtaccaattacatatgtaagtggggtataactaccgtgtaaatttgtataaatatacaattacaaacagaaaaacacaggtgagttggctagcgtcgttggttttcatccacaaggtccctagcgtcgttcgtttaattgccagtgctccagcggaatcggttcgtatctgccctactccttcacggatctcgtagagaatcaagcggctcaaaaatccgagcatcaccaaccgattatctataatcttccccaaaaagagtttttggtttcctacactgaaaatagaaagtaaaaaaactcctccctccaatagataaactaaattcaatctccaaaacttaaaagtggacctttctgttaaattaccaacagaaaattctattttttttctttcacgcgcagaaagatcactatctcccacgcgcgggaactggaggagagaagcaggagtgcgagattaggagcgagtttcgcgcccgtatataaacggagcgaggaatcgggagagggatctccaaaactcggtaggagagtaggtaatctgttggagctgttttttttttactaaaatctctcaaaatctgttttgggaattcgctgctcaaaatcagaaagctagctagttttgcatgtcagtttgatccaaccactgtaatattttaagtgatgcggctcattgtggtgatcagaaagattcactactttagattacacccaactctttcccttgcttcacgccttcttcacattcacaagctagcagcatgagccccgagtaggggtgaaactggtttggatagtttccatccgtacatacatattttcggatttggaaaaattcggtcggaactattcaaaatttatcggattcggaaatgaatttggatttttttttctcggatacgaaaacgaatacagtccgggtgatattcgacggaatcggaaaacggtcagaaactacccgtgactttacatcggatctccgttgtattacatgctagccaatgggacatttttcagccnaccaagaaccagaaaaaccccaaaaacccccctttaagcccccggggcccccgagggccccccaagaagggcggtttttttttcc

SEQ ID NO: 46269 - DNA, 795 bp, Oryza sativa
  unsure (1)..(795): unsure at all n locations
atcacggaagcttnnnnnnnnnnnnnnnnnnnnnnnnnnnnnccgtgccagcgtcgcgccgcccaccgccggctgccgcgttttctgcgccagatccacgccgctgcggccacccgccgccggccgtcgcggggccgagcgccaaacacctccctaggacagcggatccggcccctcccgagggcggcgccactggatccgcaaccctcgtcgcctgccgctgccacccaccgatgtcgtcgccgcccatcgaagccgttgccgcagccgctccctaggtcgcggcagtcgagcccgctgccgctcccgcccgccgccgccacccgtcgttgcccgccacgccgctcgagcccgcccgccacccgccccgatccgcgctgctgtggatgagacgaagtgagagagagagagagagagtagaaagtgtgtgagagagaggagaggaagagaagataaggttggggtgaaaaaaaattgtggatttttttttcaatgtaaaaatcgattttttttgtatgtgtctgtttaaaactcattttaaggaactaaatcaacgtatatgaaaaagttgtcaaaattaaagttgtataacttattgagatctaccatttttcttttggtcatttctccatccgagtttgattaaactatataaaatttaaatattaaaatataagaaattcaaataatttttcggatagtaaatgatttcaaatgaaaaaattgtcaacaacaaagttgtataacgcattaacatctacaactttcgttttggtcattttttatatgactagg

SEQ ID NO: 46270 - DNA, 1257 bp, Oryza sativa
  unsure (1)..(1257): unsure at all n locations
tgttgnnnnnnnnnnnnnnnnnnnnnnnnnnnnnnnnnnnnnnnctattcggtgaacaaacaaacaaacaaacaaaatgtttcttggtcaattgaaccaaataggaggactagcttggtggtacaaataaaacatattcattaacaataatgttatttaggatttgctaaaaaaaagaaagcccctaaacattttattaaacaagacagaacactacatgtttccatacaaattaaatctaactcttttctacatattgttagataattgtttataggaatgtattaaatattatatattttaaaagctaacaaatagattggacaaattataaaagcaacactgatgaggataagttatggataaacagtatttttgaaatggcaagtgtcatctggttgatattctatcattttaattttttttcaaacataatctctaatacatgctcgcgcatcgcgtgggctaccttcctagttatatactaaaggtccattaaacttcctacaaacgctctcaagcctccacgtggcacatctacaaacgctcctagaccaccacgtggcaatgcctaatctcaccgtcaattttcactcaaatcggtggacccgataatttagaccattaggttagattagatgtattttatttaaaaagttgtgagaaaaaacatatcaaccattggttttcatttattttcaaccatccgatacattttagatcatatccctactttcagctaatggacaactcatctttaattgtgctagagaaaaaaaatactctctctgtccaataaaaaaagccaacctagtactggatgtgacatatccaagtaaaacgaatctatacatgcctatgtccagatttgctatactacactatgtcatatctctagattcctttttttacagagggagtaaattacagtccatactatgtattcttaaatattcttaaaagttttcatattatgtcatcatttaaccattcttttcttttacacaatagctaactttacatttcaatttggaccaccctattatatccatctccaagtctgatgactcagcaatcactccgcacactatctctctctctccattttctttttccctccgtttgataactgctaggtatagcaagaaggagcacggatatagcgtcttcgctttttgttaggtcaacttctgccttccagtccctttacgcccgacattcccgacctcaatgcaaccataacaatagtgtgcataa

SEQ ID NO: 46271 - DNA, 3069 bp, Oryza sativa
  unsure (1)..(3069): unsure at all n locations
atgggcccattgaaatgacatccgctnnnnnnnnnnnnnnnnnnnnnnnnnnnnnnnnncgttgcatcatgtcttagctttatagtcgtggcattccattttccaatcctaccttaacacgggggagcaagcgttttaattaaaaatagatcatttcggaatttttttaaataggtccttgacatcagtgtcatcggcaccggccctcttgatatgagtaacttagccttcacggagagtgatggggacggtgcacgggagagtgatggggacggtgccaacgttataggcgctgtcatattggaccacatcgcctataatactgacactgtgaaatgagtctatttctaagtttttaagggtgtatttgtaaaataatttttcaaaaatgtctagaatatgaaaagccggcatagtgtcggtggccgaccgagagctgcgtgtttgtatacgcgcagtcggatcttgcgtcgacaaaggggggtcgataggtggatgcatgggtggtgccatcctacctgccgcttccagcggcggagccaagggccggctagcatgggcaggtgcctggactccgccgcatgcagccttgcattagatactaaatacggtgcttaccattagtctagctacacatgcatcattagattagcactaattatcatgattagtctttagccacaacccaattttacttttatccatgataaaatgttaaaatctataacgagaagtctctcgatttggtcttacacagcaacgcctggcgcggcattcgatttagtcgagaagcatcagagtttagaatttgagagaagcatcatagtgttaggcatccatatcttttttcccttcttaaaaattttctctcaaattacttatccgatctactatccgattacactattttgttcattgtaattaaatctttacaacaagtctcacacgattatattacgttgaaaaactacaaattacttttataatatatctaaattacttaaggtttcactaaattacttcttaaacatataaaagtaatacaataaagtctaaaagttatttacatatattataaaaataacttaagaaaaaagaaagtaactttgtcatgacattagaagtaaatccgttgtagggataaaaacataactctatctagaaactaaattaatcagcacaaattacggaattgactaaaaacaataataaaagtaatcacctcatagcattacgaatgtataggaagtaatttaatcaaatctaaaagtaatttatatatatgataaaagtaacttagtatataataaaagtaatttacaaatataatttttttattaaatataatcatgtaagatcttgttgtacatatttaattgtaacgaacacaacagtataatcggatcgttgatcagataaataatttaagagaaaaatttatttgaaatttagatggataatgaggatgcaggtggcgggtgctactacttaagaagggtaacgggttgatacacactgtattatttttgtaaaaagatggtcactagttagcacttacgagtgcatgcgctctctttagtcgcacgtaaaatattatatgtatttacttgttagtttgttatctatcattagatttgatcatgctaagaaaaaaaaaagaaccttctgcatccgccactggcggctgccatgcgtattggccggggcctggggtggcgtagtggggaaatttcatgctgtactacagtggagctgctgtcgtgcggggaattaatgcgggcagggtcatcagagtacggatcgatgatcgcccgagaattttttggttgttggattggagagacctcgcgtttcgtcgcgtgtacgtatgatattaaccatggacgacgcgagaatacataatgcggagcccataaccaaagtcatcgccgtttttaaatttcatcgtacaaccattatctatattgcaatatggaaacatcgtacatatcggtgctgcgatacgtacgattctttctacgactgttgtacgctgaaacacttctctcgtagcatttgttagggctctacaggattgaaaaaatctatgatagaaaaaaaaataaaggaatagaaatgaaattcgatcggccgggtagaaaaccaaggattacaaaatacaggactttggaagattttagactttggatgtgcctgggaactaacgtaggaagtaaacagcaattaattttttctgtcgtcattattcatcgatctaatatccttcacattactggagaatatatgggtgaacactcattttcatgcagtggtggctcaggaacaattcgttgggtggtcctacttggcgtcccaaattaccatgatgttactacatcaagtcaaatatgtcaaatacagtgaaaatatagttcaaatatagcaatatatatcagaacatcacaaattgattaaaaccaacattttcagttcaaagttacgaaagttacttcctctgtttcaaaatgtaagactttgttgcattgttcacattcatatagatgtttatgaatctagatatatatgtgtgtctagattcattaacatctatatgaatatgggtaatgctaaaaaatcttacattatgaaacagatgaagtacaaattaatgagataaacaaaaattgcactacaatgtctccattccttttcatgtctcactgcaatttttgcactacaaattaatgagccaaacaaaaattttccaatagcactactatatttgactactcactaagttgttgctcaaaaaaatatctaagtttcagttttcattcatatttttttatccacatttttcattcatcaacgaccaatctattcaaagtaaaaactaaggctactcatagtgagcaagaaataagtaactcacctatgcactaaacaggggccggcggcagggggctcgtgtcgctcatccgtctcgctggctcgggcatcatggaggggcagcagggtgcactggagcagatcagcagagccgtcgagcgagagggacccgatgccagcacagcggtgggggcagaatca

SEQ ID NO: 46272 - DNA, 717 bp, Oryza sativa
  unsure (1)..(717): unsure at all n locations
atttgtcctgaagattaagactacttatagagctctatctcacttcacatgaattggttaaaacggttttatattgctatgacagtattttaaataattaaccaagctaattttgattccaaaatttcatatccttactcctgtaaaaaggtggctgcactactacagaaagggtaaaaggtgccggttcggaaaccctaataggtgccggttttccctatcggcacaaaggaggcggcactgatgatacttgtcatcggtgccggttctagaaccagcacctattacctaataggtgccggttctaagcaaaaataccacgtggctatcaaataggttcaaaaccggcacctatttggtcctaataggtgccagttctaaagcaaactgccacgtgggtgtcaaataggtgccggttttgaactcaaaaccgaccaaataggtgccggttttaagccaaattgccacgtggctgttaaataggtgccggttcaaaaccggcacctattaggaccatattggtgccggttcaagcctaaaaaccgacacctatttgttgggtcaaaaacaataataatttcagtgaattcatccattcaaccccaattccatataaacccaaattcatccctacagnnnnnnnnnnnnnnnnnnnnnnnnnnnnnnnnnnnnnnnnnnnnnnnnnnnnnnnnnnnnnnnnttgttatcaaaggccgt

SEQ ID NO: 46273 - DNA, 747 bp, Oryza sativa
  unsure (1)..(747): unsure at all n locations
cgcgccatttgaaacccnattgagaaccgttnnnnnnnnnnnnnnnnnnnnnnnnnnnnnnnnnnnnnnnnnnnnnnnnnnnnnnnnnncgtgtgctctatgctgcggtatgaacgtcgtgcggctagggcattggccaaacatcttaaatttatgccagtacttgtaaagatatgccttgcgttagttatatctagttgcttagcatatattaatatatctagttgcttagcatatacccctccgtcctaaaatataagaatttttagcatagtgataagtcaaacattttaaactttgaccattaatagcaaaaaaataaaaaagatcaatcatataaaattgatgttactagatttattattaaacaaactatcataatatgcaacttttttttatttaaaacatcttacttatataaatattgttggtcaaagtagcatctcggaaaccgtttcaggatccaagaatgcttatattttgagacggatggagtagtaatatatatttgaaaagtatctctataaaagttacaacgtatgcctaagcaaaagccctacatatgaggtaaattttaaagtggcgtgggttttttctgcaaaattgcacgctggtgcgaggtgggagcgctcggcttcatcctgagcatccccatcaaggatcggatctgagcattttgaatattgtttgcgttcaactaatatgttgtcatatataacgtccaccttaaattccgcatcaatccgc

SEQ ID NO: 46274 - DNA, 642 bp, Oryza sativa
atcatatttcatctacaatcttatacagagtctattaaatttatttctcttaacatagtttgacagactagttttatttattgttaatagctaatactatttttacttttagctcgattattaaaaataggaaaaaatacgaattacccccccccccccccgaactatcgcggtcgaccgacttacccttttgaaccacaaaaccagatattcttaacccccaactatgcaaaccggacaaattaccccctcaacccaatccgcggtggttttggtctacgtggcagtccagtcagcattttcctttttttaatggtggggcccacctgtcatatatactatctcaccttttccttttcacctctctcactctcactctctccctctctctcggtgaaaacggtggcgggcggtcggcggcgcacggcagcggagcccgacctgggtagctagacgacgaggcccacgacctgggatacggaggcagcaacggcgtgggacacagaggcgtggtggcgcgggatgcgtaggcggtggcggagtggttcacagagccgcccgcgcctccactgtccctccaccgacgagaacatgggctcgacacactcctacacaaaatgatgggagttcgccgcctcgtct

SEQ ID NO: 46275 - DNA, 971 bp, Oryza sativa
  unsure (1)..(971): unsure at all n locations
gtggannatttgaattgactgacgcgcnnnnnnnnnnnnnnnnnnnnnnnnnnnnnnnnnnnnnngggtcccatatttttttataattagaatgctgactggactgccacgtgtacgccacatagactaaaaccaccgtggattgggttgaggggggtaatttgtccagtttgtacagttaggggtgaagaatgtccagttttgtggttaaggggggtaattcggtcgaccgcgatagttcaagagggtaattcgtactttttccttaaaaatatattaaaagttacttagtaatttccgcagcaaagcgcggggaatcacctagttgctagcatgaacacacccagtgtaatttttctagacccgccactgggtggtagagttgtgcgacctcctacgcatatgtatttattgtattttgatcaactgcaaaacatgtttatgtagtgtgagtttgaataataattgctgcaacaaagttagaacaagtttaataatatagttaactaccaacattaaaaattaacacatcatacacaatcactctagtagcttacctatgcaatagttttatataaacatatatatgatattaatacttgacatatctctcatacaatgttttgaagtttgtgctgcaactcatttcaaatctgtagcattcttatcttctctctgtttcacatgtgtatgtgtagataatctataacctgctattctacatgctcttagtaaacatatttgtgcacagtacctaggcaattcttgcacaccatcatccggtaaattttagtactgcagtacaggggcccagcaagcaaacccaattattaattaccggagatatttttattgttcgtacaaatttccatcgctcgctactgctaccgtacgtctaaacacgacgaatnnnnnnnnnnnnnnnnnnnnnnnnnnnnnnngcgatgcgcaatgcattcaaaangggccct

SEQ ID NO: 46276 - DNA, 593 bp, Oryza sativa
  unsure (1)..(593): unsure at all n locations
tttgatccttgcnattgacnncccnnnnnnnnnnnnnnnnnnnnnnnnnnnnnnnnnnnnnnnnnnnnnnnnnctttcttacgggcgggggngttagcggcagccgcgggcgcggctagtggagggcaacagtggatgggcggacggcgcccactggcgaatggaggtctcacagggagcttgacgcagccccttcttctcattggcaacgccgtggacatggccatgactacccgggcgcctctggttgacacttgacggacgcggtcgacggacgagaacggcttgacggagggacgaacggtctcgacgaccgggaactacgagaggatgactacaggaaccggcgaggaggcgatgagggcacccggcactacctgcacagagactaggacggcccggaacacgccgttaccatgacgacgagggtggtggtgcacttagacgacgagcccccaaggactaacgaccgaccggaggagtcttttttgacgacgagcggagacgactataacgaacacaggcggtgttcggatggaggggatgcgtcgcctatggcaaccttgactcttgaaagcctgaggaggagatgg

SEQ ID NO: 46277 - DNA, 741 bp, Oryza sativa
  unsure (1)..(741): unsure at all n locations
gaagtgcnnnattgtanaacttatgcttgcttgnnnnnnnnnnnnnnnnnnnnnnnnnnnnnnnnnnnnnnnnnnnnnttcaagttggggccggccctcctgaaaaccccccctgttatgaggtggactctatgggacaagcgtgtatcggctaacaagcaaacccattgggatcaaatcggaatcggccaaccccgtgccctcactatagcaaattcagctaaagatgaaccctctatggccgttgtcacctaccattgggccattactattcacaccttttcattcaaccaagggccgctgaccccatctctgatagatatttctatgatcactgggctagatgtatactaagtggatcacgccatggacctggacaacaaaagcccatccgatctccggaccaacagcatatgtggttgcactggatatgtggcagcatatatggtctaacgatctattactcatcgcgagcatgtcgccttgtgacttatgttgctagaaaagcaacttttgtgcgagtactgcttgggccctacaaccaactgacagtatgctagcgacgctattgtgtgaaagagagaatttcctattgggaaagacctcctctgctacttataccaaatgctgatcaatgcatctgacataataaccgtatgctatgatgttggagcaccgtgtccatggaggacgtacaatctttgctcaaatcatcgagatcgaagctgacaacggtcatag

SEQ ID NO: 46278 - DNA, 6016 bp, Oryza sativa
  unsure (1)..(6016): unsure at all n locations
cggggcattgatgattgaataacnnnnnnnnnnnnnnnnnnnnnnnnnnnnnnnnnnnnnnnnnnnnnnnnnnnnnnnnnnnnnntattaccaaatttagtcgttaacacagtggcccaccttgcttccgcagcatataactccaaataatgatatccagtaatctaaacatcacgcttaatttaccaaatactactttaatatcatcgtcatgacttagagtcatcataaatacgatcattatacccacaccattgcatctcccagataagctagcattataataaatgtaacttggatatataataaatttggtattcatatactcggaaagtaatacaataccaaagtactataaagaagaatattctaataaaagtacaagtcttacaaaagaaggaaaaactactagagccatacccgaattcttccgaagactccgaggactgaagattctattctatttctattccactatgctatagagactatactaaacttgagagatgtatgaagcttcttacttgaggtgtcttgaaatggagagagtgaggggtttatataggctggtaatgatggttatgatggttggaaaggtcgataatacccaccaaccatcattgggaatcaatcccagctgtctagccaaaccctgcatccatcggtgttgcggctggttcggccgaacccctgggctggcccaaccggctcagttcctggaaggcggcctcctctcttgttgctcacttcagacttgtgaattttggcccaattgatcgtgtcatttctgagttcttggcctatccttccacaagtctgattctcgacatcgtccgattgattgatcgtctattttgatgccgattttccttcattttatgtttattctctgtaagaggttagtaattctagtgctagtggaatatttattatttgaacacaaatatgcattgcaagcataactagttctcctttattttggtagtattgacgggcgaaattgatcgctaacgaccgtaaacagatatgcatgtatggagaatatggatctctagttgtccaatgtgttccatgtacaacgatatcttttcatggggatttatggctgttggatcaaaaaaaaagtgcagacgcatttgttatcgttgaagttaggggtgcaagtgctttcccatgaacccgcttataggcaaaactagtgcgtaacccgtgggtttgaatcgcgggttacctattaatgggtttatggatcgacccacttgcatacctagatgcggcaagtaggggcacgatgcgaaaagccatgaattatcatttatttgacctataaatgaactcgtgggtcgacccgcttgcatccctagttgaagtaatagaaaaccacccacatccacccctcatttaatgatagacaccaagtataatttgtggaagaagagagtataaggacatgcaagttaattaatattatacattcatgttaattttcaaattggctacatatcatttcactaaatagaaaaaccatcattctcaggtccgtcttttgcttaggtgaaataggattttcccatcactatcatcttctttaaccgatggtgatggagtagaactacttgttcaccacggtttcatgtgcaaaccctcatgaactggcagtgatactcgttttttcataccatgagccgagaagtgaggtaacatatgttcttatggaggaatcacttttaccacaacaagaaggccttcgacggaagagaagggtttttgttacaaaaccaaccccaaaattaacatcgaaaaccaaacatggaagaaaacactatagaaagattcaaacacaatgacgatacttaggcacgatgtttgttaatgtgatttagccgaagcctataccgccaagacatcgactacggatgctcatcaccgatccaacatattacagtgtatctgagttacaacaacctcggccggacactgctggcagccgctccctctcactatactaagtcgtcgtacggttataataggtctacccctctacttaagagtgagcataggatagagtccgacttttactatattcctaacacttgtacaactccaagtcacaaactgtaacctactacctacgcatattcaatacaaactccaccttgaaaaatacgccacaccaatatgaatttgtcccatgcatgaactctgtgaacccagacttgtgttgatcctttcgttgctcacatcgccccgacaagcctccactaggctcaccataaacaagagactccactatccatgtaatttcttcctcttaactccatatacaacagtgatccaccttctttcctatcatcacatatgtcttgccaagcgaaattgaattcctccttaaccggtacatacctgacttctagacatgaagagaaccatttctttcttccgtcttatgaaccgagttaacaaatccaatatccacacttctcgcatccatagattgaatctatgataatttgataaaattcaccattgctttgaattacccgaagaaattaccactataatgtttgctcttcctctttagtgatgcaggttccatatatccctattatgcaaacctgtagatcctgaatatgaatatatcatgtactaccgaacagacccattgaagcaatcaacgattttcccccactgttgtttggggcttctcgataattcccatgttgcttccgctgagtcatgccttgacttaaccagtcacctttgccttgctgcatcatacctccttttgcatgtcttgtggcccacgagacacaaacaaacgaaaaagcaagcatgtccttcaatactggagcagccacctgtttactaatctccatccaactaaaaactttcaattcaaatctgaaaacttttcaattcagatttttgaaaacttccaacttaaattttcaaaatcaatttttattactttttagaatttactgtagctcttagcttactacttgtaattcaaattatttattattttattattaaaaactacagcttagccctaaacgctgcgtttagcattaagtgctttgtttaccatctagaagggccatgtgtgtaggtcacgatgctttacttagtgccttctagaaggaccagcgtgtgcatgacttatatagatcgcacactgatgcgctgataagcacaccccatagtccacactccacaaccactttgactcggccaaacaaccacacggtcatagccctttagggtataaaaaaaaaaaaaaaaaaaaaaaaaaaaaaaaaaaaaaccctcgaggcttgcgagctctaaacaagccgagcttgagcttccattgagcctagcaatatataatttttgttgttatttaataaattaggagatcaaatatgttatttgttagcatcccatacaataaagtatcttgtattagcatcatatattaattttattcttttttcctattctatcaatatgatgaactataaatcaatgttttttaaaaaagattatccatgaaatatacattgtttcacttacaaatcaagctcgagcttgatcgacttcagaccaggcatgtctgaaagctcgaaagttttatagactcgacttgagctcggctaaagcttgtatcgagctcgaacctagtgtagacccccgtttttataacaggaatcaatcgtgtaaacagtatcatttctctggatcaagtagtctggtacacacgagttcatagctgaaataccaaatgcacatacatgagagtctagtgctaattattacatcataagcccgcaggcatggtcttaaatcattgaaccgagcggtccggaatacattccaaaagcagaggtagataaggtagcggaattcaagcagcggcatgccattgccacaggcatcgaccgtactaagacctactgagcgccatcgtcttcatctccctcctggtagtaggcatagggatcctccgaagtttcatctcccgcttctgattaattttatatttgcaagggtgagtaccaaccgtactcagcaagccaccacagcaatgatgcacatgacagaggaattcaaaggatggctatggttcttttgcgcaaagcaagttttgtaattcttttctcaagcctaagacctagcatagactgttcaagttttaataccagtgttcatattaaacaatgacggttctgtccaccatccattgtgatcccaaggatagcttcctgccattgaatcgtcatagttttctgaggatgtccaccttccctcctctcgggaagtggctccctcagcataaaattcatcatgcaatatcccatcccccacaagttaagaatttagagtctacccaagtgtaatacatgttccggtgctcaataaccgcgagcacggctattcgaatagatttgttttactcacactgcagtggatgtacactttacccgcgctccgcgactgcccaacacatgagcctcgtcccaacacatgagacgcgtcacggcaaagcctttcgataacctcgcattggcagtacccgctccatgaactttagccctcatgcactctaggcgtcatacgtttctagcagtgagaggagttctggcgctcccgggaagggaaaaacacacacattcctacgttgcttcttgtcgttgaacccagtccatcatgattgttctcttatgggtatcctcatgtagtattgccaagccagcctctgaccatccggaacgggcatccgccatccacctggccatccacctggccatccgaaccgggcatctgccagcagactgcttgccgcatcacacacctaaaagaagaccactacgcatggtactgcctccgctcagctatctactccgctaggtctatacccatacgagaagtgcggttgtacgggggtcgtttcatgcttaacttcatggctcggtccttaattgaccagggacggcactagccttttccggacaccacccaaatcctccggccgccccagtcgaaaacagttgtttcactttattttcctttcacaaatcatgtcatcaatatcatggcaatgtggcgctcatgtctccacatgccgcatctcaattaccttcccaaaggtaattgcccaagcatatagcatttgataaatatgagtatgcatgattctgtaatagcatttctaagcaatggtcatagttgactagggactcatacataatcatgggtacaaagatttaagggtaaacaataataaaggcatggcataatcacaagtaggatgttcatcattgcatgcaattttctttgtaaacaaaacaatttcgtaattgggatcaacatgttcaaagaatagtgatgacttgccttgctcaaagtcttgtgagtcttggccttcactcagatccgcaactccctcgggctctacaagtacgtgcgaagaattgatttgaattccattagaattcaaataaaatccaataaagaccaaatcgaaaagcgagcacgagaggcgattgttatatccacaatattattcgcggaatagaactattcaacctaagatattttgtgtttcctaagtggttttcctaagaattcaacaccttcattttagttcttaaataaatctaaattcctaccgtgaattgattactcatagaggctaccgaaatataatttaaatttcgcagttttacgactataattactctataattaaatcattaattattttaaattttttatttttattaacctccctcttctattttccccttttttttcttcctttttctctcctctctttctttttctttctttttctccctctctttcttttcctctctctctccggctcctctcttcctccctctctctctcggctgcgctccccggcggcaacggcggtgaaacaagaggcgggggggagggggggcggcggcggcaaccaccgcgacggcgacgctggcgacggcgatgcaagtgacgcggtacccggcgc

SEQ ID NO: 46279 - DNA, 4568 bp, Oryza sativa
  unsure (1)..(4568): unsure at all n locations
cgcgaatggcaacggcgcggcagcggcnacacggaatgcgagtcgncggcacggggctcgggncaacgcgacgggcgncagtgcnnacgcgcggggcgcgaggcaacgtgacagcgacggcaccggcaacgcgacggcgacggcgacggcgcgcggcagcggcggcgagttagggcaagagaccgcaatcgagcacctatggggcaatgaacagtgacttttcctatttaaccccattttagcctatttattatataaatttgattctataaatcctaaattttgcataaatgaagtatactcgatatttgtgttatcccaaccaatggatccactctagattaattgtacccatattttatttttatataatttacttgattttaattagagttaattctcattccgtcgtatttaaatttaatcgatacaaatataatcgcggtaatattttattcatttctatcctcacctcatctttattttaaattatatcttgattatttcttttgccaatctaacttttcgggtttaatcctaattaatgattctttattcgcgatctatgaactccgaaatcaaaatccaataaaatagtcgaacaaaatcggcatgatgcaatttatttaaaaagtttttgaaggcccatatttttggagtttagatttttgtcggtcgaattttcagggtgttacacctaggcaggcgagcgagctcaagctccactcattgacaaccctaattgaaaccacctactaaaaccagtcggaccgcctggttttttcttgttccaaaaaccagcatggtttttcttggtcaaaaaccaatcaacgagggattagaccgaatcgttcgcttcactctttctacccgacttctcctcggcccgagcacacggcgccatctagcgcctaacgcagctttgctaccaaagccccctttgacgaccaccgagcaccaaagtcgtcacgcccccactgaaaatgccacctccattcccgacgctgctacccatcctagagggccgccatgcacggaagctatcgtcccgcttcattgcctgctaggcctcaccgatgagggtgcgaccatcactgtgggcctcttgctgaatgaggatcccgacgcccacagggcagtcccccgacgcaggagcagcgccgcctctgccgccaatacctgtcgcctcgacctcctggagcctgccacgctgagcaccgccacctaaacatcccgctcacccgaagctatgcaccattgctgtagctcatcactagcacaccacctttgcccacgaaatcaggattgatccgctcttcactctgttgtgtttgattgcaatcccatgaaacctttgatgagcttatttgggaaaaagtgactccaattccagaacgaatcgtactcctcgtccgatcccctctcgtgtgtaacgcggtctccctttctatctcttctgtcgggtgtattgaaaccgaacccgtgcttgactccttctctaccacgacctcttccaagttgagtcctccaccattccaaaccaggtttgctactatcagcactgctttagtctttgccaccggctggtactgtcactgcctccgttcttctgtcctgccttccgttgcatgtacaccgctaagtagcaatacaccgttaagtagcaatcctccatgcagcatcctatcataaacacatccaaactagcctttaggatccacccgccccggcttctgattgaaagccatcaatttagtcgcgaaccgaagccgacaaatcgcatgccatcttcccagccaccgaacgacccgagcacaacgtctagccgtctccatgtcgaacgcagctcaccaaaaggcctgggctaccctactgttggtattttttaatgacattactagaaatattcattccaagcaatggcgcagaaatagtcctggtatatttatggttacagaagtaatccgcaagcgcacggatataccattgtagcatttcagcatttcacccgaaagtattccaaggtatcgtatttatttaatcccaagggaagattgtgaaagagagaaccacgctaacatatacacatatatattacttgcctttatcaaagcctaggcaggggttaatttaatatgagggtagagtgacacgaagtgaagcttatagatttcctcagataaataattctaactaagtagaagaacatatagaaagaactcatttcctatacttctaatagagtaaagtgtacgggcggtccttaaacttgtagtggtgtgtcacctagatccctaaactcccaaaatgcatatctaagtcatagaacttgtcatagtttgtcatctagatcccaaatcaccacaactccttcaggatcctacgtggtgttgatgtggcatgccacacggacatgacgtggcatcattttgactaacaaattaatgggacccatttaaattttttctttttctttttttctctttttttccctttcttctcctttctctatgacccgagcagaagaaagggaaaaaagaagaatgagaagaaaacgaaaaagaaaaaaaatgaaaagaaaaaaaaagaaaggacacgtcacgtccacgtggcatgccacatcagcgccacgaaggataccagaggggatgtgtcgatttgggacctagatgatacactttggcaagttctaggacatgatatgtagtttgagagtttagagacctatatgacacaaccctacaagtttaaggaccgccaatgcactttacttgttcgaatatacactcaactttactctacacttgctagtatacaatcatgtggccattacctcctaacagtgccctcttggtgtttcgagagaccacccagggttgccaagttttttacgataacctgtcatggccgtccaactggggctaaatacagaggagtaccctccccagaaaattgtcttaggaatatatactaacgtggaggaatacccgtactgagctgtcaccatcagcggcccacctctattgtcccgcaacatatataaccagataatgatacttacgaatctaagcaccgtgcttacattaataaatactactctacacctctgcagatgatatagagcaaccgataaatcagacactaaacccacaccgttgcacctatctggtaggctacccacacaattataccaatacaaatgtaaagaacgagtagtactcatactaagtaaagtaccgagaatatataaagaagagtatttcattaattcggagagtattacaaaagagaatagataaactaccagagccataccgaaattcctccgaaagctctgaggactccaagaactattctatactacttccacttagcactaaactactaaataaagtatgaagaggaatcttgagattgcttgagtgcgttgagagagtgaatgagctcctccttttataggacagttatgggggttgtagccatgcgagatgtccattttacccctgcaaccgtcattaagagagcatctggagcgtacacatggagggccaagctggttgggtgctgccagggttcgaccgaatcagggcccaacaggcctccagcttcggtctgctcactgacaggtgggtcctttaggcggttgtggcagttaaagcagtttccaggactgttacacttgacttgtgggccctcttatccttaaacttgcttaggagtgaggtttcttcactttctctttattttatttgctaaattcctgcaacacattattctccaagtataactggaactatattattctgaaataaatatgcattgcaagcatagctaattctctattattttagttatattgacggtcaaaatttatctgtaatgaccgtcaacacctacctagagtgttcgattccactgaccaagaatgatgattgcctctagcttcaatcaacccgagtgtgggcctcacatctccctattgagagcagctcaccagaaagcccgaatcacccgtctgaagtgttcaacccaccgattcgatcgtcaatcacttctaccgctgtcaacccaagaaccacatctggtcatcttcatgttgaaagtagccatcaaatagttcagaccgccgcctgaagtgtttgacccaccgattaaattttattgatcgctgccgtgctccaccttacgcacatgtccctccctggacataaaccgcaagcggcatgtgtggggcaccccatcgcctctatccatggacctcccatagactctgattccacttggtacaaaaccagcccataaattaacatcggaaaccaaacacagaagaaaacattataggagattcaaagtttcaaacacaatgatgacactaaggagcaattgttaacgaggtttagccgaagagctgcaccaactcatatcccacactggcattgcaccctacacgggtgctcctcggtggtcacatcatgcatgggtgacctggtgtgccgccccataacttatgccccacaattttacttggcttgttggggtttagaggtacctttggactgtgtttgggg

SEQ ID NO: 46280 - DNA, 1660 bp, Oryza sativa
  unsure (1)..(1660): unsure at all n locations
aaatacaatagaatacattttaaaaaattgtattctattgtatttgcctcaaccacttattttaagctatttgcaaagtttatttttaaatgattaatttatccctgtaatttagtagataatccgagaacaacaatccacttaacaatctgttcctgcagacggattgagattctctggagtcaaatgcactgtacctttgtcactgacatgtgggcccatggattatcgggcccacatgtcagtgacaaagtcacgtgtcttcaactgtggaggattctggtctcccggagacagcagcaggtgcgttgacctgattttttttctaattttcacattgcaattgattttttaaaacttctcgaagggtgtaaacgtactttgtaactgttcagttttttgtatgacaagacaaaggtcccggtttttggtctataaccggcacctttcttccaatagtgcttttcatgctatacacaaaggtgccggttttgggtctagaaccggcacctttgttccgatagtgcttttcatgccccacacaaagttgccagtttttggtctataaccggcacctttcttccaatagtgcttttcatgccctacacaaaggtgccggttatgaagacaaaggtgccggttttgggtctagagccggcaccgttgttccgatagttcttttcatgccccacacaaaggtgccagtttttggtctataaccggcacctttcttccaatagtgcttttcatgccctacacaaaggtgccggttgggaatacaaaggtgccggttttgggtctagaatcggcacctttgttccgatagtagtacttatactccatcctttgccactcgagctgattgagcaagaagagatcggcacctctccttcttgcccgatcagctcgaggaggggaggaggttttgctctatttttttgtggtgtttggttaaagattgaagcctaaaggtaaatattcattatttctctctccatttatctcttcattgttgatttgaattgtcgtgtgcgtatgcatgtaaaatacgatatgggtgttgtttttagggataattctttttatcttttttgtgtctattgttggatgaaatgctaaatttgtgttaatgttttcttccatctacgtcatggccgttagtcaaattaatgattgtcaaactatattaaggccacgaaaatatccattgatagcttgatttatctcaaatttatgttaggggtgcccatcgatccgctagaggtggaagcggttttgctcgatatttcttgggttttggttgaagattgaagcctacaaggtaaatattcattatttctcaccccgattcacacccgctcgttgaattgaattgccatgtggtaatacatgtaaaatgcactagtcattaatttgtatggatccataagtcattcatagatctgtctcgggtgctatgctaaatttgaattaatcattttttccatctatgccatcatcgntaatgtttcacattagccaaatatttttttgcattgacgaaaaatagaattttttttatcttttcgttagccatgactatctagttaaagtgacgtgaatgtgtgccaaaaccctcaattttatccganggtaaaatggtcatttccctcgttgtttt

SEQ ID NO: 46281 - DNA, 514 bp, Oryza sativa
cattcagctgctgctatttcagaatcatcatcatcatcattatccgatccatatatgtaaggacagatatggttaacctttctagagttcttcctggcctctgtaaacctctgttcatgcaaggttaccttctgtgtaagatgcgacaagctatcaaagtcttcagacgagaatttctccctgattggagtaatcataccttgaaaagccaaatcggctaactgggcatcagtcaaactcaagctgtagcacttattcctcatctctcaatctctgaatatactcatgcacaggctcatcatgtctttgcttgattgctgttaaatcagacaatttcatctcatgtaccccactgtagaaatagctgtgaaaatgcttctcctaatcagcccaactgttaatcgatccatatggcaaagaaaaaaaaccaagtgaaagccgatccagacaaagacaaccggaacaaccgaaccctcaaggcatccacagccgatgcttcaccacactgagctaa

SEQ ID NO: 46282 - DNA, 505 bp, Oryza sativa
cacaaaacattaacaaatctctgtggaagttcaaggcagccctcaaagttaagattttttacttttgtaattacaccagggtgtagcgtaaacgaaggacaacttagcggaacgtaatttgcaaggatgcaggaaaaagctggttttatcatataaatcagacaactaagaatatctttcactggtggagaagtgctttttagtcccggttcgtaacccccctgtagtcccggttttcaaaccgggactaccaatccgggactaaagatcgttatctttagtccaggttcaaatacccgggactaaagatggtgttaccaaccgggactaaagaaaagggatctttagttccggttggtaacaccaaccgagaccaaagagaggtagcggcggtgagatggtccttttctttttttttcttttttattttctctcgaatcaagtgggatacatatcccaaatcaaaccccaaatacccaaatcaaatcccaaaccaaagtaacat

SEQ ID NO: 46283 - DNA, 624 bp, Oryza sativa
tttttcacaggaaatttgaacaaaatctcatagcaaatatgaacatttctcgagatcaagacatgcctagctggctaattatttattgatttatgggatgtcttcactatttcctatagtaaaaggaagcatgaccaaactttaagctctacaagaaaaccatgatttctcaggtcgaggttccatctagaaagtgactttttgaaaacaaagatgcattatgcatggtccatagtcttttcgcgaatgaaacaaacaagaaagaaaagcaaataatcaaagaaagaaagccctggctactggaaaagtactagctggttaattacagatgagatctaaattaaagcatcagcccctgcccatatagatcatgaaaaatgaagtgggacacacatatgctaccctttttttacaaatcatattatgagatcagtgttggttttcaacaggtaattatttatattgatttatataaaagagataatctatcatattcagaccacaacagcactaattttcatattgctaatgattgaatttgacatctcgatattataatcttgctagcattgtgcaatgttaggttgatcatgtgtgtggctggtttcatatatatgcattaaa

SEQ ID NO: 46284 - DNA, 566 bp, Oryza sativa
aaaatagtcatgtatgctaagtgtacctgtcgtatattagaaccctacacaatcttacatgctaagtctaattacaaatctaataatcttatactaaacctcaaatagtgatatatgctaagtctaggtgacgtatattataggaccctagctagtcaataattatatactaagtctaattacaaatataataatcttatattaaaactcaaataatcttatatgctaagactaaaatagtcatgtatgctaagtgtaactgtcgtatattagaaccctacacaatcttacatgctaagtctaattacaaatctaataatcttatactaaaactcaaatagtgatatatgctaagtctaggtgacatatattataggaccctagctagtcaataattatatactaagtctaattacaaatataataatcttgtattaaaacttaaataatcttatactaaaactcaaatagtcatgtatgctaagtgtaactgtcgtatattagaacactacacaatcttatatgctaagtctaattacaaatctaataatcttaattgcattaca

SEQ ID NO: 46285 - DNA, 752 bp, Oryza sativa
aaaaaaataaaaatttcggccgaaataatatcacatcgggaggtccgatagaacaaatccaaaattttgaaccctgctgtggagcaaggttccagcttaaaaaaggaaagaagaagaagaagaagacaaacagcggaatttcaccgaatttgaatgaaaattcaaaattcagtttgaataattctaccaaaaatagatcgatgatcataaagataagtaaaatccaggagaatcctgtcctccgggctgatcgagcctatgtgaggggatagggtttggcttctcgagttttggtcttcgtggaccgtctacaaattcaacctcaacaaacgacaaaaatttggggaccgacaaatctcgccagcttaactgattaatgctaattatacgtgaaaaagactttttaaaaaaaaagggggggggggggagggagatacaatagtcgtcagatactacggctgaataactcgtacatagatgaatccatatgcgaggggaaaacatacgtatatatggtttctctcaactacttgaaatcttgaattaacctgaacgccttatccgaacaaaataataaaattgttaatctcattcaacttcagcgactaagggcacccacaatggttatctataggctctctataagagatccatgtcagcatattttcctacttgaaagagattaaataaaaagagagagcaaagctatctactaacctggagatagtctattgagaaaaacgaggcaatgt

SEQ ID NO: 46286 - DNA, 902 bp, Oryza sativa
gattttttttcacacgtgcttatctccctctccgtccttcgtttttgcgtgcaattttttttctcatgtgatttttcctttttctcacgcgattttttctctttttttcgcaagatagctaggtaagtttcaacctcattttattttgaaaatttttgactcaaaatttaaaaacttctaacacaaaattgaaaactttcaattagaaatttgaaactcttaactgaaaatttaaaacttttgatcaagatttgaaaactttcaactaagatttaaaatattcaactcatgatttgaaaactttcagcttaaactttaaaatttattaacttgaaatttaaatatgaaagataaattttgaaaattttcaactcatatttgaaaagtttcaacttgatatttgaaaactttcaatccgagaattgaaaacttttaactcgagatttgaaaattttcaagtcaagatttaaaaattttcaacacaaaacatttgaaaaccatgtgttgaagattaaaaaaatcgtgaaaggaaagaaaagaaaaaaaaatcgtgaaaagaaagaaaaggaaaaaaatcacttggggggagggggccagctggcgcacgcgttgccgcgccaatttgccacacccgagcggagcaccccgtcggatccgtacgtaatacacgcgtcgtccatcgagagcggtgctgcagaggtggcgtgctgccgctgggatgcatcaattttttttatttacattttgaggcttttcttttcatcgtccgctctgttccattcgccgccgtcctccattccgttcttcctcagctcccgtcggtggtgcttgaaagagtccgttttggtgctggccttcttcaggtcgtcaagttcgccttggcgcgcggtgcttctcttctt

SEQ ID NO: 46287 - DNA, 1509 bp, Oryza sativa
  unsure (1)..(1509): unsure at all n locations
atcggctccctctgacttgcttgttccattcgaacccatcccggcttgcacacatcgacctctccccacctcctctcgaacgatccagatggccaggcgaaccccgacgccaagggcggatctactatgggcacggaggggctcaagcccccacaagcatcgttagaactatgtaagccctcactgagtttcttataaaatgagggttaaaattatgtctagtttgttcagccccacgtgttacttcttctatcctccattgtcagtgtttacaactgctctttttgcatcatgggcatcttcccgtccccggtcgtgtgggcagcatttcagcaacacgagtttgtcctggaactggtactcgcccaacatagtcgccggtgatgttcgagtactacactataccgcctgctgacgctggtcgtcgtggtgttattcttggtgatggcacacgcgctctctctctctctctctctctctctctctctctctctctctctctctctctctctctctntcatgaaagcggagtgtgcatccatcaccatttgcgaagatgacctttgattattattttgtgattagaaaaaaaggctcgtgcgttgaaacgggtgaaggctattttaatcgtattattgttattttttttatctaaaaagtatatgagatttctattttgatagtattgatatctaatttagaacctttgttgggattatggtcatatactgtacgttgctttcttagggcctgacaagaattctaaagcaattagcggtactcgttccaagttagctgtgagtgttttaaaaggatttcttatacgactcctggtgcattttcaaaagtgaacgaatttaataaccaactcaaatacggacaacgtacaaagtattggcggaaacattttcaatttttataataatagagaagagatgaacaattgattttgaagataattggttttgaagattttctgatgatgaattgacctgacgatgaacaatgagttttgttagtttgggtctggtcagaccgacgtgtgttgtgcagtcaaatcggccagcccgatggtctgatcggacggctctgtgtcggttctggtttcggattgtttttttatacttgtgattaatttatgtttatgaattctagatgaatattatgcatatgtaatgctgttgtgaactaatgttaagtcaagttggagaggacttgtgctcagatattgtatcttgtttgattcatatgtaggtgtctcttaatgcctggggagagtgttactagtgattgatcgggagtcaacttggaagaagatgatgtccagacgatcaggatatcatggttggtgaagattccatatggtataccatgaagatattgtgtgcgtatggatgcggagtccaaatttggtatgattgtagtttataaagtttgtttattgtatgggaaggtttcctaggagattaggacttcttgtacaagttgggtttgtggttttagactgct

SEQ ID NO: 46288 - DNA, 560 bp, Oryza sativa
  unsure (1)..(560): unsure at all n locations
atgcatttctttagtcccgagtgaaataacgggaactaaagatggatctttagtcccgcttagtgttaccactaatcgggagtagatattttttttttcctttttttcattaattttaactgcttgcatattgatttcactccatccccaaatcacgaaaaccccaaatcacctccgaatcatagatcaaatgcatcacaaattctaaaagaaacatcacacatacatcacatattcacatcaaaaattcccaaaaacaaattcaacaaaaatatacaaaaacaaattgtaaatccgcccatccgccatcgctccaccacccgccgccggctncccagcccagcacgtgccccccaaccccgcccccgccccgcgcgcgtgccgctttcgctcgctcctcgctgctgcttcaagaaaaggagaggataagagagagagagagacaggaggaaagggaggaggaggaagttaaagatgaagaggagtttgcgatcgaggaggagaggattagtgtgagggattatatacgacgcgttaatttttagtcccagttgataata

SEQ ID NO: 46289 - DNA, 593 bp, Oryza sativa
atatatatgcttttcgttttacctaaaaaaaccttttcattttagctttgtataaaggcaaatattcatcataaattttcaaaaattcgtatacagattaacatgtgaattatatattatgaaaatatttctcatatataatgaatttagaaaataaatcttattatggtaataactgcataaatttctagagaattgatgatgaaggttagaaatgtttgacttactgcaaagttataacgacaagtaatttttttaagtaaaacaacaagtaatttgaaacggagaaaatcatatatattttatctttatttttttttggaagtaaatactagattaatcatgcttatgcgcttatgcatgcatgcatgcatgcataaaaagaagattaattaaggcgcattgacatatatgtgcatgcagctaattaacctttttatttaattaatcttttgtactacaaccatagctatagctaaagctggataataattcttgacagaaacatctcgttgctcactgatgaaaaatctaccggactacgacccatggaattattgcaggtggtttcagatcgctgcccggcttaccgg

SEQ ID NO: 46290 - DNA, 642 bp, Oryza sativa
  unsure (1)..(642): unsure at all n locations
cgcccaccaccaccaccacgcgatcgccaccatggacggatcaagcttaataggagatcatcaccatcacagcagcagcatcctctttggcggcgcatcagtgccacctctcctagaccaccaaaccattctcgacgacgacgacgaccaccctaacaaaaccggcagcaacacgaccgcggccacactgagcagcaacatcacagacaacagcaacagcaacaagaacaacagtgataataacaacaacatcagcagcagctgctgcattagcctaatgaacagcagcagcaacatgatctattgggagggtcaccaccaacaacagcagcagcagcatcagatgctgcagcagcagcagcagcacatgagcaggaatgtcatgggagagtgggacttggaggagctgatgaaagatgtgtcatccttgcctttccttgatttccaagttgaatgattgagagggaggggccccatctatagctgccaaaggagtacattgcatatatatacaantatacatatatatacatacatacacattgaaggtagtatttttttccattgacacatatattctctcttccaaatgtacaagatttctcacaccaactccacttttgatcttgcatatatataaat

SEQ ID NO: 46291 - DNA, 639 bp, Oryza sativa
ggcataaccacccctaacacaaagactaagaaataattattatcatcttgtagtttggatcatcctaataaatacaatgcatgcatccaatagaattaaagaacatgagagtggaggattaaaaaagtaataatttaatggagaaggggtcatagttaattgcctatatgcatgcatgccttatggagtattatggaacatctaagaaaagtggtttatatggaatggagggagtacatgtataactaatgagccctgtctgaatgactatttgacactatgcaaactgcatgtagaaaattgtttatcaaaccactaattaatttgatcggagtttgaatgtataataaaccgtgcaacttgtcctcttgcatttgacacaataacatatataatttgtcgatgtttgatgtcgcgattccgatatttgtatagtgtggggattgttgataccagggtatatacgagattgtagtaaaaaagatggagacggggatttttatacaggttcgggcccctgaattgtcaggtaataaccctactcctgttgaccgaagccggtcgttgctcttattcaccataatcacaccagtacaatatttggggtagcttatctatctgttgtcgacatggtggtct

SEQ ID NO: 46292 - DNA, 5878 bp, Oryza sativa
ctttaatgtctgacattttttagtttaaacattaagaaaaacaaacagagtagttatttaggtaaaaaataatcttattgtactgctcattgaaaatgtaattgagcccactatggtgctctatactataaaagtagaaatcaatatgatctattatctattttgatcgatgggttatctattcgtactattatcctaattaacggtaatagaaacatggaggaacattattataaaaaatcgtaatttagtagtgactaaacattttttttctcttttatatatatatatatgggggaaaaggtaaattaacttgtgctacatggagtatgggatccaagattcaaattgagtatatacccaatttgaatgagtatgaattttttttaaatgtttagatatgaacattaacttctttactaacaaggagtttgaacttttttttttgttagattttgattctaggtatataacatccaaacatataatttgttaggtatgtaataatgaattgtgaaacaaagttgagtttgagttgttttgttgttaggtatttgtatgaatcaaattcatatacctgatatctacttacaatttgtaaatttttaaaaatttgagagaatttgtgtgttttataccttggagcctgggcaccatgtctcccaggtgtacgtactcccggttgcatccatcgtccatctgtagcaggcgacgatcgaggcatcgagccaattatcggatccatccaccgaacccgttttgattttttttcacgaaaaaatattcagtaatcgttaatttttccaagactaatcggtgaaattcagcaagaaaccgatatatatccctgattcccagcaagaaatggcaacaactcgttctccccacccaatttacggatctagcgcgatttactggcggctcagaggtagggatgaaactggtttggatagtttccgtccgtccggatcatttttcggattcggatagtttcagtcggaattatccggaaattctcggattcggaaacgaattcagatattttttcttggaaacgaaaatgaatacagtaagggtactatccgtcggaatccgaaaacggtcggaaactatccggaattttttcggatatccgcagacattgagtaaattatataaaaaacacgtatatatatatataacttttttatacggaatcagacgaagacaaactttatattaacattgtagagctcgatgatatttacaactttattattgactattttattattttaggtcatttatgggtctaaatattcattataatataccatattaatttttacaaaatctcagatctacaattcaacgacatctaatggagatgtgttccataccaaagttgtagagctcaacgggatctaccactttttagtttataacatttgtatttaaaagcatttaaagtataatacaaagaatacaagttttaaagtaaaataaataaaatctccaatttatacaatagtaagttatatatcaagtaaaaggtcttgggaatagaaaacgataatcatatttgcatatggatctcttagaggaacagccatgaaaatcgattttcacatacggttgtgagaccgtctataaaattgacgatataaatgttggagatgttgaactaaaataataagcgatatctcttccttgatcaagaaactcaatttgaggggttttttatataccggtaaatattcgctaccgtattcgttccgtctcgtattcgctccgtatctgtattcgataatattcgattttatttccgtatccgagttttcgattccgattccgatcaaaaagaatatgaaaacgaatatgataaagctagtttccgatccgttttcatcctactcggaggcggcagcataataaattggtgattcgacgatggcggcggccggccggatgcctggagccattaatgatttggtggtatagggcgatccatcggcagggacaacaaatttatctcggttgtgggtgccatcgcccatcccacccttctcgggtctggatcacctggagttgcaggcaaatccaccgggtggatttcacctaatctgagccattcttttacttctatggctgagatcatcttttctaattaacaacccttataatcagtttaaatcgcagtgatgaccgacaccagtggcatcgctaccgtgataatcatgttcgtgcactgtcatgcatacacgtacgcgtcacggcggtgttgctccagtgaactgcatgtccaaaaatgcagtaactttgccggtcgtccattccagccggcggctgaaccacttgtcaaccaaatagacacatcggcaccacaccgccgagcgcttgctcatgttctgctagtgatctcagccaccaccattatttgccgctcctgtgctccactaccactgcaaggtgatctcagctcaaccgtgtcttctccgttttgtaattggccctgaattcttgatcgatgtcctgatgtgtgctcgagctcgacgcgcggttcttgttaacaattcgggatagtgtaacaaacgagtaaggtactacagaataagaaccaccctggcttaatcatgaccctagaaaaagacaaacggtccagattaggtgaaatccactcggtggagttgagtccaactccaggggatccaccgttcccacatcccacggcgtcttcagatttggtttctccgccggctattcaggaacccatgcatgtaacagtgttttttaccgttcttaattcttgattcattgtgtaatcacctttcttaatcacaccgtcccatcttaattaattgcctttgatgcagatcgatgattctcttgtatatttcttatgatccctatgagtggtctgctgcatttttttttcataattctgtatattctttagtctgtggaatgatgaagctccctaactccttgtagaagcgacacgtatataatggttgagctctgtttttctatgtatagatgttgcctgtggtctgacggctggccggtggctgttcatgccgacccaaagaaagcaatccggcggcatcagtaaatggtgaatattagggaagggtctttgtttagaaactgtaattaggattgtacgttctttttaatcagcgtataatgtttcaatgttagcctaaattactacacatctttcatggaaattctgtttttactaatgtcaatgacgactagttcttctgttggaaatgtacatgttgccttctcgtatctttgagaacatactgatacttgaatcatcatacttgcatgtagcagctgttatatgttactccctctgtttcataatgtaagtcattctaacatttcccatattcatgttgatgttaatgaatctagacaatatgaatgtgaaaaatgctaaaataacttacattgtgaaacagagaaagtatgtatattatgtaaaagtaagtatatactgctactaattgaaaaagacagtagatacttgtacgaactaattaaaatgagtacatatactatctactaacttaaaaaataagtatgtactactaacgaaaaatcagtatatactactaactaaaaaagataagataagtatgtagtactagctaaaattcagtatgtactactatctaaaaaaatatatactgctattgactgaatataagtatataccactcctaattgaaaaataagtatatactgctattgactgaaaaataagtatatactactcctaactaaaaataagtatatactgctattaaataaaaaaaaggatatactactgctatactactaagcaaaaaggtatattctagtactaactgaaaatatatactactatactggatccttaaaataattacatgtctcatggattgcatgctacaatgtgcacatgcaccttgaattttagggatgtatcgttcagtacctacctggtaatcttaagtggtatatactgaactagtagtatatgctttcgtttatatctagattagaaccgcggctcattcaaatatttttctattctagatattctcatctcaatatatgataccttctgcatcttataggatgtactgatacttttggatcatcatatcaagtccccaacaaaaacacaattataaaaaaaaaagtatatactgctactggatattaaaaaaaaacgcatatagttcaacaaccaaaaaatctaatacgtagcacatactaagtcatacaaaaaaacacagtatgtgccgtatactgaaaaaggaaaggcatatgctctttcaacgttggttctggtacataccgaatattatgaagaacaaaaatcgttctgcatatctaactactttgcatgcaacaggcggactaatttacgagttgcatgcatgcatgaattgttacatcatctatttattaatcattttgttttttcaatccggttaatattggatgatccactatcaggtatatatataaaatacacaaatccactcaaaaattttaaaaattttcaaattgtgagtatatatctagacataaaaatttgattcatacctatacttagcgacaaaacatctcaaattcaactttattttatattcaattattacatacctaactaattatatatttggatgctactccctctgtcccataatataaaggattttgatattttggttgcattgtttgaccactcgttttattcaaaaaaatttgtgcaaatataaaaaacgaaaagttatgcttaaagcactttggataataaagtaagtcccaaaaaataataattccaaaattttttgaataagacaaatggtcaaacagtgcaagcaaaacgtcaaaatcccttatattaggggacggagggagtatatagctagaatcaaaatctaacaaaaagatgttcaaattcagttcaaatttgtttgaactagttagtaaataagttaatgtttatacctatatattttttaaaaaattcatactcaattgaattaagtatatactcaatttaaaacttggtgcccggtcaccataaagctccagttaatgaaaaaatgtttcaattcttgaaaaacagtgaaacacagtcaaatcagtagatgaaacaaatgattttaaggactgaaacactaaaaattcacaacgcacacatccactattctgatgctcctcccttgtgcgctcccgacagtgaagcgacgatgtcgtccttgagcatgctagtcttcttgatcgtgagaaaagaagatcaaggatggccgctacctagttctcgagctcaagacaaaaaaaatcacataacaccagatcaacatcatgttctccaacactggctcaacatcagcgccagacctcccccttccacaactacctccttcactcgtgcgccacagagataaatctagccatccccaggtcacaggctccactgtgacctcgacctcatcccaccgctgcaacgtcacctccgacgcctgcttgtgctcatcgtctagtcatggaagaggggaagaggagagagtgggagaagagagggagacggagaggggccttgcctcccaagctgccatcgctcaccatccgcggccatggaaaagggaagagagggagagggagattgagataaaaaaaatgagtggctgagaattgaggagctcatgttatttctgtttttgttgggtatattggcacagacaaatcatgttcttttaattaattatgtattaatttgttgagcagatagaaaataaattaccttgacatttccagcttctttgatggccttgacgagcttgagctgcagcaagatgttgtggctgcggtggtggacgccggacat

SEQ ID NO: 46293 - DNA, 1232 bp, Oryza sativa
tgttttgcgcatagggtttctgtctcacgggatgatgctggtgtgtttcctaattcatcggtgcttgaataatccgcgaagggtttatagtccgtttcatctgattgtgttctctctttgaatcaggtgtcgtgcagagcaacgagtcctccgcaaaggtcgatgagccgctgctcctgctgaggcatctgtagatgctgtgaacggcaagattcctcctaccaaggttacttcttattagggatgaaaacggatcgaatacggacggaaactagctctaccatattcattttcatatttttttcggaatcggaatcggaaaccccggatacgaaaacagaatcgaatattgtcgaatacagataggagcgaatacaaaatggaacgaatacggtgacgaatattaatcggaacaaaaacccctcaaactaagcatcacaaatcaacgaatatttccaaattttagtgttaataattttgctatatccaattttgtggttgagggtgacggcatctgcaaaaatcgaccttcattttctcatgcggctccttaagactagtttatcgcactcatatgaactccaaattggatgattcttttttctaaatgtttgtaaaatcatgctctattgtgttagtgtgttcttactgctattattttggccatatttttcttgtgactttgttttatcaattaaaattttgaatttcaaaaaaataacaacttcaaataatattttgaagcggtaaataattccagctgaaaaagtcatgaacataaaagttgtagaactcatcaagagctacaacttttattttgatcatttcttcatccgacaaagcagtagtaacattgttcacaaaatttacatatctctcttataacttatgaaactatatgtgagatatgtaaattttgtaaacaatgttactatcgctttgttggatgaagaaatgaccaaaataaaagttatagatcttgatgagttatacaactttgttattgatgacttttttagttgaaatcatttagtatttgaaaatgttgtttgaaggtgtcatattttgaaattcaaattcaaactgtttaacaaagtcacatagaaaaatgacacaaacaaaagttgtagatcttgatgcgttttacaactttgttgttgacagtttttttcatttgaaaacatttaatacccaaaaaattatttcaatttcatatattttaaaattcaaat

SEQ ID NO: 46294 - DNA, 637 bp, Oryza sativa
agaaaccgagtagtagggaggaagaagaaaccccagcaagagaaagaaagagagaagcagaggacgggtagtatttttcctctctttttcgatagatgtcacgtgcctacgggctggcgatttatacaccacacacccgactcaacaaccgttagccccacaagccagtgtcagaaatcagtacatagactcaatatgctatagccactcgaaaacgtcttttcgcagtacgtcttcagttcgacacacctccttcggtcgttgccagtagctcatccggcataggcataacagttgccccccctggaattggagcttgtccccaagggacagcgtccggaaatctggtgcgaacaacgtcagcatcctcccaggtggccaaagcagcaggaagagaaccccaacacgctaagttctggaccacggcagcattgcgggatgaaagtggtacggataatttccgaattcacttcggtcggatttttttcggatattttcggattcggatacgaattcggatagtttttctcggaaacggattcgaatacagtagcgatggtatccgtcggaactcggattcggtcggaaactatccggactttttttccggatatccgaatcaaaatcaacagccaaa

SEQ ID NO: 46295 - DNA, 632 bp, Oryza sativa
attatggactaattaaactcaaaagattgatctcacgaattccttcctaactgtgcacttagttttttgatttatctatatttaatactttaatgctgtgtcccaagattcgatgtgatgtttttagaaaaaaaatttgggaaatcaaacgggcctaatagttcccaagttttttttttcccaacttctaactttgcctcacatcaaaacttttatacacacaccactactgttctatcccatcgtacccattttacacacaacttccaacttgagtgtgaactaaacacagcctaagagttgattcttttaatccctccctcctaaaataaatttaattttctacctatatcactactcccctcgtcctagaatataaggggctattgagttcctaaaaacatcacatcaaatctttagacacatgtatgtagcattaaatatagataaaaagaaaaactaattgcacagtttgcatgtcaatcctcagacgaatcttttaagactaattagtccataattagccataagtgctacagtaacccacgtgtggtaatgacagattaattaggcttaaaagattcgtctcgcggtctccaggcgagttataaaattagtttttttattcgtgt

SEQ ID NO: 46296 - DNA, 572 bp, Oryza sativa
ggttcggcggtgcgatagtagagggtaaagtttgttaaggtgagatgtaggggggggctgaggtcttagccgcgtggggggggacacgtgcgtcgtgccgtggggcttccaccgctttaaagcgtggccaataaaaagtaggagtcgtcctactccttgttcgttctctctctcctcacttaccccacactcatcaccaaatgcaacataacactgttaaaagacaacacttgagtcttataagcacgatcttgagttttattatacttgctcttatgtacgtactccttctaattccataattatcatgtttgactagaactttaacaattttaaatatttagcttaaaaaaacactggaacatagattagttttaaaaagtactttaataaaattaaatatctacttatatttttatatattataattgaaaatatatttggacaaactctgatagcggtacgtaagctcagggatccatttgattggattggtcaatctttttctagctaccaggccaattggtatgcacactctatatccatgcatgctgatagatcatgtcatgcac

SEQ ID NO: 46297 - DNA, 718 bp, Oryza sativa
  unsure (1)..(718): unsure at all n locations
ccgtggctgccatgggtccatgggtcgcagggatcaaatccatccggtgcaaaagctcatggaggatgcagttttatccagatgtagtacagctcatctgaatttcctgccacttcatctgcagtgcaaatggtttctgaacccataggttatgatgctttaagcgtgcggcaaatggtgtgaaaaggccaatggttttcttcttttttttttcattcaggaactctcaaattcaatcaatcctagctttttttttttttaaaataagcaaaaaggaaggcctnatatnactatatgaagcatggagcagtttggtaggtacaagattggcacagggcacaatccgggttgtggctcaaatttgaacacaagatttatattgttttcgggttctcggacaggtcaaaatgcttcacggcgtgtggcaccanccaaatgatcatacataaaattccatgatgcgaatacaatgttatatctacaaatgcaatcaaaccctgaggttttcacaagccctacaatattaagcgggcactgataaacagccaagggacgagacaccgcgacagaatagaagaagggacaaatggacaactcatacaacaggtgttggtcctacagagggcggatgggttgcnaaatcnataagctggnatcgggaganctcccagcgcgttgnatncatanctgantttctatcattcacannggggcgcgg

SEQ ID NO: 46298 - DNA, 708 bp, Oryza sativa
  unsure (1)..(708): unsure at all n locations
tttctgccaccgaacanttnntaangngnngnnagntannnggatnnaagnttatcgatttccaancctgtgtgtataactgtatatacatgncatacttttgctgcccaattggaagagcttgcgggtggcggagaagaccaccaggcccacctcccccccccccaccatccaaagcttcctccggcttctttaacacccccctcccccccttcgacaccgccaccctgccttccccccccgctccccaccctccccccccctactcctccccctcccccccccccccgctcccaccaccccttcccttcccccccccccccccccccccccccccccccccccccccccccccccccccccccccctccaccccccccccccccccccccccccctcccttcccccccccccccccccccccccccccccacaccccccccccccctcccccccccccccctccccccccccccccccccccctctccgcccccccccccctctcccccatcccccctcccctccccccctccccccccccccctccccccccccctcccccccccctcccccccccctcccttctcccctccccctcaccccccccccctcccccctcccccctcccccccccccccccccccccccccccccctccttccctttcccccccccccccccccccccccacccccccccccccccc

SEQ ID NO: 46299 - DNA, 1415 bp, Oryza sativa
aaagaaaacatgaaggaggtcccccccgttcgtgcgcctgtgcaaccacttcttcttaggcgtcatcgcagacgtcggcgcagccgcccggccggaagaattcgttcagcctgaagtccagtggcccgccggccttcgcggcaatcataaggctgacccctgacctcgtcgacaagatccggcgtgccgaggaatcgggcagcggcgctcgcatcaagttcaaccctaacatgtacaactcctcggagaacgtgagcttccctcccctccctccctccatctcactccgtcgtcaagttctgtccccgcgagtttcttctgaagttaaaacctaactgatttctaaattttgcttgttatggcatatgtgtcttaagttcataactcgagattattttcatctggaataccagtttttggttttcctgtaacatcgttcctgagtttaggttagttcactgtgtaatttgcatttatatttgctcaattttactgcctggtgcttgagatgctctgaatcgttttggcatgatgctgtgttatcccaaatgttgttaggatcgttaaatacttaaatttcacttgtgatgttctatggtactctcttgagtgtgagctcgtccattgcttattctggtcctgtcgatatgccattcattttaccttcaagttttgtataggattgttcaaatccagcccctgcctgttcattattgagtgattttataaattggcagttcatgttttagtttggttttacttgggcacatgtctccttggcttgatgggaataaaccgtatgatttcttttggtatatgcaccaatggcaaggagttttgtttgtgtattttgcatttctttggtcagatcactgtgagcaaatcattatttgaggcttccactatttggctaggatgaatttggatattttatgctgtttatggttgctcaaagttctttgggaatgatgatccatgcggaagtattaattttgtggaattgcattgttgggccctacttttgtaaccgttagctgctaggaatggcatataaagctcatgtacatcttttatctatggtctttgattgttttttgggtatatcaaattattattttttgtttaatttctaatgagcagttatatatatttcttttcttcaaaaccatttacttggttttgtactaaagaagcgtagaatcacccaactatgtatttggctccagtagggttcactaatctcaaataggaactccaaaactccaaatctcctttcctgtcaagaccctttgtgttcctaactttcttgttcacatgacatgttactccagtgaaactgtagctttacgtctcatcactgacatttatggatcctagttcaactgttttgctttgttttctaaaaaaaaaatcca

SEQ ID NO: 46300 - DNA, 760 bp, Oryza sativa
  unsure (1)..(760): unsure at all n locations
gcgtgnaagtagagccctgtnnnnnnnnnnnnnnnnnnnnnnnnnnnnnnnnnnnnnnnctctatcggcggcatgcccgcgcccccccgcggtcgcggcgccgcttgtgttttcgccgacgaagtggttaaggttgcaaaagtaaaaacttgggatccggaagagtccaacagggttggaaacttatttgcgtgtttccatagagctcctaaagcggttggggaatacatgggctttactttgttctggggtaaataggtatccgattaaaaattcaaacaagtttccggtgtgaaagaataatggggaaatctgggggtgcaaaatgcgtacctaaatcaaattaagttaattcggcttaatttcctgttttcaatgatgaaaactaatggggcaggttactttaagaaatggccaaaccgcaagcttgaggagcattgtttattgaaggtttttacatttctcacataatgatttttttgccttggcggtctatttaagtggacccctaaataactttattaaatgggggtatacggtttctcataaacttttagggtatacccaggttggacattttgatccataagctgaatgaaggtcacttcctttaaaaaagagcttttacatggttatttaaaatattttcaccccattatggaggcttgaaaaataattacttttaacaataaggttgaaacccccaaaggccaatataatgtccctggattctcgttaaaaaacgattgggcttatattt

SEQ ID NO: 46301 - DNA, 609 bp, Oryza sativa
  unsure (1)..(609): unsure at all n locations
tctgtgaaaatcagtatttttgcgtgggcgacgaaggaccgcttgggataatcgcattatccggggggtcatactataccaccccacacggaataaaaaaaacccaaaaaaaagaaaaatngtnngcccgcccgccggccttgaagggaaccgggcggccgaaattgtcgttgacattgttgggcccgccgccgaccttaacgccgtgagggacggcccgcgccgccggaatcgggggtgtgggggccgcctgcccgccgccctccccgccgccgcctcgnggccccgcccccccccccccctccgaaccctcggcgcgcccagcccccccccccccccccccctccgcccccctccccccccccccccccccccccccccccccccccccccccccccccccccccccctcccccccccccccccctcccccccccctccccccccccccccccccccccctccccccccccccccccccccccccccccccccctccccccccccccccccccccccccccccccctcccccccccccccccccccccccccccccccccccccccccccccccccccccccccccccccccccccccccccccccc

SEQ ID NO: 46302 - DNA, 737 bp, Oryza sativa
  unsure (1)..(737): unsure at all n locations
gcgggnttttaaaactctgtctnnnnnnnnnnnnnnnnnnnnnnnnnnnnnnnnnnnnnnnnnnnnnnnnnnnnnctataacttattagccgctgccacctaaaaattaatcttagagttcattttgattttctttttcattgtagatgatttgctcacagtgatctgaccaaagaaatgcaaaatacacaaacaaaactccttgccattggtgcatataccaaaagaaatcatacggtttattcccatcaagccaaggagacatgtgcccaagtaaaaccaaactaaaacatgaactcgccatttataaaatcactcaataatgaacaggcaggggctggatttgaacaatcctatacaaaacttgaaggtaaaatgaatggcatatcgacaggacccgaataagcaatggacgagctcacactcaagagagtaccatagaacatcacaagtgaaatttaagtatttaacgatcctaacaacatttgggataacacagcatcatgcccaaacgattcagagcatttcaagcaccaggcagtaaaattgagccaatataaatggcaattacacagtgaactaacctaaacttacgaacgatgtacacgaaaaccaaaaactggtatttcagatgaaaataatctcgagttatgaacttaagacacatatgccataaccagccaaatttagaaatcaggtaggttttacttcagaagaaactcgcgggacagaacttg

SEQ ID NO: 46303 - DNA, 701 bp, Oryza sativa
  unsure (1)..(701): unsure at all n locations
ccgcgcccattganattgcgcactccaggttcgnnnnnnnnnnnnnnnnnnnnnnnnnnnnnnnnnctactgtttctaaatcaaatatggttggatcttctgaacttacaggagaaaatttggaaaaagagcaacggatcttggagctcaggaatcaggtttagtacacagctcatctgaatttcctgccacttcatctgcagtgcaaatgggttctgaacccataggttatgatgctttgagcttgcggcaaatgggttggaaaagccaatcgttttcttcttttttttttcattcaggaactctcaaattcaatcaatcctagctttttttttttttgaaataagcaaaaaggaatgcctgatatgactatatggagcatggagcagttttgtacgtacaagatttgcacaaggcacaatcctggttcgtgctcagatttgaacacaagatttatatttgtttccgtgtctctgacaggtcaaaatgcttcactggcgttggcaccagccaaatgatcatacataaaattccatgatgcgaatacaatcgtttatggttcgaaaatcgaaaagcttggattccgagagctccccaccgcgtgggatgcataactttgagtatctattagggcaccctaaatagctggcgggaatcatggccatagttgtttcctggggaaaatggtattcggttcccaa

SEQ ID NO: 46304 - DNA, 686 bp, Oryza sativa
  unsure (1)..(686): unsure at all n locations
ggcgttgtaatcatacaacnnnnnnnnnnnnnnnnnnnnnnnnnnnnnnnnnnnnnnnnnnnnnnnnnnnnnnnnnnnnnncattttgtagaatcagagaaagcaaaagacaaagacaaaactgttgtaggattgaaagaattttacacagtacacacactagcgaattctatataaaccaaagacaaaactgttttaagattgaaagagccgatgatgagaaaaaatatacacatctatcactgttgtgtatatggagtatatccaagaaaaaagagctgaccgaaaatccgaaattggaaagccatgacctcaatctcaactcctcaactgaacaactcaattagaagcacgataaactagaattttatgtttattatgataaattttatactaattaaacacgccaaaatgaagaacgtaacttaccggcaaatcaattagggaaatttcagaagaaaaaagaaaccctgatcgatcgacaaagagccctaacaatagtacgatattccaagaaccgacagagagatcatcacccagatcgagatttaattgcaagcaaattaaacagaaataactgcgagcgagcgaaggagacgccggcgaggaagagagaagcatatatgtgttggtgtgtgtataactgtatatacatgcatacttggtgctggcgaatttgaagagct

SEQ ID NO: 46305 - DNA, 527 bp, Oryza sativa
  unsure (1)..(527): unsure at all n locations
ccgcgccatagtatttgcctaacnnnnnnnnnnnnnnnnnnnnnnnnnnnnnnnnnnnnnnnnnnnnnnnnnnnnnnnnttaagcttggagaggctgctttatgcatttcgtatgtatggtaggtacttctaaaccaatgatctttgttgggttgagttcgttagcaccagtgattggcacttaaacattatccttctttcacctagcatttctttaggttctcatgggcaagtttcatttacagaatagcatatggcgttgaatactccgtagagcccccagtttcattgggttgatctgtcatggtcaaggatgttattaagcttggagaggttgctttaggcatttcgtatgtatattaggtacttctagaccaatgattttacttctaaaccaatgatctttgtgaatggacatgttgggttgagttcagtagtaccagtgatttagtgcttaaacagtataattctttcacttagcttttcttttaggttctcatggtaagtttcatttacggaatagcata

SEQ ID NO: 46306 - DNA, 565 bp, Oryza sativa
  unsure (1)..(565): unsure at all n locations
cggtgcattgaaattcctatgtctnnnnnnnnnnnnnnnnnnnnnnnnnnnnnnnnnnnnnnnnnnnnnnnnnnnnnactgttgggcaactgccataattaaatgtatttgaattctcaagtaggcatgcattcttaactatgcataacaccataaacagagtccatttaacatcatttaaattctagtaaaagaatagtaatataatattagttgagaaacataccgaggttgaagtcttcagcaactccctaatagccattgtagcataggaggatgctggtagagtaaatgctaattttatggccaatttccttgctaacatatctgagctaccgacagacttttcctctactaagccagtttcactacctggcatagagctatccaatggtcctgccaccttggaatcatgtgattgagcatttgaaatcgcgctagatatagtctcatttacttccttggcttttgtaggtttgtttctggacagaacatccaaatcagtttctgctaaagatgctgtgtcatctgtataagtcatgagttccctacagtcacaccaaag

SEQ ID NO: 46307 - DNA, 714 bp, Oryza sativa
  unsure (1)..(714): unsure at all n locations
ccgtgcaatgaanatcaaatgtctnnnnnnnnnnnnnnnnnnnnnnnnnnnnnnnnnnnnnnnnnnnnnnnnnnnnnacttgataatttgttatagatccctggtccttagttctaacgttgtgcactcttacttagaggacctcttaagaaaacaatattctatatgaagaagcgaaaaaacggaaaattgaaccgcgctctgaaaactagaagtttaggggttgattttgcaaccctcacccctttccccaaaccctagccgccaccattcctctgcctcctctcctctcgctccgctctctttcctgcccaagcgacggccgccgccgggtgccgtcccctcatgctcttcttcccgcagttggcgaccttccccgcgcactccctactgagagctgttgctgtcgccgcgccgtcgtcctgccatagccatcctctcgctcccgcgccgcatccgccaacgaggaggccgggactgtcggatccggtgactccggcctcctcgccggcagatccggccgccctgaagtgaggggaagccaggagccgccttctactcttctacctctatgcccggcactgcccctatgtccctctccctatacctctccatactgttcatttccggatcagcggatgcctgcgattaggcggccacggacgtgcgtgtgggacgtctaggagacggggaatcactggatcccagtaggcg

SEQ ID NO: 46308 - DNA, 747 bp, Oryza sativa
cacggcggtctccagtacggcgggtgttgctggatctcccgcatggagggctcctcgtcagctcggtcctacctctttttctgcctttttggaaggaggtaaggaaagaaaagtttcctctggaatttcatactgcatgttatatctttgccaagttggtggtcttagtgtgatactgtgattaatttggaccgatgaagatatgtgtattgaatttttctttgcaagtttaaatcagtgtaacactatgaatgtgagcgtgtgaatgcagcttgtagtgaagctttgttgagcttacgcaaagcagagaagggcatcggcgcggggctcctagaggatgctgccacctccatccccttgcgtcacggccgtgctgccctactggtcctctggcacagcatctaaggtcatctgccaccacaaccaggttgcatctccaccgaatgtgaccccactttgatggcggcgagctttgctttggtagtgttgctgtcaatttggctgtgcatttctttaaggggttcatctacgatccattgtagcatgctgatgactttaaattacaaatgagttaatgcataagattctttgtttccaagtataagaaattgatatatcttttgttgaagtatgagtatgctgatttgttccagcaaaatatacccatgtacaatattttttgtggataataatttgataatgctccatccaaatgtagtcatgcatcttcatcaaaatagactgggg

SEQ ID NO: 46309 - DNA, 711 bp, Oryza sativa
  unsure (1)..(711): unsure at all n locations
cgctctttgaattcgtaatctnnnnnnnnnnnnnnnnnnnnnnnnnnnnnnnnnnnnnnnnnnnnnnnnnnnnntgcctccagttccaacttccaaatgatattcttcattgtgcactaatgagatgttaaattaaagttccattgcttctgaacgaccttacaaatgaatttactgtttagagccagtttaaggcattcttcagattatgtgggaatctgtgtaagcttctactgccaaaacagctgtgcaagtgtttaaatatatcgttttagttgagccttgtgtctttgatagttatattgattcttttttttttgtaaaacagataagaatcctgatattaattattgttcttccagtactacagtgttcaacgttagggaattatcttaaactggtgctctggtaaaattcgaaaggtacatatggctatgtgcctcataagaaactcctcaggcaatagggatgattcttgggagaaacaaggattttgttcctaaaagtcactcatttggtcttgtatagttgtatctaggtcatgtttcctcttgtttaattccctcaggtttcctcttgtttaatgctttctacatgattcttgaaatacatttttcacttttaactgctggttctacctcattttcagtggtaaaaccatgccagtacttccagntaatgtggntnggnattgttgttangtgctttgtg

SEQ ID NO: 46310 - DNA, 715 bp, Oryza sativa
  unsure (1)..(715): unsure at all n locations
cgacacagggcacaattctctactgcttgtacatgttcagagctgcaaaaaaatgacaatttgacctttcaagaaacttatttcgcaaataaaccgcgcacaaaacttatttcaaaaataaacagagggttcagcgccaaatgctccggcactgagcttagccacctcagtgccaggtcaaccggcactgaatgtcgtgccaccgtggatggcacgccgactcagtgtgccgacgtgtcaaagttcagcgccacccgactcggcgctgaggtggctaagctcagcgccattgtatttggcactgaaggggggaacttagtagctgtgccgagcattatggtatggctggctgctctgctagatctcagcgccaaataggttggcactgagtatggctggttccgtgccgggtggtttggcgctgagatatatttgacaggcttaaaactatgtttacttctgacacatttggagttaagtgaacacagcaaaaaatatgcagtcattcggttgataaccagtgcgcaaccaaagcaatgttgcgaagtgaaagtcacaactaagcaaaccatttaacatatatagaagcagtacttaactagagaacaagtcttagccatacatannnnnnnnnnnnnnnnnnnnnnnnnnnnnnnnnnnnnnnnnnnnnnnnnnnnnnnnnagaggttatacaggtnncgaanccaaagcgcct

SEQ ID NO: 46311 - DNA, 717 bp, Oryza sativa
  unsure (1)..(717): unsure at all n locations
ccgtgcattagtagattcgtnnnnnnnnnnnnnnnnnnnnnnnnnnnnnnnnnnnnnnnnnnnnnnnnnnnnnnnnnnnaggtggtaagtgttaagcgctgcatcagtggtttaacgatgagatgttctaggaatgggacgtgttgggaattcacatccaacatggaactaaaatcaactctcaattcgagatgccatgcttacgggttgtcgcatttggtgtagatttcatcgatttcattcctctacgattctaccactgtcattgcttgtgtgacttggggagccaaccctcttcccagcttcggggtgtatttcgatttatttcctagtcatgattgattcccagagctgaaacaattagataagagattttaaggtgttaaccctagctagccacatcatttccatacgtattacggttgaaagatgaattaagtgtacatttacttagacttaaggtagttgataggcctattcttcaatcatactccctccattccataatacaagttatccacgtattttaagattccacgtttaaaatattttgaccaaatttagtacgatataaatggaattttacttgctaaaagttatatcataggattgacatttgaattcacttttctatgnatataacttttgtaagtatattataggaatgaccgttgatcatgccttatattacggnataacaggagtatattgcttgat

SEQ ID NO: 46312 - DNA, 716 bp, Oryza sativa
  unsure (1)..(716): unsure at all n locations
cggcgccttgatagattgtannnnnnnnnnnnnnnnnnnnnnnnnnnnnnnnnnnnnnnnnnnnnnnnnnnnnnnnnnnacgaggtactttaattttatggtcctaaagtactatattttctagtgcaaacctaacctcataggttaattggaaattttggtaccttcaaattttgcacgaggcactttaatttttcattacaggcttgggactcaagcacatctaagttttacatggaccatgttgaaagttcttgtaattgcaaatcctgaagcagcgtagagaacaacttgctcgttggactcgagcaagatcactggatatatgttccctgtggtgatggttctaccggatacaatccgattgattgacaaaccgatcatcttattacaaggggcactgctttgctctctagcccaaattaaattaaatgaactgcatcccgcttgttcgtcatagccctcttctaattaaacaaatacaaacagcttaacacgagtcccttcggaagtaaattgaggctagagataaatagcattgtcctggcatcaatgtgaccagccgtatgaaatgctagcttttgtgaggtctgcgccaagttaggatcatcgcacaaaccaatcgaacccgctcttcactgaggcagatgagtggaacaagcaccatcgctacattgtcgtgcacccagaatgatcttgagccggacttgatgtgt

SEQ ID NO: 46313 - DNA, 1372 bp, Oryza sativa
  unsure (1)..(1372): unsure at all n locations
aggtgccgagaacaacgacgcccggaaaccagccactatcgcaagctggcagccgcataaacggttcaagagacctgaaagcacccagggaactcgattcgctgacctactggatccaattcacaattcacgcacatgaaaagaaaagaagtcttttcccaaccactgatattctccttttccggacctcccatgcctgactgactttgcatgattccctgcattaacgatgtagaattaaagaagcaatcgatatagaataaaacaagaaacatattttacaatatcaattctacatcagaaatgttattttcctcgttttttttcacgcgtgtctcattgtatgtctgtggatggaattggtccggcgtgaagagagattaaggggcaaggccgtggacaagaaatgcagaatctttagcagaaatacaataacttgcaggattcttgattcctcttatgagatgtgggcggtgatcgattgtcacttcactcggttcttgattttactaagtggccgcactaagaacataaaataaataaaagaaaaatggaaccaaagaatagatttgtttcccgaatccatagcatcgcaccatggcaaattggcaatgccatcaaatttactcttcctcccccattagcaaatcgcaaccacacctctatgccttctagcccgcaaacgctaaccatgcgaaaacgaatctggtgagtttttttttttttgttcctcacctttatgaactggaggacatttggacatcggcgcgggcgtcgccgcagcggaatcgcgcgctcgaaagcaaagcggcggtcgacggtgtgaaccgatcggagaggccgccacgccaccggtggcgtaaatccggcgccatagcccataggtttccccctcttgcggctgagcggcggcgccgacgactccatccgcggcgacgattttggggaggatggaaggggaagaagacgagccagtctactttacaggagggtcatttttgtaaaaaaagttactagtaggatctaagcagaaggggggctactttgtaaaatgtagggcaccagccattgtccgttgcgaattgtgatcgggtcagtatgggctatgctgtaatatttaggatcatacaggggggctactatgtaaatatatgggctattgtgcaaaagttagagttggtaggatccaagtaggggctattttgtaaaagttagggtccccgtcccgtcgccgccggtgagctccgccgactgaactcggcggagacgagcacctccannnnnnnnnnnnnnnnnnnnnnnnnnnnnnnnnnnnnnnnnnnnnnnnnnnnnnnnnnnnnnngttntacaaaatcagaaaacaaaagctcgg

SEQ ID NO: 46314 - DNA, 714 bp, Oryza sativa
  unsure (1)..(714): unsure at all n locations
gcgtgatataattgataactnnnnnnnnnnnnnnnnnnnnnnnnnnnnnnnnnnnnnnnnnnnnnnnnnnnnntccttgcttagctagcaagaggcacacagcacactacactctgctggtctctaggtgagatgcaacgagtgacagcaggagtgtggctcgcgaatcgggtttagttcttctggtctggttatccatgcgtggcgtggtgtcgtggtctatcacctctgagcgaatgggcgtccgccacctggacgcggtagatttccgttgaaaaagaagcgggcgtttgcaccggtgaagtgcaactcctgccactatcttagattcagaaatgtaacggggggtgtcaggttcaggaccacagattccaattctggagaaccagccaaccaggtgagcatggtcccatcagagtatcagaacgtagtagtatatatatgtgccaagaggttgcacggcgttcgacatgccaacatggacattggcttaacgaacaaactatatatcttgcacaagtgttttgatgggagtgtcattgaggttttttcatcaaggctttcactgaagtgaccatgaaaagatgtggttgttctttgctagatcccgaatacattcgacaggacacatgtgttcatgaacgatgacttcgacgaggctcattcgatgcaactcgatcgnccggcaaaacgaacaatatgcccggtggtaac

SEQ ID NO: 46315 - DNA, 702 bp, Oryza sativa
  unsure (1)..(702): unsure at all n locations
tcagtctcgccccaaggtgccatccacctactaccaaatcgtatattaccgatctcgatattggtccagtctaccccatgttcacgtacttttagtctttgacctgactcctgagtatagtgggcaacaaacattagacctgctactgcatagcagtaggtatatgcaactccattccagtacttggttctcagcaaaaatctaccagtcgtaaaacataacgcaaacgtccatttacgtttccatcatactcgttctgcaagcaagttcgctatcagggcaatcagcgatgctgaccactactgtgtttttctctgtgttccaattcttagccctgtctttcagcttggtattattataatccagattattaggagtaagctgaaagaaatagacaacttattgaagtagcttattataatctggagtccagtttattataatctgataagctcatttaggtgagctttttccagattattggatgaaaaattacctaccatgccaccccactccctttttagacttgcaaacctaataatctagactctaataatttagcacagccacaactagccgcttattctactatagattataataatttagcttatagtaatctgactcaataatctagattnnnnnnnnnnnnnnnnnnnnnnnnnnnnnnngggntatgtccaggctctaaaggggtacatt

SEQ ID NO: 46316 - DNA, 717 bp, Oryza sativa
  unsure (1)..(717): unsure at all n locations
ccgtgcctttgagatcgtatatcannnnnnnnnnnnnnnnnnnnnnnnnnnnnnnnnnnnnnnnnnnnnnnnnnnnnnnnnnnnntttggtgattgatatttttatgctacaagaggaaattcatctcaaggtggagattgttaaatatgtgatccgaattttgggtccacaatatattcggattagttttctagtaggagccctattaggtgcctttcttttatcccctatatatactcttgtaagtcatacgggaaggggtgacgttcccattgtgatttccctatgtttataatcaactcctctatagtgatcattgccggtcggcgcccgtggtttttttccgcaaggattttccacgtaaaattcgtgtctccattgtgcatctatttccataataattttgtcaaaaatatattgtttaacagtttgaaaagtatgctaacgaaaaaacgaaaaagttgaagtttggagttgatcagaaaaagaattgggcataggcaaacccgcatccgcagccgtgcatgtggtggcgcggcatcagggcaccacgccggcgcttaaaaagatcgtgttcagcaaatcatcgtcgcaagacacacatatgtgatcctctcgaaatttgggttgatcctcagatttgtgtgaggataaaaaaaaacatttcgacagtgaatatcttaatngggatgtgcttcgattatgcacttgtaaat

SEQ ID NO: 46317 - DNA, 1391 bp, Oryza sativa
  unsure (1)..(1391): unsure at all n locations
ttcggtaccccaaaaatatttttattgtattatatattataataaaaatatagtcaaaatatattttaaagatcgtgtcattgttgaatatgtcaagaattataaaactggagggagtaaagatcactctacgtttacctcgccaagtgcctagtgcctataaataggataaccgctacttctctagacaaacccgcactccaaaatcagtaaaccttgaccatctcttccactgactactagaaatcggtgataaggagagttagaacatgtgttgctggttcgacaaaccaaatactagatatacactgagaatgggatgcatggggaattcgagaagaacttccgtgatgtgaataggatccaattgtagcagcacggctcactgtatttgatgacaatgtggttgtatagtcaaaggttgtgctacactgcccccatcccattttgggtgcataggctaggaagtggttggtgctgtcgctacctgtcatggattgtgagtctcacctcgatcgaccgagtccacatgcccaacgcttgtccacttccggccaaaacgacggccgaaaccttttaaggtgcttgagatgtaccagatggaggtacctccctcactacttaatcacccaccattgatcagttaagcacaacttaggaatagaaaacaatatattataaaagtcgataattaattccttttacatgtaacagtctctctctttttttgcatccggtttgttacttatcttcgattctgtcgttcacatcttaacacttgtccaaaatccaatttccctaattaattcttcaggttctcatctaaatttagagtccaaagaaacacatataatcctctttcgtccatacacaaagacaaatatggctcgatcaactagtttgatgaatctttgtatgtatacaaaattcttggtcattgtggatcatcagtggtggtggtgttttgtccgtgcggcacttgctgaagaaagatgttcttatcagcaagcagggcttatcgatcctaattcttttactgattaattagaaccccacctctaatatgtatgaaagtaaagttactaatctaaccttccacctaaacatcgagttaatacctaactcacttttttaataccttctgagacatacttcttccttccctaaatgtttgacgtcggtgacttttttaaatatgtttgaccatttgtcttatttcaaaacttttgttaaatatggaaaactatatgtatacacaaaatattttttacaagggatccaatgatttaaaacacttatattncctaattttttaaaatagacgacgggtaacatgttaaaaagtcacgtggtaacattagggatggaggagactttatacaaaccgtaag

SEQ ID NO: 46318 - DNA, 1447 bp, Oryza sativa
  unsure (1)..(1447): unsure at all n locations
acgagggaaaaaaccggaaatgagagtcggtcggtcggtagcgcggctatggacgatgacgggggtgacgaggaacgtgaggtttgcgttctttgctttgtggactttcttcccgctttccccttttcgttttacccgctgcactgcggctgtgcctgtgttgcatcgtgggatacatacatgggatcaatttggaaagctttaagattatgccgagtagttagtagtcaacttacgagaattcgtataggcggctgtgcctgtgtcgcgccgtgggatacgtacttgggacctgtttgggaagctttaagattctgccgagtagttagtggtcaacttacgagaattcgtataggatgggctttcgagcttctgacttctagttttatttttagcttctatagctatagattctcagaatctgaacgagaatatgtatcattggaggagttggagattctaggagaaactatagttgctagaagctctcctaaatagggcttgaaccagatgacggcggaggtgacgtgagattgtgagagggtatgtgagctgcttatcatgaaaaattctttgttttgtccttccatttttgtattgtgtttggcatgattttcaggtggaagcagatgcatctctcgtacacaagtcaagcggctacttgggctctgctgcatctatactaccaactgccattgatgtttgaaagaaagtgaaaagtcactagaaactaatactagtcgctcacaatcaatggcaccgctagcggcatcattgttttttgtatgtcaaggtagaggtgggttgtttttcattggcaactatgtgtacgtgattgtcataacaacctagtcctatattttattctatctattttctgtgtttatcaaaataatcacaatgttaggtttacatgaacactactccataatttcactattaagatgtgtatttttttagatgttgaacttagtccatgctaacactgataacagtttaatccatacatatgcagagagctagagatgttgcgtttctacatttcttcaatcacttgtaaataggtatgtgtcatgatagataattgaagtacaagcgccaaaaggattggtagcactgtgtgtctatcattacctatgtacttaaaaagattgtccattaatcctgtattatcaatgatatgttgaaacaaatgcttaggcaataattggtgtacaactagaaagtggtcatattccccaatagttatatgaaatatttattgggtatgaagtttgagcactggattggctttgtttgcgtctttgcctaattagtataatttataagtctcgntatccgataaactttagtttttcttctatttcaaaaaaataaataaactttgctttaagccaccaatatttctagatgaaaattgagaaccttcacttatatctacaatgac

SEQ ID NO: 46319 - DNA, 1175 bp, Oryza sativa
  unsure (1)..(1175): unsure at all n locations
cggccccttgantttgannaatgagaacctcatgcnnnnnnnnnnnnnnnnnnnnnnnnnnnnnnnnnnnnnnnnnnnnnnnnnnnnnnaacggaataggtagttacagataagattcaatcgtaaccgactaagatcccgagtatttccttaacatacaagtttggaatttaacccaagtccctttaaagatattctatctatacatggcaccccatacctagtcggattatacatgccgtgtaggtatggggtatccataatctccacagtagcccctgagacctttacagtcaacaaaatagttttctctcgtaatcccaaacgataatccgagcactccaacttcttctgccttggtctcccgagtatcaaaatcaaagactgtgaatggctgaaaatagaaaaaatcaggtgcatcgactagatgcacctaattaggtgtagcccccgactaagtgattagttaaaaaaactaaacatatagtcaaggtgtaaataacatccaaccgagtggttttacaaccgaatcatccaaagtatcatacaactaagcatatgagacgtttgataaaatatccagccgactgctttagctttgatataccaaaaatggaaatataaagaaacccgagtaaaaaatactataaggtccataatccaacacatatgacaagaatccgagtaaaaactctcaaaaagatccatcaaatgtgatataaatcgatgagtctaaataacctaggccatgactcacgtcataatcaaaataagcatataacatgccgagagaatgactattcaaaaaccagtcacctcaacaaaacccaaatagtttttgcagcctaaaaaggcctacaaaatcagtataacacttttctgtcaggcacctttttatttgcattgtagtaattccacagaattatctaactgcgtcaaaaaggattttaacagcattgggctatattgtcgtgagcaagtgttgccaaagcaaaaacaaatgcctaagcccctaaggatcacaacttaaccacgctgatagcaaaactgggctgaagtactgtttaggcccaggcccattagtactcccgataccctaatgagataacaccgaaggcatagcgtcgttttgtcttccccgccgaaactcttgccactttccctactcactgcta

SEQ ID NO: 46320 - DNA, 849 bp, Oryza sativa
  unsure (1)..(849): unsure at all n locations
tacccctggacttcatctcaaattccccgtgcatcctattctcagggcatcgcattgtcgaatcgccgagacaaacattttgttctttctcaccgctgcttttccacgtacagagaaagatgaacgatggccagggtttatatctactagtgctatagtagttctttaaagaggggtaggtgccgctagtttatttataggcacttgatgatgaggtacactagctagcactttcacaatgacacaccaactagatgagaggctctgaacgatatcattggcaagacaaggagttgaacttggataagcatgttttcaaatttatccacaaaacttatttttgtttaggacagaggggatagccgataattaattggaagtttggaactgacaaaccatggacaactcgcgaagacaaagaggtacgaagacagatgtgtacatttgtgcacaacatagtggctgtactgcatctagccacggtccatgacatgcagcgacatggctcaccctttcacaataattgaaaaaaaaatgaaaacgatgaatcatgtgaaaatagatgaaacacacacaaaatccacacaaaaaagcattgcattctgagaaggatcaaaattcagggaagaaatgcttatatataatgacttcaattggtacagtgtaccgtactagaattacacatagagtttcacaatatcttctgctcacccggtcatctggattcacgttcttctcaatttttttttatagaacaccggggggggggggggggagggggcttttnttgggttttcccaggtgggagatatcggaattgtttttggggaggccaatccaaggggaacc

SEQ ID NO: 46321 - DNA, 753 bp, Oryza sativa
aagtggtctgtatcttctgggcagctcttgcaaagttcacagttggcaaagagaaaaatttttttttgtgaaggttaactcgtgtgggcagtctattcattgctagaagcatccaaagaatttgactcttgaaggagccgagcttgtccagatgtaggtccagtgtggccaaacctggaaattttccatcatcttctggtataaggctaaagaagaaatcaaattgttcttgtgttttagactacactcaatcttgtcttcgcacaaagttagtgaggtgtgttgaagtaaggaatggagctgaattagctgttcttgggccgccgaagactgacgaggaacaaaagtcaggttttggtttagaccactttggatagcctcgttcttctcaatttggcaagcaaaagattgaactttgcaggttggagaagaacagagaagataaatctcgtctcgatgatatccccattcatccggattcacgttcttctcaatttggcgagcaaaagattgaactttgcaggtcaaagaagaatggagaagataaatctcgtcttgatgatatcaccaacaagacaatgactacggcgcaactattttatttgattggattagaaacagggttagcaatttcgttttgcacatttctaatgggactttcggaacagaaatatttaaaatttaaataaattttgatgagtttgaataaaattttaaccaaattcatagaaagtagactgaggggtaccgaat

SEQ ID NO: 46322 - DNA, 744 bp, Oryza sativa
gcccagatcgatagtttggtttcaaaatatggtcaaataaacaattgtccctttctttaagaaaaagtacaatagcaggctgtggagccagctataaacatattttaaagagataaagaaagagagagaagagcagcgggctacagatctgaagccagctgcagcgcggaattcaagacgtaatgtgtgtatgataagtgggaccatgtattagtagtatagtaagcaactacttattatatgaattggctattatattgattataaataatttagagtcagtagtagtgggtcttgctctagctgaagaatcaggtgagtcgcgtcgctgcgtgccgtggcgagacgccggccgcgtacagaacctctctctgcttgctccccatctgctacagccactgtgttgtgcgcacgtgtagcacgcgctggacttatctgctttgctcgtttcatccaacgagccgagctaccccatcacctgccgagctgctgagctacccatcggtcgcgacaaggtccaatcagattttcagctggtcactggcttgctgctgctgatatcatcagcacgagatctttcgtcttctccgttcttctccgatctgcaagggtccatcggtttctgctcctcaaattccactacctctctttttgattgcgagggagccaagaagaagcaagaacttgccagtccccggcaccaagtggtggggccaagtgcggcgatggcgtcggctctggctc

SEQ ID NO: 46323 - DNA, 566 bp, Oryza sativa
ggtaccccatttaaaaaaacacataatgtatttttaaattttataataattaatacttaattaaccatgtgctaatgaaattaatcatatgataatgagaaaataatgagttttctcgtttcttatgcgctgaaaatatccctatgtaccattgaatcgaacggagtcgtcggcactggagggataggcacatctagttccgtatcggtgtgtctagcaagccattggaactcaccctgcagggatcacatcatgtggtgtgcatgtagaatgaactaaagcacagttttcagtggcagtgtgaatctgcgaggggctaacgtgagcagtggttgggtaactggtgccagccaacaccaatgctgctcatctcgaattctcggcacatcccattctcaaagacatttgcatcgttgaatcgccgagacaaatgttctaccctctcaccgctgctttttcacatatagaggaaggtgatggccaagggttacatttactggtagtgctatagttcttctcaacctgcgctagtttatttataggcgcttgacgaggtacactagcta

SEQ ID NO: 46324 - DNA, 753 bp, Oryza sativa
attgggcacccctactaaccaaactattatggccacttaattacataaatctgcccagcatcatttcttccgtggatgagaagtatcgggtttgaaatttggtgtggctgataagctaataaaccaacaatgtttctcagaagacagaagtgacagactactaattttctattcaagcttcaggaccgaagcacatcccaaggttttacatggagcacatgcgaaagttttcagacatgcatctccgatcggcaaatccaaataatcaacgtagaaaggacttaaatttcggccataacagaagtgcatatgcacacaatgcggacgtactctgctgagttttcctaccaatgagctgctgagatggtcaatgtcactctcatcggctcacagcctgacacacataccagaagggactgcagcaacgatcacttcccttgtcgttgctagagaacggaagggagttgtacaggactggaatgcgatcagctaacatgaactggaccatactcagatcgacgcagttcacctttgattccccatgaatcccattcttaacttaagggcatgctatcacttctcgtcgtcgaaccaccggcggtacgctgatttctcgtagaaatgaccagggttccgaattttgagtattgagcgatcagcgtgacttggaatattgagtgatcgagtgtgacttggaaaactagtgctattccattcaatggtattacaatggtgttgaaataggttcatatt

SEQ ID NO: 46325 - DNA, 707 bp, Oryza sativa
  unsure (1)..(707): unsure at all n locations
aagtaaaaaacgtgaagctgcnnnnnnnnnnnnnnnnnnnnnnnnnnnnnnnnnnnnnnnnnnnnntaatagtttggttagtagtagcgttcatcgattatttcaccatcgattgaaccgatgatcgtatcaatagaacagatcgatttacagatcatttcgaggccacaacaagattactttcacatgcttggagagcacactagaaacaagaatggatcatgtcacagctgaatcaaattgaaaccactcaagttacaacatccatttttgggcagcaaaaagaaagcaaagacagggaaatttttccacctctcaactaggctgtgaagagatttgcttccattcagcaagtctcccgttaccaaatctcgggccttcaacctgcctgatcggacggtgggaaatatgcggtacctccagttacatactttccaatgagatggtaccggctgtgttgagagtggtggaagtgtaattttgtcttttcacatagataagttttctccagctgaaataaccctagtttcgattccccttgtgtgtggtaacagcggcggctgcgaggtagcgaggtcccatggccgcaacttggtgatgggcgtatgtggctgcgaggtaacgagggcccgtggcccgcatgtggtggcagctgcngcggcaggtgggtgaacgaccatggcggcgacttggtgacaagcacggtg

SEQ ID NO: 46326 - DNA, 1343 bp, Oryza sativa
agaattcggtacccctctgggaggtaacaaaaattttaatgtaaaatttagataccctgtgatactttctttctcaagaactgtaaaatttatcaccaccgtgtaccattataatagcccgtgatactttcataagttcataaactgtctatagatagcattatattatattatattatattatattgtgcacttgaataaactgtacatgggttggtgtatcgcttaggccccgtttagttcgcgaaatgaaaatttctggatgtcacatcggacgtttgactggatgtcggaaggggttttcggacacgaatgaaaaaactaatttcataacacgcatggaaaccgcgagacgaatcttttgagcctaattaatccgccattagcacatgtgggttactgtagcacttatggctaatcaaggactaattaggctcaaaagattcgtctcgcaatttcctccctaactgtgtaattagtttttgtttttatctatatttaatgcttcatgcatgtgttcaaagattcgatgtgatgttttttggaaaaactttctggaaactaaacagggccttcaagttccaagttaatacccggcattcaatttacctgcctacaccttcaccaataaccatctatatgccttactccatattaagggcagagttaacatataaaaaaaattgaagccaggcatccttcctttatttttctttcttctttcttttaggatgttttctttgtaagatgacaagagttgagtgttctattgggggtccgatgacaagatgctctgagaatgggatgctttgggaattttagtcatactgatttgtcaagttatgtacactggaagcttatttagttcgatgtgcttgagattggtttgtgcgattttcttgctcaaagtttgttgcccttgtcaatttttgttttagcactacgaggagaggcttaacgaaaacatggtgtaattaacatagtttctacaataactatatgtgtatcttcttttttttcagaataaattcataattaagtctcattcttgtaataatatgattgggtaccggatattgtctgtgtcatttacgaaggcccgactgaaatcacagaataaccaagccgacctagttggcatggcacttaaagttcaccttgttattccacatgcctctgcaccttcatactccctccatattttaacgtatgacgccgttgacttttcgaacaacgcttgtcattcattttatttaaaatttttgtgcaaatataaaaatatttgtgccatgcttaaagaatttttgatgattaatcaagccccataaaataatgccattcct

SEQ ID NO: 46327 - DNA, 941 bp, Oryza sativa
gattgtacagtgtttttctatttggcatccagtaacgcatatgatattttacaaatgtacctgacttgtccttcagatgcttctcatgttctacattggatgcatcaagttttattgcaagctcactttgaatcttctacctaatgcttctaatatttaggcccttttttatttaatatgtgatgataaggtaatgcttagactagcatataaaagattggcttgattagggttctaaaattgaagttttctttgaaacgactaatgttattatttgctcttgccatagaagtggtttttcaggactcttgataatataactattggtttgggatgataaagcttcagtttaggacgatgagtgctgccctgtaggttaaaatcccattttaactaagttatgtattatttgactagcttgcactttcaccctcttcctttaaacatactgatagtatctgctcataaaattattgtgcttgctatgatttaggtattaaaatcacataccttttataatctatgtaaaagatgtacaaccagaaaccaataggttaacttgacagaattgacctttacaatcctacaataccgtccattccaactttctttgctaaataaatatgctgctgtgtgcattatttggttcacatacctgattattagaaaattactgaaaacagtttggattgtttacctgtttgtttttttagtatggataaatcattactttgcttttggttggtacctttttgtgccccccccccccctgctatttgagatgtttaattaatttcctcatattgggctaaatttgtacctgctggtgggccttcagttaattcattcacagattacttgacatcggcaattgctcttttgatcttacaatcttgatatatacaaaaaaacactatgtaacttgctttttcacatcagaa

SEQ ID NO: 46328 - DNA, 1209 bp, Oryza sativa
  unsure (1)..(1209): unsure at all n locations
gtggccccttgggttccctccaccttttgggccatttgccaatggcaattttgggtggagcgggcagctttaacccacccccccaccccaagcgcaaaaggaaaaggtcctctccaagagcaccgaccaagttgttgccgttctccacatcacgcaacaccggcaagaaggaaaaagctcgcaagagagtggagaaggtatattcagaaattagcatttaaactttcaaacatccctacacccatgcagaagcatcccaaaccagtttccaagcagaagcacatttaacaaaataggttcgtagttccacgacaactaagtgcacatagtgaaccgtgattccttcactatctcaacatatgcctcccattcggtctctccattcaactctagcatttgcttatgtgaaataggctctccccccatatcatatctatcttgaatggataccaccttgtccgaccaacccagaatatccttcgtacgacacaaaagctcctcgaaggtaggcttagattgaaaaacaatcatcttcaccgacatcccatcgaactgactaccaccattactcgactctaggacacttccaccatagtgcacatgaacaactctctccatctacaaagtccgaccacctttcaaagtaagtaatactattagtacatctatttcaattaaacaacgacaagggtactaaaagactaacttacacaagtaaaccaaactagacaatgtggcacaaacttcataccatcacattcattcgattcactacatactacatcgccaatgagaataaaaattcttcccaaaccctacattggaacctaccaaatccatcctaccaactagggttcagtaccgatgaatgaaatcccctcaaaattaacctatagaactcacctaaccgataaatgaagtcgatcttccttgtctcacaaaaacgacaaacctagggttcatgctcttctccaaaacaaatcaccaaatgaagaaaatataggaggattttgagaaggttaccttactccacaacctccacatgaaatcccctccaaatccccttgatttcccatgggttagagggggattagggctcggagaggaacgccgncatcgccgtcgtagttttcatggagccgggaaggggagagaaatgagagagctcgctctctcggccgggggcaggggggccttaaatgtctcgaa

SEQ ID NO: 46329 - DNA, 788 bp, Oryza sativa
  unsure (1)..(788): unsure at all n locations
atgaaaggtttgatgtgatggaaagttagaagtttggaaaaagaaaactttggtcaactttgaaaaataaactacaactacaatgaaaaagaaaatcaaaatgaactctaagattaatttttaggtggcagcggctaataagttataggacaaacgatggaagcctctaagatacttgagttgtaaaatctaaaaaaaaaagtaaagaaaaaaaagctaagtgtatttttagattctcatcaattagcaagtcaatacttcctttgttacaatataaatatacctagtgcgagatgtgttatatcttacgactataaatctgatcaagcaactatttagatttagatttatagttctacaaatacaaatctggacaaataactatatgcagattcgtaatcgtaggatatctcaagttctatcgcagatgcatttatattgagaagaaggttacttagccatctgcgcgctgagtacagcaatgcacgggccatccgctcgcggctgcgtagtacactttttacgtgcgcacgcaatgcatgccgagcttgatggaagggatgggacgtgatgccgcttgcttgttcgtgaagaagaacatacgagcagtagaatccaacccccacaagaaaggaggccgccgaattacgcgtggaggaacggggattngtacaccattgggancttgaggcgtacaacacattatgattcaccgggaaatattccatagncacatcattattccctagctaagtatagtggaggagcaaatacttggcttaaagaaa

SEQ ID NO: 46330 - DNA, 707 bp, Oryza sativa
atatttttgagctgcgggtctgcagcgcgcgtatacaacagggtgaatgccagatcagtttgccttggtgctgttcttgatccactccaggtacttggtgttaccaccagttatgggaagagcgataacagcaccaaggcaaactgatctctgagacagcttcttcacgggtcaacaaggacaaggatcatcacaccctgtcgacgaatcaccaggtgtgtcttagcttagttatcaaccaatcaacaaccggtgagtgtctggtaataattactgttaatttgcattattctctgggtcattggctgtgaccggcgatcaggttaacttgtttaattattaacttggatatgtgttaattaacactgtaaacattctggtatatatatgtggggtatcagttaacaacactcttgacattagatatatatatgcacttctttccatgtgattagttcataacacaaaacgatcaacacagtacgtaccctcatgttacgacatataattaggactaaatttgtttgcatatatgtatacacaatggttagaaccatcagtaacccaagttcagttgacaaattaattagactggataccgatatataccatatccattaaaaaatattttgaataaaatagttgtaagttttcattgatttgcctacctttggtttgaccaccactttttttaaggaatctaggtt

SEQ ID NO: 46331 - DNA, 4351 bp, Oryza sativa
tatggtgctgaagtgggggtacatcaccttagaccaccttaataccttaaacaccactgcattctacagaccagtaaatggtccctggtacttgcagttgcagtctggtctagcattctgttctgttagtgctatcctcagtaatcttgattgtcagcctatgtcaggtctaatctgtttgactaactcaggcatgtaggatcttgtctggcgattaagttatggttgtgtcctggttccagtattatattttgttgtctgaatggcactgcacttctctatcatctaatgcatgtgcaatgaacatgtgatgttcaaagtttttcatagttgctattccctttttgtttcccagcacaaagaaatgcttctacagatattgcatgatgctcagagatattctgcattccggaaaggtcttgcaatgattgacatttgtcaggtacctgtcagtttatcagattctgatcaattattatgcactattatgctgaacttgtttgtaattagatcaaactttttgcagctgaaaaatgatcctgaagaagtactaaaatggctcaaattttcaactggatggtctgtgctgcacaatagtgagctaagaattggtttaaaggttagagctaccatattacataagctgaacatgtttcataagatgaatctaattttgtcatttaatatatgtacattcttttcacagaggcacatggaccttctgaaggaacacgaggggaataaaatgaacccattgtccatgcctgaggtagaatggcatcttatttggcattaatatgacataaaatacatacatgccatgcctagaatagaatgtgcgtgtgtgtttgtgtgtggattttcatgttttgatgcaattctagattagaatatgtattcaataatttaatgctttggggttatgttgtcatatcagcaggcaaaactggtaaaatattcagacgcttaacataacatctgttgctccccaatgggaactaaatcatatctgtcagccatgtttagttacttgattcttcaaaaataaaaagtaaatgatagttggttcacaaatacctggatctatctagaacaaacggaagacaaatcagtccgatttaaaggaatatgtgatggagttcaaatggtcactaaagttgtgctgcatgcacattttgcactgtaaaaaggtggcatctgctgacagcagcaaataagtagagaaatcaagtttctaatattctttgatagtccctctggtcataagtatttgacagttaggacaagatttggtcaaattttaaaattttgaccatcaacaatttcacagatgcttagcttaaaaataagaagaatggtatgcataggtttgccctgaacaatactgtcgtaaactcatttgatctataaacttattctcatataaaatggaaggtcaaggtatacaaaatgaccgaatcttgtcttaaatgtcaaacatttatgactggaggaagtgttgtttatcttctccctctggtagccagatgtggaaatttccttaatttgtattgaaggcattgaacctccgtttattgtataatgtatcttggagtaaatctgttttcaacgactgttcttgtgatcagctgagattcagataccttctagtgctgtaacccatcttgccagatgttgcatatttagaggaatgctttccccttaaccggcaatgtcatgcaaatttatccttagataaacacttgcatattttattgcatatactgaagaatgaagtgagcacatgatttttccaatagtagactgctgatattttactaacttggcagaattgaggtaactttagagtccttttgggggattcagtttgcaccaagaacttttgacactagttttttcggctacttttgttcagaactattgttgccatgtgatgccatatcaaggtttcatcttctgtgcctgaactggttcccacagtgggatgtgaactacttttaaccagtaataactggtgggacccaccactccgctagaatattgaattgttttggattcccaaatttcaaactcaaaatttaaaatgagttggtgattacattattattcacagatttacttttgatgcattatttgattgcccgatctttatgctagataccttttttctccaattgtccaggatgaaaatttagttttggagaagataaatgcagagctgtgttcagaattggagaaaatgataggtacctttgactgggtaagttttttgatgctaagtgtagcttcctcatatccttatatttcttctttagatgtaaatttttttgtctgcataatttgtaggcacttatgagtcagtattactacaaggcgagatttagcaactttgcaagacaatgtgctattcaagcaagagcgagtggagttattcttgttaagcaggtcagattcatttgtcagccttaaaattggagacattcagtcagcacatgatacctagagatattttgattgcgctgctgcctgtcccatcctcttatatgcaaatgcaatattagttttttccatcctcttatatgccatcctttcatcagcacgttctgtttactacaagtgggggaatgaattataaggccattttattccctccgtgataaactccttgaaaatttgtgaggagccgcaatctttatgtttgcacaagtttgttcaatataaaacagaaagcacctgtctgccaaaacggccacaaaaatgagattccaagcctgtctgattggtctcatgtgaacagttctgaatcatgagttaaccttgtatgttatttttattgcaggctctacctatacgagaaacttggaaggaacagaaacaatccacaagtccaaaagtgtcaaagttgtcgctcgaggattgcttaggctcactacgtcgcccactacgtagaataaatgagcaatttggtagaggtgctgctcgtggtaagccgtggctacttgctgcttttgcttcaatcgcaacggctgcaacagttggcatgtccagcacacgctagagatgaaggttgatatatgtgtagttcatgctctggtagtcgttgatggggccaaagctcaacactcaatttgtttatgttgtgtccctgttcgtagaccgtcggctaaatgattgagccttaatcgaaatggtggagctgcccatttttctttatatttgggccactgtaaatcaacatacaatcattggctactgtttccgcctagaaagtttaacaaagttaaatcatctaacattaatgtattttgataatatgtttattttgtgttgaagatactactacatttttcaaaaacgaattataatatgatgaaatgaaggaagtatttcacaaaatgtgacttttggagaccccactacgttgtgtgccagagttctcaagggactgtatctccgaaatcgtgacttttgtgaggctgaacgtccatgaccttctacatatagttggcatagcattctatttggaagggaactcgtggagaaacggatcagatggccagttggaattggtaacaaaattaggatcttggctgataattggattccagggaagaatgacgaacaatcggcatgtgatagtgatactgttcggagcttcttcgaggaagatatagccaacgcaattcttcaaattcctatcagttctcatggctggggatgatttcatttcctggtcactttcttgtttcggtatttatactgtaagtcagcgtataactaacatctaaaatcaacaaaaatgtgtaatttttttaactttttgcattatgctgatctttgtctgtgttgtgtgttaatactaacacttgtacgacatgctacagaagaaggaaaaagtacacccaaggtccctcaactatatatggggtccattaactatacaaaaccggtcacccgaggtcccttggcggttttgacgccgtttttgtcctacgtggcggctgagtcagcgtgggacccgcgtgggacccacttgggccccacatgtcagggtgccacctcatctctttcctcttatccctttctctctctcacttttcttagccggcgacgggcagcgctgtagagaggaggctgccggggcaaggggagaggaggaggtccggcagccggcgtcgcgccggcggaggcaacgccgtggccgtcagcatcctcgttgccgccgcgcgccgtggcacagcgccgcttggcggtcgcggggggagcaaggcaacggggagaagagcaaggcggcggcgggaggagcaaggcggcggggaggagagcaaggtggctgggagggggggggggg

SEQ ID NO: 46332 - DNA, 1156 bp, Oryza sativa
gtgtgtccaattccaacataagccacccattccatagtgtccaaatgatatgagaattcccaaagtctaaagttataaaaccacctaatgttgcctaattaatcagcgaagcatctacctaaattcatactagtggaaccatgaatagagtacccactagttggggttttatttatcctagggtgaacaaggtaataataacaataacaacaataataaggtcataacaaaggtaaataggcatggctaaataaaacagtgataacgcgggaatttaaataaagcgataatgcaataatttaaatcaaaataattttataaactgggattcaatatgttcaaggatgatgtgacttgccttgctcgctttcccaaacgtcggcttcaacttccacgaagagcggatcttccgaagctgcagcgtctacacgaccgacggaaaagaaaaggcttttactctaataaactccatataacaagcagaaacaaagcacaaaaatgggttcttgacttcttaaggaaaaattagagacttgaacggtccaattccgagttcaaatggtcaagttatggccatttgaaggttatatgctctttaaatgaatatttgcgaatttcttcatttaaattttaatttaaaatcggatttattgcgtcagccgaggggagaggagcgcgcggaccgggtccacaggagtggggcccacgcggcagcctctcggtccacggtggaccgggagcacgcggcttacgccggccggcgccgtgggtcccacgcgtcagccgcacctaagggcgcgggcggctgacagccgggccccacacggcagccgcggggcacgcccgaaggcggccacgccggcacagccgacgggaggcgacgcgcccgcgccccgatggtcgccgccggcgaccaccggcgcggcggagcggcgcccgagagaggggagggaagggggaaacgaatcggcggtccacagctcaccccgggtcgacggcgacgacgggaacggcgaccggagcggaggaaggcggcggcgcggctcgggtcgacggggacggcggcgttccggcggtcggcgggcgaaacggaggggtggacgaggtcggcgaggacgcggcggagccgaaggagacggcgccgaagcgggagaag

SEQ ID NO: 46333 - DNA, 530 bp, Oryza sativa
aggactagaatgtaaaatatagtataaatatagatggaatagagcaagggatggatgtagaagcatcgtgagaaattccccaaaatctccagtctccttctctcttatctcctagccttggtgctaatcgccccccaaaagcctacattaatctctaaaattaggtttaaaaaaaaacattaatctctaaaataatcaacattttatctgttacttttcatgtttattgattaaaattgaacctagtttatgtctagaacttgtgtttgaagtttcacaccaaacatatttgaattggcgaagttctaaagtttttgattaaatgcatcgtgttgttttaactgttcggcactgttgcgctacactgttcggcattgtagcatatggtttctttactgtgctaagccttttgctataaggggggttactttagtgtttatttagtaatattagaataactgtaatattagttgtttttatttccgctgttggttgcttcggtggtttgaaaaagttaccacgattactca

SEQ ID NO: 46334 - DNA, 528 bp, Oryza sativa
ctcatactcctcaccgcgatataggatacaatcgttcggacatctgaaaaggttatttcttttcctgtttgaaaaatatgcacaaacgctcattatgctcatcactgcatacatgcaagttatgactttattgtatcttcttattcctgtagattggaggcaggttgggttacaacatccgtggaattgtacaacaacaatcaaagcaatttgttgactatcagcatactgtccgggtgagtgataaaatttgttgactatcagcatttgttgaattctacaatggtaaacaacttgcatgagtttactgatgatgaaaaattaaaaggccattcttcaaatgtttgaggatgattttgtatctcgctgacaagatgagggaccttcggtgtactttttccacagaagaatgtgtgtgttgtcgagttgttgggcctgcgagcctagtgcggagtgggcctgaaagccaaagggaagcctgtagatgccatcgaaaatggaaacgaaaactttgctactcttattcgg

SEQ ID NO: 46335 - DNA, 874 bp, Oryza sativa
taagtcatgtatgctaagtgtaaatgtcgtacattagaaccctacacaccctaacgtgctaagtctaattacaaatcgtgatataagctaagtctaggtgacatatattatacaaccctagctagtaaataattatatactaagtctaattacaaataaaataatcttatattaaaactcaaataatattacatgctaagactaaaatagtcatgtatatgctaagtgtttcgtgcgtatatgctaagtcacgagacatttatgttttaacaatctaagtcatgtatgctaagtgtaaatgtcgtacattagaaccctacacaaccttacgtgctaagtctaattacaaatcgtgatataagctaagtctaggtgacgtatattatacaaccctagctagtaaataattatatactaagtctaattacaaataaaataatcttatattaaaactcaaataatattacatgctaagactaaaatagtcatgtatatgctaagtgtttcgtgcgtatatgctaagtcacgagacatttatgttttaacaatctaagtcatgtatgctaagtgtaaatgtcgtacattagaaccctacacaaccttacgtgctaagtctaattacaaatcgtgatataagctaagtctaggtgacgtatattatacaaccctagctagtaaataattatatactaaatctaattacaaataaaataatcttatattaaaactcaaataatattacatgctaagactaaaatagtcatgtatatgctaagtgtttcgtgcgtatatgctaagtcacgacacatttatgttttaccagtgtaagtcatgtatgctaagtgtaaatgtcgtacattagaaccgtacacaa

SEQ ID NO: 46336 - DNA, 1326 bp, Oryza sativa
  unsure (1)..(1326): unsure at all n locations
tggtgccanattgaanacatgttgcaangccncctttgtatggacnnnnnnnnnnnnnnnnnnnnnnnnnnnnnnnnnnnnnnnnnnnnnnnnnnnnnnnnnnnnnnnncaattattattaagagtattttaaatcgtatataagtgtgccacatcatcacccactagtaattattatctagagtattttaaatatcatgcaaacataacatatcattcataattttattggatttttagagctcaatatgtaaataatgtcaaatcattatcttacattatttaaacatatacatctaccatttctataatatataacatgcattcattcacatatcccgtagcaaagagcagagtatcaactagttattagacattagtatgccctaagctcttaacaagttagcatagctttggtccatgtggcataggtcgttgctttaactcagtatccgaataagtattccagtcgaatagtatttgcatctgtcttagtacgtattcgctgccgatgatatttgtgtttgtatttatacccgatactatccgtatccgtcctaattttaattacggttagaatatgggaagggtaaaatccaacccaacccaatttctcccgtcatcacgagggctgaatcctcaccctcgcgacacgactatggcgattactacggaaacagtttcgacaaaaggctatgtggcccacctctatccaggtgtgtgcgcgtggaaaatgaccatttttgtgtatggggcacttagccgagtggggaaatagattattcccgacagaccgcttaagatatctgattgcgataataaagtttgcaggcttctacgttaagcggtccacctaggatgatgtttttcccatgcggccatgccaaattagggcctcctgagaagatgcttcttagatatatatatttctcagctatttttaatcaaaatatttttttaactgaaatttcccagttttatattggcacaattctgtagtattactatagactctagtacttgtcaatatataaatattgaatatgtacaagacatataaatattgttttgtgaacttgattacaaattatcattctcagaccgcgtaatagtaaagtttcattacatgtgttttctttcccactatataaacagaagataaactttttactcatacgtgcacaaatttatatcagtttgtcctaagtttattcaatttatgatatatatcgagttcttttaattaatgtttttaataannnnnnnnnnnnnnnnnnnnnnnnnnnnnnnnnnnnnnnnnnnnngtgttcaattcatggggggggc

SEQ ID NO: 46337 - DNA, 1103 bp, Oryza sativa
  unsure (1)..(1103): unsure at all n locations
tgatcagattgaaaccttttgcagccncctgtatgacnnnnnnnnnnnnnnnnnnnnnnnnnnnnnnnnnnnnnnnnnnnnnnnnnnnnnnnnnnnnnnncttaaaatagttgtgttcttgaggccagttgagacgaacagaggatacagaaacaatctgggtcaaacacaagactgctatttttttttatttgtaggaattctacagcagaatggtttgaagttgaatcctaagataaaaccgacctccccagatgtaaccagtgttaccgggacacgcgagtccaaaaaaattttccatgtcgacacgcatccccgtgtcagctcgtgtctgacacggttcgacacgcatcagacactactagcggtgtctctctcagctgccataggcgagcagtgccggtggttgtctggcagacctgtgggagaggatgggaaaaagaaggcagaagagagagagagaatgggatgggagagctcgatgggaaaagtagctgcgtgcgtgcatctacaatgcacaggcatactagtagtactccagagacaactagtagtactcatgagtagtattggtagtggcatgtggatggcaggatagcagtgggtttttttgtgcacaactgcacaagggatcctctacacatgaaattcacttattttggctgtcagtctttgtcctaactaataagaagataggatcttctgtgcagaataatgtgtgacaccatatgttttagtgttttactgactaagagtatgttttatttgatgatatatataatattttcactaaaaatcatatttatggagcgagtccccgaatcctattttttcttagcttgccgagtcggactccgacacccgtgtcagtgtcccggtaacactggataagtaattagcataatctatttgcagtaacctagtcgaatttatgaattgcttgtgaactactacatgagtataatataaaaattagtagagcgaatgaaatatgaccatgtatgtgcctataatcgccatggtgattaaggaataataaaacattcaagccatccatgggcgatagtctactacagttgtacacagccgcatcagtaatcaaa

SEQ ID NO: 46338 - DNA, 621 bp, Oryza sativa
  unsure (1)..(621): unsure at all n locations
gccgccgnngattgaagaccctttgcnangcanccatggatgncnnnnnnnnnnnnnnnnnnnnnnnnnnnnnnnnnnnnnnnnnnnnnnnnnnnnnnnnnnnnnnnntttgccgttttgcgctgaaaaacggtcgtgcttctccacgaaagcgagaagattatcctttgctagtttgctcggaaactagtcgttcgtcgtcacgtaagtacgatatttatcctctttgctaatttgcttgtaaattagtcatgtgattccgcgaaagtgaattaatctcgaaatcggtttcactagccgattttgatctatcgattttggcgactctattgtttacaccgcaagtcgttaggtgatcttgtgttggccatgaaaaagcgtcaacaccgccatcgcgtcgccgtgtccaacacctccgcctccctctaccgccgccagtccaccgttcgccgcctccgtttcagaccaccgccgtcgccgtctccatctccgctcagtgtccgcctcgcgccactgccgcttccgctgttaccggccacctcccgtgcggcacgccgttaccgtcgctgagcgcacaacctccgctgctgtcgaccgccttatcgggctgccggcgttcgg

SEQ ID NO: 46339 - DNA, 519 bp, Oryza sativa
atctttcatggaaattctgtttttactaatgtcaatgacgactagttcttctgttggaaatgtacatgttgccttctcgtatctttgagaacatactgatacttgaatcatcatacttgcatgtagcagctgttatatgttactccctctgtttcataatgtaagtcattctaacatttcccatattcatgttgatgttaatgaatctagacaatatgaatgtgaaaaatgctaaaataacttacattgtgaaacagagaaagtatgtatattatgtaaaagtaagtatatactgctactaattgaaaaagacagtagatacttgtacgaactaattaaaatgagtacatatactatctactaacttaaaaaataagtatgtactactaacgaaaaatcagtatatactactaactaaaaaagataagataagtatgtagtactagctaaaattcagtatgtactactatctaaaaaaatatatactgctattgactgaatataagtatataccactcc

SEQ ID NO: 46340 - DNA, 615 bp, Oryza sativa
  unsure (1)..(615): unsure at all n locations
cccgctgcnnnattgaanacactttgatanacnnnnnnnnnnnnnnnnnnnnnnnnnnnnnnnnnnnnnnnnnnnnnnnnnnnnnnnnnnnnnnnttagaacatgatggttttccctttatcttgctcttggtcatttttggtgcaactataggtgtttcctcccccagacatggcaaggctacattcatgttagatggctcaggttggttggtatatcatggaagtacacctgcaaaatgacaacaaaaagcaaccttaactaaattttccatgatatacatacacaatccagttgctttttgactggcagaaattaaatattatctactgaattttcccttaattgccctaaatactaacatcagagaacaaactaaattgttgctttgcagtaatagaatttgaattacctcatctcttcatagttcctcctgaacacaatcgctaagaaactcgaagagacaagcttttcattctcaatttaatataacagaaagaggaccaagaaccgtaattgctatatctagctagatgcacccaacaaaatttgtcacacaaaacaaatctgaaaactacaatcatcattagtcactggatggtgaaaaagtacttt

SEQ ID NO: 46341 - DNA, 613 bp, Oryza sativa
  unsure (1)..(613): unsure at all n locations
cccggtcnnntttgataactcttgatatgcnnnnnnnnnnnnnnnnnnnnnnnnnnnnnnnnnnnnnnnnnnnnnnnnnnnnnnnnnnnnnnnaaattataggagtataaaaatattctttttggtgcttcagtcacgcgttacgacttacaaaagtgacagccaaaaacatctcagctaatcaagaataaatattaactagggggagttgtaatattgtaaaaatcaatagcctcattcttcagcaatcatgctatccttaaggcattataattgcagagaaaaaaaattagtcctttcacggcatagtgcaagaattctcatttcttattgccataaatgggatatcaaaagcatctttatttgatggtaaaatttgctccatgacacttaaaatttatgtaatttgctagtagacatcgcaaaaacgtgtcataaataaaagacatcctaaaaaaattggtaatttgttgtggattttttcggctcgtgagagaaattatttaaaaagacgagaatgtccctaaggtcaaaagcttttgagctaatactagagtgaagatggaattcaatgtatcctagtgatgtatttgaggtgatggtaaatttataa

SEQ ID NO: 46342 - DNA, 573 bp, Oryza sativa
cgttgaacccctttgaagacactatagctgctgctcagttattgctcggaagtatttggttcaaggtgtgccccaacctacttttacatccacattgtaacattgttactcaatgggaagtcttgggcccatcgatgccacaggtgtaattagctatcctgtgaaaaggtgtattggatcatgcttgaagaatgatgactataagaacttattgtaactaggtcaatccgaaacactttattaggacaattatagaatactggatctgccactatattttctattaatttagaatttgatacaaaattagttaacggtaattatgcatacaacttgcattgtttctttgatgttccatttgggatgcaaccatcaacttcctctgttgttacttagaattccaactataaattcttgcgaaaatgctagtgattgtatgacatgccttcaatatggccaatgctttcttgtaaaaaaatgtatatggccaatgctccaaatttagtatgaccttactatggaaggtaatgtaaactaaacttaggttaatttcatcctcaaccacacattcaa

SEQ ID NO: 46343 - DNA, 610 bp, Oryza sativa
  unsure (1)..(610): unsure at all n locations
cggtgnnntttaancccctttgatanacnnnnnnnnnnnnnnnnnnnnnnnnnnnnnnnnnnnnnnnnnnnnnnnnnnnnnnnnnnnnnnncataatgtatgcaaaattgttagatgttccaagcatgctttcttaaccaactaattagtgcaccggtggtgtaggcgccttcccaatggtgcatgatttagtgaaagcaagggataaccactttgttagagtcaatttcgactcgtgatttgtcctctatagtcgtcgtttggaactaccccatctataccagagatgcctgtccaccgttatgacaggttagttgtagcaactgcacatttgttgtgatatttcattactcatttactctagcaatcatgtccagggtttacaattttgatgaaccaaagtttgtaatataggaaaatttaaggttaatgattctttgagttgtggtaaaatttctccccttttacagggacctaagcaagaataacttcatgagctcaccagcaccgggtgatgggtttccaatagtaacatccctaaccaccttgtgagttgtctgatgacataaaaactggatatcaaatggacttagtaaggtacatcacaatt

SEQ ID NO: 46344 - DNA, 526 bp, Oryza sativa
aactactccattcgttttcatattgtaagtcgttttgaattttttaatgctaaacttcttgaaattagtttcattgaatataaattaattatattttataatttccttttttaaattgaaaatattgccatagttttttataaatctggtcggagcttaaaaaaaggttcacttagaaaaaagttaaagcgacttataatataaaatagaggtagtatatcacacccatacagcaagaaaaagttaataagtgaaaaaatgataaatggattaaataatggagaaacaaaagacgttcattaggaatcttgtcctgctctaataaatttgtacattaaaatatcaataaattaatatttttaaatgaaaagtcggtagatgaaatgaactttacgaagtggaaacaaaacgtgcaactaaaaatggctgaaaatgaaaaggaaataccaataatgaagaattgaaaacaggttatttgcagcacagaatctggatcgaatgggaccactgacaatgagaaaaaaaa

SEQ ID NO: 46345 - DNA, 603 bp, Oryza sativa
  unsure (1)..(603): unsure at all n locations
ccgctcnnatgaaacacttgctnnnnnnnnnnnnnnnnnnnnnnnnnnnnnnnnnnnnnnnnnnnnnnnnnnnnnatcccctcgtcccctcatggtagtcactcccgtggaggagcagccacctcccgcggccgacgcatccacattggaagaggctgagcacgccgcggccgcagccaccgagggcgagggcgagcacaagagtgttatgcctgtgccggatgagctactggcaacgaccgaaggaggtgtgccgaactgaagacgtactatgaaaagacgttttcgagtggctatagcgtattgagtctatgcactgatttgtgacactggcttgtggggccaagggttgttgagtcgggtgtgtgttgtataaatcgccagcctgtaggtatgtgacatctatcgaaaaggagaaagaaaaatactacccgtcctctgcttctctctttctttctattgctctgttttcttcttcctccctactactcggttcctatcagatctccggtgagcatcgccaccggtgattggggtcgtaacaattttggtatcagtcacttacggtcctgcttgctccctcgcactctcttgacctttgaa

SEQ ID NO: 46346 - DNA, 572 bp, Oryza sativa
  unsure (1)..(572): unsure at all n locations
cgatgcnnnttgnnnnnnnnnnnnnnnnnnnnnnnnnnnnnnnnnnnnnnnnnnnnnnnnnnnnnnnnnnnnnnnnnnnnntgaaacatatacctcatttctttttaactttagaccttacaaccctaatccacactggattatttaattgaaatcgatccgcactgagtcaactcactcccgttctaaatatgtatccttgagatataatagggttgtttgtttttgttgtgacttataacttaattttgaatttaaagagggggggtgtgggtttgggttgtttccattattttttatttgcctttgggccgaagagtaggagtataaaaaattgtactctcagaacttgtttttcgtatatgtctatggtttataagtcactgttcaaaaaattgctttccgtgaaagcctgttatacaatgtcatgaaaccactaagaaaagtatggcatttctataatccaaatgggaatttcatactctccattgtaccttttctcaacaatcaacagccatttttcaatacattcgtcacaaccatacgcggccattcgctgaaccacacaagag

SEQ ID NO: 46347 - DNA, 604 bp, Oryza sativa
  unsure (1)..(604): unsure at all n locations
gcgcgcgttnnnnattagatacactnnnnnnnnnnnnnnnnnnnnnnnnnnnnnnnnnnnnnnnnnnnnnnnnnnnnnnnnnnnnnntgcgataccatggttaaacatatgattagaggccataattatgtgcctgagcatgataacaagtaatcttaaacacttgcctactcactgttactcatgctgcacctttcactaagaacagactttaaagaagaagctattacactcgggttcggcctaaatggnntttttttgggntttttttttttttttttcccccttttttgggagctcactctttactttcatgcacaacagcttaccttgcacattgaccacacattgacgagctcaactctcctatatagctctgcatggaaagcgcatgctactctttgtaggctgactaantcttgatctgtgcacagattttgaaagatgatgaacctcatgcgcatgcatgattgatatatgaagaacaatacctgctgcatgctgagattattatcaccgggttagaacttccagctgattgactaatcaagtgagatggtatgtactcactgtatttgtaagtattgcacgacagtgactactc

SEQ ID NO: 46348 - DNA, 511 bp, Oryza sativa
  unsure (1)..(511): unsure at all n locations
acttccattttcaccgctcaagccacgcaatcttcttcaagaagctccgacgatttctccagtgttccattgatctactacgaattactttgtaccgttcaattgttttctccttttttttaatgacaggtaatttgtggaagggttttttctaataagaaaaaaggggggggaaaaaaaattttaaaaagggcgcgcctacaagaaactttggtaagtttgcggtttcatgtgcaaggcaagaaattgngcnannnnggagcttnaaaagggtatgatggcatggnnncaaatatgtnggattttgtattgggtgcttttngctccccattttacgaggtatatgtgctaaaatggcgaatatgtgatattctggggtagcctggcatatatttgtcatgattctgaccataagagggcgttgctagtaaatcctgaggctagctaatattctgaattagtggattgattctaagtccaccttagcactgatggggcataacaaaatcca

SEQ ID NO: 46349 - DNA, 586 bp, Oryza sativa
  unsure (1)..(586): unsure at all n locations
ccggggntgnnaagtaggcccacactttgcannaangngnngggagntntnnggatccaagnttatngatttngaacgaatacgagtactgttcttttggatgtcctccttgaacctaatcttccaaggaatcacccctttcgctcgtgttcatcctggatgctctggagtctgcagggcgagtgacagctcgtccctctatctgtccggtcgtgaaacagtggtccccctttaaaaaaggggaaaaaaagggtaaaagggggggggccccccttttcccactgngtgtggtagtcaacgcgcagtctcttgtatctgatcgccnaaaaccannnnnncnnnnnttnnnnnnnccgcgccgnaagagcatagnnncatanntttttttggatctcctagggcgttctggatctccttatggnnnnntnaannaagctngncttcatntnctnccacttnggnntnnnaacnctatanccgcctgaccccaaatggtgatggnacttcttcttggcgggattttctttgtttctttccattatcgcctggcccttgtaacctgtcttatatgcaacgaactcgttcc

SEQ ID NO: 46350 - DNA, 602 bp, Oryza sativa
  unsure (1)..(602): unsure at all n locations
atttgannnnnnnnnnnnnnnnnnnnnnnnnnnnnnnnnnnnnnnnnnnnnnnnnnntaaatattgggcataattaagcagaaagtcgtgacacttaattagcgactttatagcaaagttgtcacatggtaaatttcgaacttcagttcctgtttgttctttctcaccgaaagagatcaagttgttccctctataaagaaagggccagtaggcgccactcgtgcagaacgtgttgatttgtttttgcatatttgcatatactatattgtttgaaaggcatgtttatatatattttgtctagtttcgtgcatattggcgaccttcagtcccactatctggtcaccccaaccaaatctggccccacttacataatcagtatggttgagctggctgtttccggttgggtcaattaagatgggacagcatctatatataggatgattggatttgtagtttaattaaatctccaaatagcaaaagtggatgctccacaattattggggaagatataatggtcaaataattgtgataaaatattatatcaataaaataaattgaaaaccctgtataatgtgtcacaggaaattaattagctttggtta

SEQ ID NO: 46351 - DNA, 977 bp, Oryza sativa
  unsure (1)..(977): unsure at all n locations
tgttagataattctaaagatatatcataaaaaacaatcttacatgggagcatcgttctggaaaaggaggcaaaaaatcatagaggataataatggaattgcttatagttctcagtgactcatatatatttgaaccaaatatattatgtgtacgtggttaaagcatgtggttacaaaaaagaaacaaaatatggtgataccaagtaaaattttattcaatatatatactatttggcagtgacaactgacaagtaatttgagataacattttgttgctaatttatatatatatgtttacattttttttgaaacaacatatgtctaaatttaattaaatccacttttataaatacattaattaaaatatacatgagcattgtagcatggttgattttctttctcaaaatacatattttgagtgaccaagcatttgagaaatcaaatactctctccattttttattataagtcgttttgacttttttcttaatcaaactttgttaagtttgaccaagtttataaagaaatatatcaaccattccaacataaacatattcaaaatatattaaatgttagttctgatgaaactaatttggtattgtagatattactacaatttcccacaaatttggacaaagttaaataaatttgactaagaaaaaaaatcaaaacaacacaatatgatatggatggagtacttagtgttctcttgtaattctacaatttacatgaacaaagaaccatatcatttttttgcgcacacaaattgtaatagatcttttttatgccttacaggatgaccgcagagtgatagagactaaacaatgatgcactcaaggactaattaatttttttacaacgatacactcaaggactaattaattttttttacaatgacacaatgtgcaattgtnnnnnnnnnnnnnnnnnnnnnnnnnnnnnnnnnnnnnnnnnnnnnngatttcaatggggggggggg

SEQ ID NO: 46352 - DNA, 560 bp, Oryza sativa
tgcgtctaggaaaatcgcgattttcttgtgcgggtggcgcaaccgcacgcgaaaatccgattttcgcgtgcggctgcttatgccgcccacacgggaaaataaaaatccaaaaaaaaaataaattttcaaaaaacacaaaccctaaccctagatccggatccggcaccccaccgccgcgctggccaccaccaccgccggatccgggcgtggggagggcggcgccgctccctgccgtcgcctcgccgtcgtcgacggtgttggccgcgcggacgctgccggctgccgcctcctcctgctctcggcacacgtcgtcggcccgctcctagccgctgcctcgccgtcgtcgtcgtcgtcatcatcggccgcgcgcacgctgctcccagccgtcgtgagcccgccgtgcccacccgccgttgtcacaagacctacgcgcccaccagccgctgtcgacccctccgtcgagagccgcccggaggagaggaggcgtcggcgccatgcacagcatgaggagaaagtgagagagagagagaggaaaatgaaaggagaggaaagtgagaaaa

SEQ ID NO: 46353 - DNA, 904 bp, Oryza sativa
  unsure (1)..(904): unsure at all n locations
agagagagagagaggaaaatgagagagagggaaagtgagaaattagggggagagagagagaanagaagggggcgggggaagagagaanaaaagtccaaattttttttaatagaatgcgaggaaagtgctattttcctgcgcttttagattagaaggctcgcacgtgaaaatagagttatttttgcgtgcgggcctgttaagtgacccgcacacgaaaattgatttttgtgtgcgggtgatgacccggcttcgctccccctatttttccgtgcagtccaacttacggaccacatggaaataaaatggggtgacgtccaggaaaatcaatcatgtagtagtgaatgattttagttcttcatgtgaaagctgacatgaagcatttctgtcttgagttggagtcaccggtttagttcagttgggtgatgaaatttgctgatggagatggtgaaacaaattaaaacattcggtgttccatgttggaattgatacagccagttagttaattcattgattgaagaatgcgtttgctgtttctcctgattggattaaactggtgacattagtaccttgtcattgttatgggtttcctgtcctatgtttatacattttttttcagcttcttgatgtaatggaggtggccactactttatattagtcttttcatttcctttgtgtgattgctggggccatattagcattcttttctaaagcaaatgcgcatttccacttcgtgcatgttagtgctgatggcctacatcctacctccagtctgcccaatttttgttcttgacaggttgaaaaaggtggcactgttttatgcaaccagtgacaatgcaataggggatagtaggacttcagccttatctgtatgatgaagttttgttttagacaaagcctgtatgat

SEQ ID NO: 46354 - DNA, 628 bp, Oryza sativa
  unsure (1)..(628): unsure at all n locations
attgaaatcganatcnnnnnnnnnnnnnnnnnnnnnnnnnnnnnnnnnnnnnnnnnnnnnnnaatgatatttattgagtaatccatttcctcagttcccacagtaaatttccttgtgtcaaacatgtagaatcaagcaagcagcaagtgaaaaatgccgaaggcctgagcttattggacatggactcaaatcattcataaaactaattgaatcaagttacatgaagataaggtggaggggtatgacgattgctatcaaaatctgaaccagagaatccagcattaggttactttcaacctaggctgatgcacaactggttcatcagtcattgcaccagcgtcctatatcctccacccgaagagttgcaagcaacaaactaatatatagaggagcagtcagtagaaagttacatctaaagaacatgaaaagatacatgctcatgcaagtcataagttacgtctaaagaacatgaaaagatacatgctcatgcaagtcatactgcctcgacgttagctcattcaacatcatacttcacaacataccggtatctactatttgtcttcacgctatatgatcttatctcctaattttctcatatgaatcaagcatcccaaatccatcaggtatt

SEQ ID NO: 46355 - DNA, 632 bp, Oryza sativa
  unsure (1)..(632): unsure at all n locations
ccccccccccccttgnnnnnnnnnnnnnnnnnnnnnnnnnnnnnnnnnnnnnnnnnnnnnnnncgatgaattgaagctttcagacttaatatcggttgagcagcaagaaggagaattggctatggaatatattcaaagatttcgtaatgtccgcagccgatgttatggtttgagcctaagtgatgagaaactagcagatctcggattccaaggattatcagcatctataagagagattcttttgccacaagtttggcagcctggctcatctaatgcaaaaagtcctagctcatgaaagccgattgcaagaagcaaaggaagatcagttttggagttatcaagacaagaaataagataattttgaagcatgagttttcatactccaaaactggggggcatgtgttaacgccaaaatttggtatgccccaaggagaattatcgcatcgtaaatagtcggattcgtactatattcggttaaagaaattaatctatcgaaggaagcttatccagaagtgacagagtttaaggaggatgcggcatgacaagttatctattaattaagaataatttgttagtttccttttatctttaggaaagtgtgtttagtgtcctataaagttatgttttccttt

SEQ ID NO: 46356 - DNA, 841 bp, Oryza sativa
  unsure (1)..(841): unsure at all n locations
gctaggtctaattacaaatctaataatcttatactaaaactcaaatagtgatatatgctaagtctagatgacgtatattataggaccctagctagtcaataattatatactaagtctaattacaaatataataatcttatatcaaaactcaaataattttatatgctaagactaaaatagtcatgtatgctaagtgtaactgtcgtatattagaaccctacacaatcttacatgctaagtctaattacaaatctaataatcttatactaaaactcaaatagtgatatatgctaagtctaggtgacgtatattataggaccctagctagtcaataattatatactaagtctaattacaaatataataatcttatattaaaactcaaataatcttatatgctaagactaaaatagtcatgtatgctaagtgtaactgtcgtatattagaaccctacacaatcttacatgctaagtctaattacaaatctaataatcttatactaaaactcaaatagtgatatatgctaagtctaggtgacatatattataggaccctagctagtcaataattatatactaagtctaattacaaatataataatcttgtattaaaacttaaataatcttatactaaaactcaaatagtcatgtatgctaagtgtaactgtcgtatattagaccactacacaatcttatatgctaagtctaattacaaatctaataatcttaattgcattacaaatataacattcatatannnnnnnnnnnnnnnnnnnnnnnnnnnnnnnnnnnnnnnnnnnnnnnnnnnnnnnnnnnnnnnnnnnnncattcaacaaactctg

SEQ ID NO: 46357 - DNA, 650 bp, Oryza sativa
atcgattttgtgcaagttgagtttagaaaaaagttagtattttgagtttagtcgagatttgtgagaggagtgttgttgttgcactttgtaaacatgagtagaagtaagttcaatctacttttgaaatatcttcaatttgtatatgcttgggttcggcggtcacaccgacagcatatgtaatgctgttgtgaactaatgttaagtcaagttggagaggacttgtgctcagatattgtatcttgtttgattcatatgtaggtgtctcttaatgcctggggagagtgttactagtgattgatcgggagtcaacttggaagaagatgatgtccagacgatcaggatatcatggttggtgaagattccatatggtataccatgaagatattgtgtgcgtatggatgcggagtccaaatttggtatgattgtagtttataaagtttgtttattgtatgggaaggtttcctaggagattaggacttcttgtacaagttgggtttgtggttttagactgcttacttcgagtataaatagagagggggttgagacttcccggcatcgattttgtgcaagttgagtttagaaaaaagttagtattttgagtttagtcgagatttgtgagaggagtgttgttgttgcacttttgtaacaat

SEQ ID NO: 46358 - DNA, 820 bp, Oryza sativa
  unsure (1)..(820): unsure at all n locations
gggttgtggtgattttgtattatttttgggtgtgtggtggttgtatgaaattatttatttgccttnnncgttgttttaatanctatatttttatatcnnnnncncncnnccncccggtgggtttgatgggatgtcnntgcnacnnncannnnnnnnnnnnnnnnnnncncnccncnnnnaannaaaaaaaacnnccccagggggggggggtgggggggtacntcttttttttttttcccccaaacatctataaattgtgggggtggggggggttgttgtgttgattgttgtgtgtggggtgtgggattagagaattatttgggtggggggggggggaggggaattttgttggggggggggtgggatgtgtattttgttgcgggggggggggagggaggtatgggtgggggggggggggggggggggtatgtgttgggtgggggggggggggggacgatagtttggtgggggggggggggggggatgttatggttgggtggggggggaggggtattatttgtggggggtgggggggggaatattgtaggggggtgggggggggttagaggttatgtgtgggggggggggggggagattttgtgttgggtgggggggggggggggttttatggtggggtggtgggggtggtggttttttgtggggggggggggggggggggtttttatgttggggggggggggggagtaattggggtggggggggggggggggattatgtgttggggggggggtgggggagattttggggggggggggggagcgaatatttttggggtggggggggggggtggaatatttgt

SEQ ID NO: 46359 - DNA, 786 bp, Oryza sativa
  unsure (1)..(786): unsure at all n locations
ggcgaagaaaagatgggggggggggagggaaaaaaaagaaacagggggggggggggcaanaaatcttttctttcccccccccccgcgggatgatgcgacctcgnacnccnnnnnnnnnnnncncnccccccaaacaaaaacaaaanccacgggggggggggggcaactttttggtgggcgagaaaaaaaagggggggggggggggaagaaaagggcgcccgcggggacaaaagaaagaaggcggggggggaggaagaaaaaggggggggggggggagaggaaacggcggggggggggggaagaaaccggggggggggggggaagaaaagagggggggggggggagaaagaggggggcgggggggaggaaaaaaacgacgggcgggggggagaaaaaaagagggggggggggggaaaaaaaaaacggggggggggaaaaaagaggggggggggggggaaaaaaagagaggggggggggaaaaaaaagcggggggggggagagaaaaaaaaggggggggggggggaaaaaaagagggggggggaggagaaaaaagagggggggggggggggaaaaaaaagagaggggggggggggggaaagaaaagggagggggggggggggggaaagaaaaagggcgggggggaggagaagaaaaaagagggggggggggggggggaagagaaaagaaggggggggggggggaaaaaaaaaaaagaagggggggagggaagaacaaaaaaaaccggggggggcggggggggaaaacaaagaacgggggggggggggc

SEQ ID NO: 46360 - DNA, 618 bp, Oryza sativa
tatgccatcactggactcatgatatgaaatgtaatggaacggggatatatgctcttccctctgaacagttcatgatctatatggacagtgtccgacgcggaaaaatggagctctgctgcgatggacctgatcgtactcttacgaggaccaatgactcccatttccatgattgcacacttgaatgtgtagttggcagcactctcgacaagcctatgcgccctgcttgatgcatcatggagaacgaaaaaccactatgtacatgggacctctacctgttaccacatggacttgttgaaaagcactagaaggggttacagcaaggctcagactgtatatatattgtggcgacgtactattgatttgtgtacaactgtccgactcctgatgatcggatcaagaaccgacgtgcacctggctgtgagatgttgctcaagatgactgtgcaaaatgcgaggcgtccatgcgaggcctctgctatctggcgtaaaaacatcatacctggactgacctcactgattaaatcagatcccagagtcgtttgtgtagctaacatggataccacctggacctggaccttaatcgatatctaggaacatttgcgtgattaactctataggt

SEQ ID NO: 46361 - DNA, 696 bp, Oryza sativa
  unsure (1)..(696): unsure at all n locations
cgcgcgattgatatnnnnnnnnnnnnnnnnnnnnnnnnnnnnnnnnnnnnnnnnnnnnnnnnnnnnnnnnnnnnnnnntacgctctaatcgggctcaccgtgcctaatcatttggaaccatcgttgaccctatgccatacctactgtctaggacataaatggacaggcttcgtcagggcaaaatggagctatgctcgcgacctcataacactaactcgtatgagggatacacactccaaacacatgaatacacacttgcacgactatttatcagatttgtggaattcatattcgagccaattgatgcataagtgaatacgagaaacctttaaagtacagtgacatcctcctaatccgacatggaaacggtgacgatactcaattgagtgtcttaagttgcgattgaccttttatcagatcagagtgaccagtgaactgcctacaaccgtaacgcttcctaatagcagttcaatacctttcatgcacgtacctgtaagatgttgctccagtaatcggtgcaaacagggaggcagttaacggatggaatcggcgaactatacgaaacaccttgcgcccgaggacttacacaatcgtgaaaggacagataacacaggcgtatgggtaacagacagaaagagcacatgggcgcttgcggggcaggtttcctatggaactcgcgttgacgcgcgcattatt

SEQ ID NO: 46362 - DNA, 695 bp, Oryza sativa
  unsure (1)..(695): unsure at all n locations
cgcgcgcatnnnnnnnnnnnnnnnnnnnnnnnnnnnnnnnnnnnnnnnnnnnnnnnnnnnnnnnnnnnnnnnnnnnnnntacgatcttatctagctctccgagcctttacatttagttcaatagttgatccaaagccagtgctattttctggagcacaagggtacatgcttcgttgggactagagggatttacgacaggacctctgaacataatcagaatgcgtgtactgcacatttaaagagatcaagacatgggagggccgactctctattagccataggggcactcttacgctgggcccattgagcgctagttcgagatcggaaaccttttaactaacagtcaaaatctgacgactcctgatgtgaaaactgtggcgttacccatctgaatctattaacttgagattcacctttgatcagatcagcgtgtgagatattatgctcatatcggtagcgcttgcacttggtagttgaatacgttcggtgcgtgaactggaaatgtctaacttcataaaggacaattgtcgagtggccaattaaaagctttaacgataaactattcggaaacctagcgctcgagacttaaagtatcttgaatggatatataagcgaagagggtggctttcagagagaagaggcaacatagcggttggcgtggaggggtcagattaagcacgcgttgacgcgcccat

SEQ ID NO: 46363 - DNA, 701 bp, Oryza sativa
  unsure (1)..(701): unsure at all n locations
ccttggggaaacattatccatccctggaagatccgctggttctttgcaaatctgatttccgcacggcaagttaatggtcacggccatcggcatgcatattgccagtcgcatttgtcgggcaggtaacaaacaggtatgttgccaaatacacaacggccttcggtgaaagtgtggccgttcccctaaatgaagctggcaaggtaactttaccgcttggacaggaggcagtccacccaccgagtgtaatgtccgatggcccccccagtcggcaaacaagtctatccaccagacgctacaggctaatatgttgcgtggtgttcagaccgtaaaccactatgtgcgagggtgtagtcacggccatgatgccgccttctttcatagatatgcctacaccatgtttgaagtatgcaacacagggtggcaagcaatatggtatcctgaccagcacattttataaccccggctgcatgttaggccatccacacaccaagcttaatagatgactccatcgagtaccagaaatatgcaatccaaacaaagagatttggcatcccaccctcgacaaggacttttcccagcacaatagaccaaactcgcatgccacataattacgtgtcttcagctcaaaacatnnnnnnnnnnnnnnnnnnnnnnnnnnnnnnnnnnnnnnnnnnnnngcatgcgcctttcaaatgcgcggc

SEQ ID NO: 46364 - DNA, 609 bp, Oryza sativa
atccctgcaaaggagttgtagcatagccactggtggctgctgttgtctatgacgagttaccaatagtcttctggcccagtctccaccatatagaagggaacgaaatgttggatctatgtgatacatattttacatgctcaatagcttgatctacctggattacctagagccctgcagggaaaacctagatttactcaaactcatgcaagcatgctagctgcatgaagtttggactgatgaataaaatgaagtgctggatcaagtgcacctgcctactgttaacttggcatgaaaagaggatacagccttgcttgtggaagagtacatacttataagctgatttttgctcaaatctgacctctattaatgcatggggtatgatggtactatttgcttttaatatcttgctagagtacagatctaataggctaagcctaaaggaagtgtatcacccaagaaatatgtcgctgtttgatgactgaaagttagagcctactatgtaggcaaaaactatgatccagatagaaagaattaaattttgggacaactacacggtgtacacgatttctcgagtcttgaagagcatgccacgtccttaccgatttgacc

SEQ ID NO: 46365 - DNA, 700 bp, Oryza sativa
  unsure (1)..(700): unsure at all n locations
cagcgattgggggccctcataaaacctcaacttatgcaacaccgcctgggtgcttaccgaatccaaactcgcgagttcgaagtccgccaatggaaaanatttgttgcatagtcactctcacagtctgttgtcttggcacagtacccataagtctgttggtccagtcaccaccacatagaagggaaggcaatgttggatccatgtaagacccattttacatgcacactagcttgatgaagctggatacgagtgtgccctacagtaacagcctatattttcgcgaagtcatccaggctagcgccccgcatgagtatggtgtgaagaatagaatgtaggccgtgagcgagtgcacctgcatagttgttatttcgcatcaaaagagaatacagccttgcttgtggtagattagctccataaaagccgagttttgcgcaaatctgtcctctcttaatgcatggggtcagatggtccaatttccgtcaatttttctagagagtccagttttaaaagccagagccccgagcagtgcgagcacccagcacatttgccgagcatgttgccctcgaagtaagcaccccactcggtaatcaaaaccaatggttcacagaataaagactgccgtctggtaccttatacannnnnnnnnnnnnnnnnnnnnnnnnnnnnnnnnnnnnnnnnnnnnnngatttcaatcctcgcg

SEQ ID NO: 46366 - DNA, 697 bp, Oryza sativa
  unsure (1)..(697): unsure at all n locations
cgcgctcatttgaatgnnnnnnnnnnnnnnnnnnnnnnnnnnnnnnnnnnnnnnnnnnnnnnnnnnnnnnnnnnnnnnnnnnnnnnatctctgtacaggagttcttgcatacccaagggtggctgccgttttccacgacgagtgagcaaaatgcctgcgggccactctccactactatgatgggtccgaaatgctggaactattagattctaagcttaaatgctcaaaggatagatgtacgtggatgaccaagagccttcaggagataactgtgtttactgagaactattcaagcatgctagctggacgtatttggcctgattcctaaattgacgtgctacttcaagtgaggctgcatactgataacttgacatggcaagggaagacaacattgcttctggaagatggaatactgttacgctgtctattgctcaaaactgacctatattaattcatggaatagaatgttcatctctgcttttaatttcttgctgagatcttgtataataagccccgcctccagttagggtaagacgcaaggcttatgtggatatttaatgactgaaagctcaggacctactctgtagagatcaaatatgatcctgactggcatggattgaacttttgtgctgctacacggtgtgccgcaattatcgagtgctgagaaacatacccacctcctaacgatttgacatat

SEQ ID NO: 46367 - DNA, 695 bp, Oryza sativa
  unsure (1)..(695): unsure at all n locations
cgcgtgnattatatagatcataatcactnnnnnnnnnnnnnnnnnnnnnnnnnnnnnnnnnnnnnnnnnnnnnnnnnnnnnnnnnnnatcgtttcgagagtaacttttaattccgctaaaagttttgatttgtgagtacctcaaccattcactagtttttgctggcgaacttacagacctgtaatctactgagcggaaccaaggatccttgatcccagggccctggagtgaaatgtccctaacgaatacacaatctcacgatactcgatcgaacagcacacagatgaatatcgcgcaagaacttgcattctactaaccaggatttctctccttatatgagtactaaaaagaagaggccttgaagccaacgattgcgcacccaccaacgaggaattccacaacgagtactaccgaagggcattccaccacggggccatcaagggcagtgccaaatgggactgcggcagaagggagaaccaccaaaacgctaaccacgcagactacggtagagcacgctactggtgaggaagtaagtcgctgtcaagaaccaccatgacgtcaaccaccacatgttgtgctggatcatatcggccgtgatgaaagacctcgccgtcaagaaccaccacggcaccaaccacgaagtgcgtctgtggtgaggaaggaccttgtcgtcaagaatcaccacgacctcaatg

SEQ ID NO: 46368 - DNA, 685 bp, Oryza sativa
  unsure (1)..(685): unsure at all n locations
gacggattgatgacgaatcctatgctnnnnnnnnnnnnnnnnnnnnnnnnnnnnnnnnnnnnnnnnnnnnnnnnnnnnnaaatcgtcgccgcgcgccgttgcttcccgcgcgcacgcgccatggtggccgaccggccagtcgccgccgccgtcagatacaacattaagcaacacttgacagatgatgggatcagccaggcctgggtggccgtttgaaagctgttggccggatgtcaaccttgatcaattcaaaagactgataccttgaatgcacggcgtaactaatttggagccaaattagtcatgggattagctttccggccggatagaacatagtacagaaacgagggtaagcctcactacaccggattaggtcacctgtgatgggtcctaaccatcacctttgaagggccggtttgggcctagtcagagactaatggtcactgttgagtctcagtcacctttgatggtgcccgttagaggtatcaatcacctctgatgggcatgtatttcatgcccgttagaggtatcagtcacctctgatgggcatgtatttccgagcccgtcacaagtgatgatgaccacaccgcagtccgtggttgcaaccccacaggtgacttatctttgaggctgtgacgggtgcattatattcggcctgtcataggtatatcatctttgacggggt

SEQ ID NO: 46369 - DNA, 727 bp, Oryza sativa
  unsure (1)..(727): unsure at all n locations
ggggggggtggggtgtgggtttgtttgtttttggttatttgttttgtttattgggtttgttttattttttnttnnncccnnccaggggatgttggttgtgatggnaacnncnnnncnnnnnnnnnnaaannanaccnanacaaaaaaaaaaaaanaaaaaaggggggggggggnccccacaancaccaacacaaccaaaaaccaaaaggggggggggggaggaggaaggggaggggggaacaggaagggagggggggggagggggagaaggggggggggggcagggggggggggggcggggggagggagggggggggggggggggggaggggaggagggggaagggggaggggaggggggggggggggaggggaggggggggggggggcgcgggggggggggggggggggggggggcgggggaggggagggacgaaggggaggggggagggggggggggaggcgacgggggggggaggggggggggggggggggggggggggggggggggggggggggggggggggggagggggggggggggggggggggggggggggggggggggggggggggggggggggggggggggggggggggggggggggggggggggggggaggggggggggggggggggggggggggaaaaggggggggggggggggggggggggggggggggggggggggggggggggggggggggggggggggggggggggggggga

SEQ ID NO: 46370 - DNA, 730 bp, Oryza sativa
  unsure (1)..(730): unsure at all n locations
cgcgtgcttgttgatacnnnnnnnnnnnnnnnnnnnnnnnnnnnnnnnnnnnnnnnnnnnnnnnnnnnnnnnnnnnnnnnnncctcctagattaagcaatagatctgatcatccttacacatgcgtcagacataccaggattacataaacattacttaatgggaaggatataaaaccaatacgacaccggaaccgtctcaaaaccttaagatcagaccacacgggcttgctgatactcacgtatatcaaacgtttgacttacctgaacctgactaacaaaacttattggtccacgtaaggtcggttactattaaacgagattctccaccaattttgttcaaaatctctctatgcatcttttcaatatcattaataaaagggactatgcttgcgcctatactttgtaagccctccctatttgagttgcttattaagtaccaccacatttgaaaaagcaccaggtgtccgataacaaatacgcgtcatactctcacagaaactagtgggcaagaccgcttattcccttttgatgcttgttacggcctgatgtcgcaaccaacagcatatgactagaaatataggcaatgacctaacgttgttatgaacacattcacaagatagatcttacatactcttggaaataagagatactctatacgctggcaccatcttccgccggtgaagcacaagcttttttggtcccaggaaactattataagggttgtagccc

SEQ ID NO: 46371 - DNA, 694 bp, Oryza sativa
  unsure (1)..(694): unsure at all n locations
gcgggattgaattggcttgatannnnnnnnnnnnnnnnnnnnnnnnnnnnnnnnnnnnnnnnnnnnnnnnnnnnnnnnnnnnnnnnnnccatatgcggatctgagcttacaaccttcggctacagtcgggagtttaaagcacagcgggtttgccgcggctatgaaccctaacctacgttatatgcccgcataatgtgtcaaactcgagccgggaccgaaaggtagccacccatctagaagtattgaactctcttaattgatcaggggatagtcactcctgtaagcatttagatacggcgacctagggaaatgggagacgccctctgagatcgggcccacacagttagccggttagagatgtttacccaaaacctgattagtgaatactccaagttctgatctaccagtgatctctctattcaggcccgagctagacgagctgcaacacaccatagagatgagcctatagcacctgtgggcatatttaccctcagatcttcgtctacaacacctagtgtccccacccgattggattgatcagattcttcataataaggacgatccgtcagcatcgacttcggtccagtcatgaaacgacgatgatatagagttctctgttctagcgtgctggttgaccgaccacaatgaaaacgagatttcggagccgctcactacatcgtaatgcgcacgaagg

SEQ ID NO: 46372 - DNA, 740 bp, Oryza sativa
  unsure (1)..(740): unsure at all n locations
ccgcgtttggatgactnnnnnnnnnnnnnnnnnnnnnnnnnnnnnnnnnnnnnnnnnnnnnnnnnnnnnnnnnnnnnnnnnnnnnnntctgcatattctacgtatgaaacatgtctcaagggtcattccatgcttaaagggaggcccctcaatctatacgcactgccgatagcccactaataatcaagctaatgctgaacgatacatatcctaatcgaactaatctgtacatactttcttctcaacatgatctgactatggctatgcacatttttacccacacaactttactgtctgatgaacttgcaactttatttttccgacatacaagcgtgcagtacgtaaacactgatgtcgtattacacccactacattggatgattatgttgcgaccgtatttagactctcagatgtctttgtaattaccaaatagagtaactcataataatttcatcaacgatcctcttgacataagaacttatgaagcttgcctcagcatctcgtggaataaaagaacgtacatatcatggggaggcactctgatgctgaccggtgagaccgaccggggctagcgattccgatgatgtagcaggcgctactaatctttccagtactaaatgttccagaccgtctgacatgtactatctgtatgagcatccgtgctacttatagggactatcccggatgttagactatatctgttcattaccctttattccccaagtatcaaatgtctttaa

SEQ ID NO: 46373 - DNA, 1280 bp, Oryza sativa
  unsure (1)..(1280): unsure at all n locations
aggggggggtaaaaaaaaggggggagaaaatacggggggggaaaaatcngggggggcgaaaaagaaaaactaaaaaaaaaaaaaaaagggggtgatggactcgataaaaancnnnnnnnnnaaanaaannncgaaaaaaaaaaannnnaaaaaagaggggggggggacgggtttttaaaaaggaggggggaaaaaggggggggggggggaagaaggagggggggccgaagaaaaagggggggggaaagaaaggggggggggaaaaaagagggggggggaaaaaaagagggggggaaaagagaggggggggggaaaaaaaggggggggggggaaaaaaaaggggggggggagagaaaaaaaaacaggggggggggggggagggaaaaggaggggggggggaggggaagaaaaggggagggggggggggagaaaaaaaagagggggggcggggggggagaagaaggggaggggggggggaaaggaaagggggggaggggagagaagggggggaggagggaaaaaggggggggggggggaaaaaagaagggggggggggggggggaagaaaaaaggggggggggggagaaaagagggggggggggggaaaaaaaaagggggggggggggggagaaaagagggggggggggggggaaagaaaggggggggggggggaggaaagaagaaggggggggggggggggaaaaagaaggggggggggggagggaaaaaaaaggggggggggggggggagaaaagggggggggggggaagaaaaagagggggggggggggggaaaaagagaaaggggggggggggggagagagagagaagagaggggggggggggcggggaagaaaagaagggaggggagagggagaggggagaaaaggggagggggcgggagggagagagagaaaagggcggggggggggaggagggagacgagaaaagggaagggggggcgggggcggaaagaaacgaggggagggagggaggggaggaaaaaaagaaggggggggggggggggggaagaacaagggaggggagggaggagaagaaagagagagggggggggggggaggaaaaagggagggagagggggagggagaagaaggagggagggggggggaggaaagaggggagagaggggggggaagagaaaaaaagggaggggggggggaggggaagaaaaagagagggggggggggagaggaaaaaagagggaggggggggaggagggggaaaaaagagaggaggggggagggggggaagaaaaaaggg

SEQ ID NO: 46374 - DNA, 949 bp, Oryza sativa
  unsure (1)..(949): unsure at all n locations
gggaaaaaggggggtggaaaaaagggggggagataaaaaaaagggggggggggnaataaaaaanaagggngattttnaaaaannaaaaaaaaaaaaggganntgatgganctggagataccaaannccaannnnnnnnnnnnnnnnaaaaanaagggaagggnanaannaaaaaaanaaaggggagggggaggaaaaaaaattatttttttaaaaaaaaaaaaaaaaagggggggggggggggggaaaaaagggggggggggggaggagaaaaaagaggggaggggaaaaaaaaagggggagggggaggggagaaaaagagaggaggggggggagaaaggaagaaaaagggggggggaggggaaaagaaagagaggggggggagagaaaaaggaggaggagggggggggaggagaagagggggggggggggggggagagaagagaggggagggggggagaaaagaaaaaggagggggggggggagaagacgatgaggggggggggggggagaaaaaagaagaaggagggggggagggaaggaagaggggagggaggggaaaaaaaagagggggggggagagagaaagagagggggggggggaggaaaaaggaaagggggggggggggggagaagaaaaggggagaggggggaggaaagaaaaaggggggggggggggagggaagaaaagagaggaggggggggagggggagaaaaagaaaggagagggggggaggggaagaaaaaaggaggagggtgggggggaaagagaagaagagggggagaggggggaaggacaaaaggaggggggggggggggaggagaaaaaaaaagaggaggggggggggaaagaaaggaaaggaggggcgggggagaaacgaaataaaaagagaagggagggagagagagagaaagaacgaggggagagggggggggaaggaaagaaagggg

SEQ ID NO: 46375 - DNA, 704 bp, Oryza sativa
  unsure (1)..(704): unsure at all n locations
gactggnatttgaatggcgattcannnnnnnnnnnnnnnnnnnnnnnnnnnnnnnnnnnnnnnnnnnnnntgtataatgcgccactcggcaagctctattctgtgaactattgattttgatagcgcatagacttgcctcatggggaaataacgagatcgggcccatgtgctggcagctcaccctgctcggggctctgtcctatgggactagactctatacatacaactgaccgacacttgcccgaacgaccccatgcattaggtcactattgtatggcaacaagccgggccttcattgacataatctaccctaaaaaaggctgtactcacttttgtgcgaaaataactactatgaagatgcaggtgctcagtctctaccttgtatacttagaccatgctcatgcggggctctagacaggagtgttgggctgacaataaggctattacagtagggcacaatttaaaccagctttatcaagcttgtcctcatgtaagatgagtctaacatgggtacaacaatgccttgcattctatctgatggtgactggaccaatagaattatggtgacgctgactaagaacacaggagtgggagagtgactaagcaacaaatctgattcatctgcggacttgctagtagctagtatgtattcagtacagcaactaggacgtggtttcataagttgagtttatatgattgcaccc

SEQ ID NO: 46376 - DNA, 698 bp, Oryza sativa
  unsure (1)..(698): unsure at all n locations
cgcgtggntttgaattgcnatacannnnnnnnnnnnnnnnnnnnnnnnnnnnnnnnnnnnnnnnnnnnnacccctttacctgaaggaacgttattatgttgccagcaaggtttttcttttgtgctgggaatgggcctagccggggcgggcatgccaaatctctttgctaggattgcatatatatggtgcgcgaccaagatatttataaagctcggtgtctgaatgacctaaaaggcagcctgggttataaaatgtgctggtctggatgccttattgattaccacccatgtttgcttacttcaaagaaggagaaagcatattgatgaaagaaggcggcatcatggccgtgactgccccgtggcaaatggaggcatacggtcggaccaccacgcaacatattgaaccgacgcgtcaggtggatagacttgtgcgcacgaaggggtgggacttctgacgatacattcggtggctggactgcctccgtttcaagggggatagctcccctggcatctttatctacgaggccgcccatacctccactggaagggattgagcgtgtagccactattctgtttggtaacccgccacttcttgcaacgggcaattgctatcccatgtgcataacattttacttgggggcagaaaatcagctttcaactgaatccgaggagctaccaatgaagaatatatggtccaca

SEQ ID NO: 46377 - DNA, 655 bp, Oryza sativa
  unsure (1)..(655): unsure at all n locations
gctggcncnnnattggttagcgtcgcgagcaccccgcnnnagaatagaggaattcggcaccccaagaggggaaaacgagaaagaaagaagaggaaaatgtgacattgacatgtgggtcccatatgggtgagtcagccggttggaccgagtcaaagtgccacgtcagcgaaaccgccctccaaaaccgttgagggagccaaattataccggttttaatagttgagggagtcattctacccggtgttctggttaaagggtatgaattagattcggcgtactttgaaggagtcaaactggactttttcctttagttgatagacgtgggctggtgacctcttctttttcgtggtgagtgggtcgcgatggcctcgcagcgacgcggcccacgtacgccactttgactcggcttcggtgtgccggcttgagactttggcttgacgacgtacgtccgtcgcctacgcggcgggatattccgccgcacctcgccaatatcctcctcctcctccctgcatggagatctccggagcttcggctgttggattcttgcgcacggcaccctgcttttcacggtttttgtgttccatgagtgtacgcagcgccataagacgaaactccagattgtcacagttagctgttgagaatatagaaaaactac

SEQ ID NO: 46378 - DNA, 555 bp, Oryza sativa
  unsure (1)..(555): unsure at all n locations
taagttggcctttaatttgtcgaacaagcggagctttgtctttgccacgtgacacctatcctctatgaaatcaattggctaagctcatgaaagatatgtagtggggggtgagctcaaggaagatggtagcggggtgagctcaagaggatgggaggatggcagtggacatgccaatccactgctgcttgtagctctatgttcactgaccgcaactacgagaatccatccaaaatttgtatgagtgatgcccgatagagacagagttggtttgtttgatagtcataatagccctccagccgtcagctctccaccacctgtgtcatcctcctgccatcgtctctccgccacccatgcgttcccctactctcggctctgtgttgtagtcttcttgacacgtcctcacgtcctcgctcttctccgtttgccactagattgacacaactgcacttctgtactgtgtcatcctcctgctattttctttatctctctcannnnnnnnnnnnnnnnnnnnnnnnnnnnnnnnnnnnnnnnnnnnnnacgatntcaatnntccaa

SEQ ID NO: 46379 - DNA, 1624 bp, Oryza sativa
aaccaatggttgtttttcttccaagcccgaggagaggctctaccgccggcgcgttttccctacagccatgttcccggccggccgcacggtttccggcagcaggcttcggcggtggcgaggcagttgtggcgatgtggggtggcggcacaggcggctagggttttgcccccgagccgtccgtgtgagagcagtgcgagggagacgcgttgtgttttcaatatcttcttggagtactatgtatttactttgatcacaaaaatgatatatctaaatgaatacattttaaaaaatatttttaccttcccttgaagatatattacaatagaacttaaagagtcaaacatatagtgatggaaaaatgaaaccgttgctcgtggctcatatcagatcagatcaacttgaactcgtaattataatggatagagttaagttaggtttttatctcatcaacttataatgagccagctcacgagctactcatttagctcgctactacacaaaatcaccatattaattagtacttaacatttcttgctttattttcttaattatagtggctctctccacctccatgaatctgaacacattccttgctttatttttcctctataatagcctaaaaatgattaggttttatatagttgaattttcaaagtgtcattcaacttatctttagtcctcggtcgtctagtcgacagtttcgagtctctaatagttggtgtgttgacttccgggttgaaatctacaattgtaactatttctttgtgtttagttaccgattcgtaatatttagattgcatttacctacttcttgcagtgttttatcttttgcattgatatgatcattaaccatgtataacggttggtacgacattatttgtggtgtagtgattgcacgatgttatagacttattatggttgataacaactttaccaacatgatattctatcaaagcaagatttaatcccttactataagattgggccacgagagagcgtcatcagtgcttggactcatataccaaacgagttatgtccaaacaaagttgatctataccaaccacttcttgggatgggatccatctgttgatcatttaatagcctgggagcataaccacgataatctaccctcgattaagtcagaagaacatgaattatatccttgcgcgttgcagggacggatctacactgtaatagtcagggtacttaaagtgcttattggtagaagataatatcgtgatttaagtataattataattagtacgttatgacaccagcaaattcactatggcactggagtgtcaattttgtggatcaaccaatggcacattgcacatacgcaccgtgtattgggagaacaatatctccacaacttgtgtcttccgtttaaaaaaaaaactttagtgtgtttgaataattggaaatgaagagtgggattgtgattgaaaaatgaatgaagggttagaattaaatagaagagggattgtttaaagatatcttttggtgcgtgagaaattatttttctatcccattagccaaactgggcctttgtgtctctcttggtccagcagagtagtgcagagttcttggaagcagtggcggaggcagcgtgggggctgggggg

SEQ ID NO: 46380 - DNA, 1095 bp, Oryza sativa
  unsure (1)..(1095): unsure at all n locations
ctggtcnttnnttcggaaaacggtgcgactncnnnnnnnnnnnnnnnnnnnnnnnnnnnnnnnnnntctgcttcgtcatcggtcgctccgtgtcgaggtatcgatcgatcgaccgacggggcgagatcgatacaatcgatccgggtcgaagagagagagagagagagtccccgccttcgcgttcgagctcgtcggattcgcggcggagagaggagggaggtgtgtgtcgaggaggcggggaggaaggcggttatttatagttggaggaggcgcccggggcgggggggggggggggagagaaagagaagaggagagagagaagccaagagcgcgacgcgaatctatgggcgagggccccacactgtggtgccacggcgtggggcccagacgggtgtccttgggtcccaccaccacacacaacacaagtacagaacccaccccggccggccctgtgccgtgcccgtgccgtgccgtggcgttgcctcgcccagcccaacactccagtaatacggtgcggcccacgctagcttagctttccccatgctttgacactgatttattaccacgtagtacaccgccgcgacgacctcgatcgagtcgaaacgctcgttacaacgatgggaaagggttcgacgcggccggcacaacgacgaaaccagccggggcgggcggccactgccagaagggacacacgcgcgcggggaccggacgaccagacgatgggcgcgcgcgccaggagcgagggacgcgtgtgcgcggcgccaccaacacacacaacccgcgcgcgcggcccttgtgagcaagccgtggcgagaccgcgcgtggcggcagcggtgtggtcggtctctcgtcccgcgcgcatggacacgtaccctnannnnntnngtntttttttttttcttcctttcttttctctgtctttctcttcctctttttttcttcctccctcttcttctttcttcctcttcttcttttcctccgtgcccactccttcttatctttttcgcgtcttttgttcgtctcgcctccgctgtctagtttttcgttattctgctactattgagtcacactacactcttgatatcgctttcacct

SEQ ID NO: 46381 - DNA, 510 bp, Oryza sativa
atcgtctgccgatcgatcgatcgatcgacagagacgacgctgctgctgatcctttcaccgtgccgtgcaggaggcagccacagccacggccaccaccagtccacctccaccacccccgaataaacctctggatcgctgcctgccccccccccccaccccccctgccactttccgcagcgcctaatcatgcgcgctgcaggccgctgtctgtctccacgcccccccgtacaccaacgcaccgcacctcccccggacaaaaaagccacttaaaacggtgcaacttgtgtttgcgtttgcgttggccttggcccttgtgattgtggacgaataatcaaaacctctccttccctcttctgctgctgctactactactggtctactgcctttcgcctcgccttcctcacgttggatcccgtggagttgagactgattctcatggaggcttaagttgcggtctcttgcacctgcttcgagtttgccccgcttgatttatataaaggggtggttttc

SEQ ID NO: 46382 - DNA, 634 bp, Oryza sativa
  unsure (1)..(634): unsure at all n locations
aacacagagccgagagtaggggaacgcatgggtggcggagagacgatggcaggaggatgacacaggtggtggagagctgacggctggagggctattatgactatcaaacaaaccaactctgtctctatcgggcatcactcatacaaattttggatggattctcgtagttgcggtcagtgaacatagagctacaagcagcagtggattggcatgtccactgccatcctcccatcctcttgagctcaccccgctaccatcttccttgagctcaccccccactacatatctttcatgagcttagccaattgatttcatagaggataggtgtcacgtggcaaagacaaagctccgcttgttcgacaaattaaaggccaacttaggtaggaggcggttgtgtaagcggagcttgcagcggaggagctcgtggatgaagtgacggtagaaacacataggtgaaagagatgaggacgttaagatggtgccatgccccgcaagggtgctgacccagattgccctacaataagaactcaccccaaacctcacttctcatattgtcatcaagccatccattgtgnnnnnnnnnnnnnnnnnnnnnnnnnnnnnnngacgtgtcngacgcaacgttaacgcggct

SEQ ID NO: 46383 - DNA, 576 bp, Oryza sativa
acacgtacgttagagacccggctcgatcgacagctcaaagccgtgatgactactgatgagctatcgatcacatgcgtcagaccgttagagttggacattcgcgtgcgtgcacgactgacatcgatcgatcgggtcgacgaccgaccagccatgagtcatgcagggcttcgatcgagtctttgacacgacgcatgtacagagagcgagaacactatcggtctttagaaaaaccaacttctatatgctatatatacaaatttaaacatagtatgttaattatcaaactcatgtacaaacattactttttatatacgaagctggatgaaatatagtctcttcatactacctctgtcctaaaatttagctatataaatctgtatacacagttatgtcatacccatactacataaatgtatccaatgttgggtgaatgacgagtggccctaaagataggattgggtcccacaattcaatccttaccgccatgatataaggcaagaaacatgtattgagagattgagtgaatgaaatgaattgaatctgaattccttccgctgttcttcttctttctttgcc

SEQ ID NO: 46384 - DNA, 533 bp, Oryza sativa
ctggaaggtgttttcggacataaatgaaaaaaactaatttaataacttgtctggaaaccgcgagacgaatcttttgagcctaattaagccgtcattagcacatgtgggttactgtagcacttatggttaatcatggactaattagactcaaaagattcgtctcgcgatttatatgcaaactgtacaatcagtttttctttttatctatatttaatgctctatacatgtgtccaaagattcgatatgatgttttcgtgaaaagtttttggaaactaaacagtgacttagggaatactccctccgtcccaatatattagaacctaggatgggattagacctatcctaaaactatgaatctggacatctttgaaaaaaattacgtaagcatatgttggagtgaataattttttaaaaaaatcttcatctatctaaatagtctagattctcacaaaatttgtattatagaatttaaaaattaaactgaagctagaagatacaagaaaatccagtagtttttctatattctcaacagc

SEQ ID NO: 46385 - DNA, 640 bp, Oryza sativa
  unsure (1)..(640): unsure at all n locations
ccgacagatnacgtgtatggtggtgacgttgtgtgagtaatgagaggtgttaatcagtgcacgttagaaggaaagaaatgtaaattatagagtagtacgaagcttgactgcttgaggtattcctagacattcaaaaagaattaactgaaatttaaagagaaatcgaccgttgactgatgaaatagcaagtccaattaattacgtgtagcattagaggactgctcgtggtttaatttgctacttctctttcgacaattgatggcttagacttggacgtcgattgatgcttagacaagcacaatgtacattaacggtgactatccccgtatagtaggagtatatagtacgatctggatcgaatctttgggtgttctcttttgagcccaatcaggtaaagcagctagcacacacttgcgcctttgtacgtcacaaaactaagagcgctagctagtgagctacggtgtagctagtcatggtgatatgtgactagctagtgtcgttgtgagaaggtgactcgatggatcagctgggtcgatctcatgcctctctcatgaatgtacgtgcattgcttgaatattcttcttgtacaaactggaattaatactgcttcaaagttcaaattaaccggtcgagttacccc

SEQ ID NO: 46386 - DNA, 718 bp, Oryza sativa
  unsure (1)..(718): unsure at all n locations
acgatgcccttctgtgnannnnnnnnnnnnnnnnnnnnnnnnnnnnnnntccctaaggatgccgctgtcgagctcctacacctaggccagcaagtcatcgtgagagagataaagaaaatagcaggaggatgacacagtacagaagtgcagttgtgtcaatctagtggcaaacggagaaaagcgaggacgtgaggacgtgtcaagaagactacaacacagagccgagagtaggggaacgcatgggtggcggagagacgatggcaggaggatgacacaggtggtggagagctgacggctggagggctattatgactatcaaacaaaccaactctgtctctatcgggcatcactcatacaaattttggatggattctcgtagttgcggtcagtgaacatagagctacaagcagcagtggattggcatgtccactgccatcctcccatcctcttgagctcaccccgctaccatcttccttgagctcaccccccactacatatctttcatgagcttagccaattgatttcatagaggataggtgtcacgtggcaaagacaaagctccgcttgttcgacaaattaaaggccaacttatgtaggaggcggttgtgtaagcggagcttgccacggaggagctcgtggatgaagtgacggtagaaacacataggtgaaagagatgaggacgttaaaatggtgccatgccccgcgagggtgcttaccc

SEQ ID NO: 46387 - DNA, 2414 bp, Oryza sativa
ctcggcacgctcgcgcggaaaacaacgggcggaaaggatggccatggggaccggacaacgcggacggcgcaacaacacggctcggacgggaaaccacgcggcgcgcgcgagcaacggcgcgcggggccggctttgcgagcggggggggctcgcgcgagagaagggggcgctcggcgcgggcgactcccgcgcacgcgcgcgcggcgcgcggcggaaccggaggggagcggaaagagaggcgctcggcgcggctctcacacgcgcgagcagcgagggggggaaaacgcgccgggggggcaatcgagagagagagagagagagagagagagagagagagggagacgcccgggagagagagggccggggaagagatcatgagatggcacgggcactagacaacaatcaaagaaacaactttcgcaattagggtttttaggagataattttcccgctaggcgccacgacggaacgggcgctacactcaaggaccgtaaaattgttttaaacgtaacactagacaacaatcaaagaaacaactttcgcaattagggtttttaggagataattttcccgctaggcgccacgacggaacgggcgctacactcaaggaccgtaaaattgttttaaacgtaattaaactggatcgaaagccaccatggaatataattcagggggaaaagaggcattttcaaagtttttatatggattatcctagaaccgagttgatggttcattcatcacaggacttcagttagcgtgaattttaggttggactctattttatttccaacgcttcaaattggaaccttttctaacatgttgtgttttgctttggatctttttcataatatttcctttattttccaggtaaaaacgagagcttaaatgtagtggtggagacatgtgtccatggagaatatcgtgagtaaaagggttgaatgtaaaactaaaagttaaaaaagagaggattaaagtgaaaattaattatcagtgtactaaatataggatttgtacccgtgtacgcgcgcgcatatacctcagtaagaatactacctacatacctattattggacaagaaacaaattcccaaatctaagataaactcgtggacatgaaatgtgatctcagaaagaggataaagctcatagtctgacataagaatgactaggactgctcgaattgtgtcttagcttttgcctttcgagttctgcttggataaggaggtgtccaggcaagtgatataaacacaaggcattgaaagggaggacattctaatctctatagataacacaatacatatataaatacaatgtattgctgaaggggcctctacttgttctttgcctccactagattttgcattggcaagtgaaggtattggaggcagaaagttgctacatcgagatcaattggatctggtcgacaaaaggaggaatgtgacaaaggaactagttagaggtggaaggaacacatatgagaagtgtaggttgccattataccttcaaaattttcttaatggagagattgaatgtgatccacgtcttcatccaagcagcggatacgtcttgaaattagttgccagcccttaggcaccaccaaagtacagcatggtttcctttgtaaggaggtcttgctgctcgggggaggcaaagataactaagtcattggcatatattaacctttatatgtaagtattaaatttgtgcaacaaaaacaactacttcctccatccaaaaaaaactggatgttgtaacatcctaacaattttccagaaaaaaaaggtcattttagcaatatgtaattaaagaaatggggtcagtctatttctatcgactcattccagaccactcgtgatttgctttgccctatgtaatgtttgtgtccatggcgccaatgtgtattgtaactcctgtggcacgtggcaataagttatggaaggcttaattaattacaatcaggaaatattctctcgaaccttccactacgccagaaccctacatctgtgacggtacaccagtgacgggtttataaattggtcacagatgaccgtcacctttgacgggtcgttaggtttaccatcatcggtgaggcatctggcctcggcccgtcacaggtatcacctcacctgtgacgggccagaattttaagccgtcacaggtaagatagtgacgagtttgacttccaacccgtcactggtatgacctcatttctgacgggccagggagttataacccgtcacaggtgatgggccgtcacttgtgacggatatgacttctggcccatcactgattttaagtttgcacccatcaaaggtgatcaattttgacatataaaaaaggaacccccaccccccacccatggggccccaccgacacctgctcagtctctctccttctcctctcagactctcttct

SEQ ID NO: 46388 - DNA, 2065 bp, Oryza sativa
  unsure (1)..(2065): unsure at all n locations
cgcgtgnnatgtanncactaagaacnnnnnnnnnnnnnnnnnnnnnnnnnnnnnnnnnnnnnnnnnnnnnnnnnnnnnnnnnnnnnnttggagatgttctgtaatatgtgatgatttggatatgggaggggatggtgtgaaatcaatattcaatattaaaagcagaaaaaaaaagaaaaaatatctttagtcccggattcttagtcccggttgaaaaaccgggactacaggggggttacgaaccgggactaaaaagcatttctccaccaatgtacggttcaaagatgattttgtaactcgatgataagttgagtgaccttcagcgtactttttctgcattttttttgtcacgttaggtgatgaacatgggccctatttttctattctcaataattaataatcctgaaactgaataagtggtaattacttgtactttctccgtttaatctggattcattaacatcaatatgaatatgagaaatgctagaatgacttacattgtgaaatggagggagtagttgctaagatttcgtaaaatataaggtggacgctgtagccaaaagcgtccagctgcggatgctgttgcggagtggtgcgagctagctgctgccagcgtgctcgccggccggtgagcccatacgaaccagatctgaggatgttgttgcatgaatgcctttatactgctgttgaattgttgatgattactcgactcaaaagaatccaatctagttcaaatccgttgtattaattgtgttccatccaagtgctaggttagattttttgaaacagagggagtatgatgctagctattgctgtccgtgttttgtttgctgttgatgcatgcatgctagtgctgttgttgatgaatccgaggaaaaaaaatcatttctaaaccattctatttatgtcggtggaacggcttttatgcgggtaattttctttttcttttgaaaaaaaaatattttttagccgggtgacataaggacaccgcttatgaaaaacctatttccacatgcggccgtcttcatctatccgtttgcaaaaatagctttttctaggtgagcggccatcctcctgtgaagatataatattttcgcatgcctttgcttacaagcggcgtgtgtgaccacctgcaaagagcaattttggccgcctgcgaaaattgcttttctagtagtaacaatagcaaaagggagactccaaattgtatttggatctaccaaaattaaccctttcattcattattgagtactctctccgtcccattttaagtgcaaccataagtttccgcgtctaactttgaccgtccgtattatttaaaatttttttagaattagtattattattattattatgagatgataaaacacgaatattactttatacgtaacttatgtttttaaattttttcaaaaaaatttcaaataaaacagactgtcaaagttgtgcacggaaaatcatgtctgcacttaaaatgggaaaagggagtagtaatttaaggttatatttatgaatttatgataaaaaagtatgctattaaaaatatgtactcagtataggtaaaatgcgctactaataatacaaataaaatatcatttccagtatgatgtctaattaagatgaatgaacaatgtttttttttcaaaaaaaacttatgtactttctttaaagtaaaggtacacaacgtacatgagagaggaagtcgacacatataacttccagattgtagaaaagaccctaagaaatgggcaaattaaccttataacacaaaatatgtaaaagaggacttaaaaaacttaaaaagcaatcggatcctactttttccacaggaacggcgagccatcttgtgccgacgtcgatggggaggatgattccatggcgagctgcaaaggagagagccgaggagcaaacccagtcggggcctccgcagtggaggttgaagctaccttggccaaacaagaaaaccacagctgcccccagaagacgaaaaaccgaataccaaggaaagaacaccgttcttctgtgttggtcaccagagaaaagttggacggccgacataacctct

SEQ ID NO: 46389 - DNA, 640 bp, Oryza sativa
  unsure (1)..(640): unsure at all n locations
tcgtggnnnntttgatttgtgtgcatgtnnnnnnnnnnnnnnnnnnnnnnnnnnnnnnnnnnnnnnnnnnnnnctcactccctggatcttcttcccggccacggggcacttgggcccgctcgcagatcagttcactccaatcaagctgactttagcgagcccccatccgattaaatgcacccttgctgtccttctttgaagaactccctactcactgccaaaaagataatagtaccacgtgtttggggcatctgcacacaagattttactgttgtgtattcttgtgaaaacatggcttgttgacaattcttgataattggttgacaatctctgttcactgttgtactagctatttgcccagaaaatctatttctggaaccttggactatgagttatgctgaacaatgtttgggtcgtcaacatcgtgttaattaggatagtaagctaggttggtgggggttaactaaattaaatcctagtgtgagtgcacctcttaattttctgccatgtaagatgagatgacatgaaaagatttgagttggaactctgtagcttgtcacatttctggcaatagaaataggggctgccaagcccttgctaaaaaaactgaaaagacttgagtttggggtgtaagaaacac

SEQ ID NO: 46390 - DNA, 808 bp, Oryza sativa
  unsure (1)..(808): unsure at all n locations
agcgtgaatttgtatttcctatnnnnnnnnnnnnnnnnnnnnnnnnnnnnnnnnnnnnnnnnnnnnnnnnnnnnnnnnnctataaactttaggtgtataaactttagatgcataaaaatactatatatagaaaatatttgaattcaaattcaaatttgaatcggcttggtagtactcgtaccctataacaaatatcttaggaaaagatgtaatgtagcgaaatatttgtgaaaaaactgtaaggagtattttgtgaataaagaaatctatctttgacaaatgtctcttactctggatgtcatgtgtaagagtgcgttctcagttaacgactttagtcagccgtttgagtcgtacactctccctagcccccagccttgtcgtcggaggaattttctcagaggataaagctcttggacctttggcctgccttggttgaataagctctgatcctagcccccacccgtgaagttggaaagttgatttccgatttcacggcttagttaatacgcatggcgagaactcttacacgaccagatcttacatggtctttcgtctctacaggatctgacaaggccttatcggctctgggcgtccctagccgaagatcccttaggttcctcggaggccttgtcgagacggcgtaaagggacataaggacaggtttcaacgctaggtgtcatcacagtgagggatcatcgggcgaaacacgttgattgtgatatgggcctagaaatagcctttattgatactgtaannnnnnnnnnnnnnnnnnnnnnnnnnnnnnnngggactccacgttacatggcgg

SEQ ID NO: 46391 - DNA, 844 bp, Oryza sativa
  unsure (1)..(844): unsure at all n locations
cgcccgtnnttgttgtanaacnnnnnnnnnnnnnnnnnnnnnnnnnnnnnnnnnnnnnnnnnnnnnnnnnnnnnnnnnnnnnnaaataggtttttagtcccggttggtgttactaaccgggactaaagatcatagggccctgacacagcctgacatggaatcaaccgggactaaaaatcatctttagtcccggctagagttaccaaccgggactaaagatgatttttagtcccgggtggtaacaacaaccgggactaaagatcttcctcttattaaccgggactaaaaatcatttttagtcccggtttttaatggaaccgggactattatggatatgggtcgaccgaccaaagatggtttctctaccagtggtaaaatcggatatgacgtatcccccaatttacaaaaccagtgcaaattatatccctcggtggttttgaccccggttttgtcagatgtggtagctgactcagcgtggaacccacgtgggccccacacgtcagcctgttcttcccctcccatctctacctctcttactctcacctctcttctccacgagcggcggcgggtgagcagctgcatgggtggtggccggtgggggagcagctgggcgcggcagagcagcgcgtgggcaggcgcaggcggcggggggagcatatgggcgcgaccggccggcggcggatcagcgcgcgggaaggtggtggccattcctttcctctcttccccatcgtctcctccgcctagttgacccaccaaacacatcgcctatagtttgggtggagggaagttttaggagggattgggagtttagagggatgaggcttataaagggtttggttgggtg

SEQ ID NO: 46392 - DNA, 1011 bp, Oryza sativa
  unsure (1)..(1011): unsure at all n locations
cgaacgcttnnaaattgatatnccgcatcgnagatngcnnnnnnnnnnnnnnnnnnnnnnnnnnnnnnnnnnnnnnnnnnnnnnattttgggaggaatccaatcctttgaaaaattttcctatatggtcatttgtataaatggaatagctatgcaaaaatcctgggcaattcctttcgattggctcaaaacctcaaaacatagaaattttggaggaataacataagcttcaacctcttggaataaaaaccctttgtgaatatctcttttctggttctagcatttttctcacgtcattcatatagtttttatgtcttttttttttcaatccatgggatttgaggtgtaagggcactttaattctacattttttcttgtaattcctgttttaagaatcatgcgttccaaaggagctggccgcagcccgtggtactctaagacctccactgtcaatacccaaactaacctaagccgtatgatctctgttctttttagctcatccacgggattattgaactcacgcttcgaaaaatacgttttctcgaaatcctttttttctgctgcactgtttggaccacttattttaaactatctgttaactttattttagaaaatatagtttatccctttaatcaggtagataatccacgacaacaatccacttaataatctaaatcaaaaggggcttaagaaattccattgttgtaatttgcactccaaaattctgtggggttgctggaattgtaacgtgagctatgagtgcccgccttgcaacttttccttttgttggttgtatcattccaaaccgaatggaaaagggaggtcatgggggccaaattccggcttttattgacaacaatttatatgctctaaaatttactgcatgtggccggccttcaaaaaatgatcaaaaaatttatagaaacacgtcttgtttaattgtcctnnnnnnnnnnnnnnnnnnnnnnnnnnnnnnnnnnnnnnnnnnagcagaatgtcaacaatnaacacc

SEQ ID NO: 46393 - DNA, 850 bp, Oryza sativa
  unsure (1)..(850): unsure at all n locations
ccggtggcggccgcggacgttggggcgcatggttggtaagaaagagtgggaaggtttggtgggagcaacggtgaagttgaagtggagaggaaccgaacgacgtggtgctgccgtcgactcgggactccaacgttcgctgccgtcgttttgtcgcgtccatttcctctcctctggtgcaggtttcacctcgttttttcgtctctttcgaattttttttctcaaaccactatggttccttttttttctcttgattaagatacatgttttatctggtgttaacacgtttttccaaaccattaaattgtatattttatacgaaaactttatattgtatataaaaattactttaataattaaaacttaattgattatgatctaatgattttcttattttatatgtcagtactcaatctcatctaaacgcaaatggctgataggccacgtatatgtacttgtatccgtatcactatagtacgtatccatatctaatacggatacgtggcctatcagtcatatccgggtacttaaaaaaaacgtgcgccagtcgtctgtggtttcgatgtcggcaacggcgcgttctgcctcggtgacctccgagctaatgtcgggggtgttcgggctgaataaaaaaaataacctctttcactgatggctttgtcaggatatcgagaaaagtgccgggggtgccgaattcccaagtctggnggggctgctaagcagtgactaaaatnggggcgcactgggnggnngnnnnagcactacgacatacaaacaacgtactcaaactatggaacaagataccaaagcaaaacagaactaagtacgcaacgagatagcaagggtgggagga

SEQ ID NO: 46394 - DNA, 720 bp, Oryza sativa
  unsure (1)..(720): unsure at all n locations
gctggctttgatacacnnnnnnnnnnnnnnnnnnnnnnnnnnnnnnnnnnnnnnnnnnnnnnnnnnnnnnnnnnnnnnatgcttagcatgctgagggcaccacttttttgtgttatcacttggacaagcacaatacggaaccatccaacatgtgtgtgacgcacgagggctgagtctggatacgctgaattcgagtcgtgaggtaccgtatcttggtgcgaatagactacgggcactcacttggcttgtaaagaggaaaagggaacctagagcgactcttagaaaacaagagctatctatctgagaatgcatagccgtcttgggagtggagcaccatgattatgttggggggttactttgtgactattagcgtgagatatggtacaggtaatctgatagcaggacattatgctagagcgtacactctaaagattaaggaaaatcacttcccgacagactcagaagactcagctgctagtttttactctactcgcagtttttggtctatcgttcttgaccggtatcacatcattaccgtgagctcatcaatgaactaaaccaggaaagcatcgagcggatctgctgcatgatgagcacaagcatctgaggagggcagggatctgtagcaggagactacaggtgtagaagatagaagcggccatcatttaactggaatgtgtgactggactgggtgagatggnaacggggtaccataccagg

SEQ ID NO: 46395 - DNA, 735 bp, Oryza sativa
  unsure (1)..(735): unsure at all n locations
cgcgccccttgtagttccttttgctnnnnnnnnnnnnnnnnnnnnnnnnnnnnnnnnnnnnnnnnnnnnnnnnnnnnnatttagagcttatcatctttcgacctcttcctacgggtggcggatggaggagggttagattaataaagactgcctctgcttgtatcgggagttaatttgctagagcgttcagctcttggcgcgttggaaacccccacttattcgacagagcggtctagctaaaggaacaatctactgttatacactccacgttgacacagggtcccctaatgtagagtctactatgcattatcatgaaacactttggagcataagcagaactgttaattagactgaaaagatggtaggggatatacttcactgcgtgcaaggcttatagacgcgtgtacacgtgggccgagatcacaagttcaataacagttttttggaattaaacgaacatgaggaaatgatctgtgagtggactgaatgctccctttcataagacgagaatggatgtgccgtagttacttaaaggacatgcactgtgtgtgtaacatgtgtatccgtcagcacgaacgaaccagaggtgctgcattacacgtgaattagacatgctagtgcttgacgtgtgcaatgtaagttatgtgcacaatacgcgcctagtgatctgtgatcgctgtacataacactcatgaggtgtttgatagactgcatgagatgatggaagtccttata

SEQ ID NO: 46396 - DNA, 675 bp, Oryza sativa
aggcgcactgtctcatccgtgtcgtttgagaagcactcacttaaactttttagaaaagagttcaaataaaataaattgcgaaaacaacagcctctccttgaagcctgcattaaacacttatttccctggctttgctgagtacttccgtactcacccttgctctatataaatgatccccccccagttgctgaagaagatgaagtggatcctgctgacgaggagttcttccaggagcaagtcggctacgatgagttttagggtttcggcctagttcccaagtcgcgcctgtgatgattggtccaagtcctggcttccgctttccttttgtaatgcagttgtgagctcgggatctgtccgcagcccaacatgactgtacttctactctataataaagagacctctgttgctgtgatactctgtctccctgtgataccagcactgtttcctgggactggtatcgattagcaggttaatttggagcgtcacgggctagttccggtcgggactagttcggggcgtgacattgaggagataccatgaggtaccaaattttacactaattttgagtacctcatggtacctcatagtacctagatactaagaggtaccaaatttacaataagaggtaccaaatttacaataagaaaagtggtaccttatggtacctccttaagt

SEQ ID NO: 46397 - DNA, 703 bp, Oryza sativa
cattttgcctccggaatccagctatggcattgggtccgccaatgttatataggtgccgctatgggaatcctcagcgttatgcatccacgggcgttgtgagctccccggaatccaaccttataagattccgaacccctcttgttagaaagatgatagatgcaaaccctcagtgtgatactatgatcaatttatgaccagtgattttcttttggaaactatcgaagtatttattacattgtgagattattattccatttccataacatttctgattggtatgcaggtgttgcgttgggtttttcatagtccatgaaaccaaagcggggttcttggtggtttggaacgtactggcaaaggaagtcgtttatgacagcgacacggtcttcaaaacataactttaatttcttgtttctataaaactatttatttaaaaatgatatatgtatacttttatgaaagtatttttcaagataaatctattcgtataatttttaccttttcaaactcaataacttgagagttatttatgatttatattcctaaggttcgacttaaacattgccctaaacgacttcctttacgagtatagagggagtacaaactctagaggattttgggtggcgtgagggcaggttcattaaacacttttacccagtttgatgggtcaccacttgaatggagccatttgggtgatcgaatcagt

SEQ ID NO: 46398 - DNA, 727 bp, Oryza sativa
  unsure (1)..(727): unsure at all n locations
agacttgcaactgagtatcnnnnnnnnnnnnnnnnnnnnnnnnnnnnnnnnnnnnnnnnnnnnnnnnnnnnnnnnnnnnnnatgtacagaaatactatatataaaaaaaatatttgaattcaaattcaaatttgaaacggatatataaacttttgacttataaacttttggtctctaaactttaggtgtataaatttactaaaataggaaagtaatgcggtgccaaaaaaggaaaccaggtggagggatgaaggggggaggtggtgatcntntntagtnntatttaacttgcttaaagtacaagatcacccataagaccattcactccaccccttttcattctacattggggattgactcctacattatcaactaaatatgtttgactctctcaaccgtgttgtgaatagccttatgagacttacaaggcacgaacatggttatgagggaccttacagagctacattactcacaaatctacatattcatgaggcatattggttctaggagaggatttaatttatcatgttagtggctaactttttcacttttatcctgactttttctaaaggaaattacaaagcaggccaatcttttacacggaacgctctaataattaaaaaaaataattccttatatttttcccacaccaacctggctctttagacctcaatttgcttgttcgtttttacattgtttaccggcgtaaacggctttaccctaactt

SEQ ID NO: 46399 - DNA, 506 bp, Oryza sativa
  unsure (1)..(506): unsure at all n locations
taaaaaaggttagcggcgaagtcagcccgaacacccccgacattagctcggaggtcaccgaggcagaacgcgccgttgccgacatcgaaaccacagacgactggcgcaccccactaatcaaattcatcagcagcgaggagttgcccgaggacgatacagaggccgagaaaataacccgtaaagcaaagatctactgtatggtcggcaacgatctatacaagaaagcgccaaacggggtacttctcaaatgcatctcgaccgacgacggtagacaccttgtaacatcctgaaaattcctgacattaaaaatcactaaaatttcgaactttttaaaactttttgcatcatgctggaagttatggttgttattgcttgccaaaccataaataagaaacaatggaagngtttctttctaaagatttacacccgagcaatagttannnnnnnnnnnnnnnnnnnnnnnnnnnnnnnnnnnnnnnncggtgtccaatcaatttcagtttctt

SEQ ID NO: 46400 - DNA, 512 bp, Oryza sativa
atgcagattatcaaagctggacacaacaaattgagcctaattaacactatcaacttcctgtgcttattcctgcaaagaacgcagacaaggcccagtcctgatcaagaacagagctttctcaaaaaataatactaccaataatcaagatcagagcgagttgattaaaacagagtggaatgcacacaaaggcaactgattcgatcacccaaatggctccattcaagtggtgacccatcaaactgggtaaaagtgtttaatgaacctgccctcacgccacccaaaatcctctagagtttgtactccctctatactcgtaaaggaagtcgtttagggcaatgtttaagtcgaaccttaggaatataaatcataaataactctcaagttattgagtttgaaaaggtaaaaattatacgaatagatttatcttgaaaaatactttcataaaagtatacatatatcatttttaaataaatagttttatagaaacaagaaattaaagttatgttttgaag

SEQ ID NO: 46401 - DNA, 559 bp, Oryza sativa
  unsure (1)..(559): unsure at all n locations
agagactgaaattgaatgcacctgacacaaaccnnnnnnnnnnnnnnnnnnnnnnnnnnnnnnnnatctatttcaaaatttaacaccgtcatgtgacccaataagatagcttgagacaagccagcttgtggagattatggataccccatatctacatgacggttgtaatttagtcggatatacggtatcaaatatagatggaatatctctatgaagactcgggttaggttctaaacttgtatgtcaaggaaatacccgggatcttagtcggttacgattgtattttatctataatcccatattccgttaggatatggactgtattttgtaaagcggactccttcccctatataaggagggtccgcgtgcctcttgggaggtgattctttttcccagtctatacaattaataacacactcggcggaattatccccggacaggagtagggtattacttctttaataagaaggcctgaacctgtataaaatttcttgtctccaaacccatccattttcctagcttgacagccacccccttttattattgccgaaatcttgct

SEQ ID NO: 46402 - DNA, 731 bp, Oryza sativa
  unsure (1)..(731): unsure at all n locations
gtgggtnnnnnnnattgaaccattctnnnnnnnnnnnnnnnnnnnnnnnnnnnnnnnnnnnnnnnnnnnnnnnnnnnnnnnnnnncttctgctttacgggatagaggcccaacagtagtttggttggctgcgtgttcacttcaccatacggacttcattttcgtcgattggtgatccttttggactttggagcgtccacgttttcgtatggctcccacgaaaaactggttttggtcgcagaccattctgtttcgtacaatagtattatcttttttttattacgtacacgggcgacggcacagagctgcctaacccgtggaacatcgaacaccttcgtcgcttctacccctagtggggatcgggcatcatgtctcgggctcgggccaaccccgcaccccccccgggcgtgcaggattggccgggggctaccacatgcatatacttaccttttttctcttccgtatttcaataaaagcatttttgatttcctgaggactgtgtctgtgccatcatttccttttgaagaatcttggcttgaattagcacgctcgtgctcgaccttgccctcggcggcccgggccggctaaaatcgccaaacggggcccagaaccgagccgtgccctggggcatggtgaactccgagggggaatcggcaaaggcccacaatccggtcatccataaccctcgtcaccgcgctcccggccttgccagtctcgacacgaggatctccc

SEQ ID NO: 46403 - DNA, 2956 bp, Oryza sativa
  unsure (1)..(2956): unsure at all n locations
actgtccnagttcgacatacgatcttcaagccccnnnnnnnnnnnnnnnnnnnnnnnnntgaccttttgtcctgttgatgttgccccggcccttccccgttagcttcttcgttttcgatgaagatgtaaacaagttggctgacttagcagttgacacaatcattaaccattaacctcttgttcttggctgctctctgaatggtatcaaaattttttagacggtttataactttatatgatgtcaatcacatggttcttgaaaaccagcggttaccggccggtaaccgtccggagttgacgatcagttcgagcaagtgaccaaaaggatatggttgtttttaaaattgaattaagaactattttgtccaaataaaaaaaactgaatttaaatttctatcatgtaaaatccggtaaacggccgttacaagatttgacagagtccgataatcatggacaaacaggtttcaactacttattccctccatttcaagatattagcatttttttttctaggattcaaaattataccataatataaatatttttgggacattgattttagtatatgaaaatccatgtattttcaaccaatcagaagcttaggaagagaaccaaagccattcaaaatttaaattttgagtaatgagacgaataaaaagaatatttctcatcaaccttaatctttgttaaacaaatcataaagcttatattttagaacggagagagtaggtggaccgatgcacatacaaacccgccattaagttgattggatgaacatgaacagcacgagaggaacatttcatttctggtcacatttgagcagctactcgctttcagatcaaatcttccattaatttcctgttccttgtggtttctcagtgggggcatctagtctcagtcgctgacgagccaatgcatcgaatgggcgagcatgattagattattggggggacagtggtgcccattgcgaagtgactaatgttcatgatattcgatcgagcaaccctggagtaccttctactcctactatactatccactgatccacagctattagctagctgctcagatgattggaagagtccaagaaaaactgtaatgcctttaacatcggtcaatcatagatggttggagtggattgggactgacaaagagacattatccgtcagcaatctacattgccaattttcttttcaggcctgaagatgagacatgcattagtcacagagaagattttcaggatttcactagtccttgacagtttttgacagttactagatgcaaaccacttactccctccgtcacataaaaaacagttgccggcaacaaatatagatagagctatcaatttttggctacgaatataatttgttcttttttaggaaggagagtataagcatgaatatgaataactaacagtaagatgactagaacctagatgtccatgctgcatttaagtccaggtgtttgcgtctgggctctaagctacttttcttggtgcagatgcatgctttgcaacttcttcctccttgagctttaggaaagaaaaagaaaagcttaattgtatactataagcaagaacacgttcggttcagatccattttgattcctgagatctcgcagagcgagatttgtcatccggtttatcgatccaaagtgggcgttttcccactaatcttttcatcatcttcttctttctgaacctgttgacatcaaaagggagaaaagaaactcgatgtactcgctcatcttatgttactatcaatcagaggcagagatgatcagatgaagcatcatcattcaggcatcctgctcgccactgcccatacatgtagaccatctcctggaaagaaaaagagatcaggcttcagtggaggcagttcgatccattttatctttctgaaacttcgtaaaggaggctaagctatctcgcagtttttctaagtctccggatgactcatgtcacattgtcacacggcctcctctcctttaagttggcaacgcgtgaaaaaaagaaaaagaacagtgtagtgctgccatgttagtagtactccaatccaggcaagtatcagtctactgaaatcatcatgattcaagccatttgcttgagacatatcaacttggcacggaacttaggttttgtttgatgaatagttagctggtgagaactttctacttctgttcattttctacttaatctaccagtagatgataatatggtctgagaaagttggaggttctaagataagctgtaactggacctcagtcactcactacactattctgtgctcacttctagccattgtggagtaatattgtactagatcatcagtgttctttcagaaaatgtgcagccgtgcatgctgatctgaacaatcctgaaggctgaagccaccaaatgtgtaaaccccccacctttatctgtcactactcactagtgcatttagtacttaattgcgtgattagggcgggggaacactgcacttaatggcatgattagtggtagtaattaagtagatcaccatcatcatcatcatcatggtgtccatattggagagagcctatggggagccaggcttttcaacggccctggaaacaaggcggcatgtccccccaggagtccaatcctgtctccacggcaacagctaacgtcgctctgcagtctccacacaccaattaatccccccttaccctacaaacctttccatgggccatggatgatgatatactcatatgcacccccaaccaaattaaccaacgtctcctcgacgtatatacctctccgccgatggaataaccaacccccaaccatgacatgttgtgtcacgccctcttgttcccctcacgtttttcgggaacgcgcaaaatnnnnnnnnnnnnnnnnnnnnnnnnnnnnnnnnnnnnnnnnnnnnnnnnnnnnnnnnnnnnnnnnnnnngatctgcattcaaaacgcgct

SEQ ID NO: 46404 - DNA, 759 bp, Oryza sativa
  unsure (1)..(759): unsure at all n locations
ccggcgggggggggggggggggagggggggggggggggggggggggggggggggggggggggggggggggggggggggggggggggggggggggggggggggggggggggggggggggggggggggggggggggggggggggggggggggggggggggggggggggggggggggggggggggggggggggggggggggggggggggggggggggggggggggggggggggggcgggggggggggggggggggggggggggggggggggggggggggggggggggggggggggggggggggggggcccagatgaaaaaagtacggccaaaagatttttctatgttatgttaataataaataaagaagtatttattggtaaaacttgttaatattgttataaaaatgtattgaagttggttgttgcgcaatttcatatgttaagtgaggtattattttgtaccttattcgacgtattagtactcggataatttatataggcatatcgcagtctaggtcatagaaacattatatggacttaaacaaggagaattatgtaacatgaagaaatagtagtacaatttgaacatgatacaactatttgcattgcagttacatagatgatattagattcgaactaggagggaggtagtgcaatagttgaacacaacgacgatgtaatannnnnnnnnnnnnnnnnnnnnnnnnnnnnnnnnnnnnnnnnnnnnnnnnnnnnnnnnnnnnngatgntacncatcacgg

SEQ ID NO: 46405 - DNA, 705 bp, Oryza sativa
  unsure (1)..(705): unsure at all n locations
cgctgctagataatctcctnnnnnnnnnnnnnnnnnnnnnnnnnnnnnnnnnnnnnnnnnnnnnnnnnnnnnnnnnttctacaatttcatacaaaattacaagatttttaccatattgactcttagcttatacgacagtttagtttctgtctaaactttcagatatttcttctgattacttgaatattttgattcaatgccaaaaaaacttcataagttttgaacttctctacttcatttatttgaaatctagttgttcttttcaactcaacttgaaacttgatgaagacactgcgattatacattctcattgcttggcactcaatgtactaatgggaccaaagtttgcttggcttctttgatcttcgaaaagtgaacatcaaactgttccaagttttgaatcgcatccattactgtttaatactctatcatgaagtttgaaatgttgcactggggaccatcattatctttagaccgttggataatgccttcactgagagctgtgcatcttatgaattgacagaaagcacccttggaattcactggaatgaaccttctattgattgaccacgtgtgcattatgaaattggtaaggtgtactgtaacgctggtagtgctgttatgcaaaaatgctattgtcttcctccggaacatggaaatcaggttgaactctacttaggggccaaccgttatattggttgaagg

SEQ ID NO: 46406 - DNA, 1179 bp, Oryza sativa
  unsure (1)..(1179): unsure at all n locations
cgctgcatagatnnnnnnnnnnnnnnnnnnnnnnnnnnnnnnnnnnnnnnnnnnnnnnnnnnnnnnnnnnnnnnnnnnntttttcctttttcttttttattattattatcgggcccgtgcaggtgcaggtagtgacggtggttctcgacgacagggcccacacgcacgcgtggtactcgttcgattggaacgggcccattatagttgagccctattgggctgggatctatatgcgggccttacaaactgggccgtaactgtagtgtgcgtacgtcgatcgggaagggaagtcacgagagagaaaaccctagaatcgaatctcggcgactaggcgagattggaggcgggcggaggaagaggaaaaaggggagcttctccggtcgcggccatgtcgctccgggccatcggttaccttctcacccgaagccggagggggttctcgccacgcgggatcccccgtgcgcaggcggagtcctcgctgggtatcctcactcgggcggggaggccagcagctcactctttccactccgttcgtctctcatctcacccggttctcaaatcgaaaatcttttcttttgttcactcgcagctcatatgtctctcatctcgttacgcgatacagatgggtttcgccgttggtggtggctctgttgttgtagccacggcttcattggttggattggcggccacaattctgtgtttcaagcaaaacactgacaagtcaggaggtatgaattgaaaaagcggattcagatggtgacataggataagcatgttaaaggtgatatagcgtagatctcagccctccaaaataacatccaaagctgagattccccccccccccccccccccccccccccccccccctccccgcccccccccccctcccccccccccccccccctcccccctcccccccccccccccccccccccccccccccccccccccccccccccccccccgccgccgcccccccccctctccccccccctttccccccccccccccccccccccccccccccccccccccccccccccccttcccacccccccccttccccccccccccccccccccccccccctctcccccccccctcccccccctccccccccccccccctcccccccctcccccccccccccgcccccccctccctctcccctccgccgcg

SEQ ID NO: 46407 - DNA, 1628 bp, Oryza sativa
  unsure (1)..(1628): unsure at all n locations
agcgtatagatagcttcgtaggaccnnntcgnaannanccncnaggaattcggtacccctaatttacacgcatttgacagtatatcgaaatgaacattttacatatttatatactactccagattgcacacactgcttgaggccttgagatgcgaaaacagccgatatacacctatatgacaaatcaccactgctgtacgtactactagtccctggcgatctcgttgctgggatttggctcgtttccgttatcttcacgatttggctcgttgctgggtgtgtcgcctccggcagtcatgaacccggtggtggatgacctgacaaccgagttcaggatgtcttcgatcctcctctcgacggcgaccatggttgggcgcacatcccggctgctattgacacactgctgcaccagccgtatgaactcccagaacccatcggtgcttgtggcgtcccggatcgctcaagatcaaccgcatcacagcgttcggcagcccatcggtaatgccggatctagtcaattccatcattccaaattgcagtgaaaacgaaaagagtaaatttcataaaactacagatattataaccaaactatcacaaaactacatatttaaggaattatatcacaaaattacacatttagcaccaaatttagcacaaaactacatattaaagatgaagtgttacaaaactacacgtttagttactaaattatcataaaactaaaggtttagaaccaatttaatcacaaagtaataatgtttatagctccaccataacaatggtgctagggatttaaactccaaaagttatagttttgtgataagttcaatattaaatatgtatttttgtgatacttaacctaaaatctgcagttttgtgataaatttgatgctaaatgtgtagttttatgatacaactccttaaatctgtagttttgtgataatttggtcaaaatacctgtagttttgtaaaatttactcaaacgaaaaggaatcgccaatactatggttgtgtttgcaaacccatgttcccaacccctctccctcgtttttcgcgcgcacgtttttaaactattaaacggtgtgttttttgcaaaaaatttctatatgaaagttgcttaaaaaaatcaaattaatccattttttttaaaaaaattagctaatatttaattaatcatgtgttaaaaagccgctccgttttgcgtgcaggagggatgagttcccatcctgcacttgcaaacacaccctataaccattcatattttcaacacataaaacaggtccatcaaaaccacacgaagttttctaataatacctcacaaataccccatatactttatccaatctttacccatttagtactgtcggcgacatgggacccgggggtatcgtgactagaagcttgggcagccgccgtcacccacgtggcctgaccccctcgggggggtcgggcccgagggtgacatggccacccctcctctgtctcccgagggggcccnncccccccnccccccccccccccccccccccccccnccccccccccccccccccccnccccccccccccncccccccccccccccccccccccccccccccccccccccccccccccccccccccccccc

SEQ ID NO: 46408 - DNA, 977 bp, Oryza sativa
  unsure (1)..(977): unsure at all n locations
tgaaacgtggctgatatgcnnnnnnnnnnnnnnnnnnnnnnnnnnnnnnnnnnnnnnnnnnnnntagttttccattttgaaaattgacggaagtagtcgcctaccgccctctgggagggcgatttttaaaaatcaccatcccagagggcggcgaaaatgacgtggcagacggccgttcgctttcgggcgacggccgtcaacgaaatttgcaggcggcccccttgccgccctccgctagggcgattttgtactgtgcggggggccgcctgcaaatgggcggcgagggggcatggaattttgcaggcggcccccttgccgccctgggggagggcgatttttgcctcccccctataaagcccagtcccccctctctgaaatttcattatattcactaaaaatccaaaaaaaacgaaagagagagaggggagggcagcagaaggggagcggcgaagccctgctggttcgctcacttcatcacaggtttgctcccatacatcttttgcatttgtactaatatgttatgtttgagtatatatgttgcgttttagttttagttccatatattttagcatatctgtagcacacagcacatatgtgtagatccagagcatagaatataatagtatgaattgagacatagacagtagtgttaattgtaagatgtagtttagtttgatctggagaatgtaacctacttttagaattttggagaacaatattgtagagaatgtaacttaaggcgtagtacagaaatgcgaggttaacgcagttattgttttcatcaggcacaatgtcaaataaggtcacatttcagatagttcacggtgaaggaaatattagatttggtccaaatggtgttgatctgtcagattttgaatgacatctaagggcatcgataggcctgccgagagaacatttcagtcaatttatagttggttgttgagaggattagaatagcccaagagtctacacatggc

SEQ ID NO: 46409 - DNA, 731 bp, Oryza sativa
  unsure (1)..(731): unsure at all n locations
cggtcgtgatccgacacgctatcgtgannnnnnnnnnnnnnnnnnnnnnnnnnnnnnnnnnnnnttagctggtgagaactttctacttctgttcattttctacttaatctaccagtagatgataatatggtctgagaaagttggaggttctaagataagctgtaactggacctcagtcactcactacactattctgtgctcacttctagccattgtggagtaatattgaaactaaactacatcttacaattaacactactgtctatgtctcaattcatactattatattctatgctctggatctacacatatgtgctgtgtgctacagatatgctaaaatatatggaactaaaactaaaacgcaacatatatactcaaacataacatattagtacaaatgcaaaagatgtatgggagcaaacctgtgatgaagtgagcgaaccagcagggcttcgccgctccccttctgctgccctcccctctctcttctttcgtttttttggatttttagtgaatataatgaaatttcagagaggggggactgggctttataggggggaggcaaaaaatcgcctcccccagggcggcaaggggggccgnctggaaaattccatgccccctcgcccgccatttggaggcggncccccgcacagtacaaaaatggcctaacggagggcgggaaggggtgccgcctgcaaaattcgttgacgggccgtgcccgaaagcaaccg

SEQ ID NO: 46410 - DNA, 3961 bp, Oryza sativa
aacaagtagtgctacatgcatattttcttaagcatggagtaaccttagggggatgatacagaacggtatcccgtttggatacattttcctaaccttatgagtcccctaattttagtactgtatttcttgattgcttattcatgcatgacaatatcagaaatcgatattcatcattgccaatcataagcagaactgcattgatgcgtgtcatatagctacaggtactatcatgacactcatgattcttattttgcatagtaatgaaagcatacatgaaaaaaccacttacctacagtttgcctagattatttaacctagttaaacattgtagacagctattgaagtatttctgacagtaatgactttctcaatctcagatggttcaaattgctagagcctacctttccaattatatagctctctctctctctctctctctctctccaacatgtaggttcatttgggaatcaactaactacctcatgttaattccgtattagttttgcagtacacagagcagcacaagctcagatgatgcaccgtagcatcggtattgaaagacagtcgagcaggacgtatgtgaccaacttctacaatttcatacaaaattacaagatttttaccatattgactcttagcttatacgacagtttagtttctgtctaaactttcagatatgaaaagatcgcaaattgtattgctccatctaattgattagttataagactggttggacatgccatccaaaatagatagactggttgaatggacttgaaaattacttcaaccatgttgaatggagttgagaattacttcaaccatcttcctgtcatgagatgctcgtgcaatgctctcgatgttcattgaagaaaaatgaaaatgaacaaaacaaaagaaaatatgctccatattatgtcgcatgtcatagtatataatgcatgtcaaaacgtgagcatgcactggtcatatatccacaataaatataaaactaagatataagcagtctgtgaacatttatcaattatcagaagattattagcaactgaagaccatgcaaatatgtgggatgcgacccaatggacaaatctgaggtaaataaaaaaaaatgagtagagcatgttcaaatccaattaatgggcaatgcaagcccaagtccagactttgtaaagttaaattcaatttaagaataatttgtatcaatacaaaagttgtagaatttatagtatatttggcgatggataatctagaaaggactaacatatttggaaagagtttccaaaaaaattggcatacaattttgcaggagagaaaagggaaaattcctaattgcaaatgcacagtgaatagttacatgcataattgcataccaatataccattcaactttacaaactttacttttgtctctgaaaatgaaagattaatgtgtaaattacaagtaaattattaaggacaattctataaaagaaaacttggtggaaaagaagtaaacccaaacctttcatggatcaaagaaaaccactgcaattggtatcatgccttataatgctcagcttcgttacaggaagaacacctatatctttgtcgatacctatttgagagctcaataggaaacaccactgctctcccaataactaaatcaaatgtgaacagtgcacacctcagctagccttgaaccatcaccggtgatgttctggctatcagccatgcctacacaggcaaaaatgcagacaaacacagctagcgccgcaagctgaccagtgccaatctccatgaaccaagagatcccaaatggcttcttgactaaatgaactttagagtccggcaagaatattgtgttctctatgactttactctagcagtcattctcgataatcaagttcccatagttgaaaatgggggaacagagttcgcatgcatcaggtgagataatcatttgcttcagattcctagaaatgaccaccacaagttgcttcaagaaagagatcaatggccgaatctccttctcagcaatcaagaaaccccaaattgttggcaagtagccagttcataatcttgctccacaaaaaagtgcagtttttaccagcgcttgcctaccaactacttgatgaaatgctcaaatgacaaaatggcaagcacagctagccttcagggctgcaaacgcaaatagaaaggggaaaagatgccatcaaagtcataaacgtgctaattaatcagattgactgtccaaagaaaaagatcaggaattacctagcgcttgccatctgatcgacgcagatatcgtccagagcggacatggagacgaagaccccagtagtatggagcgtaaatcaggaaggagatggcgatgctagcaagaatcagacacatgagtcctactgttgtatccatctcgcattgcaagcgagggtgagcggctgccgccacggccagggggaacgatgactaaacagagaggtggattggtagagcgacacagccgggacggtgatggagtggttgagtggagcacgactggaacggtgagatggagtggccgagggggtggggggccgggccgccggggtggagcggcggccgggacggtgatggagtgaagcacagtcaacacagcgtggtggagcggaggaccggcgcgtccgagatgatggagaggagcgcatgcaggcgagtggagccaagtgtgatcgagggaaaggagatggcatatgtaacgctccgcttttcgtgagacgttaaaaactaattcggtaaaatcctaattgcgaaaattttcgttctttgtgtgcgagtctaagtcgtgccaagatctcatttcaaatctcgttgttccctctcatcgaaatcaaaatcctccacctcaaattcctcttccgattcaagtctccaaatcaaattccgaaattcagtcgcatcctttgaatcctcgctaaacgctcgctcccaattccgaaaaataccaaactctatcttgagccttccttgattcctccctgaaccctcgagttcgaatatcgaatttgaatccaaatccaaactccaattctctccaaatcagccttctctgtgaaagtctattctacctccctctggctcagtgggccgactcttcttccccggcccatctcctctcagcccgctcccctcctcatgtgcgttgcacgtgccctacctgagagaaagcgcctctctctctcccccgatctctctctctcgttttctctcgctctctctcgcccgcgctccgcgccgccactttgtcgttcaaacccgccaccgccttcgctctttcccgcgcgcgcgcgcgcgtggccgaccggccggtcgctgccgccgtccgccttgccgcgcctgcgccgcgcagccacccagccccgctcgccttttgccgacgtcgccactgtcatcgcctggttccgatgcccccatgccgcatccttccaaaaccaggagacagagctcgtgctcctctctctcgttctcatatcctccttcctcccaaaatagcaagggagcaaagctcgtttctctcctcttttcacctttttccttagccggcgtcacgcccgtgaccgcctctgccgccgcttggccgctagctccgagcacgaccgccagctgccgccttgaccgccccaaggtcggtttgaaccgacctcccgcgcgaaccgacctcgcctccactataaagccgagtccctcctctcaatccctcccgcttcagtctccaccgctgcagtgccatcgccgccttgctgccgccgtcctcgccttcctccgccatcgcgtgtgccgggaagccagcgtgcgcgcggagccaaagaggactctggtcgccctctctccctccccttccccggcccgagaccgaggtgatcccgcatgtgccgtcggacgctcttcccagcgatctcccgacgcggtagctcctgttctccctccccactcttcctcccccctag

SEQ ID NO: 46411 - DNA, 744 bp, Oryza sativa
  unsure (1)..(744): unsure at all n locations
aggagaacggatacaagtatttatcnnnnnnnnnnnnnnnnnnnnnnnnnnnnnnnncctgagagcagaagagttgctcttggctgcctctttctctctgatcctgaaatgaaacctcaaattgggtgtcactgtacactgaaaagaaaatccctcttggtgagtatggttttgggtcttttttttagcagaaaaccagagggatgaaagtgtaaatatttctaagaagaagaagaagaaaagggggttaattaaagcaggaaattcttccctgtctatctttctcctccatttcttgttctaagctaccagccttccactgttgcgaggcaaaattccccccccccccccaattaatactagaattaactaacaatatattgtacaaattcatccaaagatccacatgcccaaaacatggaaaccattttaatcgctactactatgtactccctccgtctaaaaaaaaactcaacctaagaggagttcggggttccttctagtacaataaatctggactatttttatccagatttattgtcttaggagggagatttctcttaggttgaagttttttttggaccgaaggagtacatttctgcattttctttacacagcgtctgaaaccacaaactgcatgtctgaattgtgaacatcaaaactgtctgttctccaccttgcagagactgtacatgccaactctgaaccagagagactagacctactactgtctctgaactctgg

SEQ ID NO: 46412 - DNA, 742 bp, Oryza sativa
  unsure (1)..(742): unsure at all n locations
atgcgggttagacnactcattgataacccncgnnnnnnnnnnnnnnnnnnnnnnnnnnnnnnnnnnnnnnntgtaacgttggtttccatttattagagcatgtgttaaggggacatattcgtgggagtgtgagtgtggcgttggtgtgtgtgcacgcgtttcgtgtaattaaaaaattaaatcaaatatagaaatgaacggaaaaaaaaatccaaaaatgaagtttgaaaatcttaaattgactacggcgccggatctgctacaccccaaaatcctgtggtgcacatgaacccaagagagtctcgaaccggcgaaaagtcaaaaattctctcgcggaatcggatagaaaccggaggggcggcgcggcgtctacgcgtggcgcgagggggatattcgggtggcgacgatgaggtagacgacgcgcgtgggggcggaggcggcggcgtcagcacgcggcgtggtcggctggagattacgatggctaaacatggtttttattaggggagattattattattattatcagtggaagccaaggaaatgatcccatcaatcgactcgtacacccaatcacagtccgagatttatatcgttagctgaccaagaacgggtagtcaagttgcgttgatttttttctgttatttaggtgcagctctttttattattattattttagattttcatttcaagcttgccaaccttgtaaaaagtaattattgggtatatatttctggataaaata

SEQ ID NO: 46413 - DNA, 669 bp, Oryza sativa
atggatatcccatggaatggggcgaccgggatatagaaagccttgggaaaattaccgcgcactccacaaagggccaagggcgacctccaagctcaggaggaaagctcggccctttgctctgacccaaaagagaaagggcagcgatgagcgtgaatagaatacccgaggggtcggacgttcacatccccataagactgaatggcgagacggtaccgccctctactgttttgaggggtgggagctaaaactgaacctcaataggaagggataagaacggatatatgatcaaggactgggatatatagtgtgtcagcaggggacaagaaaactctttgggatgagatgaagaaaaggttctagttccctgagggatcagaagcaatgacaaggaattgcgcattgcaaacaatggacaaggcgtggcgcggatagaaaaacactctgaacacacaattcgtgcagaaggggaaggcaccatttaagaaatatgggaaaataacgctgaaccaatgggacaaatttgtaaagttcaagacctcgccggaagaaatggccaagagtaaaaggttgtctgacttggccaatccaaaaaaatggcaccatcgactgggctacggtgggtacgcacgtaagattgcactgtggtataaagaggatgaggaaatgaag

SEQ ID NO: 46414 - DNA, 742 bp, Oryza sativa
  unsure (1)..(742): unsure at all n locations
ttcccatgatagatttttctaagagtcatccgtagtttcttgacttcgaggttcagcacgtcctgtctcgtatccagtgcaaacttgagatgtcagtctantaccacgtctcctagtcgccgcacatagacagatagtctccagctcgagctttgtcctttccacattcactttgcgagcagatagctgtggctagcctctcgcaagagggtcatgcggtcgccactcatctatagagcagtggtcttgtgacatagatagattgagaggtacatattaagcagtgtagtggtcaaaatactagtaactggtgtgagcactataatctctcgtagtctgtcatctcggtgcttatcatcccctactcggataggtaccaacccccatcatacgttgcatacagtgaatggcccgggtaagtctgtcaaggacatcgtcacctcagaaatgatcgatggtgcgcgagtcagcattgtatctgacactgtacagttctcccaggtagagcaccccacacttgtgcaggtgttgtacaagcaggctcagatgatgcctggtggtcaccaacttatgcagcttcgcgtaccgtctgtttggggcagcagccagcgcatcaccagtagcatatctgccagagtgggccaacgcctcctcagacccccatatnnnnnnnnnnnnnnnnnnnnnnnnnnnnnnnnnnnnnnnnnnnnnnnnnnnnnnnnnnnnnngatacaaggcgtgg

SEQ ID NO: 46415 - DNA, 641 bp, Oryza sativa
aatttatgctgatttaatttaatttctatatagactcatgtttttacctcataacggatttacttttaatgtcatgacaagttactttctttaccatcagaaaatcttagcaaagaatttttcaaatgagaaacctctttttccaaattagcacaattttcacaatctaccatgacacctttgcttttacgacatttggggcaagaaagcagttcattgtttttcacaacatcttccatgtactcaacacgacctaaagcatcttttagtttcatcttattcaaattacatgttgagcaatccaaaacatcatgaggttgttttaactttttagcagaaatcatgttaaacatcaaactagcatgaaaagcaatttgatatttttgcaacaactttttagttaaaaacaactcatccaatgtgcgtgtgtgcaaagcaaaactacaagcaagagaagatctatttttcaaatcatgtgcagcattaacatctctaatttttgaaatctcattcattaaaacctcacaattttcacaatcattatcattaggaataagagattttaatttatcaatttcagatttaagagaatcaatgataaattcccggtttctatatatcttctcacacctcctaattct

SEQ ID NO: 46416 - DNA, 1261 bp, Oryza sativa
aattatcttaatcttgattaaaacactgaaaaagaggcacgcaactcctaattgaggcagtcataccactgacacatgatatcgaccaccgactaaccctcaagcaacaaacctaaacacgaaaactagcaagcaaacagactaagaagacgataaagctaagggcggcgactctgaagctcggggcggcgcttgcaatcgagggataggactgacatctaaagtagacaagggataggaaccaattcatgctcaaatccaaattaaacaaagcaacaaatgactcaaataaataacctagcatggtgatttttatgcatggaacaaccttttccacgaaccgagacaaaagacactaatgcaactgactaaacaataaattaatgcatagactagttgcatggaaaatgatgcgcataacattgccccatcgaacatagacacgacctaatgcataacccccaatagattcccgactgactgtcgaataaactccaaataaaattttactaaaaccctagactgagctaattttaaagatccgatccgaatgaacgaccaagattttttttcccaccaaccaaagaggcaaaccccaaattttcccgaaacaaaatccaagtgaaaaaggcatatgcatatgaaaaagggttcagagggctcctaggttttctagttggcttgccctacggtcaaggtcggctctgatgctaacttgtcacgcccagaaattctcgaaccagaatttctaagctgaatgtgcattaaatccctgtccaggaccagccagggtacacaaacgacaattgttgacatacagatccacgtcttacaaaaatagaaaagattacaaatgcagcggaaaagataaaagcgagctaaaccgggaagcttgacttcagcagcgggcgactccacttcacaggcaatccttgacggcagcgacgaaaccaactttgacaaaacagctccaactaggaagatcttcagctctggtgtggggaaaaagagagcaagactgagtactacccactgtactcagcaagtcataccggaagaggaggtatgatgcaggatataaccaaaggaggctaggggttcttttgcataaagatagcatttaaaagcagtagttgaaagcagtaaaacagttgtagcaattatcaatattaaccaaacactgtccaacgttacaccacgttgcaacaggcccaaccaaccacttgaactacacccgttcattaagctaaactaggggtaa

SEQ ID NO: 46417 - DNA, 2129 bp, Oryza sativa
  unsure (1)..(2129): unsure at all n locations
acgcgttgacccgtcctcacnnnnnnnnnnnnnnnnnnnnnnnnnnnnnnnnnnnnnatatagaaattaaattaaatcagcataaattacgtcattaactaaaaatgattataaaataaacaactcacaacattataaatgtataagaaaacctatgcttcaaataaaatgttctcttaacttacttatccgatctttgatccgattataccattgtgttcataacaattaaatctttataacgtgatctcacatgtttattttaataaaaaaatataaattagttttagatttcattaagttgaatcttagacatataaaaataaattcaataaaatataaaattaatttacatatattatagaagtaacttaaaacaaaatgaaggtaacatgtcacaacattagaaataaatccgttgtgggggtaactatgatatattgattaaatctaatttctggatagatttatgtttttacccccacaatagatttcttttaataccataacaagttactttacttttactttttgttttaagttacttctataatatgggtaaattacttttatgactaagaagtaatttaataaatctaaaagtaatttagatatattataaaagtaatttatattttttataaaatataatcatgtgagatcttgttatagatttaattgttatgaacataatggtgtaatcggatagtaaatcggatgggtaatctaagagaaaattccatgagaagaaaaagatacatgcacttttgagtatacaagtagcaacttatatgagattgaggtaggtgattattaccaaacagagaacggtctcgttgtagacacgttccaatggaagaacagacacaacgatggcatttttgtttacgatcggtctttccatactccctccgtactcgtaaaggaagtcgttttatgataatatttaaggtaatctttatgaatataaatcatgaataactctcaggttgttgagtttaaaaatgtaaaaattatatgaatagatttgtctcgaaaaatactttcataaaagtatagatatatcacttttcaataaatacttttatagaaacaagaagccaaagttgtgttttgtagaccgtatcgctatccaaaatgacttcctttacgagcatggagggagtattttttttgaataagttcactttgactcccttaactattgtcgaatctaattcatatccctaaacgacaataccagatatttcgacccccaactattaaaaccgttaccatttaactcccacgacggttctggagagcggtttcgctgacgtggcgcctatgtggcgatgttgacatggttttattccacgtggcattgacgtggcacttaccgggcattataattttaaaaatatgtgtggcatctgtttatcattcatgaaaaaaaaaaactggggggacacctcgatgtgaggtaagcacatctcatccaaatcgatcagcagaaatctctaactggagaaaccaagccggcggtgagtatttcacggggccttgctccggcaagaacttgtccaggtccccggcagccgcaagccacttgccgctgtctctgcatggccagcagtggcatcgccgctcctcggcttcggcggcggcagcctggatacttgttcgcctcgtacgatctggagcagcctcgcgtgacgaacagcatccgcccacccagcgacgaacaactccttccaagcgtatgatgcccgtggttgttgatgggattccacggcgaatactcctccgcgccaccaccgccccagcgcacgcgacgccggcgctccctcctcttcagcggcggccgccccttcccggggtgcccccacatgcgcgccttctcgacggcggaggcgcgagaggagatcgaggccgccatggacagcaaggagaccgtctacttcgacgacgtggccgcctgcgtgcacgatgctgccggcgagacgctccccaccactactacatgaaacatttttctggacacaagaaaatgagagatggacaccagtnnnnnnnnnnnnnnnnnnnnnnnnnnnnnnnnnnnnnnnnnnnnnnnnnnnatacctgcntgtaaacttggccccgtcttt

SEQ ID NO: 46418 - DNA, 1316 bp, Oryza sativa
  unsure (1)..(1316): unsure at all n locations
agctccaacgagcaggcgcagctcggcctcgcgcgggaaagcgggagaaggcgcgacgggctcgggaaatttggggaaatgggagaggagagcccgaggatcgtttttatgggctcggggtggtgagatcgtggctgtggagggtggaatcggccggcaacggccgacgacgtgggtgacattgtgggcgaagtggggactcgatttggcgcaaaaaattgcggaaaagtgggggatttggtggaggagatgaaggggaaccgatttcactcggtttgggcgcaagggcgcgggtggaagggccccgaattcggcggaacgtgggcggcaacggccggccatgggcggcttcggcctgggaagccgaaggtagtaggaggacctgacaagtggggtcgccgggcccacctgtcggggagggagagaaggaggagaccgagggggttattcagactttgtgcgaggggaagtcgatcgcgccgagaagggtggggtcggcccgagagggaggagggaaggagagaggggcgagcaggctaaggagggggaaaagatctagggccgaaaatggcccaaggagaaaggggagattatttgattttctttttatttaattggttaaatgatatttgtaatagtaaaattagatattgagcttcgaaaattcgcgggaaatttcagaaagttcattagggcacaaagaatattacaaaatattctcggccatgatttttaaaggaaaattttaatttcctctataatttcacttgattaaattgatttaacttttatttaatttctagaaaatgcattattaaatgatttttaatcccgacgaaaatcggggcattacactatactattaatatatggtcccacctgttatacatatattacgtcttggagtccgcgctgcagctggctatatatctgtaacccactgctcttctctctctttttttatctttttaaaatatatgtttatagctggtttatagcatgctattgtacatgctcttagagcaccacaccatagctaataagtgttcctagaaagcttaataaattttaataaatttttatcgtatggtatatactccgtagatagaagataaattccgtcgaccgatatctcgactcaccagtatggaaacaagagcgtatggtagtccatcattttctccgtgtgagacagaagtgtgacacccttgtttaaacctagggcaggccgtcataaagtcctgaaataacattccacttnccaaactaatagctaactttctgtctgagctaggaatcccaaactcgtattacct

SEQ ID NO: 46419 - DNA, 725 bp, Oryza sativa
  unsure (1)..(725): unsure at all n locations
cgcccacacgctcgtagnctacngatagcccctnnnnnnnnnnnnnnnnnnnnnnnnnnnnnnnnnnnnnnnnnnnnnnctgccagcgtgtttccggctatagctctataaaccgtttttgcaaacaggtggattgcattttggcatgcggttggccggtacacatgcgctagaaggtctgcaaagatcacgatctttgcatgccgccagtgcaaccgcatgcaaaaatcggattttcgcatgctgatgcttaagccggctgcatgcgaaaatgaaaaatcgcgaaaaaaaaataaaaatccccaaaaaaaaacccctagccctaagcgcccgagctcgccgatgccgctcgcaccacgccggatccatcgtgcccgagctcgccgacgtcgtcgtcgtctcggataggtcgtcgtggccgcacccaagctcgccgccgtcgtcgtagccgaggttgtcgtcgccgtacctccgccacgctcgagctcgccgtcaccacccgtcgccgtcaatgttgccaaggtcgccgtcgtcgcgaggaggtcctcgtaggtgtacccgtgccggatctcgccgcctcgagcttgtagtcgcccgagggagctcgttgtcacccgcggggagagtgcccgtgcccgatcccgctgaaggagggcggctgaccccggatcttgctcggggagggctacagtcccaaatccgatctggccgcctccgcccccccg

SEQ ID NO: 46420 - DNA, 726 bp, Oryza sativa
  unsure (1)..(726): unsure at all n locations
tttgggcccctttgngnnaaaaaagttcccaaganatnnntcacttngnngggaggtgtnnggatncaagnttatngatttngaaccctggttcgacaatcagcgtaaatgtctcatcgaagtcaatgccaagacgttgtgtgaagccacatagaacccaatgagccttatatctgtcaagagagccatcatcttaaacttgtgacgaagttagtgtcgggtgtattcggaatgagctcccaagtgtgattcactagcatagcattgtactcatccattggaacatgctaatttccaactcaagacactagccatagtttccttaaactccacatcattaagaaactagtaatagacactactcttccaacgcaaacaccactattccatacttaaatttaatgctacttatctcacataatgtcttggatgttatgtagaaaccatgtctaatgcaagacgtggtttccttctctttcctcatttattcacttgccacgtcatttttcatcctaggtggcatcttatttaatgctatggacaacatcctagtcattgggttgggaatgcccttagagaaagtttaatagtatagcccattactagctccaaatcatttatagcccatgtaatagcccattcatacaataggtggttactatatgtcacgcccagaaatttaagccaaatttttagactattttgtgtattaaatccctgtccagg

SEQ ID NO: 46421 - DNA, 701 bp, Oryza sativa
  unsure (1)..(701): unsure at all n locations
aggttatgtctgcttcgnnnnnnnnnnnnnnnnnnnnnnnnnnnnnnnnnaatcttaggaaggcttttcaacaagtttgcgccgccttcgagccactaattgatgtagatggtgaaagtggagatgatgattaaggaaagaacatctccgatttttgcttcatggcgcgtggtgaatctgacacagagtatgaagataatgaggtgagtgatcttgaggaagctattaatattttgagtgcaaaaaataagaagtagaccaagaaagatgggaacggtggggagtgaagggatgagcggtggggagagtgaagcgataaggataaggcggagagagatggcagtttttatatgtcgtgtttttaataggattaattggattaatgccattgcaaacatgtcatatataaaaaaaatgccagtattattcgtgaaacatagtgcgtgccattgaaatttttgaaaatttgaaccatgccactccgtcatgatttctgtcatagagatagatgccaagttgttgctatatcaccgattcaatttcatcctttctctctcgtcttgcatagattgggtttgttcgtccgttcgtcgtgcagcatatgggatcaagaagagaaaaaggatcttgtgcttgtggtaaatccccccaaaaaagaaggaaaaggatgggggagaagtttcttgaagcggatagagaat

SEQ ID NO: 46422 - DNA, 1646 bp, Oryza sativa
  unsure (1)..(1646): unsure at all n locations
cttgcccttcctcggaacaccgaccccgtgcacggccgctcctttccctccctcccgcgggtgggatagcgccgccgctcctcccacgtcagccggcccgacgatctcgcctcctccctcgtggcgttcccgtctgccctctccgctagcgcggcgctcccgacagtggctggataacatatagttgtagaagcaaaagaggaagaaagaatgaaaaagtagggaggatgacatgtggggccacatgggcccatcatttttattacttttttgtgtatagctgacgtgggtcccgtgggttttattattttttcggatcaagttaccatgtaagcgccacgtggaacgaagacctagtggagtgccatgtaggcaacacgtgaaacaatactacgataggaccttatttgcgtggttttataagtttggggatgcgttgtatccagttttgtgatgtagggatgaatttcgaactcggtgacaaattgagggacctaatatgaacttattccacagcatgagaactgcatgaggaggaagaaaagaaaaacaaccaaaaggagtcaaagtctcaaacaaaaggaaaagagtgtgtaataaaaagagaaaatatttttttagagacatagcacaaacacattattgtcagaaaactttccgaaagaagggtatttagaaaattttaaacatagattaatgaaacacatgataaacaaaaaaaaccaaaaagcaaactacggtgcagacaaaaaagtttaaatagttaattattgaaattaaaccatttttatttaggaatatccataaagctagaattatttaattaattaaacatctaaccatttttttatcgtggagtaaccatctatcagacattttatttccttaaataatttcttgcggtacaatcttaaaccaaatttcagtctcagaaattttaaacactacatatctaccacatacaatctctaaaagattttaaatattaaggaaaaatatgtcccaccataaaatctactctctctctctcagcagtcgattcgtaacagaggcaaactttctaagttctcgttgggaggaagggagcccgaccgtatccgagtggttctctcctctctctctcgatctctctctacgcacacagacacgccgcaaaaaacgcatgcaacacgcacgccgctatatatataattaaccatcactgcgtcgctgcggccgcccacagccaccgagcggattagtggaacaaaccctagcctgagtagattcttcctctagctttcgcgagccgtatcgtatccattggatggagccctagagcaacaagaagaagccaagaatatttgcgccatggagggtggtaattccagcaagggcgccatggagggtggtcaccgctgccgccccccaaacgtcgacgacgatgaccagatcgaggagggagagatctgctacgactgccacgtctcgggctccgagaccgacgacgacgagcaccacagacgcgccgtgctccctccccgcgacaatggcgatggctgcgcggagcacaaacggtgccggctcgacaatgctgctaccgcgcccgcaccctctgccgggccggtgctgaccaccagcaaaacgagcgncatcgtcgncatcgc

SEQ ID NO: 46423 - DNA, 1378 bp, Oryza sativa
  unsure (1)..(1378): unsure at all n locations
aggttagatgttcgtacgtgnnnnnnnnnnnnnnnnnnnnnnnnnnnnnnnnnnnnccgaatgtcgctggcaagcacatctctcttggaccaccacctttgccggaccttactccggccgccgctgaggtaacttcgtcggaaccacttgatcagccaccactactgtcaatggtggtgggtgcagaagttgcagcaccggcgctgcttgcgctggccaacgaggcagcggcattgccgccacaggatgatcaggcagaggaagaggcggctgcagaagccgctgcaccggccgaggcagcggcattgcgaccggttgaggcaggggcagaggcggccgatgttggagcagcaccagaggagccgctgctggcgcctattgccggcatgggaaccgtgcgtattttcggttttttggttgagaagccggcacctggagacggcagtggaggagagggttcagcgcctgcatagatcgtcctagttatgatatttgattttgtgattttctttagctatcttcagagccattaggatacttgatttagaggctttctttattatgttcaccgcatagtagttaagataatttttgcttttcgatagcagaagtgttttcttcgttgtactagctagttggccgggttttcgaggttaaagactataagaaacttacagttatatatggtgtgcaatgtggtctcaggtgttcggttgacgactggcaactggcaaggctgttttgtttggggtaatcctgatcctgaaggaaaacatgaaaagaccatgggaagtgaggggtactactatgtcccggacatctgacacgaggcatatcatcagacaaactgtggatcatccactgcatttgggcttttcatttgctctctctttgttacttacgaatatatacctctcacattttcttttagctgaagctctatgtatgcatcatctatccctctcacatttacatcttttagctcaagctctatttatacatgtggatgcgtgcatgtcctccatttacaaaatttaaataatttttcggatgaactgtttatccaatcaataatttgattacaccaccatattcatttcaagtaaatctttattaaaaagatacgtcctctgttcatattataagactttctagcattgcccatattcatatatatgttaatgaatctagatatatatgtgtgcttaaattcattaacaactatatgaatgtgggcaatgctagaaagtcttataacttgaaacggaggtagtattatataagtgtattctcatacaaataatgtatatataaagttttaaacgatnnnnnnnnnnnnnnnnnnnnnnnnnnnnnnnnnnnnnnnctcacgaatccc

SEQ ID NO: 46424 - DNA, 957 bp, Oryza sativa
  unsure (1)..(957): unsure at all n locations
actgggatctgagccttgatggtctgctgcttgcagttgggcctacacaatttgtttcaatataataattaataataccaaaattaaataactactcaatgcaaaccaactaatagtagaatagtccctctatttttttttaatgtatcgcatcatggactttttcattcaactctgactaacatttcaaccatacttagttaagtaaaatggaagaataccgagatatttgtcataaaacatgcattaagtgtcttgtatgtttgtacatgataatttttccgataactacgaatagttaagcaaacctcgtcgtatcaaactagagaaacctaggagctaccacttacaaatctaaacactgatgtaatgtgatcttgatgaagttgtaatcctatatatctataaagttcatccccactaagtatagttaatgctaattctctcttctctcatgaagctacaacacctcaattgtttttaacctttggatgattcatcaagggtgtaaattgtatctcttcacatcacctcaattgtttgtaagctcttggatgattcataaaggatataaattacatctcttccctccaaaggacacaccaagcaacccaatcatttataacctacggataattgataaaggtaaaaaaaatataaacacatgaaaaaaatcgtatagtaggtaagaaagaaaattttagaagtaatatctagtatattatcacataattctcccgcagcaacgcgcggagtacccatctagtactaattaacatggaatgcctaatgtatgatgggaattcttccccacataaaatacattcccaactattagtatgttaaaacaaataggttattaattaaattntttgtggccaagaaaatatttgtatgtaagtggttggaaaaagggaaagtttaaagtttagaattaaaaacctaatgattttaaaa

SEQ ID NO: 46425 - DNA, 866 bp, Oryza sativa
  unsure (1)..(866): unsure at all n locations
gatgtgcncaatggagactcgtcgtnnnnnnnnnnnnnnnnnnnnnnnnnnnnnnnnnnnnnnnnnnattcggccgatcgtcgtccccgactttacgtccacgaccgaacgtcgcctcggccgcagctcgtcctcgtcatcgtcaaccgaatgaactcatgcatgtgtgtgaggggtttgaatggtatatatatgtgtgatggctttggatgacatgtggggccggtttgggttttttttgggatgatatgtggctatgtgctatgtggtgatatatgtgttttatgtgttatatgaaatgttgaatgtgggtgatatgtgttgaaatttttttgatagggcatgtgggtgttatatgttcaacttcttttcagatgacatgtgggtgagatatgttcaatttttttatatgacatttgggagatatgttcattttttttacgtgacatgtgggtgatataagttcaattttttttatatgatatgtggaatttttttacatgacatgtgggtgatatcagttcaaattttttcatatgatatgtgggtgatacaagttcaatttttttatatgatatgtgggtgatataagttcaaatttttggtagatgatatgtgggtgatataagttcaatttttttgtagatgatatgtaggtgatataagttcaaattttttgtagatgacatttgggtgatatatgttcaattttttaatgacatttgggagatatgttcaattcttttttaatatgacaggtgggtaatatatgttagatattaattnnnnnnnnnnnnnnnnnnnnnnnnnnnnnnnnnnnnnnnnnnnnnnnnnnnnnnnnacatgtgaaatcataaagcgcggcg

SEQ ID NO: 46426 - DNA, 3650 bp, Oryza sativa
  unsure (1)..(3650): unsure at all n locations
cctgtctagagatagaaaaagggaaagagtgaaggaggagtatgacatgcgggtcccacaatttttttaaaaataaaatgctgactggactgccacgtgtacgccacgaaggccaaacccaccacggattggattgagggggggtatttcgtccggtatgcatagttgggggtgaaaaatatccggttttgtggttcgggggggggtaattcggatgaccgcaaaagttcaggggggtaattcgtactttttcctatatgataactcacctcgatttccacaaacaagacccacatcgctatgcagataaggcgaactttcgccgccaaaaactatttcttactttgtctgagtggaggttgcgatatgcccgtccacggtccgcctgcacaaacacttcttcactagtggagccttaaaccgtcctcctgatgtatgaattatcacaggcggaactaaaacacgaacgggttaagttgtcctcctgtaaaaatttttttatatatagtcttcttccttctcgaaccctgttcagtttaattagccgagatttttctctcccaaaacaaacaaattatagggtggggttttaaactcgaaacttttagtggattttcctaaggcggtcagatccatacattctcacacttgttatgaagtttttttttgctttttttttgtcttatctgtgatggatatcttttagagctctatgtgtgtgtgcatatttgtttttggcttttatgcttttttatattttaattttgtggcaggtgctcgcactcataattctatgcatgggaatcatgtgcctaacctgctttgaacctacacacatacacagagatatgtactgctagtagctcactagctcgttgaatttctgaatatattagtcaacacataatataaaataagcatgtgattagatttatttttgtaagggcaacatgccgttaaaaaagtgttgctaaaacaatcatatatatgtatgcttagataatcatgtattatcacagaagaatatgagctgggcaacctctgtaacatgttacagtatggtgtttgtgaattttcggccaaattctgaaagttttcgtctcaaggatattttcatcattagaacaaaattgtatgttactaatagaggctaactgaacagcgatggtaaatcgtagaagttaaacaaaaggcaatgacatattatggaactgaaaacagtcagtggcagattatggatctaggccatagacaatggtacacgatagattttctctaattagatcatgccattacaaatatacagtattaaaaaaataccactactaatcataaatcggctgccattagcattttctaaaatttgaaccatgcaaccatgtacacatcaggcacccgtgtactcgttttttacatacggcattttcgtatgaaccattttgcccttctctcccaagttccagccttccccctcttccccaccgccggcaagtacatcctcgaatcagatcggtcacccctgcctcccgccgttgcagtggggactgggacaagacatggatccaattacatttagagaaaaataaacattaaaaccttcactaggtatatctaactggccttgatagacaggagttagagatgccaaaaggtaatcttcaattttttatatagaatacagcttaacaatatttattctaaaaccagagattattacctctgttttaaaatgtttggagttgtttgcatttaaggccccccttgattcaaaagaaattcgtaagaattttacaggatttcatttctatagaaatttttacactttgaatcaaagaaatgaatcctatggaaatcctatgaaatacatatggaatgcctaatacaatgcaagttttggaggagttataacatgaggttctacctcatgaaaacttttctttgagtctttatctcttctctaattcctgtgtttttcctacggtctaatcaaacggccattcctgtattttggaattatctggtttacatttatattcatatcaaaatcctgtgtttttcctattcttatattttctcaatcctgcaattcaaatgaccctaaatattacgatggatcattagtgttctttgaaaaacaacgtaaatatcgtttctcagcttgttgtgacttgtatcagtacgatttatatttttctatctgcactgattttttttaataagatacagtatatagttaatagggcgtttgtatttaatacagagtgtgtactatagtgaaagaaataaatacgataatacatgcatcctagtcacacgggttaaaataaaggacccaaaaaacgtgtaacacctgcaacatgtgtttgtttcttttcaatatatttgttttgtatctatggtgtgcattactgttgacgattggtcattgcaaatcttattacagcttactttaaatgacaacgtagttggtaggacagtatctcttaaatctttgacaaaatattcctaacgggggacactatcgcgaactgttagagattatacatacgcatgactggtttaggagtgtggttgtctgggaggcgaggcttcgttcgtttcacggtgagtttagaatatttacggtgcacgtgaaacgagcgtagctcaactagttagttttaatttcttgtgatggaaccagctcaactagattcaaatcataaatttaacatggcgctcggtaggcgacatgcccgtagttactttgccaatcaggagatatgttagcccaatcttccggagatgttaattgggtagagtgtttgtgtgttcatagatttgaatacacacgtgttgtgagcgtctgcgtttatactgtgtttctaaaagaactaattagtatataattaattaaatattactaattacaaacttaatttttttaaaaaaaatcaaaaattattgtagactatgatcattttttacacctccatcaacatgactgaggtgcccgccattctcgttttcaatatccactgtaacataaaaccatttaccaaccgaatactttaataagactaataattaattgttatatatattcaaaagttaataatgttatgtgtttgaaaacacagggtgtattatagagaaaaaatggccaaatacgatgctgcatcatcatagcaaactcgcacgagcaaaaaatgaaaaccccgaacgaacgtgttgcacctggcaggcgtgttggtttcttttcaatattttttttatctacggagtgctttatcattgatggttggtcattacgaatcacagattactttaatcactagttgatactccctccatttaatcactagtttttttaattttattttagtcaaactttttaaaagtttgaacaaacttatagaagaatatggtaacacttataacaccaaattcacactactgcaaaatatcaaataagtgtcggcactataggtgccagaagtgctaaaaccagcacctataggctttttcccacctccgcgggttgaaatcgtaaaaaaccgacaccttgaagtaattataggtgtcggttataaatannnnnnnnnnnnnnnnnnnnnnnnnnnnnnnnnnnnnnnnnnnnnnnnnnnncacgtgtcgtaaccgtctatgcc

SEQ ID NO: 46427 - DNA, 721 bp, Oryza sativa
  unsure (1)..(721): unsure at all n locations
aatggctnnatgatgataatacatgccnctgacaacnnacnnnnnnnnnnnnnnnnnnnnnnnnnnnnnnnatcgtggagtactcacagctgatagtcgagccttcacaacctaccggggagccgtcatgcattatgccgcgctgatgtaaatagtattaatagttagcgtaaataatatgacaatataaattattccttcgtacgttaccatggcataagtgaattagatgtataataaaagaaagaaaaaaacaaaacctatattatgtttgcgaatgatggttgtagaccagtttacatataatagtgacaaagtgatttttgtttgcatgtgatagacattaacattcagtatattaaagtctatgttctatttcacgttataaattaatattttcttcttgcataattataacatattcttcttattgtgtatatgatgagaactggcttcttttaatatactttttacaaataactagttgggtggccctcgcaattgcgcggttagcatccatataaaattatatatattttaatatgttttacttaaaatttattaaatggttatcttgttgtctcaagacattgtaaaaccaaaccttatcatcctcatgtttttaattttattggttttaaaagtcacactagttgctaccccttacttctggcatatccttctttgtttgcttgctcgaactaccactggttttatttat

SEQ ID NO: 46428 - DNA, 747 bp, Oryza sativa
  unsure (1)..(747): unsure at all n locations
cgtatagacggttagnngaaccttgncaannnncgttnnnnnnnnnnnnnnnnnnnnnnnnnnnnnnnnnnttaatttggtgaattatttagtgaaataaataaattatttagtgaactattgttcgttactgaattatttagtgaaatatatgaaaatagtttttttagtgaatttagtgagtttggtgaattatttagtgaaataaatgaattatttagtgaattattgtactttagtgaattatttagtgaaatatatgaaaataataatttttatagtgaatttagttaatctggtaaattatttagtgaattattttgactacaggtcaactaaaaatagcaaacaaatataaaaaaataattagttcatatgtaaaaaatggacaaatactatcggtgacgggccttaaagtaatgcctgatacagattacgtcatgtttatcgggatttagtttaaggcccgtcacagatgactcatccgttacaggctttagtttaatgcctgatagagatgatgtcaactctatcgggcattactttgatgcccgtcatgggctctagactaagcccgattgagataatgctttgaccatatttggactanggttcactctccctcaaatctagaacgaaaatttttcgaagctcccccactttttgaaccctagcaccggccaccctttgggggcccaccggcgcctatcgccggcgttccccgagcccttatgcccggcgccacct

SEQ ID NO: 46429 - DNA, 2449 bp, Oryza sativa
tgaccccacaaagatgaaaatatatcctccttacgcaaggtaattaaataacataagaaaggaccatggatgcttacttaatagaagaagtttctccgaacccatagcaaagtataccgacagctccggtactcctcccgaattcctcctagaaagctacactcgtcgaggtagaagtcggatgagcaccaaacttccgggcactcctccagagcttcccctcactctcgaccttattttaatgtacaaaagatacaatagagcctcttgtaattcagctcaaagttgtgtgtgttggaatgagagtaagctcctccttttatagcctccatatgatagtacaagtatgggaaacgaccaaactaccctccaaccgtcattgggatgaaatcaggagcgtacacgtggaaggctggtgattaacagccacaacaacggttcggccggaccaaaaaaatgtcttcccggcctctcctttggcgggtaggtagcttattgggcctccaacatcatgtactttgatttggctcaattctaagtggttttggttgacatatggggccctcgaatcagtgtaaacgcgtcctgaatatgcggaggtgcattttgtcgcatgacagatgtgttttctcctcaaaatacccgcatacacatatttcaccaacactagtggaaatgattagtaataaaacctaccactaagttggataccatattttatttcattatatgcaagtattgacggtcaaatattatgatttaaggaccgtcaacaacacctccacacttaaccttcactcgtccgagtgaaggctatggactctacaacagggttatgactttcttactaataatcatgcaaacaaattattcaaagtcatacctatagttgtggatctttatagtgtcttccatgcaatcctgagcaattgagaaatggaacaatcttgactcaagtcaccctaacttttcatgaagaacaacttagggtttttcatgtaacacaaaattataactctgctttgttgctcaattgattctctcgatcactcaaagtgtatgattcctcacaatggcatatgattgcgccttctctgaaactactttgaatcatcattgcaaaactgccactagaaaattgcaaaaataccactagaactgtcatttgagtggcatccttacaatattgaaaaaaccggtggcaaatttgcaaatgcccctttcttttcctaccatctaataaggcttatgtggagctcagggtgtggaaaagagtagagcactacttgcatcacatatattacaaagtcaaataatggatccacagaaatacgagacatactttctggtcaaaaatgtgcatgtgtatgtggatggttaatttgtgggtgaaaaggaatgaaaataataactccttttgtgtacctcctccatttattttctcttttgaaattttggaaagtgcatggctatctctttttttttctttctttttttttctcatcatcatgctccatacttgtatgagcactttttttctttctttttgcatagccatgcctctctctcatttttttaaagaactttggaggaagaggcataaatgacatggagtatttattttgtgaatagtggatgaaatgtatgacaaatgatgaatgctaacttccagtgtagaagtcaagcattggtgggtgtatgtgatcttgaccatgaaagtatgaaaagcatttcatacggatctcaaaacttgacagcgctcaatgtaatgacaagcagcgtatgtagcaagttaatcatgaataatcaacctatggctctagtaggaataaaaatatcaatgaggagtttaccatcgttatattttctttcttttataaaatgaagtgtacaacatgaagtgcaggatttctatcatcaaactatatcttattcatcaattacctagataacagggggtccctattggatatgtcaccacaagcaacaagtaatcagcaaacaataataggcatgcatgttattttaaggaagaccatgaactctaattgtaccatccctagcttgagtttaattatcttcgatattttagaattagaattgataatcaaattgaactcaagatagaatggatgtccaaagaaaaattgtgcaaacctgctttctgtataaaacagaggatgattcatatggtttgtcatggcttatcacttttggggtgatcttgctttggttacggcgttgatgtgcaagatcacccccacacttgtctttgtatctgggatgctttattggacaccaaaagaaaaaacaaagaccaaagtgaagcggaaaggactcacttggttggaagaccaaggaggcgactttattttattttattttattcatgaaagctagacctaagataactagaaggaggcctaaggactcatggcattaaaaacta

SEQ ID NO: 46430 - DNA, 1327 bp, Oryza sativa
  unsure (1)..(1327): unsure at all n locations
catgtttnnanatagatactgctcctnnnnnnnnnnnnnnnnnnnnnnnnnnnnnnnnnnnnnnnnnnagaaatttaggactgtgacaatattagaaatacattatgtacaccaagaaatgatgtttaacttatttgctccattatttcattacttttatttataaaactttggtatgccacatgttccttatttcttgcaaatccattatttaaattttagccaatttctattatacaaaatatatttgtcccagaaagaaaatctcaatggaatgacaaggaaataattggctcaaaagatgaagcatgcacttctcattacatcaatgttgagaattttattctttaacgtatgtttatatcacgagatcaaattttggttggtttgaagcgtattaaggagataagctagcaaaattcttgtgaattatccactcaattcacgtaacgaggaggtattatttcagggatcaagaggccataacatgttttaataggttttcacgttttataattgatggttttgcagtaagaagtcgtaagaaaattctactagttacaactggtgtcaggaaatttatttgtcgatagggctaaccaacccgtttgagttgtaactcctctaggtatgttgaaaatcatttaggtttttattgctaagcttgagactgtgcctttgttcaagcaactacatacaaatattttcttgggcacaaggagttaattaataacttatttgttttaacatactaatagttgtgaatgtattttatttgtgcaagaattcccatcatacattaggcattccatgttgattagtactagatgggtactccgcgcgttgctgcgggagaattatgtgataatagcgtacatattacttctaagattttctttcttacctactatacgatttttttcatgtgtttatatttttttcaccttgatcaattatccgtaggttataaatgattgggttgcgtggtgtgtcctttgtacgcaatagatgtgatttatatcctgtatcaatcatccgagagcttactcaacaatggaggtgatgtgaagagattcgcttgacccccttgatgaatcatccaaaggttcccatcaattttggtgttgtagcttcatcagataagagataattagcattaccgacacttagtgggcatgaacttcatagcgagatagcatccgccttcatcagggtctcatgacaccagtgtttagattggtaaggttggttatcaataagtcttgcttgggtagagctcgctccgcgtgggttgcatggatagaagttgttctacctacacatgccg

SEQ ID NO: 46431 - DNA, 1005 bp, Oryza sativa
  unsure (1)..(1005): unsure at all n locations
agtgtgattgttgcctgnagaatctctggcnnnnnnnnnnnnnnnnnnnnnnnnnnnnnnnnnnnnnnnnnnnnnnnnnnnnnnctgggcgagctggatcgggccgacggcccaagaaagaaaaagaggaaaagaaaagggaaaaaggaaaaaaaaaggaaaaaggatttttcctgggattaaaatattgcgcttgctcatttttaattggttaaaattatttccaaggctctgaaaattccactaaaaatcttgttaatgcattggagcatggggaactcaagaaaaattccaccatgcatttccgattattaattgcatttattaattagagaattagctctaggttaattaagataatttcttcggacgatttatttagccaatttttaaagcaaggagagggggaaacttcagggcgtgacacgcggcgacgacaatggcggcgggcggcagcggctaggtcaggcgaggcgaatccggtgcggtggcgagcggcgtccacgagctcgggcgccggctggtagggttttttttttggacttttatttttttcgcgattttttctttttgtatgcggttgacttaagtgcccgcatgcggattttcgcatgcgttcggcctagccgcatgcaaagatcgccatctttgcagacgatttggcacatgcggttggcgctaccgcatgcgaaaatcgctcccgcccgtatgcaaaaaccgattttgtagtagtggcggcggccggcaggagaggatcagcggttcacggcggccggagggcgggagggagaggagcggccgtgcccccgtgctggcgaagggggcggccgacgggagcaccgcgagggaggaggcgagctcgtcaaggcggccgacaggagaggagcgacggcgcgtggggaccaaccggagatgaggcagtgcgcgccaatccaccggagggagggagaggagcggtggcccacccgccggaaaagagcaatggttccccgccctctccacctg

SEQ ID NO: 46432 - DNA, 1118 bp, Oryza sativa
gctcatttatattgtcccatttatttattccatttgatgggtgtcgtcgcgtcttcttttcatctacttttgtttcattctatggcatttggactttgtgtcacaaattatattataagtgaggcactaataaaaaatgtgtttttcttggcaccttctttcttttttttcctctagtggataaaattcgaaacacttgtgaaaatataactgaacgcccttgtttaatgatcactagttgtcgtcttaaaacaattgcctgtaaaaatatccccattttcacaagctatcttcctagccaactacttttgaaaatattttgtcaccatcggttctgctacgcaattgcgtgataaataaaacgcttcacggtattaaaaagggttaattggatccatgtcactgcaaatatgacatactaaaaaaataccactactattcttgaaatttgttgcgtgccgctagaatttttaaaaaattagaaccatgtcactctgtagatggatgccaagctgtctcgccagtgacctcgagcctccgccccgatatcaaagacgtcaccgctcgtggatgctgctattgctattcatgcggcccaaagcagagccaccccttgaggcccatgccgcagatgccatggacactaacttcctccttagggttgcggcagctttggcggcgacgaggaagagaagtagaggaaggaccagaaactcttcatccccgggctctcagccgtcacggaagatggcggagggttggccactggcacagcagagggaccgtggtgtgacgtcacagacctttctccgctctagcccaccgccgaggagtagagcgggggggcaccgctgcacggtggaagcatggcgactaggtagagggcggatgttttggaccccgagagggaagaagaggctggagtgctagacttggacgagaacacgagcctgcccagcttctcccgtaggcagtaggcacatattcctccgctagccatcgccaccaccgcttgtagggatgctcgctagcttcgctgcagtactgaattcattcaggcatgcttgcactaccgagccatcatcctcattctcattatccactcctttctccggtta

SEQ ID NO: 46433 - DNA, 3800 bp, Oryza sativa
  unsure (1)..(3800): unsure at all n locations
aagaatgaaattgaatcggtgatatagcaccaactgggcatctatctctatgacagaaatcatgacgaagtggcatggttcaaatttccaaaaatttcaatggcacgcactatgtttcacgaataatactggcattttttttatatatgacatgtttgcaatggcatttaatccaattaatcctattaaaaacacgacatataaaaactgccatctctctccaccttatccttatcgcttcactctccccaccgctcatcccttcactccccaccgttcccatctttctgggtctctctttgtcacaccctaattttcgttcgggatcaaaaattattaaatagcgcatatctagaaattatgtaaaagttaattttatcaagtaaattaatgagggaattaaaatttccttttaaaatcatggccgaaaatatttttgcaatatcctttgtgccctaaatattctctgaaatttctcttgaatttttggagctcaagaagtaattttaaataaaacaaagttcattaaatcaattaaattaaattgaaaaccaattaaagttctcccaataaaggtgcagtgttaggggtaccccaagacgatgaaaagatggatggaatatttgagagtgatatcatatatggattattagaactctataaccttgaaagttatgtggaaaatagtgaccggaaacaacaccctagtggtgtgaacatggatcaagaatggttttacttaatttaaggcaacagttatagcttccagaaatcatttcaatgcctctcggaagttgactaagaaatcattccatacatgggtcagaaagatacaagggtcaggtccggaaaggtttagccagcagagtgtacgacagagaatccttctcgataaatcatcccaactcaaggtttgaaagtggagttattatgatcaaagagaaagagcagaaactcttgatagcgccaaagtcagtttccaacagtcatacagattgcagtatttgttggaaagcaactttagagcttatagtctatcaacccagaggagtcaataaaggataagcaaagaagtgaaatgttatatcgaggaaataatcttttgagcttgatctattaagtgatcagtgcttatttcaagatatcaactaagcagcccgttcaaccagttgacaccgaagtcagggcagaacagaacagtcatgcagatggaaaggtcaatcaagagtctgtatgttcggaaactgaatgagagtcacttttgtggaacttcctgtcaacaactgatcagtgttatgttccaagccctcttggaatgaaagtgcaccggcatcaccttatttgaactgattgatgaagcgatgagttctccaagtcagggttccaggaaaataaccgaagtttggttattttcaaggatagcagtttaattgatcacggtcaggcaaatgctcaaccacttgttttaagggtaagtctcgaagatgatttttgtcatgccccgtaaccgtttcaattggatgttcagataagcagggaaagaacagttatagctcaaagaagcctattgccaagttaacagatttaaatctaacgtgtacacccgggctgccgtgtcaacagttcagcctacagaagaacagggagaaatcgtaatccaggtgaaatgccgatcaagcaacttcttcaaatacttgtttccgggtcaagagtagttcaaagcaaagtaagcatatgaggattcacgaaagtcagtgcaaaagatgcaccaattccttgtcagcaaagtgagttatcagtttatcaagtatgtcagcactaacagttcagtccaagatcgaaattaaatggcacaagaaactgcattatgccgctctcatgtaaatagtattaatagttagcgtaaataatatgacaatataaattattccttcgtacgttaccatggcataagtgaattagatgtataataaaagaaagaaaaaaacaaaacctatattatgtttgcgaatgatggttgtagacgagtttacatataatagtgacaaagtgatttttgtttgcatgtgatagacattaacattcagtatattaaagtctatgttctatttcacgttataaattaatattttcttcttgcataattataacatattcttcttattgtgtatatgatgagaactggcttcttttaatatactttttacaaataactagttgggtggccctcgcaattgcgcggttagcatccatataaaattatatatattttaatatgttttacttaaaatttattaaatggttatcttgttgtctcaagacattgtaaaaccaaaccttatcatcctcatgtttttaattttattgtttttaaaagtcacactagttgctaccccttacttctgtcatatccttctttgtttgcttgctcgatctaccactgtttctattcattctccttgcaacctttaaaagttggatcttatagtttttaaagtttattgtcctgttggatttcatttttataatttctagaagcctcgtcaaacactaccattatactcctctacggccgtccactgcatcttctccatttttactttctagaagttccgccaaaacgcccgggactttgtcactatactcctccacggctcgcctgctgccgctcttctttattgtcattgagattttaaattcaaacataattattattggtttttttttactttttagaagcccgaacctttaaaaagggatcttatagtttttagagtttattgtctcgttgggttatgaacagtgtatttaacggcgcgggatggacagaaccctaacggcgatgttatttttagacaaaatcatttgtacgatggtatttcttggaattcacgcttatcgatagtatttcttagatttggacacttgtcaatggtatttattggattatctctaatttaaattagcagcttgatttatatgttataattttttttaggttttccgttttttacataatcaatatagaaagggcggacaccgggtgtggaacaggagggagctagggagtacgtatgtacgtttgtacgtatgtgtataggacggtgatttagtgatttagtgagagatcatatagcatgaaaatagaaactaatatagcatggaaataagagagatcatatagcatggaaataggtgagaattaaagggatagaggggagggagggcgtgtatctctgatctcccgtacgcacggaccaagcgggatgtggatttttttttaccaaaaaatagaactaattccatgtattattgggtccaccaaataagtgtaaatctaataactaaaaatctgaaatagtgggtccaccggtttattagattaccacgtggcggcttaattaggagcgtttgtaggagtccaatgtggcggcatgagaacgtttgtaggaagtttaatggacttttaatatataataataatagatagatagataaataaattgcctacgtatctatccaggcttccttcctagttttgttaattggagggaagaaatttgccaatcgactaggttgtgtagatacgtgtagaaaaatggggttttgatatttgcatgtcgcgctttgtttattaatttcgggtcatggatgtaaatgtccctttcataagggtaaccatgtaaattcccctgtataaccaaaaccctagtagtaagaannnnnnnnnnnnnnnnnnnnnnnnnnnnnnnnnnnnnnnnnnnnnnnnnnnnnnnnnataggttaacaataaacatcct

SEQ ID NO: 46434 - DNA, 721 bp, Oryza sativa
  unsure (1)..(721): unsure at all n locations
gagattcnaagtaagacacgctgcctnnnnnnnnnnnnnnnnnnnnnnnnnnnnnnnnnnnnnnnnnntcattttcgagttattgcggcctatttggacatactcgacgcgtagactgttctgttatccatcaatacaagcccgcggggtttgatgtgtcgcacacagatactgcaacactccggatgcaaaaaaaaaaagggatcggtcatcagggcaactgttaattatgggccatgttaaagagccgtgggaaaccaataatagagccaaataaatctcttgctgtcaaacttttcatagccgaacacacctcaatgaactcattcgctcggaaaacaacctacagagctgtcgggaacaacaagagtacttcctcgctccactaatgaaataatgtattctcgggtcttaaaatcgcctcaggcgaaacggggcaccccaagagaatactccgaaacatatgtgtagattgccgcccccttcccctgagcattgactagcggcgaaataacccgatgacgcatactgctgcacgaaactctgtgcgcaggtgtcacgatcctgtaaccggaggctggagacccagatgcggggctaccgactgctacatgagcgcctaattaaaaaacggnggccgtctaaacgtctaggcatgcgtcagcgcgggaactagaaactccgcagaagactcgtcctgcttaagacgcgagcgacattt

SEQ ID NO: 46435 - DNA, 722 bp, Oryza sativa
  unsure (1)..(722): unsure at all n locations
tttcgtcaccgtgttgataaacggaatctcacagaatggagcctttaattgcactgtaacagcaaacaacttttgggaagggaaaagctccagctccagtgtttgaaaatccacaagcgaatgtccaaaatacgacctgttagggaacggtcgatgtataatgcgtagaaagcagtcatatatccgtaactcacaggtctgtagggaactctaaaatgaaagttccggcttggaagacagtaacttccgacaacnttatggaacgttcagtggtcagtccgtacatcctgaacgtagaaacaaggatggtcaggacgagctgttgggtcctcttcgagtataagcaacatggcctcatagggattcttgacacttggttcaaactgagtgcctttggagtatcccaaagcatcacgtggaaccccgctgaatagtgcggttttgcctaacacttcgtagtcaaaaaaggaaccatcgtagcacttctcgagggcgagaggactttatgtatgtacttttggggggtcaccaagcatccatattcatcgccgtggatctaatgcactaaataggaactcaataaggtcattagtcctttaacaagagatgtcattattcaccggaacccagtagggggnnnnnnnnnnnnnnnnnnnnnnnnnnnnnnnnnnnnnnnnnnnnnnnnnnnnnnnnnnatgangttagncaaactccgggcaggg

SEQ ID NO: 46436 - DNA, 515 bp, Oryza sativa
tgatatgaatatttcccaaagtctaaagttgtaaaaccacctaaggttacctaattaaagcgaagcatctacctaaaatttatactagggataccatgagtaaagtgtccactagttgaggttttgcttgtctagggtgaacaaggtaatagtaataacaataacaataataatatggtcataacaaaggtaaataggcatggctaagtaaaacagtgataacgcgggaatttaaataaagcgataatgcaataatttaaatcaacataattttataaactgggattcaatatgatcaagatgatgtgtcttgccttgctcgttttcccaatcgacggcttcgacttccacgaagagcggatcttccgaagctgcagcgtctacacgaccaacggaaaagaaaaaggctttaacactaaataactccacataacagcagaaacaaagcacaaaaatgggttctttacatcttaaggaaaaattagagacttgaacggtccaattccgagttcaaa

SEQ ID NO: 46437 - DNA, 1561 bp, Oryza sativa
  unsure (1)..(1561): unsure at all n locations
aaaattttttctattggattgaaatcctccaaaattcttatgtattttctttaatcaaaagggcctaaatgctttttaaaaaaaccccccccccacaaaagggggggnccganaattaatggaataaaatctttattttttattcaattatagtttttggttttcactacatatggtatgtccagcatgtataacaaaacttactaatacatgggaaggaatggctcggagaagactcttgtctagtactactatgttccacaaatcttaacctgatcgatcaacaggcttcaaactttctttttccacacttcgatttgtttgagcgcctctgtttttcccctgtttgttcggagctctgttccgccactgtttttcacgtcattcatattgtgtgatttgtgtgaactgtcacatttatcttcacgtgatttagcccttgtttagtttccacctttttcttcaaactagcaaggtagcccgcgcggcacctttacttagtggtgtttgaaattttgttatcatgtttatgtataggttctttttaaaaaatatatcttttttacttttaaaaatctgcatttatcaataatttgttagggattgttttgaaagttggtttcgttcattggacatacggacgtgcgctaagaggggggcatgttcttagacatttgtctacatgcatgcgtagctatgcaggtaagttggaccgacgaggacgtcgggacatttgacggttgtgtgtgacatcctacttcacttagaatgtggcctttctttttttagaaaaaaatgtgacctatgttgctcataaacattgtgtgcgcttgagtacaaccaacttgtaagtcattgtcccttccaacatatcattttcgggctaactattttacacaaagtgagaacaaaaatgtaagtgggatgatatttgaaagtgggcgtactagttggatgagctaggctgtgttgttctagatgataggttgttacaaattgtaaactaaaattacttaaatcatgtcgtaatatgtcgcaagaatggagcagctggttcatatgaaactataatttatattacatgtgtttagatttttttaaaaaaaatatcatattaattaaaaccgtaatatattttttatactaaagatgttttttagattttatgatatattagtttaagaaattttttattaaaaatgtggtaatatgatttctttatctaatttattaaattaagacatacccacgtactcttgtttgcttctcctacctccatccataaatcgaaatatttaaattttatggtaaattataagggattataaatactactcgtaccatccaaccatctctcatttaatttttatccaatattactttaaccaccttataattcgccaactaccctatttaatgagacttattgaatgaggggcaaaaatatccctttttgggttttggggggggcccccttttttttttccccttctagattttttcttccttcttatttcctataaaattatatgatccattttaggcagaagatagaattaaa

SEQ ID NO: 46438 - DNA, 1211 bp, Oryza sativa
  unsure (1)..(1211): unsure at all n locations
actacatgcccgctatatgtgcatgcagtagcctatcttcctactcactagcattctcccccttcagatggccccccttttttttttttttttacctaaaagcggttttttttataaaataggcttgacatgagttttcttctaaattatttatattcaatttacaatccgattatatcttgaatttattgttattaaatatgtaaaaaaagatatcacataattatattcttatgaaagatatataaacttatgttttaaccatgaaaattcatgttcatacgcgatactgaaatgtttcaacatatgtttcacataatctttcagtatttcaatcactattttttttaatgtttcacctgtggacaacttaaacatttcaccccccccccaaatttttttatggaaattaggtgcctggtatcaatttcatgttggtacttcctcccgttccgtaatccttgatgttttggataagattgagatcaacaattaaaactttaactatcaatactcccttcatttcacaatgtaagtcattctaacattttccacattcatattgatgttaatgaatctagacatatatatctatctagattcattaacattcatatacatcaatatgaatgtgagaaatactagaataacttacattgtaaaacggaggaagtaacttttaaaatatctagtttgaagaaactacaacattatgcatagattaattttgaaacatgcattaataaatttaaataatataataaaaatatagttaaaaatatgttctcgagaccgtattattgtccaacacgtcaagaaatataatagaactgaggggagaatttagtcagatggtttatttatacgaaattatcattaaaaatgcttcctatcggtctgctgataaagccaacagattgtgcctccatcttgcgcttgcactctctgcatccggcgcacctccactggtggagaaaccatctttcgtcggtcggccgatttccacaatagtcccggatgcaataaaaaccggggctaaagatgatctttagtcccggttcaaaagggtaacgggcatatttgatctttagtcccggtttgaagtaaccaaccgggactaaagatcatctttagtnnnnnnnnnnnnnnnnnnnnnnnnnnnnnnnnnnnnnnnnnnnnnnnnnnnnnnnnngcattgcattcaagcgcgc

SEQ ID NO: 46439 - DNA, 936 bp, Oryza sativa
  unsure (1)..(936): unsure at all n locations
gtgtgcattgaanatcgatataacnnnnnnnnnnnnnnnnnnnnnnnnnnnnnnnnnnnnnnnnnnnnnnnnnnnnnnnnnnnnnnatcaagagtaattggactgtacttatatatccagtctgcccccaaaattacatcatatccctttagtggtattatattgaacttgttgctaaatgtctccccttgtatctggtaaaccaattcaggaacctgtacttcagatttcaattctccccctccagcgactaccactttctttgcatcagtcgacactagaggacaatggtttctgacagcatagtcttgatccataaatgtgctagtgctgccactatctaccaggccaacagcccttcttccattaatctgaataattacagaaaaagtatctggcctcgtggttccatatacagcattgtgcgacacaaacataagctcttcttgattttcatcatcaggtggtgcttcctccttttccaacttgcagtcctcctgattccctgttaactcaccttcttccccctcatcttttccttcttccccttccatgagcaaggcatttaaagcctttttcactttacactgatgtttaggaaaccagggctctttgcaaaaccaacatttcctctcctccttcttctccacctgttctctaggttggcctctgttgacaacatttcttccctgaataggcccagcctgattctggaacctattcctgttaaagttcagtagattcttcctagcatttgctgctctctcatagttctttgtataccaataggattccagcagcccctggggcttatggccacacacatcatgcttaatatcacctctgagccctccaataaagcagctatttagatactnnnnnnnnnnnnnnnnnnnnnnnnnnnnnnnnnnnnnnncgcgcgcaatcaatngacgc

SEQ ID NO: 46440 - DNA, 725 bp, Oryza sativa
  unsure (1)..(725): unsure at all n locations
gcgtgcactgatagcttagagcccatgatacnnnnnnnnnnnnnnnnnnnnnnnnntatcaaatgtagattacgtaatatggtaaatttcacataaacataacaggagcagacaaataattgacagcacaagtcagtgattatcaaacataactcgctaacctatctcacaagatacagaatgatctcaagatgaaacagtgatggattcttaacatgagaaagcataccaatgactgatgtctggttgcaaatccaatttgtcgctgacagattgttgcttcattttctcttcaaaaatatagccctgccaataagaatcatacttagtgttatatcatgtgtgcatgaactaaacaccaaataggtaaatatacatgaaaagaatgagctgagtgataattgtaggctataattccataatgaaaaccaattggttcttatggcaccatacaccatattttggtggcctgattactacctaaaaggatgcatgcaaccaaaagttctttcaattatatgaaaggagctgcgcttaagatgcaatgcatctgaatttggaaaactaagatggataatctataagacattatgatatatgtttaattgatgcagcaaactgtggaatggaaaacatggaaattgaaataatactccataaggaaatcatgacaatattacatttttgtgtgaggtcccttatanggtgataggaatatctagatc

SEQ ID NO: 46441 - DNA, 1641 bp, Oryza sativa
agacaaaattaacatgaacaccatataacagcttaaaccatcacgtaggctaaatataaatcacatagtgcatatcataattcatcaattaatttagcttgttttcttcacatccttttcaagagggtataagtcatttaatgacatgtaagtacgtaatatacttaggaagtgcaatatttatacatgtcattgtcagacaatcatatctcaacaatccattttgagatgctgataccaacgcaaccaaactgaagtactgaacatcgcatgagctgaacacgcaaacttctgatgaagtcaaaatcatgaactctaaaacacagttcagttgaacaggccggccactgacaatcgcatcagctactgacttcggagatgctgtgcagcgatgggcgccattgacgatgccgggagtgtgtcgccgagctgctccgttggccgtctatatcatgctacgcaaaccgcgataggatgggcagcagaagagtaatcagaattcagaacatggcactttgtcaaaatttaataaagtttaggagactttgcaatcaaatcaaattaaagataaacctaaattatgaaggctaaggtgttcaatactggaatgtcaagctaatgagattagatcttgccaaattacatgctattcctgacagggaaatgtagatggctagaagatgaataatggtcttttgcaggaactgaaaatccctttcttgtcgcaacaagacatttgatgtttattattatcacccataaactgtttcaagaattgtcggtgatttttttaaaatttaattcgtctgaagttttggaactgacaactaggttcgaggccttagtggagcacttcacttttctgaggcattcatagttcatacaacatgtggacactctgttcatgtaatcttggatatttaggaacatgacagtactaatgtaatcttggatatttaggaacatgacagtactattacttcaatctgaaaagttgatgtgacagaaaaaataaataaaaccaagatgttgacacaccataaagtaagcctataaatccaaacttatcactgctcacaagtttgtatgattgcaaagccttactactgccataggctcacattggaggaagtagttagcagatcgttctataatcatcacaggaaaaaggtttcctgaccaaactactagtgattaaaaagcttcccaagtccagcagccatatgcagttgtattgtaccttataacttacaagatctgattaaaaactgctgcaatgtttctgcacatatggaaacgcacgcctaactttcagaagagattttacctgatgcacacagcaaaatgatctgttcccatgcatgcagtcttgatggctatagaaaaggagtctgttcttcacctattgctaagattggagccactgaactggtagaaataggaaacagtcagcaaacgaaattgaaatggattcagaggagggtgtaactagaagaataccccccccccctccccaaacaaaaaaagttttcagtattaatggcacaagtaatcttgcgttcttgccatgatctggctcctgattacaagtctcttgtctgaacctgaattggtaccccagactatgttcaactaagactt

SEQ ID NO: 46442 - DNA, 945 bp, Oryza sativa
  unsure (1)..(945): unsure at all n locations
attcttgtgttctgccaatatctgttctcctgatnacaagtctcttgtctgaacgtaaattgtaaccccagactatgttcacttaagactatgtacaagtatatccttcccaataaagaaaatctccatatatcattttaaaactatttcgaatttccattccatggaattcaaccaggaacagtaacatttgattgaacaataactgtctaataaagtttagttcacagcatttctaatccaaaagcattcaccagcggaaacacttaatatgcacatcttgagaaaagattaaactaatccaaaacaaaaacaatgccaataatacaaaatatacaaagtttgtgagacacaattaccttattggttatttgtgtgcaatgtctcacggaatggccttcgtctcttcgatggagctccttttgccctaatctcttcaggatcaagtactctcttctctaatggctggttactagacgaaaagtgagttggcataggaccaaaatctccggccacgatgttctcatcggatgacgatcctttatccaaaatcccctttaagaaatccatcgccttttctgtctgctcagggttcctagcggcctcgaagaaagcatcactacctagatttcggaggctacggtaccgaaccatgtgttcagaccacacattaggatcggcattcctgtctgacctaaatgccgcctttgctcccattgtccacctatccacgacacaacaacgagggatggtgtcaaaaccaaggaacttgactacaacaaaaatgtgtgagcaagggatgtctttgcactccatcttccgacagtgacattccacaccttccaaagcctggcctttaaaagaaaggggtgccgaattcccgagtttaaggnngcgggngtttcgagnggattcaaaannngngggtttcaaaatgtgaactcg

SEQ ID NO: 46443 - DNA, 578 bp, Oryza sativa
cgtgatctaagcatttgtattacagtatatgttgttcattggttaatttagggttaaatcatgttttctttcctagaatacgtatgacaaggcaaattggacagaagaaaaaacttacacattgtgtgaaatagcatgtgaggaaataagggatgggcattgtcctaatggagcatggacaactagagggtaccagaatttgaaggccaaatatttccaaagggctaacctaaggcattcaaccaaacagataaagaatagattcacccatctaaagaattattacattgcttgggtgtggctgaaccaacaaactggagctggtagaagtgctagtggagaaataattgcatcaaatgcttggtgggaaaaaaaaattaaggtatgcagttgtcaaaaatttagctagtttacatgattttagagttttttgtgatattgatttagtgtcaatacaggagaagggggacgccaagaaatttcgccatggcaaccctgagtacttagattttcttatagagatatttcaaggagttgcagttgatggttccacagcatacatccctggttttgaagag

SEQ ID NO: 46444 - DNA, 3846 bp, Oryza sativa
aaataattgataattgcagatttttaaaagtaaaaaagatatattttttaaaaggacctattcataaacatgatacgaaagttccaaaccccattaagtaaaggtgccgcgcgggctcaccttgttagtttgaagaaaaaggtgaaaacaaacaaagggctaaatcacgtgaagataaatgtgacagttcacacaaatcacacaatatgaatgacgtgaaaaacagtggcggaacagagctccgaacaaacaggggaaaaacagaggcgctcaaacaaatcgaagtgtggaaaaagaaagtttgaagcctgttgatcgatcaggttaagatttgtggaacatagtagtactagacaagagtcttctccgagccattccttcccatgtattagtaagttttgttatacatgctggacataccatatgtagtgaaaaccaaaaactataattgaataaaaaataagatttatccatatcgccctgagtaaagcatttaggcccctttgatttaaagaaaatacataagaattttggaggatttcaatccaatagaaaaaatttcctatgaaaacctttgaaacaaatgattgaatcttatattatcctttgaacttcatatggaatagacaatcctatagagattttagacaatttagcaagagctccaacttcgtagaagtttcccttttagtctatctctctcatctgattcctacgtttttctgcagtccaatcaaacggttatttctgtgttttttttatattttgcaattctttgttttacacttttttcctatattttacaatactctgttttgcacttataatactattagaatgccgtgtttttctattcttgcgattcaaaggtaatcttaattccatatttaactatgagtaaaaaaaatattcttggtgacgtggacaagtctttctgtacattaaatcctgatatttctataacttaattattgaagattctgagatttgaatcgacataagttaagatagtaatagttttgaggtaggtagtctgccaatttgcgcacatgaacacatatatttagaaggtactagtagtcagttctctggctagagatatgcatagtttgaaagaaaaaactttaccgttcttatacgacgcaccgagaggacgtctataaaaaactaccattccattccacgtatgtgttggctcttattaccagaagaaactagggagatgcgccagttactgtttaatcacgcatcgtgtcttctctccaaacacttgtgcctgggacttggaggcgttgggaaatgctgtgctgcaattacactccctcatcttcctttgccgatgactagcaggtaaggttgagagtgattcggataattttcgttctaggatagtttcgatctgatatatccgaaaatttttgaattcggatacttttttcggatatgaaaacgaatatgatataagtgatatccgttggaatcggatatctgtcggatattatcctgtatattcgacttacacataaggcccataagctagctcaacccaaagagaaggcaaatcagacttcttagaaaaaataaatttcgaattaaattttatgatactaaataaactcatatgaaaaagttatcaaaaacatagttgtagaactcattgagacctaccaattttgttttcgtcatttctccatccgagtttgattgaactatataaattttaaattttaaaatataagaaattcaaataatttctttgggtagtacatgatttcaaatgaaaaaattatcaaaaacaaagttttataacttatcaagatatataacttttattttggtaatttttctatatgactttgtttgaacaatttgaatttgaatttgaaaatatgacaacttcaaacaacattttcaaatactaaatgatttcaactgaaaaagtcatcaacagcaaagttatataactcatcaagatctataacttttatttcggtcatttctatatccgacaaagtgatagtaacattgttcacaaaatttacatatctctcatttgtttttataaactataatagagagatttaaattttgtgaacaatgttactatcactttgtcggatgaagaaatgaccaaaataaaagttgaatgtcttgatgagttctacaacttttatgttcatgacattttcagctgaatttatttactgcttcaaaatatcattcgaagttttgaaattcaaatttttaattgataaaacaaagtaaaaaaaaatagccaaaataatagcagtaaaaacacaataacatgatagagcatgattttaaaaacacaatatcaaaaatcgtttgtgagtagtgaggggtttttatattctgactaatattcgtcaccgtattcgtttcgcttcgtattcgctccgtatttgtattcgataatattcgattccgttttcatatccgggtttccgattccgatttcgattaaaaaaaatatgaaaacgaatatgatagagctagtttccaaccgtattcgatccgttttcatccctactagcaggcccaggctaaccacactttggtgctttgggtgcagttttttagcctctgtgataacatcttgcacaatgataaacctaaagtctatgccagttttgtatctgccatgaactaggtactgcagtttaagtgcttgtgcatatatattccccaggttatgtcagaatttcactgttgtaaactagttcattcatagggtctatgtctccaggacatgcttggcagagtgatggggatattgtagccttaattatttcgaaagctgcgtaccaagttgggatggtttttgatcttccacagaactttctcataaatcaatcgggttattaggacaaaaccgtacgattcattttcagatgttttttttttacgtgtatacaggatcgagcactacaccaactgatcatttgtactttgataagaaaaaacatgataaaccccggagggattcatttgctatctttgccatagtcaagtctgtaggacatcttttcttgtgctggtgtgatgtaaaaatccatatcagtctagcacgatttatctggttcgatttcgagctgtgaagattgtccagacgttctagtcatatcttaataataccgagacgccaccttcataaaacacacactataaatgttaggatacgcgtaggctacgatagcataaattaaaattttctatcgggtaaactaggaaccatgtaagtattagatcatagatcgttaccactcgacgcgctgtgcagcggaagaagacgctgagaagtcgaaggaactctcgcgtagtagcgcgcgtcgatgtagaggaagtagtcgatagcaccggctcgaccttctcctccttgtgcgttctcctcgccgtactcccacgccgatcagcaccgcaaaccagcggcgcctctaccggtatccacacgtacagggacggaacgccacgcgcagatgtgctagcccccgcgcggctagggttttgctcggggagggaagtgatgcctaaggtttctcacgtgatgcaatgccttcgccggtcacacccctcacgaatatataggattcatcactcgggcctccaaggcccgtaggactcctattcggatccctatccgaattaagctcatattggatctctatccaatccccttatttcggcccattaagcgtgcgacactggaggttcatatatactcggctgtaacccgaaaactccttttcggtccacgtgtcaacagaggcccctagcagaacgtattgacctaccgggcatacataaagatcatatcggctgaacctc

SEQ ID NO: 46445 - DNA, 2849 bp, Oryza sativa
aggaaccatgtaagtattagatcatagatcgttaccactcaacgcgctgtgcagcggaagaagacgctgagaagtcgaaggaactctcgcgtagtagcgcgcgtcgatgtagaggaagtagtcgatagcaccggctcgaccttctcctccttgtgcgttctcctcgccgtactcccacgccgatcagcaccgcaaaccagcggcgcctctaccggtatccacacgtacagggacggaacgccacgcgcagatgtgctagcccccgcgcggctagggttttgctcggggagggaagtgatgcctagggtttctcacgtgatgcaatgcctccgccggtcacacccctcacgaatatataggattcatcactcgggcctccaaggcccgtaggactcctattcggatccctatccgaattaagctcatattggatctctatccaatccccttatttcggcccattaagcgtgcgacactgtaggttcatatatactcggctgtaacccgaaaactccttttcggtccacgtgtcaacagaggcccctagcagaacgtattgacctaccgggcatacataaagatcatatcggctgaacctctagtgtatacttgtatgaacccctttgcctcacgatatcgattaagctcaaggttagatatgtgccatcctctaatagctcaatcattcactcgaacctgttgatagattatataacttgcgattgactcctcaatcacctttggcatggccatgcacttccataatctacaacatcgaggggccccagagatatctctccataggaggggcaaatcccatcttgattattcatacccactacatgtttcacagcatacctgaaaactacttttataactacccaattacggagtagcgtttaacagtccctaagtaagctactacaaatgttgagaaccatgataatctcaggtctaaggattcaacaccaacactcaatgagatcactgatgacacaatacatatggctcttgcagtgtctcatgttgggtctatccaacaacatgttcaccaacatgtgtccacattattaatttggtatctctatatcatgatccatgagacatgatcatcaattaatacatgtgctgatcatataaacatatttgttccacatatgatatttgatcagggatcctttagaaatagcaacacataacataaagagtctcatgaaagaatcacatattcattaaccaataaggagttatctatttcaaggaacaatgttggataaatatgtaaacatagtatgtgatacaatcatctctatgattgcctttagggcatatcactgacaataaataatattgggtttaatttgcctcacttctatattgcaccattgtctgtaatcgatctactccatcccacactcatgtgcaatacacataatctacgagatcccactcaccggcaaacaccgatgattgggagagcatttctcttaaactctctacttcaaagtcctgcactaggaaaaggatattgggaaaaaattaatatacttttaatgttaaatagggatccactaaaacaaacgataaaatctactaagacagacgtaaaacattaggtcgaactcttctccggtgtaaaggaagtagttgtgtatagtcatcactgcaagcgaataaggtgtttgggaagtgctacgtgtggcttcccgctgtatattcacggtgacatgtcttcatcatttctcggttgcgacgagtcatcgtcaacatttcgtagcatgcgtggtcaaagcagcaccctttacgccaagtgcaaatcatctagaaaatatctagctgtacacattaattatattccgtacatttgatttattcatgtgcgattttatctctaggttatgcgcatgagatggttttgctagtttacatgtttgatatcaacatttataagttaaaatcaattaagcccacatatgcttatattttcttccacttatacagcctatatatatgatctattcatacattgcagttttctcatacttactacttcctccgtttcatattataagactttctagcattgtccacattcatatatatgttaatgaatctagacatatatgtgtgcctatattcattaacatctatatgaatgtgggctatgctagaaagtgttataatctgaaacggaggtagtattatatatatgtactctctctaacctaaaaatcatatgcgatatgcttaggcatgcatgcagacccttcgttcgtccaacagtttaggactgggagacatgaggaaccctggatatacatatgttatccttcggttgtgttcttaccttcaagttcccaacccctctccctcgttttctgcgcgcacgcttttcaaactgctaaacggtgtgtttttttgcaaaatgtttctatatgaaagttgcttacaaaatcgaattaatccatttttttaaaaaaatagctaattcttaattaatcatgcaataatacatgcttcgttttgcgtgccggagaggaggggttcctcccgaaagccacctttggctcaactattatggaggcagcggtcgtaaggacaagtgcagctccccttctgctgttgctatcaggctgtgttatggtacttcgtgcccttgtacagctccaggtacccaatccgggttgcgtagcccgagtccactagatagtacttgcctgccgcggtaaacacctgtatgttacacgtgatggatgttagaaattgcaaacatataattagtagcattgtacctggaggtggatgagggaaaacatgattgtatgtactcaatggcttcgtgcacaccc

SEQ ID NO: 46446 - DNA, 1091 bp, Oryza sativa
ctaaaggaacgcccgttgggttatttccggtcgttacaagttggtatcagagcccccttgaccttaggacgacccgtagatcccaagccttagcagtattttcgaaataaaaatcctctgttatttgtgaaaaccctctagtctttctctgtcttgctgcttcatttatcgccaaaatctgattttttttaaaaatgttgcttttctttttgtttttgtttgtagatggccggcagcgtcacccgtcgtggtttggacatgactggtttcgtcttggagctgcggggcatgtgcgttgtcctggggtatccacatggagtggactaccagggcaggccgcttccggagcaggaaggtgacgatgcagagccccacgctgcttgggaggccactgcagtgtcgcgtcccaaaacgactctaaaattcatcctcgaaattgtgcaaagaataattaaaattcatgtgaaagcctccaacaattaaaatgtgcaaagataaaagtcaaatgaggcttggaggatttttgtatatttcctaaaagcctaaaatgcttaaataaattttagtggaattttcagagcacaaataataattgaaaagaaataaacaaagttaaaaaggttttataaaaagaaaaccctaaaagaagtcttttccccctcctcctccctttttgggccggctcggcccattccctccctctctctctctctttccccccccggcccatcggctccccgcgcgcgcgcgcgccgctgacaggcgggcccgcccgccgctctcgctgacgggtgggacccacctgtcattttccttctcccgccgcgcccgtcgtcgcgcccgtgccctagcgccgccgccgccgcggattgcgccgcatcccgccgttcccgcgcgcattaaagagaggggaatcattccccgtgattccctctcccgtttcccccaatttcccctctctctcttcctcggatccgtccggattcatcccgtaatccttgccggcgacatctatggagcccgagatccccgggctcgttttctttctttccggccgcgttttcccccttttggggctatataattgctcc

SEQ ID NO: 46447 - DNA, 839 bp, Oryza sativa
  unsure (1)..(839): unsure at all n locations
cagtccnnnnnnnncctaaaannnnngcnttnctnnnanannnaggaannnngnaccgcgttcttaccattactggatcgaaagacttttatctttactagatttttaatcgannnnannagctatatatgcacgcctnaataaaaaagcaaagcaaaagaaagaaaggaacatgtgaccaaggcattatccagtagatacagaggattccaagaatcttaggagcttaagattataaaggagaagaggctgaccaaaaaaggctaatttgggcgttcagaactcaatttggggatattgctggtagatttcaatgatccattcatttttgtactctgccccacctgtatgtttatttatcatcatgatgcctgctagaaaagatcttagaatccttttctcttattactttggtgatatatcttgatgaaacctaagtgacttatgatgttttctttgaggacactgtttgtaatttcactgacttaaatttccaaaagcagtatcatcttccagtcagttgagtcttttcaagaacagatcgaagtccataaccataagatttgctatccttagaatgaagcaactatccctggtgtacgtacagtagaaacacacacacacacacacacacacacacacacacacacacacagagagagagagttgtgcctccagttccaacttccaaatgatattcttcattgtgcactaatgagatgttaaataaagttccattgcttctgaacgaccttacaaatgaatttactgtttagagccagtttaaggcattccttaaaatatgtgggaatttgtgtaagcttctactgccaaaacag

SEQ ID NO: 46448 - DNA, 926 bp, Oryza sativa
  unsure (1)..(926): unsure at all n locations
cccgtcatttccctagngtccngnannncncnnnannnnngaannngnaccccttcttgatgccagggagatgcctattttgtctatgcttgagaggattagaaatcagatcatgaacaggttgtacaccaagcaaaaagaactagaaaggaattggccatgtggcatctgcccaaaaataaaacggaaggtcgagaaaaatacagagatggctaatacatgctatgctttgcctgctgggatgggagcatttcaggttagcgacagaggatctcaatacattgttgaacttaatataaagagatgtgattgtaggaggtggcagctcactgggattccttgtaaccatgccatttcctgtctaagacatgaaaggatcaagccggaggatgtagtgtcattttgctactcaaccaggtgctatgaacaagcttatagctacaacataatgccactaagagatagtatccactgggagaagatgcagggtatagaggtgaagccaccagtatatgagaagaaagtggggaggccaaagaaaactaggagaaaacagccccaagaactagaggatgggactaaaatttcaaagcatggagtagagatgcattgtagctactgcaaaaatggtggtcacaacaaaactagttgtaaacagaggaaggctgacttaaaacttcagaagcaacctatgcagcaaatggcgacttcatcaattgttgattcagaagagcttgtcatcactcgggtaatatttatacttattttggtcgtgtatttgtttatctccactaactatgaattttaaactcattgtatatttgtttcaggaacctgtcatcactcaggtactattgatgctcattttgcttgtgtatatgtttagctgcactaaaaggaatgttaaacagaacatatattctctc

SEQ ID NO: 46449 - DNA, 1536 bp, Oryza sativa
ttcaattttgtcccaatgtgtcaaatttagcattacattccctggtgctttagtgaatttaatgttcatgctgttaatctgacgggacaatggcttagttccttgctgcttcaatgtctgcactgaagcattggagctaggcttcaaagttgctatatgaattgtcagagtctgagataacagatgttggcctaaagcaaggcactcaaatgcctaccgcagcatcaacttctaagctctcccactgaacttgacctcctcgccatctgtcactatcgtcagtctcggcaatactgttgtagccaccgccgtcagacttgacctacccgttgtagcaaccgtcgaactcgacttcccccacggcgtagctgttgggctcgacccccatcactacagccaccgcggattcgacctccccagctccccgccgctatgaacacctctcagattcgtttcacagaaaacttatacatgatcgaaataccaaacaatagaaggggttttctgataaaatagggccattgcttacgagcaggcaaacctgtccttcttacgtgaatgcttagttggtggtctactcatcatccaactcagcaaaattagatttgctattctatttagtcatagtccgcacgcacctatacaagtttgtgcaccaaaacaagagttttgtaagtttttacactaaattgcacccacctaacaagtttgtgtaccgcgggcgcaatttactcttttttttcaaagactagctaaatgtatgtgctttgctacgtatagataaaaatgacaaatttcataatattgcctaaataaagagtaacatattttcatgaaaagtatatattacccgcctttttttatagagaataccccttaatttaatttcaaatgtggttatccacttagatttagttgttatgcgatattaaaatgtttaaggggtaatatgtaaaatctacaataagagtgggtggggagtctttttaaggagtatagatcgatgtcattgtagatataagtggaagttctcaattttcatctagaaatattgggtggctaaaagcaagtttatttatttttttgaataggagaaaaactaagtttatccgataacgagacttataaattatactaattaggcaaagacgcaaaacaaggcaatccagtgctcaaaactcatacccaataaatatttcatataactattggggaatatgaccactttctagttgtacaccaattattgcctaagcatttgtttcaacatatcattgataatacaggattaatggacaatctttttaagtacataggtaatgatagacacacagtgctaccaatccttttggcgcttgtacttcaattatctatcatgacacatacctatttacaagtgattgaagaaatgtagaaacgcaacatctctagctctctgcatatgtatggattaaaactgtattagtgttagcatggactaagtcaacatctaaaaaaatacacatctttatagggaaatatggaagtgtggtcatg

SEQ ID NO: 46450 - DNA, 681 bp, Oryza sativa
  unsure (1)..(681): unsure at all n locations
accttcnnaatccngacgtannancnncnnnnnnnnannnnngaancggnccccgttcttaattgggaaaacaattaacatacctgttttttggtatatattcacattgtaagaatcaaaaacccgcgggtttttttcaagtaatctgtgaatgaattaactgaaggaccaccagcaggtacaaatttagcccaatatgaggaaattaattaaacatctcaaatagcagggggggggggggcacaaaaaggtaccaaccaaaagcaaagtaatgatttatccatactaaaaaaacaaacaggtaaacaatccaaactgttttcagtaattttctaataatcaggtatgtgaaccaaataatgcacacagcagcatatttatttagcaaagaaagttggaatggacggtattgtaggattgtaaaggtcaattctgtcaagttaacctattggtttctggttgtacatcttttacatagattataaaaggtatgtgattttaatacctaaatcatagcaagcacaataattttatgagcagatactatcagtatgtttaaaggaagagggtgaaagtgcaagctagtcaaataatacataacttagttaaaatgggattttaacctacagggcagcactcatcgtcctaaactgaagctttatcatcccaaaccaataagta

SEQ ID NO: 46451 - DNA, 873 bp, Oryza sativa
  unsure (1)..(873): unsure at all n locations
ttcttgacgttcaagnggtactngattnntcantcananncnnccgancaaggtatcgatttcgaacccgtttaatataattccctaacgttgaacactgtagtactggaagaacaataattaatatcagcattcttatgtggtgtacttaaaaaaaaaaatcaatataactatcaaagacacacggctcaactaaaacgatatatttaaacacttgcacagctgttttggcagtagaagcttacacagattcccacataatctgaaaaatgccttaaacgggctctaaacagtaaattcatttgtaaggtcgttcaaaaacaatggactttaatttaacatctcattagtgcacaatgaaaaatatcatttgaaagttggaactggaggcacaactctctctctctgtgtgtgtgtgtgtgtgtgtgtgtgtgtgtgtgtgtgtgtgtttctactgtacatacacgttatactgattaagtaggcctttttagcctacaaaaaatatttgggttttgttcaggagactggtttttgaatagtcattctcacggcatgttatatgcttattttgattatgacgtgagtcatgccctaggttatttagactcatcgatttatatcacatttgatggatctttttgagagttttaactcggattcttgtcatatgtgttggattatggaccgtatagtatttttaactcgggtttctttatatttccatttttggtatatcaaagctagagcagtcggctggatcttttatcaagcgtctcatatgcttagttgaatgatactttgaatgattcggttgtaaanccantcggttggatgttatttacacggggtaccgaattccgagtcgtccgc

SEQ ID NO: 46452 - DNA, 3350 bp, Oryza sativa
  unsure (1)..(3350): unsure at all n locations
cgctgtcctttgatataatctcaatgatagcacccnnnnnnnnnnnnnnnnnnnnnnnnnnnnnnnnnnnnnnnnnnnnnatcagggcaccacgccggcgcttaaaaagatcgtgttcagcaaatcatcgtcgcaagacacacatatgtgatcctctcgaaatttgggttgatcctcagatttgttgtgaggataaaaaaaaacatttcgacagtgaatatcttaattgggatgtgcttcgattatgcacttgtaaataaaaattcgaaacttgttggaaactgatataaggtattcttccatctttgaagaggtatatatatctccttattattttagtgataaaaaaataaattgactaaactgattagaagataaatttatgattagtaatgatgaagctttttttattcttggaaagtacatagaggtatatatgccacatattgttagttatgaggtatatacctcctgaccgacatatatacttgtgctttaaaaatgaaataaaaattaaaggatatttaaaaaaatgagttttcaatcttattctaacctttaacatttgttttggtaactccgtttataaaaagagatcttaagtatgaagaggtatatatctttaaaaaataggtggaaacctcaaatggtatacaagcactgactctgttactatcttcatatgtaaagacacatcggaacaaatgggttcgtaccagggacatctagtttccaaaatttagaacgcgattgggagccacaatagacagtagccctccgatgcaaatgatgcgcaacagcgtcgagacggtcaacgataatggatagaaaatgatgttctagagatacagcggcgaagaaaatccgccggtggtgacaccactcgctggagctccggcaactccccgtcaatctcggcttcctcaaggcgagcatcagatctgactattttttttatatataaaaatggaatgactagtttaactatcttcaaatggcaattacttctatgggcaagtgggcccaaactaattctgtgatccatttcacaataggccagtttggatcactgcaattgtggcgatccagatcagggttcaccaaagcgttttaggtgaggttaccatcaccccatagtaaagcggttatcacggtacccgcgcggttatcataaaaacagtggttacctcgaggattaccacagttttaacaactgagaaggttaccacacgtgataatcgcgtggttttgtaaaccctgatgcagattcagtgggccttaatggccactacattagtttgccatttgccaaccatacaagagtgagtccgttgagctttcgtggggcggagacgatgtaatcttgtctccaattatatcattttcacatggaacatttgttcgctaagaaatgtatagtatatatttggacaatggattttgagtcaaactcatttcttgaccacttataatgtgttatgtatgcttgggtcatggattttgagccaagctttttttttaaccacttatactgctaggacggtagcatccaattttgggcaaaggatgtatgaaaatttttccacctcctattaggttgttatgaaatagttatactttgttgggtacatcagtattgtgacgagtcaaatgcgtgttactaaatatccggagtctaatgttacactttcttttctccaataagatggtatggtagtgtagtgttgaactgctaataactattcccttcggtttcataattcttgacgttttaaataaggttgaggtcaagtgctagaacaatatatcgatttattttacaaagtgctacaataagtaaaaatatttttattgtattatatattataataaaaatatagtcaaaatatattttaaagatcgtgtcattgttcaatatgtcaagaattataaaactggagggagtaaagatcactctacgtttacctcgccaagtgcctagtgcctataaataggataaccgctacttctctagacaaacccgcactccaaaatcagtaaaccttgaccatctcttccactgactactagaaatcggtgataaggagagttagaacatgtgttgctggttcgacaaaccaaatactagatatacactgagaatgggatgcatggggaattcgagaagaacttccgtgatgtgaataggatccaattgtagcagcacggctcactgtatttgatgacaatgtggttgtatagtcaaaggttgtgctacactgcccccatcccattttgggtgcataggctaggaagtggttggtgctgtcgctacctgtcatggattgtgagtctcacctcgatcgaccgagtccacatgcccaacgcttgtccacttccggccaaaacgacggccgaaaccttttaaggtgcttgagatgtaccagatggaggtacctccctcactacttaatcacccaccattgatcagttaagcacaacttaggaatagaaaacaatatattataaaagtcgataattaattccttttacatgtaacagtctctctctttttttgcatccggtttgttacttatcttcgattctgtcgttcacatcttaacacttgtccaaaatccaatttccctaattaattcttcaggttctcatctaaatttagagtccaaagaaacacatataatcctctttcgtccatacacaaagacaaatatggctcgatcaactagtttgatgaatctttgtatgtatacaaaattcttggtcattgtggatcatcagtggtggtggtgttttgtccgtgcggcacttgctgaagaaagatgttcttatcagcaagcagggcttatcgatcctaattcttttactgattaattagaaccccacctctaatatgtatgaaagtaaagttactaatctaaccttccacctaaacatcgagttaatacctaactcacttttttaataccttctgagacatacttcttccttccctaaatgtttgacgtcgttgacttttttaaatatgtttgaccatttgtcttattcaaaaacttttgtaaaatatgtaaaactatatgtatacacaaaaatatatttaacagtgaatcaaatgatataaaaacaattaataattacttaatttttttaaaataagacgaacggttaaacatgtttaaaaaagtcaacggtgttaaacatttagggatggagggagtaccttttatcacagaccgttagatggcaagcaatcaatagacaccataactcccaagcacaggaggaagtatataggtgcaggggtaccaattcccagtttggggcgntggaacaggactctacttcaagaacag

SEQ ID NO: 46453 - DNA, 785 bp, Oryza sativa
tttcaagttttcctctgtcacatcagagggcacccactgactttcaaagctttctctctcctctgccatggatgcaaattggatgatgcgatttggtttgaaatatggccgggaatggataggagatcgatgcggtggttgcgcgaaagatttttgtgaactttggaggatggattggaggggatttgtgaaccctagcttcaccgaagtgatttcgcactatagcagtgagtagggaaagtggcaagagtttcggcgggaaagacaaaacgacgctatgccttcggtgttatctcattagggtatcgggagtactaatgggcctgggcctaaacagtacttcagcccagttttgctatcagcgtggttaagttgtgatccttaggggcttaggcatttgtttttgctttggcaacacttgctcacgacaatatagcccaatgctgttaaaatcctttttgacgcagttagataattctgtggaattactacaatgcaaataaaaaggtgcctgacagaaaagtgttatactgattttgtaggcctttttagcctgcaaaaactatttgggttttgttgaggtgactggtttttgaatagtcattctctcggcatgttatatgcttattttgattatgacgtgagtcatggcctaggtcagttctgcgccatccagccgggataaccatcgtcgctgacgtaatatcccagcgcagccccgctatcatttattttcacaccggcgcgacagttccgggtatccccgatattattcggattgctga

SEQ ID NO: 46454 - DNA, 747 bp, Oryza sativa
  unsure (1)..(747): unsure at all n locations
gtggccttgaatgccattgagatgcgcctcgcgannnnnnnnnnnnnnnnnnnnnnnnnnnnnnnnnnnntgtcagtgggatgtttatgttaccacaataagctcatctctagttgcccttgagaaaaataagctcattgctggaagtgactatagtttcacagtaatcaattgtggtgacttccagatgcctatgtgcttgagtactgtactttgtctgggtcaaactatccagatgtcactttactttttgcattgtcattgctactgtcacacttgagtttgctgaatcgcttaacttttgcagtatgagcatatggtgttgtgtagtatcacattatcaaatcatagagcaattaggcttaaaattttcgtttcacaaattagtcgtaatatgtacaattaaatttttttctaaacctatatttaaaactttatagagatgttcaaacgttcgatatgatatggtgaaaatttttaagttgagatctagacggggcctgagtcctaaccacctcgtggcggacacctgccttcgtccctgtggctccaccacttgaagcctttgccataaaaagtaggagtcgtcctactcctacccctacccctacccctgctgcagtgctataggctagccctacctccctggctctggtttctctctttctctctcgcctncttcgcttcgctccattggaggaggggctcattgctcccttcctcccttgctttttcttcatanagagg

SEQ ID NO: 46455 - DNA, 1960 bp, Oryza sativa
  unsure (1)..(1960): unsure at all n locations
ttcattttggcgtgtttaattagtataaatttatcataataaacataaaattctagtttatcgtgcttctaatggagttgttcagttgagaggttgagattgaggtcatggctttccaatttcggattttcggtcagctcttttttcttggatatactccatatacacaacagtgatagatgtgtatattttttctcatcatcggctctttcaatcttaaaacagttttgtctttggtttatatagaattcgctagtgtgtgtactgtgtaaaattctttcaatcctacaacagttttgtctttgtcttttgctttctctgattctacaaaatgcttttgattgttcggcgctttgattcattttcttctagatgagtaatgtaatatgttcttctagggaatgttctttaattcccaggaaaaaaatgtcccagcttcttaaatagagctctctgtatatgatgttattaattatagctccatagtgcgcttaatttgaaatattgtttagcacttatgtcgtgttctcttctatctttcactcgacccattttttataatgaaaatggttaatttacaccgataggcacacggctatatatatataagcatatatagttttttttttcactcttgaagtcagcaatcttattcagttaatttaagaccgtatggaagagactcggcagagaggggtgttttctctcttttggactggatgaccagagataaatagcagattttcttgggaaaaaaaaactaaagtaggacaggttttgcatgcatgtgtgaaagcactcgtggaaaacttaccctgttctcgcatgatttgatgtgtagttgttatacatatagataaccatatctacattattgcttctggttggatcttctcataaaactgcatctttctccatctttttctacaagctcagtggacttccaagtatcttctctgctaatttcttgacactgccgttctttccacgtttgttacattattgcttttgacatcactattttaattaattagatcttgtagacaacaccctggacgcttatcaggaaacagactatatatcgttcaaagttttttgttgaaattttaactcgtaaaaaccatctggttttagttaatctcatcgatattattttcttcattaaagcaggaataagaaggcatgtagtttgtacatgcatatatatactgaaattaattattacagctttcagagatcagcagcagatttgtcatgacaattacatattcttcatgcatgagtaatatatatatatatatatatatatatatatatatatatatatatatatatatatatatatatatattcaattctgttgcttttgtcacgaatagttgttagttttaaccgagcgtgcttaaactgaccattatttttaagcaacttcaaaataaaaaggtttaagtccaactcattcataaattatttttttattacaaatctaatggtataactttgatgctaaatactaactagatttcttaaaaatattgttggtcaaacatagctaggcaactcaatgaaaactaacaactatttaattcaaattatttttaatggatatggtatatatcggtatacagtctaattaatttgtcaactgaacttgggttactgatggttctaaccattgtgtatacatatatgcaaacaaatttagtcctaattatatgtcgtaacatgagggtacgtactgtgttgatcgttttgtgttatgaactaatcacatggaaagaagtgcatatatatatctaatgtcaagagtgttgttaactgataccccacatatatataccagaatgtttacagtgttaattaacacatggcaaaatcaagcaaaaatacaannnnnnnnnnnnnnnnnnnnnnnnnnnnnnnnnnnnngcgggaggtgaatntcaattcaatggcacgg

SEQ ID NO: 46456 - DNA, 1182 bp, Oryza sativa
  unsure (1)..(1182): unsure at all n locations
cgcggcaatggataagcgntttgagaannnnnnnnnnnnnnnnnnnnnnnnnnnnnnnnnnnnnttacacggcccaacagaaagcccacctatcctctccccacggcccaatccgcgtccgactccgcgtcgcctctcgcctcctctctctcttcttcttctcccccaaatcccaattgcttattctccttcgacaagccggccaccgtccatcgctgcttcgcttgctcccacccgaagcaacgcgaacgcgacgcgctccccttcccgccacctcgcgggggtgagaccaggccttcgcgaccctcgccggccgtccctgagcgccggccgcaccggcaactcggtttcgaggctgatctcggcaggtttgtgtctgccctcgatccaaaaccggtgctgtggtttggttcacgatcccgttaaagttgtcgaatccggtcggcgattgtgattcaggtagaggaattagttttgcaagacaggttttacaaggaattttttgggggggagtgggggacacgtttttatgctgttgttctgatgacttcttgaaagtcacacccaagttagttagttatcagcagctcatggtaatcttcagtgatggattaaccgctctacggtatctaggcaatttgagagtagaagcaagccgtagcctacagaacattttgccatccaaatgcttggcattttgatttgattacgcaggcagtaattttggagtagaaaacgcgtcctaccgaacatgagacttatcacaagtatatcgttttttgacaatagtcaataggaactctgcgttgaggggtttgatttcaatttgttctagatttgatccattcttcttccttttatttttctgatgcaaccaacaattagtctggcattggcgttagcgattaccatctactagttattttccgttagaatctatatgcatgtacagcttattgattaccaccaactgttggaacatatgtaacctgctatttctttttatgcagattgctctagtacaatgagctggagatttcctctttttgggtatgttatttttactgaaagcaatacttttttcgntggtcttcttatgtctggtcctaaccctttcctcgcatagcatttgtattctataaactgagcttcctctttattttgtagaaagaatgtatttgt

SEQ ID NO: 46457 - DNA, 750 bp, Oryza sativa
  unsure (1)..(750): unsure at all n locations
accatctccagctgaggctgcagggataattgctcggttaaaggacaaaaggtcagcagctaccctttttttgataagttgcttgtagcttcctgtatacgaagtttcattgtattatgccttatcttatctatactgtgggttaaaattgcaacagccttgttactttttaccatggtattttacatattctagtgtttatattagtactaaaagagagtcactagaatctaactaataatattagagtaatgaatttttaattgcaataatgatatcatggctgatattctatattctatcaattggtaatgaatgaagaatccctagcttttcagagggcacgacaatttgtgcaattcagaagggatgtatataaatgctaaaagaagtgattatgtatggttgggttgctttttataatcgccacctttactacatgtgtttttcacactattccttgtgagcatgcttgtttggaatgcaaaactgctgtatataatactgtccttttttctgcagtgttgatgagttgcagaggctgttgaaagacaaagaggcatataatgctttcttcaattcactcgatcaagttaaaacccagaccaacgtaagttttgttgctgagtacacaggtgtttgaaatttgtattggtggctgtacttagatgtttnnnnnnnnnnnnnnnnnnnnnnnnnnnnnnnnnnnnnnnnnnnnnnnnnnnnnnnnnngagttacataggnggcgg

SEQ ID NO: 46458 - DNA, 748 bp, Oryza sativa
  unsure (1)..(748): unsure at all n locations
gcgctgcatgaatgcacatctccttnnnnnnnnnnnnnnnnnnnnnnnnnnnnnnnnnnnatcagggatttagctcaatctgatctcacgagcatagtctagatcgagtggagttgtgaagcagctcggagatcgttcaatcatggtgatctcgaagaagttgagttgtgggaaatcgttcgatcaaggtgatgttggagttgacggcacaatcaaatatcgagatcaaggctgagggggaagtgggaagtgagtcgtagtgcccggtgagggagacagcgtaagtacgtaattagagctagctagtaagctaagtacggcgccgccgattaaacaccataaaaccacggcggcacacgtacgaccgatcaatattcgatcgatttaccttcatcttgtaaggacacgataggagcatcattcctccggagacaatctcagatcgaaggggcgatcgttaacgaaagcgcgagattaattttatcagctctctagtgtgattctctctggaatatgctgagtatcattcgtaagtcgcaacccaccgtaagctatgcaatctataactatacntaatttagtggtgatccatgttaatcatacaggaaccacctatatnatttatcgacaaattttcttttaaaaatttgatagatataattataggacaatcgcaatgtaattacactgtaacttgcatgtaactacagtataacttgtatataactttcacgtatttttgaatcat

SEQ ID NO: 46459 - DNA, 751 bp, Oryza sativa
  unsure (1)..(751): unsure at all n locations
gcggccattgatttgagatgcgcctcgnnnnnnnnnnnnnnnnnnnnnnnnnnnnnnnnnnnnnnnaatagttccgaaggctcttgaacccagaactatgtgacttttcaaaatgtcaaaagttgcaggggcaatggcgtggagggagggtacactagtccctgcgtccccaggggatgtttagatatacagttgtaaagttttagcgtgtcacatcggatattgtattatggtgttgtatgggttgttcgggctctaataaagaaactaattacataatccgtcaataaaccgcgagatgaatttattaaacctaattaatccatcattagcaaatgtttactgtagtatcacattatcaaatcatagagcaattaggcttaaaattttcgtttcacaaattagtcgtaatatgtacaattaaatttttttctaaacctatatttaaaactttatagagatgttcaaacgttcgatatgatatggtgaaaatttttaagttgagatctagacggggcctgagtcctaaccaccttgtggcggacacctgcctccgtccctgtgctccaccacttgaaagcctttgccataaaaagtaggagtcgtcctactcctacccctacccctacccctgctgcagtgctataggctagccctacctccctgctcctgtttcctctctttctctctcgccttcttcgcttcgctttcattggtggnggtcttcattgctcccttncttccttgcttt

SEQ ID NO: 46460 - DNA, 651 bp, Oryza sativa
cgatatatattgttcgttggtggagagacgtacatgaaatatgtctttttgttgtaggcaagacaacaaaaacgtggttgtggtgttgaaacaaccccctcttgatgagagttgaaagaaagagaaaatctattttggtgttggtggatgacccccacatgtatggtggcccccacacactcctaatattttagagggggccacgaggaaatattttctccgtgtgctcaacatatatccccaaagcctccttcgtcaaagggtttgcgccaccccactttagaggaccctacacgtttaaatccacgtgtgtattaaaaaccccctctccaaaagaaaagcccaagttcggtaaagcaggttaaaaagaaagccaaagaatctcaagggaaaccctggtttataaaatcgtggggtttcgccccctggaatgaacggaaattttgttatgctccacaggggcggaacctaagaaaaccccaccacgcgcccttttcaggttcggccctttctggcctttgccaacatttctttcggcgtaacccatcttttgggaaaccgtattacggcctttattaagttaaaccgcttccccaacagaacgccaagcccagcaatcaattagccagaaaccgaaaaccccccattccc

SEQ ID NO: 46461 - DNA, 712 bp, Oryza sativa
  unsure (1)..(712): unsure at all n locations
cgcgcgatttgaatgcattgaacaagccnccctacgacnnatgcctcctctagaactcgagggaattcgcgtaccccatatgaagacgtttggatacaaatatatcagcccgacttgctttagctttcgatattaccaaaaatgggaaatataaaggaaacaccgagtaaagaaatactattaaggtccataagtccaacacatatgacaagaatccgagtaaaaactctcaaaaagatccatcaaatgtgatataaattgatgagtctaaataacctaggccatgactcacgtcataatcaaaataagcatataacatgccgagagaatgactattcaaaaaccagtcacctcaacaaaacccaaatagtttttgcagcctaaaaaggcctacaaaatcagtataacacttttctgtcaggcacctttttatttgcattgtagtaattccacagaattatctaactgcgtcaaaaaggattttaacagcattgggctatattgtcgtgagcaagtgttgccaaagcaaaaacaaatgcctaagcccctaaggatcacaacttaaccacgctgatagcaaaactgggctgaagtactgtttaagcccaggcccattagtactcccgatcccctaatgagataacacccgaggcatagcgcccgtttgtctttccccgcgaaactcttgccacttttcctactcactgctata

SEQ ID NO: 46462 - DNA, 1198 bp, Oryza sativa
  unsure (1)..(1198): unsure at all n locations
cgcgagtgatttcgcttgannnnnnnnnnnnnnnnnnnnnnnnnnnnnnnnnnnnnnntagagcttatgaaagcaatagatcaatatactataaagaaccaagttgctatctatttaaatgccctaatcatatttactactgtacacaaaacataaactgcatcaatgacaatgagaccaaataacattgtgaagtagcgtgaaaagagatggtaaatgaatctggattccttgttgatagagcaaatattaattcaaaatttgagtttgtagaggaaagtcaagatgacacttgaaggcagcatggaaagagaagaaataatggattaacacatattaagcatggtattaggcgtacatgtcaatacttttccggtggacattccgttttgcctattggaatgaaacattttgcactggacccatggaccataccagtgtagattgattgattttaattaaaaatgtaccggcaggcatacagctatcttttttgtacatattggagtatacacaacatttatctagccatgactgtgtttgcaaacatattttggtgcgagttaaaaatagagaaacaagtacgaagctatgataaaggagcattacaagaaatcatgattgtctgcatattacaattctctatattgcaggtttgccctctagctgtgtagtaggttgtcacaagattaatacaagaactgccggtctgtgcaattagtaatggttgttttgaagcatgccgattctcctgctattcaaggtgaagcacaagtaccctaatgcctagaagcgccaatttccggcagaatttaaatgccgacatgaacagccttaccgatggaaatggattttcgcctggtttttggttttttctgagaaacaaaagtttcggagatattggtgaaacaaaatgtgtttttaggattgcccctgttaatatatttccgggaaggggggagcaaccctatggggagaattgcgcccaataatattctttaaaaggaggttttccgccaaacccctttggtcaaaaaactggtttaaaatggaaaggagggggtacccaaacactttttggaaataacggtttctaaataaccctggggctcttcttaaggtccaacacccttttttagaaaccttatctgtttggactaaaacacttacaagacaattccttttttgaaaatttgta

SEQ ID NO: 46463 - DNA, 509 bp, Oryza sativa
  unsure (1)..(509): unsure at all n locations
ccgcttgattgcgcttcgnnnnnnnnnnnnnnnnnnnnnnnnnnnnnnnnnnnnnnnatcccaattaagatttgacaccgctaactttttttttataatgctatatcttcacgaatcactgtaggaaaccaaatctagattggagaggatattatcacatgatgcgtgccttgatcgtgttttgctggacacgatcgtctcacgcacgcgaggacgcgctcactgtcgccgtgtgtcaggcaacactgccggtgccgaccacatcatatgctctacacacagaatgagctagatcacagtcgtctacgacatcacgaatctgcgagatgctaacttgagctctagcgtgccgattggagcctatttggacttcatctcaaattccccgtgcatcctattctcagggcatcgcattgtcgaatcgccgagacaaacattttgttctttctcaccgctgcttttccacgtacagagaaagatgaacgatggccagggtttatatctactaa

SEQ ID NO: 46464 - DNA, 1333 bp, Oryza sativa
  unsure (1)..(1333): unsure at all n locations
ggccaatggcaacctaagcaaggccaaccctacctgaattaaagggcaattccaagaataagggccaggaccttgggagtcccgataattacaacaagttcggatccgcgtttttgaaaaaccaaatgttttgtggaaccttgttttccaaaaaatagaggccaggaaatgggnggggcttcaaccaaaggcaaccacatttggcaagttaaaatgccaaatattggtaaaaaccaaaagggcagaaggccacaaggtggggagaaacaagtgctgttccaagttcataaagggccaaagattaatttgtatgatgtgcacaactcaaacacatagataatcgcattgttggattctcgctagtggtgtttcagaagtgaaaagcataatctatgtctggctccatttccacccctcaaaattatctatgcccaagttgccgctaatcaatctccacgccaccccattaataatatgcctatctagatgcgtgtgttgtgcacactcgaattccgcgctgtatcctgaatttttggattggacaaagtgatgaccaaactaaaaggaaatggttgtagcgcaaatttcccttacgaaaatcgacaaagaagacaaggtgaaaaaacataaatcacacattccaacgctggagcatgcgatgcagagcgccgcttatctttcacgcgaggcaggacacacacttgctctgcggtgttctgactatgtgctccccttggccatggctcgccttcccaaagatattgtcgttgggagaggaatcgaaactttatcctagctggtgacgtgacgaatggtcgaatatgcccctctattctgtgcgaaattaccggcccccaattggccaaacggtatatttacaaatgaaaaataatatgtgaataaaacttttatatacgtgttcttagcaatctaaaagcaaagactgaaaaataaattttgatgaaaaaactctaaaatcaatttcaaatttaagcctgaaaatttaaattttgaataataaacataagcataaacgaaaaaatgcggccgtacaatttagacccttgttgtaatgagcggtgtcccatatctctgtccttggccgtccgatctggaaccgatctagaacgaacggtcggatcggatgggcattttttcggtgcttgtaccaagggaagggacaaccttcctaaacatgggcggctgcgatatgtgataatgggtatgtttggggagtttttgattcgattagctacagcttattctagaattaaaagtaccataaacattttagcttttttgatggattaaaacgaagctaaagctttcctaa

SEQ ID NO: 46465 - DNA, 815 bp, Oryza sativa
  unsure (1)..(815): unsure at all n locations
ccgctgnattganattgatatatcnnnnnnnnnnnnnnnnnnnnnnnnnnnnnnnnnnnnnnnnnnnnnnnnnnnnnnnnnnnnnnntaaattcaaatgaaattcacattttctgattcttttgcttgccgtggagaattggagacctgttttcaagacttgtgtcatttgtgtggtccactttctccgaatttgttgtggtcaccagattagctgcactgcatgtctgcatctctgcagatctcatgttcatgatttgagacctcccggccacttcaggacgggcattcaatgttgaattcagcaggaaagtataatgcagtaatgcacatgaaatgctttgaaatcaagtgctgtgcaaaactgaaaatgaggcaacatcaaacaagtggaaatgaaaatgttttcttttttattgaagtggaaatgaagttgacacgctgcttaggagctaactagagagtcttcttaggaaagctttagcttcgttttaatccatcaaaaaagctaaaatgtttatggtacttttaattctagaataagctgtagctaatcgaatcaaaaactccccaaacatacccattatcacatatcgcagcccgccatgtttaggaaggttgtcccttcccttggtacaagcaccgaaaaaatgcccatccgatccgaccgttcgttctaaatcggttccagatcggacggccaaagacagagatatgggacaccgctcattacaacaagggtctaaattgtacggccgcattttttcgcttatgcttatgtttattattcaaaatttaaattttcaagcttaaatt

SEQ ID NO: 46466 - DNA, 791 bp, Oryza sativa
  unsure (1)..(791): unsure at all n locations
tacggggngggattannagnanagtnctgccggggaggaagccgaagaacgcagatgatttattacccctcccaataacattgttactgggagtgttatagcttatgttacattttagatattttgtacaggggcctatttaacattccaccaccacagcgatggcgatgatacaaatcaggacagcgacgaagggagtggcaaaggcttggaggatgttgaagctggagcgaagttgttgaagctgggcctccaattcctcgttgcggttagctaggttagcgaaatgcgtcacggtacctgcaacggactggacgcgggatatttaagtaatgtgcatgtatggagcaaacgccaatgaggaaatagtttagttatagattgtaatgaagtaatgccaagaaactaaaaagatcataaaacatcgtactgttcaattcctacatgcaattgaaattgaaaagtgaacagtacatgcaagaaaagaacaggataacaaacacatcaaaggtaggctatctatatatgaagaagggaaattaattcatattttgcaacaattccaatggtatgtatcacctcaacttgaatttcatccctttccattgaaatatatgattgtaacaattgtaatttattttgatctttgcatggacagattctttctattcaaaaattaacattttaacttttagaaattgtttagcatcgtaacacatacttatataacatcgaactactaatgggtaacatgaagttgttaagccccttgacgaaaaaatataacttgt

SEQ ID NO: 46467 - DNA, 637 bp, Oryza sativa
aatcctgagtcctcttgtcaaatccagaaagcgcatcatcgaggtcttgttgtgcaagaacggttcgcatttttacttgccaaagtgagaatcttgtgtctcggtccaggagcggtagatcatacttcaaactcgccatgggaattaatcctgaatttgctagaaagaaattagggtaaatctagcaaaaaaatgcgaaacctggtacgcttctcgtgtgcacgtagcgtagatctgaaacttcctggtacacaagcttgtgtgcgcgtagcaattccacgtgaatagaaaatcacgtgacaggaacctgatcgcttccatcgttgacttccttttcagcctcgggaaccgtgcgatttagttggatgtattgacgccgctgctactcctggacgtgcgcgtagacggcttgctgctgctgcttgccaatcttctgatgcgtgcgccgtttccaggacgtgggctgctgctgccctaatttcgcgcgggcggtagggatgacgccgatcagatcgatccggcgcctcgacgaaccggcggcggctgcgtgacctgtagatcgatctccaaagctctcataccacttgctatggaaatagatgcacaatggagacgcgaaatttacgtggaaaacccc

SEQ ID NO: 46468 - DNA, 670 bp, Oryza sativa
  unsure (1)..(670): unsure at all n locations
gacgccacgcccccctttgaaanctanaggctctcgnccccnncnnnnnnnnnnnnnnaggaattcggtgcgcggtgctacaccaaccggccaagaggagaaaggaaaacattattagtcatgaacatcagtgacattagatgaccttttacatgcagaatctgagactaaacatatacactaatcacactaatcactactactgctgctatatattactggtgtaccaaaaatatacaagtgcatttgataaaggttatacaggtctggatcagaactgtatattactgttgcaccaaaaataaattaatgaactgtaattttctctggattatttttggatgtgattactaaagctcgctatgtgtctgctctttttgcactaatagatgttatgtggggcattcagtatcagcgccggaaccgacgccaacagccagaacaagcgccgtgaatgttggatcaagttgttaggattagtttcagtgattaagtttggtaagaagattaagtcgtaagctcctggctagaagctgttgggttttcattggtaagccatataggccattcggtttaagggattaatcaaaaaagagttaatcccagttcctggtatttccacccacggttccgggaagggaggcgtgccgtctcgccctccggttcaaca

SEQ ID NO: 46469 - DNA, 613 bp, Oryza sativa
  unsure (1)..(613): unsure at all n locations
cggtgctttgttgatccatcnnnnnnnnnnnnnnnnnnnnnnnnnnnnnnnnnnnnnnnnnnnnnnnnnnnnnnnnnnnnnnnttaggattgggttaaggagtcctccatctatataaggagggatcctatctcaggtcagttaggcattagatcaagatttattagcgcccatcggccctgccttcttggtgcaacggagagcgacgtgccgtttaggttcagggccattccctgttctttcctctattatgatccaatctattccccttcacccgtttcatcccaaataatcctagcacgtgatattaagctcgcaacagaaatatgctagtgcagcaatagtaatatggaaccacgaatccatgatagaagaaactataaagaatatagttcctgagtaaattgagatgaccaagaatggatgccttacaggctacgctggaccctggccaagtatctgtccagtttggacagttttatgaaaggttgcattggaccctggccaagtgcagtacaactcaacatgtgtttttaatttctatcaacttcaaaataaaaatcagagtacatacaatcagaaagtttctaaacagcatccaggagaaagcaga

SEQ ID NO: 46470 - DNA, 683 bp, Oryza sativa
gaacttttaacctttttaagcaccaatggatcctgccagaaaccgcgcatggttcttggaagggggcccatcaaaaatttcttgaatcgggtccaataaacaggaaccagcataaccctttttgacccccgggagagaacatatatggtttcgaaaattataagtctggaaatctggagaagctccccaagcccgtgggaagcttaatcttgggcattctaatggggcccctcaaaaagctcggcggaactattggtaatagccggtttccgggtgggaaaaggtaaccgctctcacaattccacaactaatcgagcccggagcataaaatgtcaaaactctggggcggccaaatgtgcgtgctcacattaaaataataggcgagggggtcaattgccgcttttccaccgcgagaaatatctcggctccctcgttatatgaaattgtccatcccctccgcgaaagaggcgctgctacatggccctcttcctacttttcttctccccatactcatacacgcgctcctctctttggggggtgggcattattacactcacggtggcgtatgggtcttcttcgcaaaggggcggctttcattacaaaatattctcaaatatcctcggcgcgtctctactaggaggcgggctaagctcttctattcatactctccacagcggagaact

SEQ ID NO: 46471 - DNA, 670 bp, Oryza sativa
  unsure (1)..(670): unsure at all n locations
agtgatgaggagtggggacaacaaaagcaccccaccgcgagagggtgtttttgtacaacgttaacaaacagcctaccttgtttgtcagagaagtagggctctcacacagagagagaaagaccacaatattttttttttctaagaaaaccgcagaaagaggcgcccctttctcaaaagaactagatacccgcgccaaaagagacctcagtagtgattgaccccgttatacacaataggaggcatccacaaagcgcgataacgtttgtgtctgccgcggtgatgcgcccaaaaccataatatttagcgtaataagangcacaaggggcgaggcttataaggagggagtttggtgaacacacacgcccaattgttaaaccgggagcagcacttaccgcgatatatatattacccccaccaagctttaactcattgaagaaggcgcggccccctctccccagaagggaaataaaggcggagccagggatacccggttatagcgccagatgtccagaaccagaaaagagcgcctagaagagagccttcgaagggaggaaccccctggtattctttaaagcacccgacggagttttcgcccccttggaacttgaaggagcgattttttgataatgctcgccgagagggacgggaccttataagaaaagccgcagca

SEQ ID NO: 46472 - DNA, 1584 bp, Oryza sativa
  unsure (1)..(1584): unsure at all n locations
cctcccccttcccgggaatccaccccctacctttttccatgataggtttgttttgtgtgaggataataataagtgggatttgtgggtttgcttgttgtgaagcgcttcaatttgcgggaaaccaacccccacatgccgtgggagttctcgaaggccaacatgaaaaaggggctgttgttagtctcgttcattcatttcccggtgatttatgatttggatggaaacagtggatgtttttgaagttagttgtggcagattttgttcagttttgtngngggatggncagnantggngggtagggnnccannnnannnngnnnnnnnnnnnnannnnggggggggggagcgaggaaaaaaccggaaatgagagtcggtcggtcggtagcgcggctatggacgatgacgggggtgacgaggaacgtgaggtttgcgttctttgctttgtggactttcttcccgctttccccttttcgttttacccgctgcactgcggctgtgcctgtgttgcatcgtgggatacatacatgggatcaatttggaaagctttaagattatgccgagtagttagtagtcaacttacgagaattcgtataggcggctgtgcctgtgtcgcgccgtgggatacgtacttgggacctgtttgggaagctttaagattctgccgagtagttagtggtcaacttacgagaattcgtataggatgggctttcgagcttctgacttctagttttatttttagcttctatagctatagattctcagaatctgaacgagaatatgtatcattggaggagttggagattctaggagaaactatagttgctagaagctctcctaaatagggcttgaaccagatgacggcggaggtgacgtgagattgtgagagggtatgtgagctgcttatcatgaaaaattctttgttttgtccttccatttttgtattgtgtttggcatgattttcaggtggaagcagatgcatctctcgtacacaagtcaagcggctacttgggctctgctgcatctatactaccaactgccattgatgtttgaaagaaagtgaaaagtcactagaaactaatactagtcgctcacaatcaatggcaccgctagcggcatcattgttttttgtatgtcaaggtagaggtgggttgtttttcattggcaactatgtgtacgtgattgtcataacaacctagtcctatattttattctatctattttctgtgtttatcaaaataatcacaatgttaggtttacatgaacactactccataatttcactattaagatgtgtatttttttagatgttgaacttagtccatgctaacactgataacagtttaatccatacatatgcagagagctagagatgttgcgtttctacatttcttcaatcacttgtaaataggtatgtgtcatgatagataattgaagtacaagcgccaaaaggattggtagcactgtgtgtctatcattacctatgtacttaaaaagattgtccattaatcctgtattatcaatgatatgttgaaacaaatgcttaggcaataattggtgtacaactagaaagtggtcatattcccca

SEQ ID NO: 46473 - DNA, 752 bp, Oryza sativa
  unsure (1)..(752): unsure at all n locations
cgcgtcccattgatgtatnnnnnnnnnnnnnnnnnnnnnnnnnnnnnnnnnnnnnnnnnnnnnnnnnnnnnnnnnnnnnntgtaatttaatttttcaaacacccaaccgcaaccgcaattttctacatatatcaatactccctccgtgctagaatataaggggctattgggttcctaaaaacatcacatcaaatctttagacacatgtatgtagcattaaatatagataaaaagaaaaactaattgcacagtttgcatgtaaatctcgagacgaatcttttaagactaattagtccatgattaggcataaaagtgctacagtaacccacgtgtactaatgacgggttaattaggctcaaaagattcgtctcgcggtctccagacgagttacgaaattagtatttttattcgtgtccgaaaaccactttcaacatccggtcaaacatccaatgtgacacctaaaaatttttatttcaccaaccaaacaggtcctaagaaattttagggctggacacggttattaagaaagtaggtagaagtaagtggttgagggttgtgattggttggaaagagaatgttggtgcagaagttgttatattttgagacaaatcctgatggctaaaaattgttatattttgggacggagggagtataaagcttaaaacagaataccatatttattaaatcctaatacagtcattttccagtactttatctgcttccgatatattttttaattttcatgaattttg

SEQ ID NO: 46474 - DNA, 743 bp, Oryza sativa
  unsure (1)..(743): unsure at all n locations
gcgccaccggatttgacatcaccatgcnnnnnnnnnnnnnnnnnnnnnnnnnnnnnnnnnnnnnnnnnnnnnnnnnnnnnnctcgctcctgtaggctgtagtcctatgtgagttgtgactgaactgaactccacggcaggaagcatattcccgccatcatctccggtggttgacggccttttttgtcgatgattactctataataaagccatctcccggttgggcgagcatcaatggcgaagtagtgagggtccagtgaccactttctcctgtgggatagagctgaaacaaaggaaacatcactttctcctctgggagtaatacatatccggtccaatgcactagcagtctagcagcagcagcactaccgctgtccggttgttgcttgcttgctcgtcagctactactactagcttagctagttgcagtgctggattcttgacggtagctttactactactttacggtatcagcaatggcccatttgaatcaaaaacctacgaacgcatttcgtagggattaaatcctatatgaattttcctaataatccattgattcaaaagattgaggtttttcaaaattctatgaaactcctattggatggttcattgtacatagattttagagaaaacttactgggtcatcggatatagattttagaggaaacttaccaagagctaccatcttttgaaaaaattccttttgaagttacctttctcaactaaatcctgggattttcttgc

SEQ ID NO: 46475 - DNA, 753 bp, Oryza sativa
  unsure (1)..(753): unsure at all n locations
cgcgcccctnngttagaacaaactcatagcnnnnnnnnnnnnnnnnnnnnnnnnnnnnnnnnnnnnnnnnnnnnnnnnnnnnnnctcactccactacaattttgcatgtgataagccagtattttgcttctccataaataatcattgttcttgtgacaatttttgtctagtgagagattcttatcccaaataatctttctactccaagggagaagcagaacattgttcaaaaatcaagaccttatcataatttatttactaccaccatgagatgatgattgaggtaaatagtaaagcatcgaactgtacggcggtggagttgtgagggcataataccaacgaccaaagttcacattctttgagcatgtgttaggttagtcaaaagatgccaagatggtgtccgtatgtgcttggtcaaacggttaattaaactataaccttcgaaaaacaattaaacttaagaaacaactatatgtctataagagtataagcaagttaatcctaaagacttatttctttttcaaattaacgtgttctgtaaaaatcatcggcgatactattaactcaaattaatatataaatgggcctaaaagcttaaggcccctttaaatcgcatgattgagaaaatgtaataatagaaaaaacacaaaaatttgatatgaatgtaagagtaaaatagatgattgcaaaacataagaaaaacacagtaatgacccttttgattggacccgcgaaaaaaaccgcaggaattag

SEQ ID NO: 46476 - DNA, 725 bp, Oryza sativa
  unsure (1)..(725): unsure at all n locations
cgcccagggtagacgcntcggtgnnnnnnnnnnnnnnnnnnnnnnnnnnnnnnnnnnnctttaaaaaatcatattaatccatttttaaaatttaaaatagagtgtatgacaattattcaagaacatgaaccgatgaattaaatattacagggttgaaagttgtattttaaaaatgaagttctaatatatgttgatgaagatttttttaaaaaaaattatagcgtttaaaaacttggaagcgtctcctcgtaatccattactcgtaaacaaaaaaaagaatacgacctaaacagctaaggccatgtttaaatcccacccaaaaatttgttaccccgtcacattgaacgtttgaacacctgcataaagtattaaatataggctaaaaaataactaattacacagattgcgactaatttgtgagatgaatcttttaagtctaattgctccatgattagataatgtggtgctacgataaacatttgctaatgacggattaattaggcttaataaattcgtctcgcgggttcctgatagattctgtaattagtttttttattaatacccgaacaccccatgcgacactctatgtactacccgatataacacgcccaaatttacgaccctggttcaaaaccacccccctaaacggctaaactaatttcggtgctttttctcanggaccattttgaatattacgcgttattattttgacctaccctgcaaat

SEQ ID NO: 46477 - DNA, 1536 bp, Oryza sativa
tcgaacccatgaccagaaggtagtgtaactattacatgcactttggctcgaagctatatttatatacctcataactgtctaatcttagataaaacaagattatctagaacaaaacaatattatcttggatgcacgaaggcgtccatatcatgatcagagctgttccaagacgattgggtagactaatataaattagtatggatgaatcacacatgcaagtatacgtgccacatgaaaatgccctttgatgaaatcaaattgactttgttacattaaatcattaaattaataaatgtaaaattcagtacggaaaaataaataggataaaatggagctttatgataagaatggacgaatattcaacattattgatggcggcaatatatattaaaactgggtctaaaagtatgtattactccatccagtcatttatatttgaaatatgggatttactagatttcaggctcataaaaatttataaattttcagtcatctaaaattacacacattgctaaaactaaaatcatagtgctatgcaatgtgaaatttcaactctaaatattttgttatatgtgattttactttatttttatctaaatttgaatttctctgcgatgtattttttttaaaaaaaattgttcaaccttctaaagaagggactataatttgttaaataaataacaaaagagtaatgggaaccattatattataatacaatgggtgacaaaagtaactaaaattttcgaaaaattctatgtgcctcaaatctatacactcccttgaatatacatgacttatgggagtagcataccgacctcatctgatgtactatctcattgattttatatgtcctcatcgatttatatgtcgtatttcgattttaaattcctccaattgacctgacaagtgaagtaggttgaagaaatagaaaacggccatgatcggttattgaaagtcgctctatagcttgcacctatatattttggatgcccgcagccacagccgctgaagcaagaacagctgcggaacatgcccaaggtcatcaccttcaaaatatatgggatttttgcaacagtttgttgcaagtttttgggacaaatattttcaagtgtttcatagctcatttggaaccttacaaatttaactaatcattgctctcacggatttataggatgttgaatcctcttgttgtgttaaatgatgctcacattattttggattctgcaataaaactttcaaattaacatgttgttaatcccttctgttgcaactctatttattttgtttcaatacaatctagtactatggattagtagtgatgtttcaccctcaacctttgcttgatttcttttttgtgtgtttgtggtttgatgtttttccactgcaggggtagacaggtcaaacgcgctcactattgaattctcatcattagaatattgtttgaattcttgatattgttaaattcaattttggtaatttgttgtgagggtgaggtcacaatagtagtgccacctctattgattcccattgagttcc

SEQ ID NO: 46478 - DNA, 3481 bp, Oryza sativa
ggatcagctccgccatcacccactcaagtgtcgtagccgatgtttcgctgccggcactgaagatgtcctgcatatggtacatttttgcgcgtaggtgtgtgaaatgattagcacgagacaaaaaaaatccgaccaaaataatttatggtaaaactttttttatccacattatttagtggtaaaaggtcaacattgtaaaacaggtgaaataacttaaaaggaaaatgtatgaattacccgctgaactatcgtagttgaccgaattatccctctgaacccaaaaatcagacattgcttatcctaaactttcaaactggacgaattaccccgtcgatccaatccaaagtggttttgtcctacgtggcgtatgcgcggcaatccagtcagctctatatttatatagaaaaatgtgggacccacctgtcataccgcctctatctctttctctcgggcacaagggcacatggcggcgcagggatgggcagtgggcggcggcgcgctggggtgcgtcatcggtcggcatgcacagcaacgcgcgaaggcgggcgggcggtgcgcacatacagtggcgcgcgcgggatgtggaggggagagggggattgcaggtggatgggaaagaggagaagatggagttgccagggggaggtcggcgcgctcgccggtgcccatgccgggcaagactgaagcgtgccgaacacccgcacggcgagcgaaggcgtcatcaaggcggggtcatggcaaagaggcatgtgacggccaaaggcgtaggcgcagcaggggcccccttgtcttccccttagatctccctcccattctccttcctccctcgtcttcccatctccatctcctcccccttttgtggcgctggcagccgccgtccgcgacggcgcatcttgtgcttgagagagagaggacaggtgggtctctttttttttataaataaaatgcttaggttgagcaatacctggtttttaggtgcaggggataattcggtcgactgcgatagttccggggagtaattcgtactattttctaacttaaaatataaactctgttttaacatttgtattttgagaaaaaaatattttactctcctgaactatttcaccagagcacatgaaggcctacattttttttagctcattttatagcccggattctggaaacggttcactttcttatccctatgtttttctctctctataagtgtcatattttcaagtgaaatttttggtatgatggatacattaaaatttactgtacgtcccaatatgttttttatttttttttcacttttcacatagttaggttgaaaacacttcaaactaatgatgtcaattattatcaagtttgatagaatatatccaatccaataatttatagtacggagggaatagccaaattaaagccatatgcaagcggcaatgcaaagatcggatcgggttttttttattacttctggaagccgaaggtacgactcccgttctcaaaaaaaaattaaagaaggtacgactcttattcccttattggtaaccaatcatgcatgcatgttcctaattaaactttgcactgtgtagcagctgatgtgcacgatgctatttttagaaaccagtcgtccagggtatacactaatacatcactaaatgtatgaaaagtgtcaagtcaaaaaaaatgaaaagtgcacattatataaatagatctagaagtagagaggagaatcgtacgcttgaagaagagaatgaaggagaaaggttgcccccccacatatgttgtatctatatttcttttctttgtaaacattatataacccttctgacctatacatgtagcaaagtaattgtataatactaatatctagttatttgtacttgcttgtacggttagaggtgttatttgtccagataactcgaaggcacctctattaggacatcataaattcataatccaaaaaaaatcttaactattaaactaaaggggcattaattttgcaatcttcaatatcaaaaccagttcaaacatctctccaagataaatcatccaggttttatttgtagtctcatgcttttgatattctaacaacacgatttttactaacattgcaaatgcttttaatttttgatataccattttttctaactgggttctgtacttctgtgcaagtatataaaaattgtgaactaaaaaataacagttttcaaaaatgattgggttgccttggagtgatatttgaccgtttcttaggttagtatattctaaccagttttagtagttcaaggtaaaaaatgtgtccacgttgatcagttattagtatattactgatagttggtggacgatttgccgttgataaagattccatttgaaaatgagttccatgatgtaccatatctcctatatgtagaattttgttccctttttattatccgcacttgctatttgtcctcgcaaacaataaaatattgtccgcattgctattttttctataatgccgaaaatacttccaaacgtgtctttgtttgctccaggatagctctattaacatttatattaacatttagtaatattacgacatttgtgcccctgttttctctccatgtctgtccgactacaactagttgttgagttctctaagctctaagtgaaaaaaaaaagtctcaggagaacgggtcgctttatgaaagtaaaatgacactctatagttcttaatactagctccatccaaaattctaagtactatttcttttttcaccaagactaagaagtcattaactcattcaccatgtgacaaaaccaatgaatatgcaaccaattaataagtactaaaatagcttcttggattctcatcaataatttaatttagcacataatgactacaaataagacttagattttttggaaaacccaaagaatgaaaatagaatgaaaataggtcttaaacttttggaaggagggagtatataacattgttgactttttagaatatatttaccgttcgtcttaattatttagaaatttacgtaattatcatttattttactgtgatttaatttatcattaaagatttttaaacatactaacttataattttttgtgtttccaaattactgtgaataatacgaatgatatcaactttaaatatatcaaattttgaataagaggctatagatgaatattactgctgatagtacttacaaagatgacttgtttgatggcgagcatgtcgaccggaaactccagcccgccctccttctgtatcctcagcagcacgtccagaaggtcctcgccgtcgccgtcgtcgtcaccggtgccgcagctgccgctactcgtcctctccatgtgctcctggatgatgccgtcgaggatgccgtacacggtgtcgtggcactcctcggcctcccgcacggcgccgccgaggcggcccgcgaggcgcgacgacagccacaggtccgccgggttgaacccggccgacagctcgatggtgcgc

SEQ ID NO: 46479 - DNA, 671 bp, Oryza sativa
agctccaagtaatctggatggcgaagatgcggttttgcaactggacaatcgggtgttttatatctttgtgtttaagttggccttaaaccaaaaataagaaaaatcaaatttagtgtaattgcatactgatattatgattcaacttatcagtctaaaaattaatgtactaattgtacaccgagcaaattcctacctgaataaaacggagagaatatgtttattcttttgtttcaaagacactgaattagaacttttattatcttctaaacctttttaatttttaatatataaaatgaaatctctcaaattttatttttaaatctgaaacttttgtccacaccatcatgtctgacgtggcgaaactcttgccacaccagcttaaggtttacttttagaaataactttggagattttatttttaaattaaaacttcaaaaggttcaaaactaaaaaaaagtaaccgaatcataactataacgatttaaaacgaagaatcttttttaggtgttgttatttgaaatagtttgcactgttagttaattacattatttatttatttatattctatagagggacatgtagctgtttaattgtaggaaaaagtacgaattgcactcgtgaacaattgcggttgtccgatttaccaccctaaacttcaataccagttattt

SEQ ID NO: 46480 - DNA, 2420 bp, Oryza sativa
agggatgaaaattttaagaccctaaattctagttaggattcccataactcttggttatacagtattaccaatgcaagaaagaatggtaacaaaggagtaaaaaacacattaattgaaggtcaaacaaccaaagtttcatacaaggacattcacacatggtccttaccaacttgaggggatataccttcatgaaaaggaaaggtggctttagcagtttcttgagttttgataataaaaacctttaacaattattgggttcttctaacactcttgcacagtatacacgatggtcatcatcagttcatgattcatcaccacatgcaattattgctcatcaccggactgaaaaacgaaaaagtctattttgaccctctcaactattttcggaatcttatgtgtatcgctcaaccacaacattgggtatatcagaccccaagtattaaaaccaatacaaaatgactcccttggttattttcagggtggttttgtctggcgtgacgcactaaccttggttagactggctggttttagggctagtacttgaggaaaaaagagagagtaaaaatataccgggatccacatgtcagtgaagtacccctcctttcttcctcttatttagctgccctcttcctccttggcaagcggcaagcggcaagttgaacttcaggtagagagaggaaaggctagggagagagagaaaacgcgcgcaggtgggggatgctttggggcttgagaaagccgtggctgctcgtcatcgtcgtggtggatgactgcggaaaagaagcagcaacaatagctcgcaatcttttgcccctactgccagctccccttctaggatctagagactgttgtgcctccatttaggctccgcccaaagcgctgataactaacgggcgtggtggggtgcagcatgacgacatgggagatcttcatgttggtggagtcgtcgatgacgacaaaactgtacagaggggacactgaggtgagcaagacaggctacgcatctgctatagaggatgctggcatgaccgatggacacctcatccgtcgccaccgcggaagagatgatagagggaagaaagaagatgagatgcgggatttacatgtgggtttcattgctttttttgctttcatgatacccacgtaggataaagactagttcaacgtgccacttaagcaccacgtgacatgatcgatgtccaaactgcttggggagacaaattaaactggtattaatagtggagagatgcaatttacctgtttacagttgagggatacaaaacagattcagcttatagttgatggaatcaaaatggacttctcctaagaaactatgagtcgaaaggcccatactaagccttgtaataaatgacgcaaaatgagcccataaatggcccaccaggggcccacctatttccaacgtgtgcaaacgaatccaagccccataaatggcctacacgacacaaggccgtaaactgcgaacgcgattactcgacaggataaagcagagcaacgggagccatggttctgcaccaaccgaactaaaagagccgttcgttgctccacttatgatttcgcagattagtgatgaactgatgatattctaatttttggtttaggcgtgctttagccacagaaattagaaggcatggataaatgctaccggagtatatactccatttatctcgaaatacatcttatatcaatatttgtggtgatagctaggttgtgtctaatccagtagtaaggtactacatccgttttgctgctgacttttgggcacacgtttgaccattagttttatttaaaaattttatgtaattacaatttattttgttgtgttgttttatcactaataatagtttaagtatgatttatatcttatgcatttacataatttttttaataagacgaatggtcaaacatgtgttcaaaagttaatagcgtcatcaattaaaaaatggagggagtcctatattttgggatgaagggtatgttactttagaatgatgtctaattcgcatatctgaattctttctttttaagatattgatttcttaattgttataggacattgtacattgaagctttattaataaggttttgcctcatggagtggtttattattcgttgagctgatgaaatagtaaacgtcttctccaaaacaaatgacaatactgaaacttacgtacttgatggccacgtcattcatgtcgaactcgaacttatagataatcatcagtcatcagatctgcgcaaatttactccaaggtcaatatcacatttgtagttcaataggcctaatgtcaacttgaagttaccaataggcgtgtcaactaaaaaaaaagatgggctctagaaacccaaatagattaaagtagaacacagaaggttctcaacatcactaaacgcaagggtaa

SEQ ID NO: 46481 - DNA, 4775 bp, Oryza sativa
cccttcagatctcatgcacgttcagcgtgtactatctgggggtacacctctcgcatggcctgctgtctgtcttgtcagttatcagccacaagcatatattttaatattaaattttgattctagaattgattttatatttttttaactttactttttagcattttcttttaaaccacaactattatcccataaatatttgtacggtttattctcatagcagtttgtatgctgcacagttttatggataattggatatacagtaggactttcatcgtctcataataagtttatttttagttcttttcatttgttttaaaataagtttatttgagctattgaagtttgtgaacttatgatatataaatgtacttagagtagatgaaatttaggaaaacaggagtattatagtcttttttttattggtatgtgtggaattattttagaattgagaaagtacaatgcagtaccgcatcatctatagtacgagcaactaacaaatgaggccgggcacgtatatcaatccctatttcgatccatcagctcctacaagtgtagaggcaatattggaaagaaccatgcctatataaatctgtgttttttctttttgtcaccatgtaatgacgcatgcaacaagatcctgaggtattcttgtgttcatgagactatcaaggcgtcaatcgaagttgcctgtctccttttggtgaagaacattaaggctatgtttagattcaaactttgaattcaaacttcagtcctttttcatcacatcaacctatcatacacataacttttcagtcacatcatctccaacttcaactaaaatccaaactttgccatctaactaaacacagcctaattggaatcctcctccaaagtgatttggggtctggaccaatcaggtattcaggtggagtactacatattttcgctgcaaggttgttgagctttgtgcttagtgatgtgactgaccttggccggccggcggaagccggcttaagaatttcttctcgttttctttttagggcatgttgaggttccaaataaaatttttcacgctgtcacatcgaatatttagacacatatatagagtattaaatgtagacgaaaataaattacacggttcgctaggaaattacgagacgaatcttttaagcataattacgccatgatttaacaatataatgctacagtaaacatttgctaataacgaattaattaggcttaataaatttgtctcgcagttttccggtggattctgtaatttattttgttattagattacgtttaatactttaaatgtgtatcaatatatccgatgtgacatgtaggggaaaatttttttgccaattaaacaagcccttagaaagggaagactctattaccagaaatgattgtgacattacaagccaaaaaaatattaataagtatatcaaataacagactattctttctttagataagtataacagactattctgaagtctaccagggacggcaactggtagtctggacaaagcgataggaaacagaagccgaatctgaacgaaagcaagaaacgattccgctgttgctgcttcacacacaatcgaacgaatgggacgtgctatttcacgctgcaaatcggacgcgggcgggcgagaggacggggttcgaagctctggaaatcggaagtactctctccttcacgaaaaaggcaaaccctagatttccttactaacgtttgactgtccgtcttatatgaaatttttttataattagtatttttattattgttagatgataaaacatgattaatactttatgcgcgacttattttttaaattttttttataatttttttaaataagacggacggtcaaacattgaacacggaaaccagggtttgtctttttttgaacggagggagtagtaggtaactggagggaggtaccactcgtttgctttactatacgagtacctgagtttcgattgacgcgtgtacgtacggtaaaaataaatgaagtaccaggcaaacccccccccccccccccggccctctcctatgtagcttcgcccttggtaggcagatgacgtaccaaacgaaccgacggaaacatttcatatgcgcatgtactctcgaatgtgtctgtcgctttaccgtacgatacggccatcttatctagcaactgacttttagaaccggtggtggaattggctaatggccggagctgaatgggagttggtcttctagtttttggtgatgtttgtttgaagggtagggtgaatgaggcagctaaaaagatgaaatattctctcaatattcacgatagagggattaggcttattttaccggattaagacatccaccatgtggatggctaaatggactgtccagccggggcatgaccagacccgagcctgagatcagttgggtcagcacgacttgacctgcatgtcgggccgggccatgcccacccatgggctgcaccaacaacccaaacacagtccaataagattcgggtcgtgccgagctggctcgaaggtacgaaagcccaccgtgctcctccttggaataagtctattttatgtccctcatatctttgggccgtgtcttatatggctggaataagtctattttgcattctttatctctttgggctgtgccttatatggctaaaataagtctatttctctccctcatctattttgcctccctaatcattggaacatgtcgtatcgggatggtccaccatgctgaggcagaggcccaagcacagcccaaaggttgggccaggccatgccatgcctgggccaggttgtctagcctcaggccttttggcaatctataatccaccttgtctagaatactaattagtgtatgattactaagtaggttaaattatgattaatgatattaaacatgtttgatattgattagtaattagcacgataaaactagtgtaaacaagtgctaatttgtattattaattgtatgacttactattattatagcacttctatatctgtacctaactaaaatattcgtattttccctttagtcacacttttttcgtccgtccgattccctccatctcagcacgtgcatgcgcagatttgaagagaaacagactcgaactataaagctagggtttctcttccaacatctatacgacgtggttttgttttgattcttgggaaaacagaaaggggagaagataaggatcaaaacccctcactcaatttctaattatctccatggatgtggactgatttcacggaggaggcggattcaggcgtcatcgggcagatgcggcaatacggacggaggtaggagacgacccggtagcactggcccacatgacagtaaaagaaggagcgagggaggctgattagacttgtagtgctttgctgggccggatgcgtacttgcgggccgaggaagaggggaggagaagggagaaaagtgggccggctaggctgcaggccgaggaaggaaacgggatgaaattggcgtagagagaatggagagtttttatttagatttttttaaaataaattcttaaatgatgtttgtattattaaagttagcaattgagatctgaaaatttcaagaaaattccagagagtgtaattaatcatggagaacttcattaaaaattaaatttagctatatcattttatttccacacttactttacttttaaattaatttaaacacctacctacttaaaaaatcaagtattccaggaaatgtgtatttaatttaattacataatgtaaatctttctcaaattctcctcaattttctcatcttttcttcccgttgcaacacacgggcattttttcgaggaagatattataattaagtttattgctttcatccaatccatcctcatcctaccaatcaaataagcttatcccatcctaaaaaaaacttagcttcatcctctaaaatatagatggctatattacatccaaccataaccttgaaccaaacataccctatccgattgatgaaacactagtgaccaaaggccaactcaagagactagaccacttgcacgacaacctaggacccaggttggtcgggggctatcactaaccaacctggagaacattgtcacctgccctcacgtccaactcgcatacggccacaccttacctcatcatgagttcatgactaagattatttaagttgtggtcttatgatcttctcatcttctgatttttgcatcaatttagcctaaaacttaggctaggattttgtttcactcttatttaatttacttcacaattttagatgtttatcatgttagtaattgttggtatttctcaatgtcacagctagaatccgcaagcgcacggatatactgatgtagcacttcccctacggagtattccaaaggtatcaaatccaagagaacgtgtatgattatctcctcgttaggttcatccaaggacacaaagctaatgtgggcagagggtagagaggatttcctaatgagaaacagtgtttaaggaaagcttaactttaatcctaacgcaatacttcaggcactggcaacccgctgttaccagatgtcgctctactacgtaaccggacagggagtacttaagtgctcttgagggctgtcaccacctctacacctacctcaaacgtactatgggatacgcagcaacaactgcagattaattatctagacaccgcatctacgcaattaataactactctagtgccgatcaaacactaaagcaatcactataaataaatagactatagtaaacaatgatcccgta

SEQ ID NO: 46482 - DNA, 748 bp, Oryza sativa
ctccctattctaatatacaataaagtatactagagcctcttataattcagcttatgatttggtgtgtgtttacaagtgaggatgagaggggtatttataggtgaagtgccttgggagtgtggagatgctccaagcatccaaagagcatcatctctcttgtgttgccaagcgttcaagctaatgacggtttctaccggtgaaaacggccataactgtcattgggaggcggattgctaccgaactgaacttgggctggggcgaacggcctctgctagggttcagccgaactcaggggttcggccgaacccgggacggctccgttcgctccggttttcgtcctggacactcattttggggccctcaattcattggtatgaatgtttggcccatatggaggtgtttaatttatgggtccaaaactccttaagttcggatacgagtttgattctcatcctccttcatgtatatttcctctcaaccttggtagtttgtcacctgcatataaatatacaccaacacttgtggaaattattataaataagccctaccactatgttggatgtttacaattatggtcttatgctggtattaacggtgttaattcgatacttaacagccatcaacagtaatgtttatttgtgttactttaactgatacatgatttatctcttctctgtccctactattatatattataaaaattgaagatgtttccgcggtccgtcacccgtgtttgagtcgattataa

SEQ ID NO: 46483 - DNA, 660 bp, Oryza sativa
tctagcattgtccacatttatatagattgatgttaatgaatctatacatataacatctatatgaatgtgggcaatgctaaaaagtcttgtaatataaaacggatggagtattgaatgttaattagaaaacccggaaaaaaaataaaagcatccatgtaagttttagattgtaactcacagcaatggcagctttgatgttgtccgtggtgagggaaaactgaaggctaccatttgtctgaactcttaggagtacgtctaccaggtcctctttctcgagctccatggaggcctggcgcgccgcctgatgctcctcgatgatggtctccatgaactccatcatctccttcctctgccgcctcatgcggccaggaactcggctgacgagcatggccagccgcgacgacgggaagaggtccggcaagctcgggcaggagaacagcttgatccctcgctccatcagccggaggaacgtctccctgtccttgaaccggccgcttccgatgatggcgcgcaccgacgagtcggcgacgcacgacgatatcatcctgctcaggttgacgacactcgccgtcgccgtcgtccctttcggcgacggcgacgccacggcgaggaggaggcaccggacctcctgctcgcggacggctcggaaggacagcacgc

SEQ ID NO: 46484 - DNA, 826 bp, Oryza sativa
atattgcatttgatctgggatgtatttgagttgtggtgtatttcttttaggatatgtgatgtattttttgtttgagaatctgtgatgcatttctttccagatctgtgatgttagtttggtttgtggataatttgaggatatgattgaggatatttagggatcagatcaatttgagaaaaaaaaaagaattacccgggactgctcctaccatctttagtcccggttattttacccgggactaaagatgggcatctttagtcccgcattcgtagtcccggttatacaaccgggagtataggggggttcccacccgcgagtaaagcccctttctccaccagtgtattatgcaacccctgtgctacatgtatagtacagaggggatgcataatgtataaaaaagtggagacataaaatataggggtaggacatactcttattcattcatccattgctcaagtgtacaatagtgagtttccaaccctctatttataagcataatgcatatataaaaagtaaggtgaagggtcttataagtatgttgggctgggtcttcatggtccaagcccaaatgtttcctaataagtgagacttattgcttggatgagcatatataatggtggttgcgttggataagcttatgtactgcgcgacatatggctgaggagttgtgacacctgtagtgcgcaacgagataatatttaaatgttcgacgaaacgtcggcgacctcggctagacgccgggcacgggcacgcggagtatggggcgaatgatgaggtcagccttccggcgaacaccgatgccgaacgcctcagtcatgtcgagctt

SEQ ID NO: 46485 - DNA, 2934 bp, Oryza sativa
tatgtattttcaaaaagagaacgacttttaaacccgactcatatacggatgacgtacctgtcatagttacgaataaggcatacttactatcctatgacatatgaaatatacagatccgacataccttcgtatgtacgatatacttccatatacaccaaggaaaatgacaagagactatgaaaattatcctcatggacaagtgaatagtagagccctaccttgaggattgggtttatattatatcgtgcagggtccgtagtctccgagttctacttggagactaaggtgattcacggtataaaagatacatcccctgagggatccagatcatcgaatcatagcgccaataccaccaccatagcctacaatccggaggacgtgaagcctactcaccgggagatctcgtcgaaatcatctcgacgaggggtctcgccgccaatcttgggattgattgttctctattctaatatgtagttttccatatcaatctcatataaactggactagagctattaccttatgaggggcctgagccagtataatacttgtcttcttgttttcttgatgtcgtatcgtgtaaattctcataccaacttaccacaataccctattcatccggtttatgagatttctcgttgacagtgctaaagtactggcaaaaagatattcaatttttataatagtagagataagttctttctctaattttcgccttttttaaaaaaaaatcgttgtgtacctccttttaggtccttgatattttttttgtacgttgccaatccctttactttaggttaggatcaagaagacattattttaggttaagaatcaagaagacataagcttcgctgcaaatcctgtaacgccccaatttccgtatacccttaaaaactatttaataaaattctatgttcaaaagtttggttatttgagtgtatctaggtttgagtaccaaagatctcaattaattcattcctttgtgaactcaaaatcttgaccaaaatattctatcctaaattaaatttctaagattcaaatttcgaggttcgagtcccctcctaaaccattcaaaaattcatacaagaactcatataaagtcgtagaatcattagagttccaaggtcctaagcaaagtccctcgaaatttcatttcctaaaattcctggaaattggaaaatattactattccggcacacctaacggaggaggaggaggaaggggaggatgaagagcggcagaagcaagatgaggtggtagagctgtacaacctccgccatggctggtgggttagcttggatcaaatcaaagcataaaggaatttgtatctaagcaatggagtttaaatgcttgcattttgcttgctgtttttgctcaataggtggctgattgttgggccttgtttaggggagccgcagatttgatattcttctgcttggtaaccaacttctgaaaatttagagacgctgggtttttcagcttttagatttttcattttctggattctacaactatggatttttagaaaaatttgggtaacaatatggaccgtttgaggagctgaagattccgggtgtgtttagatcctaaaatattttggctaaaaatatcacatcaaatgtttggacacatgcatggagcattaaatgtggacgaaaaaaaccaattgcacagtttgcatgtaaattgtgagataaatcttttgagcctaattacgccatgatttgacaatgtgatgctacagtaaacatttgctaatgatggattaattaggcttaataaatttgtctcacagtttacagacgaaatctataatttgttttggtattagtctatgtttaatacttcaaatgtgtgtccgtatactttaaaaaaatttggccaaagaactaaacacggcctctgtgagaagctatagctgctaaaagctcttccaaacaatcccttgttcttagtcagctctgcattctgcacccagctagttttttgaattagaaattattgccaaaaggaattatgaaaattaatggaatctttgtgtattctatccagtgtttcataaaaaaaacaatttgttgctagcgtttcgttggttatcagaaatttagaaacaatttaatgaaatttcgaatttaatttgttttaatttatccagattactcagcggtttcttgataggaaccggctaagataactgatggccacagtaaccaggtgatattttaactacttgatcattggatcgttattttgaggaatctaattatttactatgatagatggatgatactcattaattcggtatatggtgacttttatatccctcattgcactaacgagatggttgactaacctatatcggttcctgatttcctacaattaaacgaattgtaagaacaagtgatcaattaactaaggctatagctatagcctcgattattggtcagatctgcatcaacctaatgaattactttcaaagaaaactaatgtcatctctgtgtataataacagcctgatcactaagcatctaagccgccaaagtaaatagaaaaggcatgctgctaacattcgcatcccacgccatactcgcatcccgctaagctacgagctcatatatgatatatacaactagccaggcaactgcacgtacatgataaggattttctatacatggatgtcatgaaacccatcatttacgcgcgacttagatagttataggaaaaagtaacattaattgtgatgttataaatcgatacacaaacgtacaagattagattgatatacaactagagaaataacactactacacgaatgatttttcatggacgccgggcccttttgggcgggccatgagtggaaccgcacgggataatcgagcgaccggcatcgggcggacgcccacacgggaaaatcaattatcccgtgctggcatcttaa

SEQ ID NO: 46486 - DNA, 1067 bp, Oryza sativa
atcatgtgcaaacacagtagcaacagttctttagctagcttgagaaaattcattgcaatggcaacctctggctacacaactgcctccctaggctcccatcggatggcctaataagaaaaaaaaccaaattttaaattttcaaacttaattttgagaatgactttgagatattttcaacgtagatttttttagcattggcttttaaatcacaaagaacacatatataaaagttttacctacaaattcaatttttattttctaataagccgttttggcttattagaaaaaaagcgaaacgatggcgcccctaaagtccctatggtggagctttagctcgtgcttgtcgcagggtgactgtgaggcagagagaagttggggaaagaaagagagtggtgctaacaggtggcactcatattttggtggtgtttgtatctcctgaagattaagataaagataaagtgtttcaggtaaaataaggtgataataacgtatgattaattgagttttaattattataaacttaaaaaaatagattaatctattattttagaacaactttcgcatagaaagttttcgcacgaaacacatcgtttaacagtttgaaaagcgtgccacgaatattcaaaactttatccactctttgtggtggaaacgagacctttattttattttactgacagatgggcagtgcagatgttttctataattcagcatgaaaccagcaggggcggatcgaaatagtgctaaactgaagttgctgtaaagttttcgtacgaaacacaccgtttaccagtaatatagacaaaataatgtagatgaacttgcataataattcaaatatccagtaattaaacatccagtgatcgcatagtgctaaactgaagttactatcctgaaaaaacacaaactatatactttatactagatacatatgagcagaataaatagcaccccaagtatttttctttgcacaaacatgatattataaatgaatattaaaaagcttagaccaggtggacgtgcagtatccagccggctatacagtaccaaagaacaacactgaacgg

SEQ ID NO: 46487 - DNA, 3261 bp, Oryza sativa
  unsure (1)..(3261): unsure at all n locations
aggatccccaacccatctttaacaccggttcgcaacccctttagttccggttttacaaccaggacaccaaatcccgaaataaagatggatatctttaattctgattaaaataatcgggactccatctttagtcccggttggtgttatcaacccggactaaatttttagccagttctttttttttctgctcacatgatttgggcacaaatcatttataaaatcattcataaaatcatccttaaatcatttgagcaccacgaatcattcctccataaatcattcgagcaccacaaaacattcaaaaaatgcccaaagctgcattttctccatatcccattcacaaaattcccaaatacatcacaaatcattcacaagataacaaaaacatctacaaattctaaaccaaaattatccacaatttcatccacacatcgcacagatcggaaaattcatcacacatatcgggaaaggaatcgcatagatcgagaggagggcgccgggcatcgccggccttgctggcctcgctggcccgccgtgggagcgggctcggncttctcgccgggcggccacctgacgnttcgnnctgccgccgtgggagcaagcttggccgcctcgctggccgggcgggcgccgctccgctgcccgcccgtgggaacgggcttaaagccctcgtcggcccgccgctcgcccgctagtaggaaaaggagagggggaggggnagnagnagnagagggccgaaaggaagataagaagaggagagnaggagaggagagaagaagaagataaaaagattcctcctgtacctctatcctctctgttaccgtgccttgcgcgtcctcccgcgcgcatttttttcagattccactcgcgtgcctttttttcatcttttctaccggttgatataaccacccaagattaaatatatgatttttagtcctggttgttgatatcaaccagtactaaagataatagggtcttgacacgtcgtgattttcaatgatctgggactaaagatgatttttagttctggttggtgttaccaaccgggattaaaaatcattggaattctaaaccaggataaaaaataatttttagtcccggttcctattcaaaccgggactaatgtgtttttggccaatccggcaaagattacttcaccagcagtggatgttgtctaacgtggcacaaaatagccacgtcgaggtatctcagcgccagctactgaccctttttccgtataaaaagtgtcagctcggtggtgtagttcatgtaatccgatagcgaggtgcaagattcgaatccccctagcccattgtttttccaatttttttcttctcccttgacttgctctaattgttctgttattttcattttaaaatatcgtgtgtgttttgttttaacttgaactttaaacgaaataacacaagttttatttaaattaattttatttaaaagaaatatcacattttaaaaataaattaaaagaaataacacgtttagtacatattttaaaaatagaagaatggacttaaaaaaatacttgagctttgaaaaagaaaattaaaacagcaagcttgaaccctagttgctataacggcacgagaagaacctaccactgaggtaacccaaacttactgattgctttagctttcacagctatttacccagtagatatgtcagcgccaatgaagttgacgctgaagtctcctgacgtggcgattttgtgccaccttggacaatatcttaacaccaaaaaccttggcgctgagacgttatatctcagcgccaaacgccaaacccggtggcgctgaggtcgcggcttatttttggaatagtttttgacacggtctattcttataataagtttgttaaaagggtcaatttgtcaaatttttggtccaggacgtggtggtgtcaaaggataaatctcactggtgtcatccattaaagaacatcatagatacttgggttaaacaagaatccattggtgccaggtgacaccacacctaacacgaagaatattatttaaattatattgacaattgtcggtgaataggaacggggtacctatttatccagcaaaaggattattattaaataaacaacatgctcagaatgtctttgaaaataaaaataaaaccctagggtggcgtcgctaggggccctttccagagggcctcaggcccacgtaagatttcatatacagcgttcctcctggatgggggagaacgttgcgtatatggctcaaaactctaagtattgaagtagcttgcggcctggtttgggtcacaaataaaccgcaaacgtgccttaagaatatagcttagggtcagcctcgggcatggccatgttctgggcctcgggcttgccctaacccttgcagtttttatggtcctcggcaagaggggcatggcaacatgcaagtcctatatcttaagaagatgagctaagatctgcctcggatgcggtctaactctaggccctgggctcaccttagcccatacaggtcgcacgttgctcgaggaagaaaagcaacgaggcttgccaaacataaatgcgtgatcccatgtgtgctttgggcctggccttgcctcgggccctaggctcccccgagatcttgtatagctcacgtcccctgcttagaggggcgtgagaaggtacaagacgcacaatctcaaaatattcttccatcgacgacgtcttcaagaagctcatcaagaaataataaccattctttaagcgcggcagggcgcgacctcaaaaactctcaggaagtggggcatgctccccaccataaataaaacaggtttacagggggatccccggccagtctgaattgaaaggacgtggacaagacgttagcgttgagtcactttggatggtggcgcctgggacacgtgtcccgcatgactcgcgccacttgagttagccaaatgggcgttgtttcaggcaggtcgggcctcgtcgggcccaccatgcaccacatggtgagcgtattggtggaggcccaactgtctcgaatggagctcgggagcccggggctgtgaaccgtatagacttgaaaggttccttgatggttgcgttagaaatctggccggcagcgacaagacggctcataagacaagactaagagtagatttgtaataatgtgagcccctcctagactggaaggggattatatatggatgaagggttgctttctgttaggttagtacttccgctttgtagcctgaaaaaaaggcctctcttatactgagctga

SEQ ID NO: 46488 - DNA, 1980 bp, Oryza sativa
ctccttgcggggtggccgggcccacgaaaccaccgtgatcgcagatacctcgcaccgcacgcggactaaccccctggtcgaatctccactctcggggagggatctccactccccactgtctgagggaccgccccctcgacaacaataactgaaggatacttcgtacttggttttattattgagggaggaaaaatcggagcgtgccaatccatagttaagggaggtagtatatatataggcattttccttaggaatatgtgaattgacaatgtgcctatttttttttaagaaatcgtgcgttctacttatcgtagagagtcaaaatacatattgcacgagtgatatatttgtagcttcagagctacgacaaggctattgagaacagcatgatttgcggatggtcccgtcaaagaagtctaaattacatctagatccaacaaataagaaaataaggactccgaaagaaaataaaaaagcaatccagtccttgagctcgctgcttcttcttcttccagagttccagtgtgttcaactcgatgcatatggcaatggatacagtagcgaggctagctacaggagaagatgacaagccacaaacccgataggggcctcccaaagttggatgttaaagcaagcaaggcaagaaaaagaaaactcagctaaaccttagaacttaacttcgttgctgcagacaaaggccctattcatttctccaacaaatgttagataaatttttcgatactcgtggcatactttttaaacggctaaacggtgtgtttcgtgggaaaactttatatatgaaacttgttctaaaatatcagattaatctatttttcaagttgtaataattaaaacttaattaatcacacgttattatcgtctcgttttgtatgaatcacttaatatttatctttatcttcatcttaagagatacaaacaccaccaaagaaacactagaggaatagcaggaacctcatcgaagaaagtttgattggccagtgcaacctcttcgaatcctactttcgcagcagatatgttgcttgcccttcaacaattgtaggtgtgagagcttaaccctacaaccgttggccagacaacgaagctagtgcaaacaccagctatttcgtcgatgagccatggttgccacgatgaggaagacagacacccgcatcttcaaactatgcaagagggagagggaaggaacaacaacaacaacaacggaacgagccgaactatgagataaacccaactgctcaccggccagactccccccaccccggccaccaacctgatagccaacggccaccagagacgtagatggaggggaaagggagtctcatgggaggaaaagctggtcgcgtttgggatcgcctctcaatctctcatgttagaataggtgtcgaatatactagtcctatatatgatcatagttggacttggagttgtaataggtggtaggggtggagataaagttggactctgtaacccggcaactctcttaaatagagagggggcaccacaatatagcgtagatacgcagggagatgatggcagcgtagccatggacttatagcggctaggagctatgttggttgaggagaagcgtccataatcagagccccggagatgtagccttcggctgaatttcgttaacaaatatagcatatctcgtatgatcaatgattgaatcgatcgagaaggttagtcgtcgttacgctatatcgactaacttttataacatctcatagccttaggatggatcgagagaggagcttagtttgtttttcttgtgtgacatatggtgacataggctgttacttcacagttatttttgttgggtgggaacgtggggtggggttcatggagtggttgaacattagcaaacatcttctgaaaacgttcgagatcgaacatgtgattaaaaaaggtgattccggtcatactcaaatgccggccgccagttctaaagtaatgtcgtcg

SEQ ID NO: 46489 - DNA, 2334 bp, Oryza sativa
atgagaatttacacgatacgacatcaagaaaacaagaagacaagtattatactggctcaggcccctcataaggtaatagctctagtccaggttatatgagattgatatggaaaactacatattagaatagagaacaatcaatcccaagattggcggcgagacccctcgtcgagatgatttcgacgagatctcccggtgagtaggcttcacgtcctccggattgtaggctatggtggtggtattggcgctatgattcgatgatctggatccctcaggggatgtatcttttataccgtgaatcaccttagtctccaagtagaactcggagactacggaccctgcacgatataatataaacccaatcctcaaggtagggctctactattcacttgtccatgaggataattttcatagtctcttgtcattttccttgttgtatatggaagtatatcgtacatacgaaggtatgtcgtatctgtatatttcatatgtcataggatagtaagtatgccttattcgtaactatgacaggtacgtcatccgtatatgagtcgggtttaagttcgttctcttttgaaaatacatatccgtatttgagtcagtttttaaagttcgtttattttttaaaatatagaaggagtcgtataagaaatctatttaaaaaaattacatgctagcttgagacgatcggattcctaattgcagctcatgattttctaaaaaaaatatgtccaatcgaattcctatggcgaatttcaccttaactaaaccgtataataatattattattaaaataatcttcacccgttgcaacgcacaaatatttttttctagttatcaaataaataaaaggagttagactttgaaactagaccggctagcctatcatcttatggagctagctataaaacccctgaccgttccgcggattttctcaaactagaaaaacgttgctacgtactgttgtcgcacctagtgctagtcacgtgtagtacgttgcttagctggatttgtataaatgagggtattggcagttaacacctggcggaggatgcgagaatattagcagcgtacttcttatattaactatggaggcttagatgcttagtgatcacgatgttctatgcacaaagactagctacagtcttagttaattgaggcttagaattgtgatgcagattggatggagtattcaaaaaataatccattagttgatgcagatcgatctgaccaataatcgaggctagctacagtcttagttaattgatcacttgttcttataattcgtttaattaccaacaagttggtcaactaatctcgtccagtacaaggtataaaagtcaccctactgaattcatgaaataatctcgggaaagatatatcgttcgattctccaaacattacgatccaatgggcgatcaagtagttagaatcatttaagaaaaaaatagaaaagatggcctcttgggttgccttgcgtggggaggctccctagccctagcccgcctcctcatccgatctgctccgcctccaccatagccatcggcactggtgggcggcggatgtagatcggacatttaatgctccatgcatgtgtttaaatattcgatgtaatatttctggccaaatattttgagatctaaatacacccagaatcttcagttcctcaaacagtccatattattactcaaattttttttttagaattcagaaaatgaagaatccaaaagctgaaaaacccagcatctctaaattttctaagggactagcttaaaaaactgtcgagtgttttttgaggggaaaacttttaaatctaactatagtatataatttcactagaactatactataataataactggtacatatatgtattaaaataatatatacaactttatatctaatttatatagagataacaatatagttatagagtagttacactatagttacaatataattacaatgtaattatagtgtaactacaatgtaactagcatataactgaaatgcaatttagatgtaacatgaacaaatttaccatatacatgtgatgatgtggctagcttatgaaaagagggtttagatccggtagcaaaatatctcagcacaaatcttaaagcgaaatcgacggcctaaaaatttgtcgacagtcatttagcagtttcgattttctaaagttggttaccaaccagtaaaatatgaaatctgcggctcccctaaacagggcccaacaatcagccagctattgagcagcaacagcaagcaaaatgcaaacatttaaactccattgcttagatacaaaatcgtttgagctttgatttgatccaagct

SEQ ID NO: 46490 - DNA, 542 bp, Oryza sativa
ggctactcgtttgttggtgcttctttcttttttttttctccatggctcggtgcaatgtctgtgcccaatgcggcatggtgaaacgctcattggcggacaaccgttcccaaaaaatccccaatcggcattcaccggcgactccacgtcggcgttggaggatttctccgagagcagtataaaggaccaagaatagagagaggaatctgttttcgtgattatattagtgagatgcaaaatggatttgcgagttgttacccttcttcttccttgatttctagtagaacgttatgctatcactggtggagaaaccatctttggtcggtcagccaaatttcacaacagtcccggttctaataaaaaccgggactaaaaaacatctttagtcctggtttaaaagttgaggagtactttttgatctttagtcccgggactaaagatcatttttactcccgattcaagaaattgtcgggttcaagacatacatcaactatttttactccccgttggtataaacagctgggactaaagatcttttttagtcc

SEQ ID NO: 46491 - DNA, 3817 bp, Oryza sativa
  unsure (1)..(3817): unsure at all n locations
tacaaaaccagtgcaaactaggtccctcggcggttttgagtccggcttttgtctgatgtggcaattgactcatcatagaacccacgtgggccccacgcgtcagcctcttttcaaccccccctctgcacctttcttcctctccttcttcacgggcgccggcggccggagcatttgcacgggcggcagctagcgggcgcagccggcagggggagaagccacgcacggtcgccggccggtggtcggtgaagtggcgcacggccggacgacggagcggctctcgancggcggcgnaaggcgnaacancggagcggcgctcgggcggagacaaggcagaaggnaaggctgncgccagcgggagcacgggggagatcgaagttcgaagaggacgacctcaagcacggcagcgagtagagtggggtgacggcgaggcggagcggatcggcggtgacaggagcaactcacctagggcgccgtcagcttcgcaagggtagcacgacgacagacgcacgaagggagatgggaatccaacgaaggatgtcggggtcgtcggcggcggcggcggtgacccaaacgggaagcatggggacggcgccgctgagggagccgtggaagtggagcgtgacatgaaggcagctgctgccaccgcctccgcagtcggtgtcgtcgcccatgcagcggttgccgcttcaccgtcctcccgcgcgccacttcgccacctgagcgccgctctgtcgttcgcccactgcccacgcatggcttctccccccccccccccccccgcgagcgccgtgaagaggagagaggaagagaggtggagaggggaggggaagagaggctgacgtgtagggcctacgtgggtcctacgctgagtcggctgccacatcagataaaaccagagtcaaaaccgtcgagggatctattttgcactggtttcataagttgaaggatgccggatatctcgtattgtggttgggggatgattttgtaactcgatgacaagttgagggaccttcggagtactttttcctttttttttctgtccagattgatacatcgcccaacgcggcagtggggctgggctcgattcaaccaagtatggttatgaaggttatgtttggtgtatgggccattttggtttggtgccaattattgccctaccaattctttaatagttttgaatagtgcatattagcattttggattgaagccaatttttgccacatcaaaagagtggagtcaaatctattctatcaaaaatttggtggtaccaaaatttgcccaaggtttggtactaccagtattttggtagtgtttcaaaccaaacaagccctaactctatctctactattataaaaattgaagatgtttctgcggtccgtcatccgtatttgagtcggttataaaaattgaagatgtttccgcggttcgtcatccgtgtttgagtgggttataaaaattgaagacgtttttgccggtattttggtacgtcatccttgtatgtgtcagtttttaagttcgtttgcttttggaaatatatatttgtatttgagtcagtttttaagatcgttcacctttgataatacataaggaatcatataagaaatctgtttaatatatatatatatatatatatatatatatatatatatatatatatatatatatatatatatccaagcgaactcacacagtaaatttcatcttaactaaacaatatctctactacttaaaaaatacgaggtgcttccatcgtccgtaaaaaaaccgtgggagaaaaaaaccgtgcgaaaaaaatcgggcgaaaaaaaaactatgtccaataaaaaaaggacaaaacaaaaaaaaatccgcggacgaaaaaaaccaaagtccgataaaagggcgaaagaagggaaaaaccggaaaaaaagaaaaaaaaagtccgatccaaaaaaaagtaggggcgaaataaaggaaaaaaaagaaactaatctgactcggtctacacggtaaaaaagggcgaaaaaaggaaaaaaaattaaacaaatccgactctgtcgacacggtaaaaaaaaagggccaaaaagaaaaaagtatatgtccgataccaaagaaaatcgaatcctattatatgtgacatggcgtggtaaaaaaaatcgaatccgattccatcgacgcggtaaaaaacaagcgtaaaatttttttctgtgcgattccaaaaaaaaagttgcgaaaaaagttttccgtttctctttctctatctctatctctactacttaaaaattaaaaagtgtttctgttgtccatccgtgaaaaaaagcgtgaaaaagaaatcagcgaaaaaaatcgaatctaattatatgtgatgcggtaaaaaaattaaagacgtttctgacatccgtagtaacgaaaaaagggcgaaaaaaatgaaaaaaaaggaaagtccgattcaatatctatgtatacctaattaaaaaaatttgtatggcttgtgggttatagaaattccatcacacgtgcgatcgatcccgctttaatccctctccgatggcaaaaaaataaaaaaagaaaagaaaaaaaaaatgagagactgcatcaaatttggacctaaattctaaagaaaacactactacaagaatacaagatcagattcaagaacaccaagaaaacgccgacgccggaaggggagggtgtcgccatcgctgctgaaccgccaccgccgtcgtagggatgtcggtatgtcaggctgccgccacattgttttgagagagaggggggaggggaaatgattttagggttagggtttgggctgttgaacttttatataggtcgggatgaccgtctatcagatcggacggctctggcttctcccgcgtcaggccgaacgccattcccaggccgcccacacggaataagttcactttaggttgtttaagttgttcctccccgattctattcccaggccacccacactattgggccgcctcatggaccatgtgtactctccgtatggaacaagttcactttaggtcactttagctgaacttttttatttcattataaatatattttcttaaagagctcatatcatgtaaaactaaaccttaatcatataatatttttatatttgttataattttaattacccatcacaacgcacaggcattttttctatgttaaaaaaaagaccacgacatacgagtgagagatatataccacacacacccgcaggctcatctttaactgaactagcaacagattttcaattacaggtctaattgttttatttaggtgattaaatttgttttcatttatataattagtttgctctatttaagctttttgaaaattgctaaaatttgagaataactttcctacttcgtattatattatttttagctaatggaattaatggaaaattaattatatatttttatctttttgaccaaaggtcactgcaattttatttcattaataataatattattattatgattcctttattttttttcccatcagtatacatgattaaaattacctttacccgttgcaacacacgggcatcattgctagtaacaataataagattaaaatagacttcacatgttgtaacacacgagtattttttttttagtattatcaaaatcagactaccaaactttagttcaaaacacacctattataattatatgtaagtttgacttttcttagtaataaaatattttgaacacaaaataaacatgttatcaatatatatacaatgttagatatagataattttttatataaaattaatcaaacttagagagatttaactaagaaaaatcaaagcgatata

SEQ ID NO: 46492 - DNA, 690 bp, Oryza sativa
aagttcagactcatgggacttaatctgtgttgtgttaattttgaatgtgaacatctgtttattttgttggagttatgactttgttcttttgacgagaacatcagtcacctagttcaaataggggattggattgctcgtattataggtcttggtgaaataatttcaggtgaattagtcgaatttggtttttggatgttaattccaccttttctcaactttcgggagacaaaacactgattggtctcccacatgttgctttacaaaaagaactaaactcttggagattattccacatgaattcctatcagttgttgtgaactagctccagattggtctcccactgcctatttttctatagtcaaatgctcttgtgattgggaggtcaataatcgctcatcagcacatattttgagggaacatgggagggaaagcaggctgtacctcagattttcaatagtggaaagtattcttattttgcataaatgatatagatttaggaggagagtgcacgcaggcaccaggggttctcaaacagaatgagaaaggattattaacacatagaaagttcagtttaaaatgctttcaaatagaggtcatacatggtcatgccagaacgtttgtatgattaagactagttgctagagcgttggtgtgattgactagttgtttttgtatttaagggcatgggca

SEQ ID NO: 46493 - DNA, 1079 bp, Oryza sativa
cctatttgctctccttcattttcagtgcaaatgtgcaatgctgattagagtttgcagatgctgtttggtttagtttagatgtggcattttgttagtggtttctttgatgaaaaattcttggctatgataaagtttgctttctgaatatatgaatagtggccatggttcaagaaactccagttaggtgggataatttatggtgattctgggcgcaattcggggaaattttttttggcgagaatcttatcattgagataaagagggcaagaatatcaacagacttttaatcttaataaaaagcactcttagcgtaagagcaaagcattgcaatctcgtgtgacaagaacgtttctttttctccatctttttcttttttaccaaaaaatgagtgttgccaactgctgcaccttcttaggccggtttgttcttgtttggaacgcacggaatgcccgatgcaaaaaaaaaaaagaaatgctgttaacaaatcactgtcctgacacggctaattaggtggtaatttggtgcatctgcaaagaagcaacagatgctttctttcactgaaagcatatttgcatgatttcttgtttctgcttgtcctctctctgatgctgactgtattccactctgcgctgtaatgccatgttagtgattaatatgttcaaaagagcataaaagaattgccaattggatgttagagattactgtgttgttcaaaagagcataaaagaattaccaatttgatggtagatgttactagcaccaccttggtgtttccccatggttttctggaattctgcccatgatctttctgcttttctgaaagacatatgtttcagaggtcaagcttctgaaaggttattagaagggatgagtcgtcattttgtctgtgggccccactagtcagtgtcaatagttgtaaagggtagaaattttctcgctgtttttcttggaaacaatttcattgcgcctgatctgatggtcggtctggtaatcaaatcaccagatcctgaaatccaccaaatcaaacagtgagatttttgcagaggcaaaacaagaaaagcatctgctttatttctctc

SEQ ID NO: 46494 - DNA, 1352 bp, Oryza sativa
cccataactttaaacactgcaatcatcatacagtgagtgaacatagtacagtagtgatcatacagggagaattgcaaggtgaagatagaagtaggaatcagaggcatttggaaatgcaacgaaggataagatggctcagagccacgttgatcctgtgatagctgaggaagaagctctggatgcaaatcagagtcgtttcctgattgcaaactggcctgatgaaactgctttctcatctgctgagctactcactgattctaatgaatgggatctgattgtgtcatttggggcattcatcagtgtgatgcatcacagattaccaggtttcagggtgaatgccgaaatactgaagtccaaacatgtggtttttgcatgatgcagtttccctgaactgaaatgtgtctcactaaaccaccaggtgcttaacatttgttttttgtaccttccaatttcatacttattggctcctaattagcagatcaaactcagatagcaccctctgttaattgcatataaagatggaccgaggaggaagagaaggatatgcattctcctgcatatgagcggtgcggaccagcatggagggaggaggccgtaaatctcatgcatcgtcggataaactaatatgaaacttgatttgacttggtttgctaacccagttcaaaatctagcctgcatatatgtaattaaatcctacgccaaagactgaaaactatctcaatcgcacacacatactccgtatttcacattcccactaattttcaagttctgggattatataatgattccatcgttgagctatctgctgtacgaattggagatcagtgctctgaatccatgtctgaactctgaagtttgaacagagccagtagattagtttcatgacttcatccatctatggtagggtgaagatactgtgattgaaaggcatgagagggaaaaaaaatcaaggagatgggtctgccatggacgaacccgggggaaaaaaaatcaaggatggttccaaatctttggcgaaggagaaatactgtgcatcaacgaagggtgggcatggtgaggcgccggtaccgccaggtactcgattcatgacagccgtccgatcatcctagatcaacggcctaaatttagtaccggcgtgcactgctggatggtaaaaactctcctccaacattttgtagataccaaataaattgaggggagataggagaggaagaagatgaagagaggatatagagatgcatatcaagttatcaacacacgttcttgtggacaacctcatctgaagtttcattggcttcaatagttcaattatttccttgcaaattgcgggaccaggactgggatgcattagg

SEQ ID NO: 46495 - DNA, 1835 bp, Oryza sativa
ataattgggtaataattattttttgaatgctatatatcatgaatacatggttctataatatgatatagtagtaaaaaaatagccaacatggtcttgaattgttgatttaatttaaaactatggccactcaaatctatctatctatctatctatctattatatactaaaagtccattaaattaaacttcctataaacgctctcaagctgccatgtggcgctctaataaattagagaaaatcttataaattctaagaaaaaagcaaaacatctaccccttgattttcacttattttgatgggtccaatattatacaccgttagataaaattgatcttaaaacaaaccaaatactatgggtcccacctttcctccttctcccgtgcatgtgtacgtgggtatatatatacacttacgtaccgtgtacgtacacccttcttttcttttttttcttctttttccatttatataatatggatatatacttttttaaataaccataaatttacaacataaagaatctaccatcatagaatctaccatcatataactcactggtaactaaattaactctacaatttttgaaaataaaatttaaaccattatatgtgaccattaaattaataatgtaatatagtttccacttaaacatgtgtactcattatttttactattattttcaaataatgcactattttaaaataaagtttacacaattatattgtgtacctatcaaataaacagtttaccatgtatattaaaccgatggacccattatttaaattatcggaactattttttattacatcggactattattctcaaataatgcatggtttcaaaataaagtctacaccattatattatgtacccattaaattaacaatttaaaatctatattaactaatgtacacttacactagaaccggtggacccattatttaaatcatctgatatattatttgctaataaataaagcgtctgaagttctcttttttgcccgctgcacaatgcacgtctgcacctttactttttgcacgcgtgacaaagcatcgtgtctgaggcatctaaggtgatcacgactaccgcagcactaccattttgctacatatcaaatcatatatagagatgatgcagtgagagaagaattaagcactgtgggttgtgtttttttccaacacttggctttgtttaagctgaaaccgagagttgattacagaataataataatgtattgtggtatgtcgcatttggattttgtactatttgttcgtatagacgaaagaaatcattatgttataaatgtgagcacaatattaacgaatatcaatagcactcttacaaagactagggtgttataagggagtttaagatcctctttttgttccgattccatagtttgtaaatggtgtcttttttaaacaacattttaactttttagaaggcaatttattcgtttataccctcaaatagctatcacataaatcagataattcatcaattttagctgtcctaaaccctaagtagtacatattttttttatgcgagtcatggtgatcagtaaattggggatcaatggataatcaaagtcgtaagatgaatatgtaagagctactatgaacaactgtcaataggtgtcaaaattaattgctactaattagacatctaatggcttgctagccacataattaatttctctcaacatatatataaacatgcacgaagctggaacaaatattaccatatgccctatacatatatattaagcggtttaatattctaattacacgtgttaagtcctttaaaatttcttaaaacgctctcaagctgtcacgtat

SEQ ID NO: 46496 - DNA, 1369 bp, Oryza sativa
acatgggtacttacgctttcccctccctttttttatttttccctttcttctttttttcaatgcatacacttccctccctttcttactatatcatgcgccttcttgagatgatttaatcataagaattttgagtatcttgctcttgcatttttcatttgtggccatactacacggtatgcatatagatggactgtatgatacttaactagcaatagtttcttatttactcgagaaaaaaaatgatttaaaagtcataccttaagaaaaagtttgtaaatggttttttaagataccttaagaaaaagaactttagtttgcccttcatctataagacaaaatttttgaataaacaataattttacctttcaataataaataatataagtgcccgcgcatgtgcgcgggccaccttcctagtgtatcctaaattaaacatgtagatcgtctaaagataattgtttatttaaagcaccaagatgactcctatgtaaatacctagtgcttgcacatttacacccagataagtctccatgaaaaatagatctaataatttatgataacaaattatggtgtacatgcatatcgtgtaaatacaaataaaattaggaactggatgcatgcatcaatcgagcacgcagaggccatacataattatcctgcctaatgtcaatgataaatcaagcaaccaaataaataagcattgcaactaccatatgtaattggtccacatacgtacgtgtggatctgggatagaagggtgacggtggatttggttttgatccaatggccaataatattgggtcaaccactttaaataaaaactgacggttagatgtttttttttctcagaattttctttaaattataagagcgccacatggcggtttaggagcgtttgtaggagtccacgtggcaacttgagagtatttgtaagaagtttaatggacttttagtatataataatagataaatagatagatttattcaattattaatttaataaaactaatttggtaatgtaaatattactatatttgtctataaacttagttaaaattgaagcagtttgactttgaccaaagtcaaaacatcttataacctgaaacggagggagtaattttttagtttaataaatgaaagagccaaaactaaaccatgaatggattgcgtcaatacaataagataatttcaactagataaactttggaagcattaattgatggtttctcagttctctccactggttcaagaagtatattagcgtgatcctcaatcaaattagacaaagacaatattcatattatgaacggttgggttggagaaacaactgatcacatatgctacaaaatcgttgaacgcctttaattga

SEQ ID NO: 46497 - DNA, 591 bp, Oryza sativa
ttcgtcatctcccatggagagcaacgacgatcatgcactgaggagatggcgtggatgacagcacgagctgacgcgtctatgccaattagctttcgagccagtaggatttcttacgtatttatcaaatttggcaacaaactaaacgtacattttttttaactttacttaaaaaatggtatggttgataatggcatcaaagtggacataccattcatatttgtcgcatctgtatattaggtttgttttttatgcgacgggggaattcgtaggttatcgctttcttggtatgtgctgcattggctggaagcctagaaccgctgcataggtgataggaataagttcaccggaggtccctcaaattaacaccgagatttttttgaggtcccttaaccacaaaaccagaaatctccacccctaaactatacaaaaccgttcactcaaggtccctagacagtatatatgggtggtttcactgacgtgcaatcctagtcagcaaaaaaaaattaaacaaagcacgtggggcccacatgtcatctgcatatcttattttcttctcttttcttctcctttctctcttctctcttctcttct

SEQ ID NO: 46498 - DNA, 2517 bp, Oryza sativa
ttgatagtctggtttactcaacaatatccccgtatcatttgtaaattttattatcagaacaagtttcatatttctactcatcaatttaaaacaacttaaacacagaattcaagcttgtacattagatacactaacactacgcggtaatagtatcgaaaaggaatggaaatactaagtagcaagagttaaggcagtagcagagtagaagctggagacgtgtaaattcacctcaggcttctacatttctccggtgcctcctagtccaacgacatgcgatagaacaaaaatatatcggttataagatttcagggccatcagagatcaaacctcaattcaacttgatcaatgatgcaagtcattggcaagtatctcttgtacttgctttttctcaaaagtcggtcggttttatctgaaatcttgaagcaggcacgaggtgttgccacttctttaatttatactttctggccaactatgctgtcgaatcattttttctgctcatcttattaagtgctcctatattatctcgaacctacaataccatagcatcgaatacatgcattatgttaggatcccaattcaaatgagaaatgaacataaatgccacttgaatgcattccctttcatcagctggagcaaaaccagaggtattcatgagcacactgagtggcagtaacggatgatgactggaacattttattagttcctgcatcaactcctaacaactgagttttcatctttatccagaaagaacaaaacaaatgattttcatggcatcatcccgcctatctagtggtagttttggaccatttcttgagatgcacttgcatagccagttctatccatgcatccaccaatggagatgaacctgatcatgattccacaaatgtgtcatggtcaccatcatcaattggatttctggcccattaaatgatatgtattagtttgtgaaagaaatattcagtgaactaaatagaccgatgagcacaattacacctccagcctctacacaatgcgcatatatacaaccaaccatgaatcttaggtatctataatttcgtttcaaataggtttgtgtattagttctaagatgtaagatgagaaaaatggaatttgcggacactactggacagactgaagatgaattcatggagcgagagtctcatcccacgcatgacggagcgatcaagatggcgatggtcaccatggatgcaggcacagagctccttgcattcctgatgccttccaggcctacaatggcgcaaggcagtggtatctgggtttctatggtgccaccaactcaagatgcatcccaaatccctcacctatgttgcacatatggtgttggagatgtagatgtaaaaataagatgagtataaagtgtttggttcgataggatgctgatagttaggatgcagtcttgccgatgaatgctggcttaatcaaggaggacatgggcaagtgctgttggcatttttaaagagctgttggggcagtgtggttcttttggaaccttgtttttctttctgcatttttattgtttttctatatttttatgtttatacccataaaacattttttttcaaagattagtactgaatttatgcccttcagtactattcataacattgtcaatgcaattacacagttgaaagacaaactcaccaagcattatcccaccagctagttatcaataccttttcatgaaacatgagaaaatggagggaagcagatatttgggaacatgctgtgctaagtgcttgcatgcgataagacagagctgtcactaagtgaccagagcatcataatcagccacacgcatgatgtttaccggaggaaaaattactcttcaacggaccatgaccaaaactctagccagctttgctggcaggttttgctctgttgcatttcctgatgcttcctagccctaccatgtctacatggtttcacccaaaaaaaaaagaaagaaaaactgacagaaaggtttcattagtatcatgtaactatgaggtctcatcttttcggtaccgagctcgactgtttttcctactgtgaattgtgactgtgctccaccatatcctctaactcttaaataggaagagacctgtgttttgtttgatgtggtgtcagtgccattcagggtccataccagtcaacttgcaacattcaaatgagccctccagcatattcccaatgtcacgcaatacaagaaatgatgaaaaaaaaaacagggaatggaattacatttgaacttggtttggacgatagatactggcatttgagaccctgagtccagccagaagtagaggttgaaacaatttcatttcgctacacttcccaatgcccatttaccaaggatagagtcagggtcaaagcctcgagctgagttagccgaagttagtatgtcttcgattaggtctcaatatttttaaattttcaaaagttaagggccattttggtttgttgccaatttatctttgtttatttgtttgttttctttacctttcttgattttctttt

SEQ ID NO: 46499 - DNA, 1654 bp, Oryza sativa
gggcgaattcgagctcggtacccaatactccatatttttgaagagaatggaagagaacttgtgatccttgccaccagcccgccatgcctgaatcagcattagcccatcggtggctgtcgatacattttgacaaaaaaaaaagagagaataaaaaatgaaggataggcacacacgttttgctaaatgcttgaaagtaacaagagatttgcggatgtcaccaagtgaacagaacatgtagatctgcaactcttactccggaataagagccaatcttgaattaatcatcgccaacatgttacccagcttttcgggaaggttccgctctatatcatttccagatgcttcctattcttattttgtttaaatagttttcgtcaaaaagattaaaaaaaaaggtctgacgggagttctccatcagcattatgaaattatcagctcttctctgttctttctcacttacgttaggctgtttctgtgattctgcaccaccatctcttctcactcttaaattaatctgatgtttcttggtgaagggtactaatcatatatgtctcagagcagttctctcttctcgatatttttaaatatttaagatataaatgaacattcgtagctaactttgaccaactccaactctccgagaaatcagccacactacgacgctgttgtagtaccctgctctcaactctagcttgatcatggacatcagctcttctcctcccacattaccttagtctcaggatagcgcaacgttctaattagcttctcatgtgagccatctcatctggtaggtcccggacgaaatagattgcctgttgaaggtgtgctgctatctcctccagcataagttgtccctctgctgccgtatttcctagtacctcctattcctacttcctgcgccatataattcacactaatggactgtctgtccatcaggtttgccatgaaagaattttcagatgagtatctcttgctctcttcacttattttgttcaccttggttgagtctgttgtgatatatgtaatgatccaggagcatccgtttgttgtgataaccataaagaggctggttgcattgcaagcatgggggccaaatggttggcattgcaacaaggacaacttctgtaagaagtcagaactagtgtattctcaaggtggctctgccaactgctattttgttctccttgattgcctgacatgtgggcctgaatttctagagctttcctaacaccaagtgcgtgctcgttgaactacttgggtcatgagtgcaatgtgcaatcttttctaacttattagatcaaataaatactttccccgcaaaaaagagatcaaattaatacatttaaaacaaatacaatgtgtgttcaatcacaaggtggtgtttgtttgtaatgaagatgaaaattaagttagagcgcggaaaacaagaaagccactatcttttaattaattgagttaagtattataaatgttaaaaaatagatttatctaatattataaaggtacttctatatagaattttttttcacaaaatataccggttagcacaaaaagtacctgacccattttattccgattaagatgtaaattccacctagatttccattagcacgctttttaaactgttgaacgggccatttctttgattgatgga

SEQ ID NO: 46500 - DNA, 1128 bp, Oryza sativa
catggctggcaatggcaagtttgcaacagggccagctgctactttatcctccttggttgactggcatgtggggcgaatttcttagctttcatgagtcatgacgccaaccaaatgatcgttaaacactggtggagaaaccatctttggtcagtcagccaaaatcccacaatagtcccggttgcaataaaaaccggaactaaagattatctttagtcccggttcaaaaggttagagctacttttttatatttagtcccggttggtattctcaaccgggattaaagatctattttgagtcccggttggtaacactaaccggaaaaaaagatccctattatctttagtcctggttggtttctagtcccgattggtagcctaaaccggaataaaagatcggcatgcacgcatgcgtggcggagaggacgaggcgtgcgcgagatcgaggagttaataaattctattccttatctcttcctcctcacatctcttcctcttcctcctcctcctctccacattctattcctcccctctcttccgtcagcggccggacggcggtggcagtagggcgcgtcggcggggccctcgcgcagcggggcggaggtggcctcgcgccgcggcagccgagcggcggcggatccggaggggaggcggccggccgccgccggatctgaagggggaggtggtcggcgcggaggccggtgcggcggcaggcggtggagccggtgctgccgtggattttttttttctttttttccttaatgtgcgattcgatctgtgttgattgatacaatctgtgttgaatgcgtgatttgatttgtgttgttgttgtgaatgatttggggatgaactattgtgtgaatgatttgggatgaactattgctgtgaatgatttggatgaactatattgctgtgtgctgtgaatgtttgatatgagataatgctgtgaatgatttgctatgaatatttgatctgagatgatttgggcaaatagcaaaagaacagtgaaaaaaaagagaaaagaaaaaaaaaagaaaaaaaccatccaaccgggaccacatctttagtcccgggtatttgaaccgggactaaagatagcgatctggggatcctctagagtcgacctgcaggc

SEQ ID NO: 46501 - DNA, 696 bp, Oryza sativa
agatgtggcaaaaatctcatttcagtacatttcccgatgcctgtgcttaggacttcgaccatcctgaaaattttaagggtgattttagggtcgttgaggatatattatgagctacaacatttattagcgtaaaatttactattaatatctctttggattaatagcaaaataagaattgggaattgtagcaaaatgaacttgttgcgactgttaagtgtagtagtatgtcctccgatggatacgaatgtatactcaatatatatgccatttagggtcaaattaatatacagtaaaaatctccaaatccatctcctatattgacaacaaacgtctacttctggctggactcaggtatgccactatctatcgaccgaaccaagtccaaatgtaattccatttcctattttttcatcatttcttgtattgtgcggcattgggaatatgctgcgtttgttttcatcatttcttgtattgtgctttgggaatatgctggagggctcatttgaatgctgtaagttgactggtatggatcctgaatagcattgacaccacatcaaacaaaccacatctttcttcctatttaagaatagttagttgtaaattaaataatacccgtgtcaagtgtaggacttgattccgggtggactggttccgccatcaggaacttaaccaattgagctacgctcactttgcaaa

SEQ ID NO: 46502 - DNA, 797 bp, Oryza sativa
ctttttgcagccaagttcataaagattatggatattctgatttggtactccattttcttacatgatatttatcccttccttttaaaattccatttgtagtagtagttcgattccagtgaaagtttttcaaaaatcatactatgtcccaaaatatagctaatttaaaaaattgaagtagaaagataactatactttgggacggcggactatatttcaaaggatacctcaaagtttgaactatattttggaaataaaattgtatttctacgatggcatacctaactacctaggaatttaaaaactttatcactgaaatcattttgcttgccattagtatcgaagggttgatactcgactacaataacgcatgggtgggagactagtacgaagatacgaacgaagaatacaaaacgcggaagatacgaggttatatatgttttgcctataagccatactactactactctcttatcttaatatgtgaaagcagcaaagctatctcagaggagaatgggccacatcatctaaaatacgagaaccgtcggatgaaactgataaagaaaaatacaccgttggatcatatataaggcatctattggactaatcaggaggcttccataacattcctccctattctttttagcaccatgtttgattaattaatcggttgacaaataaagaaaaaaaataaaagagacctcaacctttaattcataatggagttattaacctatgtgattatcattaataacatgatttattgcaagattaacaagagacagtttctttccctggac

SEQ ID NO: 46503 - DNA, 1163 bp, Oryza sativa
agacttattttccatatttgattgaacctttttttcatatagcgaaactcagtgcgacaatatttaagctctcgtctacaattttatttgtggagtctcaccaaaaaaatatctaagaatactccgaaagtatttaattttggtaaaaaccacattaatcgctcacactttatgaaaacatattgattcggttaagcatgtgtttactggggtggttttttcatcaaaacttaataggtgggtgggcatttgcaacaaaataacttatggggtgtaatgtcaaacttcaagtgatttatggggtggtttttgcaattttccctatttaatttgtacataggccatgaattcgtgcaacgaaacctcttctctatggaatggttgacgactaacccaattcttaatcaaataaattttgtcgtcgtcgatcgatcaattaattgacagaaatcacatccacaggaaaaataaggaaaacaaaaacagtggtcggatttgatcgatcgatccgttaatttcctgattaattagtcaatggggttcggttcattagccggattagctcgagctaatcccaaaagccacgattaattagcgcggcgaaattactgcctttccctcgccggggacgggcgggcgacgtggccagttgggtaaaaatttggcgcgaaattcacgcgcgcgccggtgcatggcatggcgcgcatgcaaaataagggccgtttagttactaaaaagttttttcaacatcacatcgaatctttgacacataaataaattattaaatatagataaaaagaaaaactaattgtacagttatgggagaaatcgcgagacgaatcttttaaacctaattagtccgtgattagcaataagtgctacggtaacccacatgtgttaatgacggcttaattagtctcaaaagattcgtctcacggttttccggcgagttctgaaattagtttttattcgtgtccgaaaaccctttccgacatccgatcaaacgtcaaaggtgacatccaaaaattttcttttcctcaactacacagggccttaaccgctttgtacgaattcaaagccgcgtggaatttggcacggcacgtcgcagttagatcgatccagctcacatcctcgctagctaaacctcttcaagcttataatct

SEQ ID NO: 46504 - DNA, 668 bp, Oryza sativa
agaactgcattctcgcaagcgaaaaagcaacagtgttgcttgggggtgggggatcaagattaccaatattattaataggcatgaataacatcttgtgtacatgggttagcaattaaaacaggatgagaatctttcttgctaattctgagctgatgcaaaactaagagcttaccatgaatgaaaggaggcccgtgagaatgctgcagaacgaaagtatatgtcagactatgaagagagataggtagaaaagatttatatagtaaaactacagactacatatatcactagagcagtggaactacattttgatgatttagagtccacacatctcactattaaatagaaggattaattggatctatgctatcataataagtttcatgcttagaaaatatgccattattgttcacctacatcgactcccaaggaaccacacaagcatgacttcatgttctttacaagaatggaaagatgtaaactggtctagatatctcttaagtttgaatgacgactcagcccaacaactccccagataatggtgggaaatacgttatgctcaaatattgtgcttagtacagatttgtacataccttgccacagaccacataggattccaagattccggatgaactgcaaaaacataataaattaaaagtgatggaaattgg

SEQ ID NO: 46505 - DNA, 579 bp, Oryza sativa
tctccaaggaagctaagttacacattgagtagctcgctaatgtgaacatcttcctctcttcatcacatggtaactcacctcattaactctctccgtttcataaggtagcactttctagcattgtccacattcatatagatgttaatgaatctagatatatgtgtgtgtgtctagattcattaacatctatatgaatatggacaatgctagaaagttctacattatgaaacggagagagttaatgaggtgagttacaatgtgatgaagagaggaagatgtacacattagcgagctacaaaatgtgtaacttagcttctttgaagataaatctggtggataatccagttattcagtagaaagtaggaacagtaggctctaggaaatgctatagaaattttggaacacatatgcaacaggaatcgagtcaatcaagctgatttgatgagagccgagaagtacatgaggagttgcagtcttgcataaactgtcctccccgccactaataaaatatacacatcagtgtgtgcaactttttcggtctgaacctagctgggtaccgagctcgaattcgccctatag

SEQ ID NO: 46506 - DNA, 728 bp, Oryza sativa
gacataggtggtgtatgaaagtcatgaaggtaaagatgaagattgatcaagattaagtgtttcacgtaaaataaggtgttaataacttgttattaattgagttttaattattacaaacttgtaaaataaattaatctgatattttaaacccctttcatcattttaaacacgaaacacaacgcatcattttaatccaaaagtttgtctccacctttcataagaatagtagtacagcccaaaggcttgtaaacacgtttgctcacttacctacataagaacgtacacgcataccattatattacacataaatactttcgaagacaaacgacatgtctattgactgacgagattagtgtgtcctttaggccgcgtttatattcaaacttttttcttcaaacttctaattttttcgtcacatcaaatatttgagcacatgcatagagtattaaatgtggaaaaaaaaataattacacagtttgcatgtaaatcacaagacgaatcttttgagcctaataacaccatgatttggtcatgtggtgctatagtaaacatttactaatgacagattaattaggcttaatagatttgtctcacagtttacaggcggaatctgtaatttgttttattattagtctacgtttaatactttaaatgtgtgtccgtatacgacgaactaaacacagccttataccatatataaataagggaaaattggaaccatgccatta

SEQ ID NO: 46507 - DNA, 2424 bp, Oryza sativa
acctaaacatttgcatttcacggagccctaaatttggagacggatggactagtccaaaacacctgcggcgcagtcgcgcaccacaccaccttccgagacgggcttgcacaaaaccgtcgtgaggtcaggtcaggtcgtctccggcttcccccaagccgaaccactttgactcgtcaagccgccgctgatatcatttgctagtcccacccccgcacgcggcacgcggctttccgctcccctttctttttctccgctctccccgcggctattccggggcgttgccagtgacatgacatcccggtgttggtgcggggtgcgaccgatcgagagatgtggcgcaaaagccccggcatttcgcggcggatgactggttgctgccgcccgcgtctcctgcttgctgcctcgtcccggtgccccgcctgtctcgtctcgtccctccaaatctgcgactttcccatcaaaagcgaagcatctgctgcgtacaacacccacctgcgctgcgtgtaacatccatcatcggtcgtaatttcctcgcccatgatggggcagtggcggaccgggtgagtccggtggtgacgtcatcgggtctcggtaggagtagtactagctacaggtggcctcttttggttgatactgcgtgtccccaacctcgtgcgcacaagacaatgcattattttttaaaaaaaaaaaagcactctcggtctgtgcatgtacagtggtatttgtgcgtgtgacgtctttcgtaaaattgggagaaaaagaaggaaaaaaaaaacgccgaagaatgaagcgaacgcccgccctcggaccaaccaacctcgccgcgacggcacggcggacggctacgggattattacctcgtcgcgtgatccgccgcgttcccgacgtgagaggcggacgaggccgcgattggtggtcgtgacagctaccgatatagggaagggttcgcgcgcgatggcgttgcggatctctgaacttgtcaattgtctgcgccccatgggcacgggacgatacgcgtttctcccaccaaaccaaaccaaagcgtttgggtttccaagtgaagtgacggggccaatatttcacaatttcccaccgttcccactgcgcgagcacttgagttggtcagatgaacatcaagtggaaattaattaagctcacccactcatacataaaggctgtaatttcgtccgcacgaaattaataatgtttctgttacggacgcagtacttcattcgttaaagaaaaaaacaaaagtaccacggaatgtaattcatcttaatactataaatatggacagaatatatcacatttgatattacgtttaatttttaaaaatcaaagggagtaatgatggtgcaatgattggaagtactgtgaaacaaagacgacaaagtagttacggcagtaactaagctagggtggtaggagtaattatcaaacaaagacgacgaagtaggagtaattaagcactatcgtgactattcgtcttaaaattataaattgagattatttttttataataaaacaaatcataataaaatacataatttttatataagatgaatgattaaaatttacgtgaaaagttaacgacatcatatattttaggacggatggagtacattttacgggtactctctccatccctaaatatcatattcagattcgtagtattagaatatacactattcaccaaaaaaccctttaatgtcgtgcattagtgacttgggacgacaactagaaatgtaaggatcaccatcacttgacgataaaatgtcaaggcaaaggccagtcttgtaccactcggaggccggtgcacgccggccggccggcaggcagatgaccccaaaatcatgaaccgatgcgtgcgatcggtactgcacaaggagaaattccaatctgccaaacgtatacaacaccatgaagcacggtgccaaaagattcaaatgtgtgtgattctggtctcttcggtgtccatcaagcgtgacatttcacatttccaagggagggtttcagactttcagggttgggatggactggtctatcttccattttctgctctaaaaaaacacacaccgccctgtacgtttgggactcatacaggatgcagctttagttgaattattcaaagttcaagtcaaacaaagaaattaaggaacaaaaacaaacgtgatcgtttattgttttgcaacatgatacagattgtctgatttgagcatccgatggttaatctaaggaggtgaccattttactcttcaaagaggtagtatgccaatgttgacctaattacctatttgagtcgcccactcctgttgtattcaaaataaggtcatattattgtgagtcacttccaccaaatttgaaagaatcaaattcaaatggacagagatcaatatcccacgttttttttttgaaatacaaata

SEQ ID NO: 46508 - DNA, 1881 bp, Oryza sativa
ccattcttacagccatgatgtctagaggcttgctcgggcggcggcgaggtggaggtaggaaggaggcggggtagcagcgagctggcgagtcaccgtccgtgtcgctccagccctaggattccttaccattttcttttgtttcatccaaaattatcactgtctaaaatttaaaataaaagtacaaagaaaggtgatacataactgattgacaatcacttagccacgcatgctagtcgagaaaaatcgaatgtaccttacgcacgaaaggctaacgactagcatcacacagatgtaactacctagtttttactaccctcttgtagtattacaatgtcgtgaatggactaataaacacagtaaattaaccaccggcaatccccaagtatttacaaaggtatatatatatttcctctctcagtgatatataaggctacgtaattacgtaagtcactgaatgtatattagagcgatgaaataataggacacacatatattatgaaggtgacaaattatcaaatatcccgattacggtcagtaagggtcttttgcagtactgcacagtagaaatgctcgctgacatgttggcccgtagaggatctggattgcatcctaagagcaagtataatagtaggctataagtcggctaaatgctgatgtggaggagagaagagaggagaagcgggctgtaaacttacagcggcttggacacaagaaccaagaaactctgtgagaaagacaagtaggccatgtaataattataaagagctaactattatataggtagactaaaagaagactataaagaactttatagaatacaggtcgacagtattattagccttgctctaatattcgtggacgattaattacactccggttgcaaattcagcatgctgcccacacacagtgtcctgtgtcctcccccgcccgccagttggatgcttcccggatcccggtgcccgccgtctcatccgatccaacgaagaaagaagagaaagaaagcccgcgagttcgagtcaaaccgggcgacccaaacgttgtcctctttccttgaacccaaccacttgttgacaaagtccatctcccgccacattccaccccggatcctctacatcttcaacaccgcaacaacggtgacacacgaaatggctccatcgttacagcatatttttgcaaatgaaatataatttgttaataaaagggcggttcagattgtagccaaaataaaaccttactaaactttggtaagttaacattatccaaattttggcaagattttttttatgtatttactaaagtttggtaaaagctaaatgtggacatatctttggtaactttgctagaaatatagtatggttgaaaatatcatcaatatgaaacagcccaaaaacttttatatacgtgttttagcaattaaaaaaggaaataaattatgttaaaaaaccttaaaattaaactcaaaatttaaatttaaggttaaaagttaaaattttacggatgataagcataagcgaaaagatgagaccggttggcttcgttgccacataagatccggctactctcccccacgtagccgcctcgcctcaccttcaaatacgagctgcctccactgcctcgcccaccattactacttcctctccttccttctcttcttgccaagctcaagctgatcaagccaagaagctagctagctatgtcgtcttcgccgccgacgagcgcgatggcggcgggaacgtcgtcgtcgtcgggaggcggatctgggccgttggtggtgagcaacggcgtgctgctcgccgcggtcatcttcctgttcatggtcgtcgtcttcgtcttcctcctctacctctacgccaagagatacctcggcgcgaacccgctgct

SEQ ID NO: 46509 - DNA, 1782 bp, Oryza sativa
atattaacttttacttttacatacttataataaaattttaacagatattaaatggttagacattatgaaaatcaacgatgtcatgtatttaaaaagaagatagtatatatgtactactacatctgtcttattacattataagtcgttttaacttttttttctaaatcaaattttgatcaatttatatagaaatatagcaatatttttaatataaatccattcaaaaaaatatttttaatatgaaaaagaaactatcaaaatatactgaaggttagatttaataaaattaatttagtgctataaatgttgctatattttttgataacttaactatacttttaagaagatttatttaaagagaatcagaactatttgaaacatgaaacggaggggaatactagttttagcagcagtactgcctgcctgggtcatataatggaactggacgggacgggttagggcggcccgatcgatcggagagtcgacgaagaaagaaacgagaaggcggcggcttgggttttcaattttcagctcgaccggcgaggcaaggcaatcgtggtgtacgtacgtacgtgtggtggagtggagactggagaggcgaagcgcagccgcgcgtacgtgttggcggccgttggtgtgcgacttgggtacgtacctgcgcgattctgcctgcggaataggcatagccgcgcggccgcgcgcgacgagacgaggcggcgaatcgctgcgggcgtgggtatcgtgcagcgtagcgcgggcgcgtacgtgttgctggtggtgtgggcgtgtgcgagtccgcgcgacgcgagcgcccagtttttatcgcctcgtatcggctggcggaccgccgtggcgcgcggtgggtggggtggatgtacgcgggattgggcacgcggccgcggtgcgtaagctaaaaagagctagggcctgtttacttgatgttatttttaaccttatcaaattttatttaagttgttaaaaaagtggctacatttattttgctgtcaaattttggtaactatgccaaaattttagtttgctacccttagagcctgttcactttgatgccaaaaaaaaaccttaccaaattttagcattgccaagttttggtaacttgctaaaattttagcaggatttcttatatagttaccaaaatttggcagcaaaataaatgtagccacttttttttgcaactttaccaaaatttggtaagttgaaaatggcatcaaagtgaacaggccctaagtccgtcttgactccctctgctagtagatgaatctgattcgtatccctaaatcacaatgccaatgtagtttgactctctcagcagtttcatatgacggtttcactgatgtgacgtatatatggttgtgtttagctgatttttgtcctacgtgatgttgacgtgatacttacatgatactccctccatccttaaatagacgccgttgactttttaaaacatatttgaccattcgttttattcaaaaacttgagtagtagtagtatatttaagagtaaagtccatcaccggtccctaaacttgtaccgatgtgtcatcccggtccctaaactcgcaaatcgaccgttcaggtccttaaacttgttcgactgtgtcatcccggtctctaaacttgcagatcactcgtttaggtcctccatcttgttcacttgtgtcaccccggtccttaagacggtctaaaaattttatatcaaaaaattattcataactttttcatgtgaactctaatgaagacaaactttatatcaaaattgtagccc

SEQ ID NO: 46510 - DNA, 965 bp, Oryza sativa
  unsure (1)..(965): unsure at all n locations
tacaagtttgatataaagtttgtcttcattagatttcacatgaaaaagttatgaattatttttaaatataaagtctttagaccatccgatttgacccatatgatattcaaatccaagtttagaccccggggtgactcaattgacaaagttaaaggatctaaatgagtgatctccaagttaagggcccaggatgatacagtcgagcaagtttgaggacctgaccagtcaattaacgaagtttagggacggganataacacagcggtacaagtttagagaccggcgatggactttactctatatttaataatgaatcaaatgataggaaaataattaataattacttaaatttgaataagacgaacggtgaaagatgttaaaaaaaatcaacggcatcaaatatttagatacggagagagtacccaaaatcccttatactatgggacggaaggagtattagaattaagaaaaaatatatgagactcatttttcacccacacacacaaaaaaaatatataagacccatttacacatgggaccccatgttatctctctctttttcttcttccttcctctttctctttctctttctctgctcttcccatgcggcattggcactctcacacgagctccaccgttgtaaaaactgtgtggtttaaaaactgaaaatattaccacatatgataactataataaccgcatggttttacaaatcctggccttcaccttcgcctccccgagttgtacgcacagtcgcttcagcttcgtgcgccgtagcggcaggctccagcttcgacggtccgaccacatcgttcaccaccgtctgccgactacctctgtattgtccgagtaaagatcgtgagcgaaaagccctcgtattttaaatggcaattttggaaggagatagatgctcactcgcttgcgaagaagggatggcttggcatcgatttgtaaaataatatgact

SEQ ID NO: 46511 - DNA, 530 bp, Oryza sativa
tcaatctcggcccatcctgctacctccctctgcttagcctgcttctctgccccacaagtagaactacagacctagctttgcatagtggattgccatatgcttctctttgaccccagctcacaagtagaactataggtctagctcacatagtcgattggcatcttcaacctctggaagatagtccgtgtagaacgatgcaagaactgatcctcccatcaaatccggtcgaatcttcctcgatctcccaaaattggttgagggcttttgattcactcaatctcctcttttcatttttattaaaattggagctaatccacaaaactgtgggatataaacggtgatttctaaatagagattaaatctagtgaattaaagaggaactgaaaagaaaaattatgtggaaaatgacgatggagtagtggagaattgatttttacaattaatcggagaagggaaagcatgaggaggttgatcgatgtggcggtggagctaggattcgacctgacgactaaaaaaccgtgtagattaaa

SEQ ID NO: 46512 - DNA, 2024 bp, Oryza sativa
gaaaatgagagaagagtgggtcccgcttaagagagagatagaggaaagaaacaggagataggtaggagatagaagaggcgaggtggcagccacatcaatgccattaggatcctttaaagggtgtgacaattttggacctgagatgacatgctttaacaagatttgaaaattgcttatgcattttagagttaagggacctagataacacactccataaatttaggaattgcgccggttcacttcactctctatataaaaggtgccagcagcagcagcactctttaggggaggaaggaggttcagagacttggagatatataccaacgcaacgatccatttcactattttaagagcaggggttgacatggtccgaaacctcatctgttgattgaagtgaaagctgagaaacactgcacggtagctaaagaagctagtagcattctggttgcaggagtaggaatgtgatgtactaggaagttcagagattgttcaatttcttttggaccgagaaagactgaaactcgtcgagtaaggggatggggagtggcgacagtgggcagccgagcaccctctcacgttagtccgccatcagagtgtcgccatggattgaggtgcagcgagtgcacttctttttttccttttggaaggactcggctagctctggatgtaacgtcgtgccaaaagtgcttagcaccctctgtaacaagatttgaagacagctacttgctaattcttctcccttgctccgaatctgatcgaattggcagcatatatgcaagagtagtgtgttaggaagttgagaaagttatcaacttctattagagtccaagggcccaaaattccagaagtactgtagcaagagtatgctggttgcagggaagtatgaatgtgaggtgttaggaagttcggagattcttctataatatcggtattggatcttgacagcccaaaattgcacgagcacgaagaaggaaaactagcatacatatttgtttgcatgtgtagtactagtagtttacaggcatattgcttgtatatcaaaaaaaaaaaaaaactgagatggctataaggaactagtcaactaaaggtatttaaaataggagaaaccacattcttttaaccattcatttaatataggtcgattgaacctggatctgctaggtgaaagcgaaatcaactggtcgtatcgaccgagctaggcatatggttctcatagccagtatatatgagtgttcgacacatcgacaacatgaagcaatgtgttgatggccacggctaggtcagtgaaatgttgatgactggagaacagtacggagctccagtcgtcgggacgtggcacacccaattttgatatgggaattgcttgatttcgggcgctagaaaatttataaattttcatgtcacctgaaattatgcattcctaagcttaaaattaatgtgcaattttaattcgttttaattttattttttattattgttggttttgctttactttttttaatctaagtttgaatttcttttcacgtattttgtgtttttatgagttataagtttgtttcatctaaatttgtaacttttttatgttagaatgacttattatttaacttttggggagtgacaattgataagtaatagtgaaataaagagagccattggattttcatctaatggattagaaacgtgaccaaattatttggaagtttcaagcacttgaaatctaggcactcattggtccatttcttagattgaatctgtgttgtgtcgagcgctgatggcatggccatcgacccgatgtaccacgacgagctcccggcctcccgcaacacagctggttgcaatcttgcctactttgttgtttctaattcatgggtaataaatacgactcaagtaaaccaccctacctaactttggataaagggggtgtttagatctatggtataaagttttggcgtgtcacattggatatacagtcatatatttgaagtattaaacatagactaattataaaacaaattacagattcc

SEQ ID NO: 46513 - DNA, 2182 bp, Oryza sativa
catttttgtcaagagattgcacacatggctgaaatacacacatcaaattcaaggtactgccctctcttcttagtatataagtggcgttgaggaggaaaagaaggggtatattgttcaacatttcgtagaaaacagttaattgaggggaggaaggagatcaagataggacagaaagattcatatactttttgctcacaacttttcacctgaagttctattggccacacaatataaaccttggggggtttggggcaactctaccatgcacacacattgcaggactaggactaggactaggatgcattaggaagcacagtgttggtgaaagcaatggccataaccctcaaactcggacactccatgattgggcacttaattaagtgttacactcatgtcccatgtaggcttgcgaccttgggaagatatgtttgtcactataactttcactaattctagaagaatttgagacctcggcactttggtttcactatctggaagaatttgggaccactaggagtgggaggctctttggtagtctagcttccactatttctagaacaactcagacacctcagacctcacttgtttccagctagattgatatggctcctcaaatgatctctagttaataatgatgcgatgctctttggatgcaattttatgttgtgcaaattttttattaattcttggtgatggcatcaccagaagtgagttaaaaacatccattcaagttgtcctgtaaaaaaaaagagcctcactccggtgctttctactcgtagtaaaaaacgatctgaaccattgatctaatttgattgaatggttcagatctatttctactaccatctcatcttatggtagtagaagcgtgggtgggcaaatttgttaaaaaaaaaactatgtgcggagggtaaactcgtcttctaatagttactaaacctaacagcgtacatgatcacgacaccgccgctggcgtgcgcgcgctcctctctacctgcagccggacgccgctgccgcatgtgtctccccccatcagaggctacgcagcagggcctagcatctcagtgaagcgggatactttcgccataggctgtgaaggccccacggtgcacacatgaaaaacctgagttggatggatcattgttgcaaacgtcttcgatcgaatcaaatgcatgtctattaaatttcactgctactaatatatgagtgttcgattggaatggtcaaaggtagatctactgaatatctgaatctgacgatgaatggctcgggccgtgcctttcactctccgggggtgtttgtgttgatggagatggcactgctggctagatgggttagcagcttgcgtacactgctctctgttgtctttacaggatttttttgtgctcaagctgtttctgggacaactaaattcagcaacaaattctttatgtaactttcttgacacaccattaatcaaatggtaataaggtagagtctcgcgtcaaaaaaaaatcatcaacaaagcgcaatcaagagttatatgaaacaaaattcaaacatggatgatttatatttctatcatattgtttcattcatggcacaaatagatccacgtaacatttgaaaagcagcaggcattaacctttaaacgcgcagaacttcaacgaaaatggcacaataccaagagcttaactgctactctgccatgatgtctcgctgcggcacacactagttacatacatcatcaccaacagcagaattcatgaaacatcaagcactacaatttttcgtcaccaactgcacaagtaagcaccagcagtgccaggatttttcgtcaccaacagtataattcagtagcagcaacagcagtattttccagaagcaaactctagccggtatggatccaagcgagtctccgccgcacgcggaggggccgggatcgtcgtcggagcggcctccgaattgaactgcgcaccgctgccgcgattggatgttgatcgaagattatcaaaaaaaaaacattttatagaagtgatatcagttgatcgaagattatcaaatgttctccaaagtagaacaatgaccatgtgttcagtcttcagcgttatggcatatctagaattagggtcctcatcatgcactaaaataaaaattagtagcaattctaccaagcttattcagaatagtaatattgcatttgctg

SEQ ID NO: 46514 - DNA, 2323 bp, Oryza sativa
cagctctaaaagaaaaagaaaatatgtgttccccatttattcctttcgccattttaccccgctagaccgccaaccaactagtgaaacctcccatagtagaaaacttaattacatattgcattcccagtcattttgtcccaacaattaatgtacattcaacgattttgtgcccacgatttcgcagcacaacttgaggttgctttagtcagttactctgaacttcagtgcagatcttgttgcagtacaacaagtgttaatttactgtgtgtgtagtgcagagctttcacacaatcacacatgattgcagtaccagatcaaattcaagatgctatttgtaccctctcttctttatatataactggggttggggaggaagagaagatacatgtttcagcataacataaataagctaattgaggaggaggaaggagctgaacagaggagagacacagagaggtgcataccaagatacattttgcacgcaacttaatcacaagttttaaccacatactataaacctaatggcaacattgcagggctaggactaggatgcatcaggaaatacagtgacaggattttgaggagttctagaccttcctcttgattctgtattgtgcagtttggctctaggtaatgacatcaaaagggctgaagcctgtccaaagctacaaaactaaaacactcacaaaagctttcactagtgaaaagtgaatcccaaaatacaatcagaatgagccacgtcattgtgagaacaatggctattggatgaagaaaaggacaaaatagagaggagagagttgggccgttggattactgatggaaaaaacagttactgtaaatttccggagccttctgactcaaagaaaaagaagtgcttgaatgaagagagaggaggtcaagagcatcggctatgagcctgtgagctgtccaaaaagactgaggatggctagtaacataagtgacctaatagctggtggataatatgttaacgccaatattttgaacattgttcatcatccaaaagactgaagatggtttcgcaatctccaattcaggttgatctaattcactagaaaacctgcaaagttttttgatcaagaaaacgagtcactaacatttcatcatgtatgatacatactaatattcaaattagtagaaaataagtcactaataagaacaatgcacatgcagcatctggtaatataaaaatatttcctctgttatggtaccttcatggagtcatggttatatgtcactcgtagcacgcaatactcaaactagaacagtaaaattggatgggtgagcatcagtcaatgaatattgactatacggccagcacatctacaacaaatataagagaggtggagtaggcaattcaaatactgaattactgattcctgcaatatggtagcctgtgatacatgggtaggaccaagtaatgacagaaatatttcatacagcatccaagacaaactgctcctacagagaacaactctatctgaccgtattccaagaattaataatatattactgtccagctcatgaaacatcgtaattaaacttaattacctaggctttacataagtccatcattaagagatttaattcaacttaggttaagtgagattgagaataccttgaacggtttaggtaagatcattttcatgcatgattcacaattataaaacttttagtgtccaagttggctggttcacatgttgcattctaaagccaatcgcgaaatgggagaaaggatggagcttatttagatatgttgactatctaaatatatcttttactagctaaaactacagtattttaggcgcagagggagtcaaacattgttaagtcattttattttgtcatagacaaaaaaaaaatagtgaaaccttccatagtagaaattactaattgcataatgattgcactcccagtcattttgtcccagcaattttgcagcacaacttgaggatgcagataggcagttaccctgaactttagtgcacctcctgtacaccaactgtttaccatgtgtgtagtgcagagctttcacacacatggtaacacatgattgcaataccggatcaaattcaagatgctattgctaccctctcttctttatatataacttggggttgaggaagagaagagatgtgtttcagcattccataaataggctaattgagagataggagctgaagagaggagagagatgcatatcaagatacattttgcacacaacttcacctgaagttttaaccacaccatataaacctgatggcacctctagccataccgcattgcaggactaggactaggatgc

SEQ ID NO: 46515 - DNA, 660 bp, Oryza sativa
agaagaacccgcgcccgctcgacgaggacgacatcgccctcctcaagacctacgtgagtgccccgcagatcggatcgatccccctctcgtcttctcctcctagggtggaaattcttcggccgatctgagcttgattcacgggttagggtccccttgttccgtagccatggagtcgcgctcgtggtagatctagggttttcgatctctcgtgctcgcgttactacctgccgcactcgttggcgacaactatcatgattttgtgcagagaatcagttcttccgcatgctcaggatgaaattcgtttagttggatttcggtacatagccatagctctgtgaaacctagtccatcagatattttctctgcatattcatctcctttctgttgcattttcctctctataaagagcttcacttcaggttgcactagttagttagttagttcccacttttctttatcccgcaattagcgtgtgcgataggaccctaaaacattcatctcattgtataattttgctaaattctgccgtgttaatttaggcatctagctgaatttgctaattttatactggtctattgcttaacagggtcttggaccttactcgaccagcattaagaaggttgagaaggaaatcaaagagagctcgaattagacctatag

SEQ ID NO: 46516 - DNA, 1120 bp, Oryza sativa
gtagttagccatcatactatctaagagggtcgatgatttgtgcagtaatagtattggcaacgtacccaaattaagagggtcgatggtttgtgcagtaatagtattggtaatctgtacccaaattaaaccttgcttttgcaattctaattaagggtccgtaaccaaaataaaccttaccaaattttgatattttgataatttagcaatattactaagttttagcaggatttcttatgtatttaacagagtttgataaaaaactaaatggatgtatatatttgacaacataccaaaaatggtatggtttgaaatgacatcaatctgaataacccctaagtaaaccgatattttttttagaatacacagtacaacgtagacactcacaacgcacgcgcactcagccacaacgccgataaatcctgaaaaattcgctctcatgggagagtcgaacccaggacctcatgtgctactgaggctcttgtaactactaggttacatgccctttcgcttgtactgattgatattggtggaataaataatatgaattgatcaatatatataacattcacaaaaatattcaagtttaaggaccttatttctccagtaataactcgaaagcaagtttaaatttggctggatatttcgactcaatcaaacaagcggccaccggatgaaatggctggagtgggtttaaactgctggaattcatcgaaattactcgtgttggtgaccaaaacgttaggccgcttggcgtgtgcaattttggatgggggaacagttcgttccggccatttcaattgatatcggaacaaaattgacagtcttaattatgtatgtgctacattcacttttaaatataagcatttataattataaatatagacaaaacacttatccagatttataacgaaaatactcataattagtttagactcataacgaaaaacactcatttacctcttcaaggccggcgcctcaggtcgtttctcgtggtgtccacgtcggatagctatagtgcgtgttggaaattttataaaaaaaccctttagtttgtacgtaatttgatctaaatccctcactaacagttcctctatgttgatattttacatttaagccctta

SEQ ID NO: 46517 - DNA, 1148 bp, Oryza sativa
tacgaacaccatgacgacatcaatcacctggtgctggtgtacatcgtgccgtcacgctgttctccatggggttcttccgtcggactgcagccctgcactgctagctctccatggtacgtgtacatggttctagctcgcatcggcatgactgcgaaaacagaatggaagatgaagatggattactgaactttagcatcatttcattcgtcggacattaggatacagatctacacatcaaacacactaaccacagaagccatgatcagggatttgagatcaggagttcggcgccgctgtttttatggatgagccactgcacaggagtacgccggtgattacgaaagggcacgcatgccgtgaaacctggacgaagagtcgggctggcggcggcgcctgctctgctatttcaatggatggggttggatctgcctgcgcatcgcttagaaagacgggttgcgctagccaccatcgatgatggatcgacattgtcgtccggggaacgccactgccaccgccggctcatcacctggatgaatgcatatacccggtgttaaatcccagattaacgagtttgactagcccgaatataccgtgatcagtttttaatcgcaatttttttaacaccaaaaactaaaacgggtttgcctgctaaacccggtagcacacatgagattgggatggattaatcaccggtggatgggagagggagtacatactccctaggagtatagaaccattttcatatatatagatacacacatataaaaaggaggagttgtacccctccaatcctacaggccaaatcatccggatcaatccctaccgtccatcgctatcatccaacggctcaaaacgcccaggactggctatgcgtagcgcccgcggacgcgttgaccccaccgtgacgccacccaatcgctgcatccccatccgtcgtcggctttgctgcaggtcatcgtgttgccaccgttgctattccacttccatggtcgccgctgccgccgcatcgcgaggggactcccttggtgatgccccgatgcaatggagggcatgggtgccgccgccaccgccaccgccgcccacagttgatgcatccgccgcatcccctctgcctgctctcacgccctctgtagctcagccaccggtcg

SEQ ID NO: 46518 - DNA, 686 bp, Oryza sativa
tttctgacaccctttcttttaagtggtaataacattgctgaagagacccaggtacatctgcttaagttgggttcattgatctgggtacatctgcctaagttggactgagcagtgccttataaaaggaaacttaccattgccatcattatggtgaatgtcatctgatgcatagtatgctatgccatctattccatttcccgtagtttacacacaccattggcatggggatctaactctccatatgtgccaagacaaggtactgtactgctcctactatatctttgatacatattgactcttttctcaggctttcttgatctgttgattgctaattgaagctttattatggtgatgtggtgttgcctgtcaacactatagtaaatttgtggtttggatctacattttagtgatttcaacatgcatattaacttataaaaaagattgggtgtttaacataaggaatttaataattggtgaaatcactggtaattttgtgtcctctgtattttgtttacatgtcaggattttgccaattccgaaccctttgctaggttcttagatgaggattaaaccatgtttttagaaacactcaacattgttctaactgcatataatgctacacttttcgtgcagtttataaacaacagagcaatcattattcatgcatttctgaaacaacatggcag

SEQ ID NO: 46519 - DNA, 562 bp, Oryza sativa
aatttacttttatagagatatcagatataacgtataagcgagtttataaatactatgttgctttcgggtggtataggagcacacaatggctacctttaacatttaaaatttgtcctaatatatataaattactacttcacatattcactcatctcaactaattacaaccatcaagataaaaaaactaatttcaactctctttttttcgtctattagtttttttagctaatcataatattcacctttttgtcaaaaaataaaaatagaacataaacttttcatttaattttatcttacttctcattaaagttttttttcatcttacttccaactaacatctcaactctaatatctctcattaaatgatgaatataaaagtattttctggtcaactttaatctttattaaagaacatagaaattttaaatttaagaatggagatagtaataaaactaaaaggatagtaataaaactaaaaggcttcgtaattgtcaacattaatcgtccacttatatatgcaggttatgctggtgctcaaagtctcgcgaagcgcgactacatg

SEQ ID NO: 46520 - DNA, 617 bp, Oryza sativa
ttgttgcttatataatagtctagatactcgaagcgtctgtgttctttttctagatactcgaactggttgatctatgaaactgcttcaagttagtggcaaaaataagttcgatctttccgctattctgagagcatctttttatcttttcagaaatcagaatggcattataacttttaagaattcctgcttgtttataagatccgaggctatatatccatcaaatcttcagaattaacatctagaaattccagatcttcttcaagtaagctccatatctacgtacaactgatcctcgaactaattaacacttctgcatcgccatacgttcagaattagtaggaattaagaaccgccggcagcggcagagcattgcaagtttgcaacttgcaagcgaagcgacagagggaacccattcgattcggaggcagcgacgaggaggaaacatgcatatgagcgctgaactagcttgaatttgcaatctttgtccattcttttgatcgaactaaatgttaaatatgtgatccgagtttttgtgcatatattttcataacgctaaattacagcaccttgccaatttgggatacacgtttatcttcttgcagtttcagtattcttca

SEQ ID NO: 46521 - DNA, 1379 bp, Oryza sativa
gatgtttttaccgatactttgttacatcatctatgtataagtcggtttttagttcgttcgcttttggaaatacatatccgtatttgagttggttttaagttcattcacttttggaaatacataaggagttgtataagaaaactcgcatgctaactttagacgaacggactcctaactgcagctcatgatttttctaaaaatatatgtatctaagcgaattctcacgatgaatttcatcttaattaaaccatataaaaaataagattaaaatggatttcatccgttgcaacgcacgggttttttttctagttgaatgaaatacaaagaagttaagtgcttttcttatcttagtgaaaaacttatattacgatcaatataaatcggatggagtactcagcggtccatctgttttaatagctttttactactctctaatgatgctattgtaggcgatttcaaaacaaggttgttagtatcccgattcgtattttaatatcttatgatactacgatcctatcaaggtaaaatgataccgatctcacctagtatcctaattttcatagtatcacgatcctacaattcattactgtacgatcctacgaaatcttaagtagtatcctgattccacgatccctatgatactataaaatattatttaaaataagatggtttgaaaataatgtaaataaatatgctctagtttatataaaaatcagtttaatatatcaaaaccaatatgatttctcttaataaatatctctatttgcatgacatatattattactgtattttttatatataatggctatatgtaattaatataaatattaattaaacttaaaaaaatatcataatatcctgatcctactatacaaaactactttaagcaaaatgataatgtctactatcccaatccaaacaaacttgatttgaaatgagggaggcaagtagtcaattagtcatgtcacatcaggcgtttcttttcctttttctgttggcgcatttaactacctgaagaaattcgcaaccgcatgaatgattaaagtgttcccctgccttcttctgttgttgtgtttcaattgtccatatttgcttttatatgtcgcagcataatttacttataaacatggacattttactgttgaagcgtgtaaagtataattattcaggttttacttttaagtgttgttttacctttgcaaatgatctaagttattctctccgtcctattttaaatgcagttgtgagtttctctgtccaacatttaaccgtccgttttatttaaaatatttttataattagtatttttattactattagataatagaacatgaataatattttatgtatgactttttattatttttttcataaaattt

SEQ ID NO: 46522 - DNA, 1946 bp, Oryza sativa
aggaggaaaagtgtggctttcttgctgcgggtgaagactgaagacgcgttggatggactgactgctgctgatgatgaatgatgatgcagagccagcccaggggaggggggctaaaaatgctgacgatagcaggaaagtctcaacctattctttttgttttgtttactagtacaccccttctgtctatattttgcattggtgcatggtatttgtaggcctttttgtggttcttgggttggagaactttgagagggatggatggatggatgggttgggtggaaatgtgggaaaaaaacaaataatctcatttcctttttttatgtactttgctttacatctttgttgaataggacttatgattttcttttctttttcgtgtttacatgcgtctttttcagaataggacatcttagattccagactatagtagaaccgtaaaagagtaatatgtatcatagctttttcctcttgttttaggctacctctctttttataaaataagtgtaatgttgatttttttggggaacgtacaacaccctttcaaaaaagttagcgagatgtaatgcggatcatacgggtcactttagttgccgcttttcttgctccaattacgtggactgacaacttacaattattataaattattatagctttttagtgttgttagacatacgttaaaattatattcggtgcacctgtaccatatttagcaatggctactgatgtgcacatgaaacaaagatggaacatcagaagatgagtcatctgtatcttatggatattaaatcgtcggcgcatttatttggatagcgagaaaatactagcacaacaaagaatttgagacacggggcaccgagcgtgcaatcaattcgatgataatattagttgatgctaaatatggaagtggaattcaattcttactccgttctaatttgcttacatatttagtaatgtgaacaccactcttattgttttgaaaatatcctttaaattttcttcaataaactttctataaaattcaaaatttcaatacactttgttctatgaaaaatgctagacttctatagtttgtgtagcactatctacacgcgaggctttacattcctgcatcatcgcagggtttttacgaggagaaccgcattgtcattcgttgtggggatacaaattcatgtaacaaaattcaccaaaacagcgagggccaaagtgagatggattaaaataaaaagttttgtccagattatgtcacgcgcgagttctgagaccaggttaggttgtgatgacgtcgctgtgcaagtgggccccgctttagtgttcttcggttccctggggcccacatttggcagaacctaaagttggagatttgctgtgacctacgatcgattcgacgatgttaattaatctgcccccccgggcaaaacaacaatatttttaatcctcacttttaattaatgcttgatactcacttatcaatggaattagtaatttttttctcccaactaattctgtacaatacattcaatgggcataatgctaatttcagacgcaaatcactgaccaactaatcagagcaaattaagtggagcagtacgacctgccaagcttcagttccgtatcttatttggagaaggaccataggatgccaataatcagggtgacctgattatttaagaaattgtacacggattaattagtattagtgaaatagaggtctctctactgccattcaagtaaatttgatgacatggaagaaagagaaacaagcatggttgttatacatgacaacagctcagagttgactcttagtatttattagagtaaattttattgcatggtgatgaaagaaaggaaaaaagagtaagaaaaagtattttgatatattaataattagagatcttattgtctctacgtaggatactagtttttagataacatagaggtcatatatg

SEQ ID NO: 46523 - DNA, 1696 bp, Oryza sativa
gtagctcctttgactatgtcttcatcccacgtaacattgacgtggcagcaacgacgatgtcgcgatgatagtgttcaagctggagtgcatcctagaagaagcagtcgcaagtcgtcttggctcctctggcagcgacaatggttcgcccagctcgggctccggtggtgggggagggtgctaaggcctgcaggatgtggcacccgcggcggaggaggagcgacggcaacggcggagtccaaccgggagtcagcgcgatggtcgcggatgtgcaagcaacgatagctcaacgaggtggacgcaagtcgagcacctccactctagtgggatggtgctcgtgatgttgcacgagtgccgtcgcattagctagcgtcggtgggatgatgcccgtgttgttgttgtcgctgagcatgaggtcctacaacgcagggaggcgatcaagcgacgctaaaattgtgctggagatggcgttgatggagaggtcgagcgagacgagtccagggtgaagcccgtcagtgagttcggccatcctccctccccactccgcttgccgccctccccgcttggtccctttttgtgcatgccgacagagagaggagatagagccatagaggtagagagggtgaggtgaaggaagtggacccaccggcatgtgggtcatactatttttcatcttcttgtttgagtgatatatgggcccgtatattttttagttttcaatttttctccttttatttttttaatcaaattgccacgtaagctccacgtcaatgctacgtgggacgaagacctaatcaaaagagccatgtaggtaccacgttagctaaaactagggataatactgtcgagagatctcatttgtcagtggttttgtagattggggatggattgtatccggttttacggtatagggaaaaatttcagagtcgacgatgaattgtgggacctaaaatgaatattttttttcagctttgcttggatgctgaaatggtgaagcaagaaaaaagaagagagataacagaatatactactataagacaaaatagaaatactccagtattgtattaatcaagtgagctacacgcaatcaatttagtgtttagtccgatagcctaagtacctaaacaacgttgtttgcactgcacggaacgccagcttcattagattggagtctcggcaacaagagagtacgtacagaaaatgcaacttgtttatgacgacgaaactaatcaaattgtacaaggagtcagtggagagatctgagatcttttcacgatatttcagtactaaaatgtcagctattcgatccactacctgcggttggagcttggagcacgtatagcaccacctttttgcggctgagaacgtgattatcttcacccaatttttcttccttaatttccatgaaacaacaaattacgcgaaaaattaacacaacactaattctttctttcctctcgctgtcaatccaatccaatctaggttagagacaaatctctcagcgtcatgtgcccattgcagctaattacattgcctaatccatcaatcaatcgatcgacagtagtagcgatgatacaacgaatgatcgagctagctagctagccggctctgctgagctgagctggcactgggacttcctctgtttcacaatatgagttattttaatattttttctatttatattaatgttaataaatca

SEQ ID NO: 46524 - DNA, 674 bp, Oryza sativa
aacgcacgagtattttttctagttaaagtaaagcgtatgatcggtttctaaactcggttggtatatatcgtctaggtttctaaatttttaaaatgtgtttttagattctctaactggtttaagtgtgttattttagtgttaaattgtcacggctcatcaagatcacgcgtgctttcgtgacacgccaactcacttccttttttcctttttttctcctctttcccttctcttattcattcttgttcgtgtggcaaaaaaaaaaggtaaaaagaagaaaaaaatgaaaccaaaatatccaagagaagggaaaatgaaaatgaagaaaaaagttaaaagattaacggaaccatcgttttgcttattgggggaataagcgaaaaggcatatttgcaagtgaataataatttgtgaataaaatttttatatacgtgttcctagcgatctaaaaataaaggctgaaaataaacttcaatgaaaaaaccctaaaattaacttcaaatttaagattaaaaatttaaattttagctgataagtactccctccgggttgataatacttgtcgttttggacaagggcacgtctaaaaaaacaactttgaccattattttctattataatatgtataaaagtgttaataaatatatgatcttttaaagtactttttaagattaatc

SEQ ID NO: 46525 - DNA, 523 bp, Oryza sativa
ctttgaaatatagtccgccgtcccaaagtatagttatctttctacttcaattttttaaattagctatattttgggacatagtatgatttttgaaaaactttcactggaatcgaactactactacaaatggaattttaaaaggaagggataaatatcatgtaagaaaatggagtaccaaatcagaatatccataatctttatgaacttggctgcaaaaagtaccatatcatgatgaccagagcggctcggttttcccaaaaaggaatgagcccaccacaacaataccgccactccacgtacacaaaaagaaccacacaaatttcagtcctcgttttttttttccttctctttttcttttccttttttctccaaaaaccctaaaaaaagaaattaaactgcgagaaagcaaaatactagcggccgccaagaaattccccccctctggccttcgccttctccgagtttccagcatatgcgccccgaattttccttcagatttgcctagtttttctccctcgctctt

SEQ ID NO: 46526 - DNA, 609 bp, Oryza sativa
tcgactctagaggatccccgcaaccatccattccatggttgttttatgaggaggataaaagttactccctccgtttcacaatgttagactttctaccactatttatattcatgtagatattaatgaatctatatacttatatgtgtctagattcattaacatctatacgaatgtgggcgatgctaaaagactttctagcatcgcccacattcatatagatgttaatgaatctagatatatgtgtgagtgactagattcattaacatctatatgaatatggacaatgctagaaagttctacattatgaaacggagagagttaatgaggggagttacaatgtgatgaagagaggaagatgtacacattagcgagctacaaaatgtgtaacttagcttctttggagataaatctggtggataatccacttattcagtagaaagttggaacaggaggctctaggaaatgctatagaaattttggaacacatatgcaacaggaatcgagtccatcaacgtgatttgatgacagccgataagtacatgaggagttgcagtcttgcataaactgtcctccccgccactactaagatatacacattagtgtgtgcaa

SEQ ID NO: 46527 - DNA, 672 bp, Oryza sativa
catggcgcatgtcgatcttttttcccggttggtaacaccaaccaggacttaaaaatagatctttagtcccggttggtgtcaccaacagtgcctaaagataaaggaggggtctgacaccacctgccgtcttttaaaccgggactaaaaatgatctttagtcccggttgatgttaccaaccaggactaaagatcaaaaaatagctctaaccttttgaactgggactaaagatcatctttagtcccggtttttagtggaaccgggagtattgtggatttcggccgaccgaccaaagatggtttctccaccagtgtaacaagcctgaactagtttactacactgagtaatggaagccggcatgttatttgctggtataatgatttctagaatgaggttggtccaaagttaggaaccatgaataagcgtgtgtttgttcaacaaaagttgcaaatttcacgtttaagctagaagctcaacagtcgaggtggtgcccactaatatcatgtatatacaagtgagcttttaacaggattttagtaagatcagagatatgccgctggtttccatctcttaaacatgtgttagcgtgtaggtgtgagtgtggtgtttcgagtgtagtggtgtctgtacgtatgcgtctaccgtgtagttaaaaaaatgatgaagtaaaaaaa

SEQ ID NO: 46528 - DNA, 686 bp, Oryza sativa
gaagatgtcagctaggcttgatccggtgatcacccactgaaatccgcacaacatatacagagtagtagaatggaattgaagcaagaacatgatgatttgtgcaatagaatcccacagcattttcttgtcttgttatcctcctatttatagatgaagcaagtatggatcagtccaccattgtcatgcgtgccattcgcgccatgacgttgaacactcttgagagccgttcgttggcttatgcagtgcatgtcgcatctgcctgagaaatgagactcgctccaacatggacacattctgatcacctcgtcacctcgagctaaactagcgcatgatcacaccttaattagtgatgtacactaagataacgtgagagggcatatagtttagtggttacgagtcatatataatcatttccaccagtgaaccaacctgttggaatcggcgatttttggccgatgacgattgagccacgaccgatttttttttttaagaattacacagtacaacacagacactcacaacgcacgcacactcacccctatgaacgcacgcacggtcgatttctgttaagactcgaggctcaagaagtcaagatggttggtccattcccatctctgatagaggcggcggcgggctaggagtccaagaagcggaagaggatcctaacgaaggcggcggccctatgg

SEQ ID NO: 46529 - DNA, 3731 bp, Oryza sativa
atcaccatcggaaacggaaggcaaagcttctgaaattccaagtggctttactacctgactcccaaggagctagcaccaaccatctatgaatatttcctggagaaagaatataatggtaaaagaggctcttgccaacaacaaatgggtgacagatctccaacctgtattcttcacctcctcatgccacttccaggaatacatcgaactttgggctaaactatagacggtctccctatagctagacatcgacgatgaaataagatggagattggccatggcctagttttcaccgttaagatggtgtgggagaagccacgtcgttgatactgttgctttggtcgatatattatatccacattcatattctaattccaattcgtgcattacctttgtgtgagaagtttatggagccatttggatctatggccagattaagcctgcttctcagacagaagggatatggcccgtaaaggtccatatgtatttggatctgtcccaaacacgtgcactcaatcaattggctattaggaaaacgtactcatccttaagcacattacaatgttgttaatttccttcatgcattttatttgtcacagagaaacaataggttaaactttcaacaaatagagaagtcatgtaagtgttctgagctactggtcctactcatgaatagataatgtgttagtgttcatggtgtaattactctgaactttagtgtagttcttgcttgtgttcaagtgtttacaatgcgcacagagctttccatccacacggctcaaataccagatcaagttctccctttctttatatacagaaattttacggtacttaaagtataccataattaccaaaaaaattggtattgttctagtactggagatattgaattatcaaattttacattaaaaattatgatacctgcaaaacgagtatggcccaattggttagatttcttgcagtggaaccagcccacctaaattcaagtcctaaatttgagactgttgctcgcatttacagctaattttctttcagtgataacggataagtgatgtccgtgatgactttatcaattttaagatatatcgatccaatcctccggacccaatcctccggatatgcttatagggataagatatgcgtgtgtttgtactatgtttctacaaaagaaaaagaaaatgtgataccgtaaaatcactcttcgtgcgactgaggaagagaggggatacgctgataaatatgcttcaacatttcatacaaaaccagctcaccgaagagatgaaagagctcaagagaggagtgctagatgacatgcattattatgtaaatcaacgcgcgtaattttgcccacaacaccacctgaaattttattagccatgcaatgtaaactcaatggcaaatatagcgatgcacattgcatgggactagctaggactaagatgcattaggaaatgcagcgattgtgaaagtgatggccaaccctaactcctcgccacaacatgatggagtgccgcctccttctgttctattcctgtctcatttctatgttggtgtcatatttcactgtttttgaaaaaatttagcacatgtgttgatcactcaatagagtcaagtatgtacataaattgttgaacggaacattcagacttgacagagatacatagcgacattagatttattttattatctcaggtgtcgatatatatactaccttaggcttatcttctaatgaaagtgaaatatgatgaacactgtgtacgtagctaaaacatgttggttgcagttagcaggtagagtaggaatctgaggtttcaggaagttcagcaattcttctactttatcccccggttccaaatttgaacaagctaccaaatcacgttgcatctatagtagtagtatctactatctagcattgttcgtcagagtcttcgacaacatgaagtggcatgacgatcgtcagttgaaagccaattgagggaagaacagctgagctccggtcgtcggagtggaattaatacggcgaggggttaacatactgcttgtcttccctgtttgtaagactatctcggccaataagtttgagaacgactcagtttttctttttcaaataatacaccatatggtctcctcaatttttttcagcacaacttcattattcaagaaattttatccttgagaggtaccaagagtactaaaaatttttactgcaaatttttgtaccacctgaggatacaatacatatgaatatatggtacttatctcctgtacctcttcaaggaacgtaaaatcactctcggtattaaggaaatagtttctctgtactttagtgcggctcttgtatcatagtaaataattaatccctttgtgtctgcataaggatacaatacatggatgcaataccttaaaaaaataaagattactaccctctctactttatataaatggtgctgaggaggaagggaaaggtgatgctcccaaatttcgttgaaaccagctcattgaggggaggaaggagctgaggagagaagcacacattgcagaattaggactggatgcaacaggaaacacttacatggaaaaagtgccgtgctgtggcacattattagccatctcttaaagatgtttacaactttaggtaaatatatatattgcaattttacactcgcagattacgcattagcgtcgcgcaacaatgctcagggtatcttctagtatatgagaaaagaaagtgctgcccatgtaagactatctgtattttcggcctacacaaaccacaagatgttgagggcgaagatgtatttttgcagtatgttctaaactctatatattctcacactagtacaaaaccctttactggtactggttgggaatcggcctaggtaccagtttctcagcctgtaccaatttagtggtaccaataccgaaaggcaggtaccggttctaaaactggcacacatagtcaggatgagggtttgcaaaactatagcattgttccattgttttattatgtcaaggaaataacaagtgggaccttgaatagtactcgtataaaattaatgttgcttaaacactgcactccctagtcatcaaaagatcatgtgtccagttcagctgggtgtgctcaaatggatacagatcctccgcagtactgctgatgcaatagtagtggctaatatgtgggttcgggtccacatgccagtgtctgctgttgcatcagcagtattgtagacaacctccactggtgctcaatggctaatttgtgataattattttagggtacaaagaacgaataaagttgacatgtaaacctaaaaagttttctaaaaattaaaatatataaatctattataaaaatcacattgtttagtagcagcggggcaattaaggtgaatggtgagcggccacccttgctatggccccatgacggcttgatcgccagccatagctcctgcttgctttgagagagagaggggcagaaggaagaatttttttagaaataatacaaatttaataaaaaatttctaaaaataaatgttggttgtctgaaatgacaggatttaaaaaattggaaacttgggatgtgtgtgcacgcacgtgagtgggttgtgcgacctatcgaactttacgaattcgataggccacttacagcaaagtacatgcttactcgtttctttttttttaatcaacccatctaacgtgtccaatgaccgttgtgcgacaggtagcaacactag

SEQ ID NO: 46530 - DNA, 644 bp, Oryza sativa
  unsure (1)..(644): unsure at all n locations
tacacatatcttacttctgtaagcatctctaagagagtgggcttgctttttacgtttatgataatggatatatatatatatatatatatatatatatatatatatatatatatatatatatatatatacatatatctatctctatccctccccctgtaaatctatgttgccccatatataaacaaacctacatgcattgcctgatgcacacccacccgcatatccatttgaatccagatgtcaccatatgcacacagacacacaccacgatcgacgcatatgcatgcacatacatnggtccacaccgcacacaggattaatgactcgctgggccctaactacaagcgcgcacgcctgcatatcccacccactatgccctgccacttctattcactcccccaaggtgcacacccacacacacacacgcagcccttggttcttaccccgccagcctcgcgtcaaaggccggagaggggggcggagatcctacgtttcgcccgcgtgtcaaaccctacaacnaccccacgcacatatagagagtgcgacacccatactgcccaccccatagcctagccgcaacgccccggaggggccatggaccctgtcccatccacacacatgtgcttacccccaaccggaccccg

SEQ ID NO: 46531 - DNA, 663 bp, Oryza sativa
  unsure (1)..(663): unsure at all n locations
agccgcagggctattagtgtaaggaatacatgttaggtgcanaaccagaaaccaggatagaagcatatgcatgcacaacagttggatgcncagagcacacaggactaaggatcagcaggcccctaactagcaagcattgcatgcatgcatatgcagcccaatatgcaatgccacttagcttcactcccccaaaggtgcacaaccacacacacacacacacaattcctttttacccctcaagccttgaatctttggtaggagaagggggaggagtttctccttttgccatgtggttcataccctacacgaaccccaagcacatatgcataatgtagcttagatatttctcaccccttagcttgtttgcaatgcaactgtggggtaatggaccttgccccaaccacacaaatatactcccccacaagagcagccaagttggtgaccagagatatgtgagggcgtggatcaaaaggaattcagctagcacattctcatccatgatcagctgtattttaattatacccgattcagagatttcatttttctttcttttaaaaaattatcccgtcatagttatttgatgtttatgacaagattcgattaaacttttaaaattatgatcaaaacttataatatttatagttgtagtattattctgcatat

SEQ ID NO: 46532 - DNA, 733 bp, Oryza sativa
  unsure (1)..(733): unsure at all n locations
ccgatcatctatgcttgcatgcctgccgggcgagcctgcaggacgactctagaggatccccatgtgaatggcatgaccacagatcaccgaattatcaaaaaaaacctccactaggggatttctgacttctaggcaaggcagaaatggaaaaatatctttcactgcaccacaagaaatttccactcgaaactattagaaaaacaaaacacaccatgttttttcaattaggtagtccttaacaacagcagccatatcaaccatgaatgtgattcacctatatgagactgtcagtgactggacgccgttgctagtgattctcattatgagggaaaaatgcctgaaaaaaatattttaccatggtactaatctagcacaataaaggggcctaacaactccacatagatcatgctgttatccacgctgttactcaatctatgcactcacaaatgatatctgttgggcttttaaccgaccacctttgctaagttcttatcgcactccattcctcattatcttgaccattgggatatcatggagtagcttccatatccacagtatactctagacagaagatgacgagcttttccagaacatgcttgccaaacccatttggattttttttcgaccctctatcaaccccacgtttttatcaacccaaaccctatgcaacaaacccanntgtgtcacaagcataaaacattgccatgtgcgtcgtatcaaantctattcctgc

SEQ ID NO: 46533 - DNA, 1682 bp, Oryza sativa
ttcgagggtaacttttatttccgctaaaagttttcggtttttgggtataccaaccattcaccctccctctggttggcttagttcttatgattcgatcctacaagtctcctccacttgtccacctttagccccaccactctcccgcaaatcatacatcgtcaaagccgcatctcacctatgttgtacctatcgttggctcacctatcgcctctccccgccccaatccagtttctcgagggtataaatagcctcgccatactcctctatcttgttttccacatttcaaaagtttagtgcttttatgctaaagacggagttaaaagaccaaggtttatacctcagttgcgttttacttgtggagtggaggtgaagttccagtaggatcgtcctttttcactgttgctttgttttttctttatgaggactaagtatttattctgtaagtatttacgtttgaatatgtatattaatttgtcattttgtgtatcctagtttgattcctggacatagatttatacacagaatagtatgagaattggtgaaatttttgggcgcgacaatgaactacgtgccaaaagttgggaaacccggcttttccatattttttaaacctaactacgaaccaaccgttcctccgaattttaagctctccaaaacgggacaaaagtctatttcactatacattagagaaaccaccatgatgctatttttggttcagaagtctcacataggctcggatggtctcacatccttccaccaattgaaattcttagcccaaataatgcaccacctaaaattgaattgaaccccagaaccaaaacaaaggtcccaatgattgggaatggtagggaagatgcaagatccatggtccaatcagaccaagcaaaccatcattgagcaatgttcactgcactgtgtgcgagtggatcccatcaagatctcgctcgttcgctcgttccctcctgcaaggcagctggtcacaagtcacagcaaagttatgagcctcgattaatctattataaatctgcaataacaaatcttaccagcaaatcagcaatgcactattcagttgacccaccccgtctgaattctgaagaaaataatgcaaaacaaattcagtggacagagaagagaggagacatatttacgccatgtagataatctattataataattcagtcaataattattgaagtaaattaaatattttaataaattaattaatatataacatagattaaggaatcattgcaacacattaaaagaaagtatttttaagaaaaacttaattttgaagatgtggaagaaataatccacaacaataattcagtggagaagcaaaaagaatcggggcctgaggacctgaccaccgaatttgttatatatttgtcatcaaaatttttctaaaaaattttatagatataaatacagtaaaatcgtagtgcaattatattgtaacttaattgtaatgtaactttcaaataaattttgaaccgttatatttgcttcaagattcatgtaatcgaagaaaaaaaatcacagcgtgcttatagctgaggggattatgtcatgagacatccgcttcatggaaatagtgtgttatcatagaatttttttaaaaaaaattgtattgtaagttacaaacaaactacaatatactccctccgtttcaaaatgtttga

SEQ ID NO: 46534 - DNA, 2015 bp, Oryza sativa
agatcaaaattttgcacagctaatgctggtcatatatttatgccatcatctacgatatgtttccatgtgattgtggccgtctggactttcgcctggccatcgatcgacatgatgtgcatggtcagctagtcactccgcgaccatactgtatgctcgggaagagctggagcactgaaaacaccaaattgcatggacaactgcaggtgacaataagcgatgtgatggcatgcatgttgagtgagacattccaccgctgattctgatgtttattctcagatgatccagtaggaatgacaatggcgtccatccactactcctccctccgttccaaaataagcgcagacatgaatttttgtgtctgactgttcgtcttatttaatttttttttaaaaaacctaaaaagcatcagtcacacataaaatactatttatattttataatctaataacaataaaaatattaattataaaaaaaattaaataaaatggatggtcaaagttgaacacggaaactcatggcaacgtttattttggaacagacagagaactactcttgcatcagctctcatatggggtcaaattcaaagaaatgtttgaaaaactgacgtttaattaccaaccggtaattatctagcaagttttgataattgtgaccgaggtttctttgttacaaaggctccgttccattctgattaagatatagtctgtctcaatttttgtaaggcatgtttttcaaactgataaacggtgtattttataggaaaactttctatacagaagttgcttaaaatatcaaatgaattcattttataagtttatactaattaaaatttaatcaatcatacgctgatgactttatcattttacatgtccttatttaatcctcatcttcatcactttgcaaacaccacatacttaattaactgttgaatctgttgatgagtggtctgaattcaggatcatcactatcagagttatcagagagggagatctgcaatgagcagtacgctgtagtactacatgccatgagttaattatgagtcgcatctaacgggagctggaccttaaactaaaagcccttaatttttacgcaaaaaagggggaaaaggcacattatttggataatgactagctggatgtagccagctgtggtacctgctgctactattttgcattgcaccaccagatcggctcgggtttgcatagctggaacaggaactctgccgttgcatttccagaaaagaaagaaagaaagattgggtataatcatcttcgccgaataaatagttctgaattttgaacatcagatatggtatgccaacttgcagcgatgacatcttgtatatagtgaaagcaacaaggttttttcacaaggataaagagtttggataaacaatagtcgttaaatcaaaatggtacattcattaataaaaaacataaatgaactaaacatatgggaattttgggagatcaatttctagtgcctcctcttatatattgagggcaaagacaatgaagaaaaaaaaaagaagctgccattgatttctctaataaacatataatataacttaagtaaatttatagttgggtagaccagtcgatatttttaaataaattaacttatgtcaaaacactcataaaagctaagctaaactaaaaaaacatatataaaatttcttaaatgggatcaacagttgcgtaaagagcgactatgtggctagttatttcgtgcaaaacgaaggataacagacaatctcaatggacatcatcgaactgattatctacaccacataaggccatacacaagaaatgctctttatgtttttccctcttccagatgctagctagccagcagcataccatttcagcaatcacatcttgatttcttgttctcttcctcgacaaaaactgtcgacacgcaacacagttactactttcttgcagatgcaggtatctatctgtgacaatcgcgttgctcgtacagctgcgccccatggccgcagcaaaaccccgaga

SEQ ID NO: 46535 - DNA, 1880 bp, Oryza sativa
tgagtacttacagtatctgacaggctaatttttatcagcaaagaattagtctaagcatcaattgttattctgattctgaaacaagcactgaacactctctgaatttacagtcagtcaaggggcaagttggatccggcacatgacgaaaacaagctgagaatttgcgtgtccctccggtgtcggtacatccggatgcagcgacatgctggcagtagattctgtgctgtgtgtgattgatgctgcatcgctgaacaggaggaacatttcacattttcttaatgcgtgtgcttaagacttggacgctggaacaggtcgacggattggcagtttgattagggtgattggtgatggatccgataaacaagtgtcgttgtgctggtgtaatagtataatctggtcgtttgactacggggttggctagcctggcactgcagcctgcaggagtgcagggtgcttgcaaaaatgtctctggcgtctggtacagtgtactgatcatcttaccagtgtttgggggattgagatttctgcacttggaatctcatcttgcttgtcaatgttctgctaatcaagccaataaaatcgagtgaaaattttcctgtctagttaaaaatatattcccttcgttataaaatatagcaatataagatttgacaggacacgttttagtattataaatctaaacattcgtctgtctagattagcaatattaggatgtctcccatcatgttttaaattgttatattttggtacgtagtaatactgaatatcttttttttttcattggacgattgaaagcatgcagattttaggacacaaaatgaagcactaaggccattcccaacccaatgactaggatggtgtccatagcattaaataagttgccacctaggataaaaactgatgtggcaagtgaataaatgagaaaagagaagaaaaccatgtcttgcatgagacttgatttctacacaacatccaagacatcatgtgagataagtagcattaaatttaagtatgaaatagtagtgtttgcattggaagagtagtgtctagtactagtttcttgatgatgtgaagtttatggaaactatatctagtgtcttgggttgggaatagcctaacagtctgtcagtttttatatcggtgtagtaaatcgattgatctactatcctgtcagagagtaatgggtgaagccagggtggcgtgcgtgtgaatatgtgatgaacgatgatgaactgggggctgaatctgaaacacaattcattttgccgtgctgagcacaagctcagctatccgctatgctgaatgaatgaatgaatgaatgaatgaatgatcagttcatccattagtcgccacgcatgcatgccatggtcagcctgaatccctgaagtgctcctcttaagtgtatatggcttagctcagcgacgtcttcaatggctagcttgggcgcatctcgcattcactccatgtaggaccaagccatggatgcgtcgagctcggatgattggagattaatttgagaggagtggttgggtacgtggacctgtggcgccattggtgcgtgggtcagtgggggagatgggaggaggtggaagaagaagaaacgctgcgatccgcacggacgcaacaaaaactgtcccagttatcattcatttcctgcagctgcaggggccactgccaatgatcaccatgtatgggctacctccatgattccatggggggttttcacgaacccgctaggtgttagtttatgaaaacccgtcaatattagtcggttttcgtacggcgttgactaaaacccatcggtttttactagtttttttcggatttcggtaaaccaatgagatatgatttttaattccaaatcgaaaaagttaaaccct

SEQ ID NO: 46536 - DNA, 757 bp, Oryza sativa
agctgcaggggccactgccaatgatcaccatgtatgggctacctccatgattccatggggggttttcacgaaaccgctaggtgttagtttatgaaaacgggtcaatattagtcggttttcgtacggcgttgactaaaagccatcggtttttactagtttttttcggatttcggtaaaccaatgagatatgatttttaattcgaaatcgaaaaagttaaaccctgaatctccatctccttgttcaagttcatcttaattttttttttgttcttttttcctctcctattctcctctacaagatccgaaaccatttctctcatctatacagaagtatatccattccgatctagtatgtctgaataatggtgtatggacgagctaggcttgatgggcgttgcgagaggactggctggctggctggctgcatgtcgccagctgtacaaagcgccatgaaagcgtcgtcgcgtcggagcgagatcttgagcgacggtcagtcctgtactaacgtcaggactggggctgtacagctctgacattgtgtgtgtgaccatagttacgacatccctctcgagtaaaaacgcccatgcatagcatatagtaggactgtatgggagctttcaaccaggaagaatctatgtcaaaacagtccggtacacgcgcatttaaacacatcttaataccctgctaatcaaagtttcttgcgctacgctattaatcaaggtccattcttaccagcatttgtcgcctcatgcaaaaa

SEQ ID NO: 46537 - DNA, 3104 bp, Oryza sativa
gggcgaattcgagctcggtacccatttattttgaagatctgaattttttttgacaccgatctggttggcgtgttagcattgtcttgccatgccacctggctgatgtgataggacgttcgttgcgggtgatgtgtcagtgttgtattactcttttggaaataagttttgaaagtatttatttttaaactaaatgttgacgctttttcatggccaacacaaaatcacctaacgatttgcggtgtatgtaatcaacagagtcgccaaaatcgatagatcaaaatcggctagtgaaaccgatttcgagattaattcactttcgcggaatcaagcgactaatttacaagcaaattagtaaagaggataactatcgcacttacgtgatgatgaacgactagtttccgagcaaactagcaaaggataacctcctcgctttcgtggagaagcacgaccgtttttcagcgcaaaacggcaaagattaaccaaattctagggttgacagaactcagccatgaaaacaaaatagaataacaagaatgtaaagaagaggaaaatagtagattgaaattgtttggggggttctcaaactgatctaataccccactatatataggggcacctaaccaccggatgtgtaaatcctacattcatggaaactcttaattaacaaatcagctgctaccaaaaatgtatattccatagctgactttaccgcatagtcgcataatccagtccgcacacacgattctgccttggttgcagagccaagcagcagtgtacgtaagtgcatcaatttccatcgcttgtccagcacagcagctctcaacaaactgaaatacatatttcctcgctgcactccatcatgccatcaacccatcaactgatccatacatatcccaatgccagattaaatactatgatcacccaatgttttgcaagcatgatctagccgatgcaccgaagatccataagccaaattataccacaaacactaaaaaggttaaaaaaaataattaaaaaccgggtaatagtgtcctcgtcgcagaaggagcgagtccccttcatcatcggcagcatggcctccggtgccgccatggcagcggcagcgagaacgtcagcggacgcagtcgcgtcgtcgtgacgatgacatgggctacgcgcgccgggcagaaactgactcctgcactgcacatcgtggttgtcgatgaggaggtaggggatctcacacatgagctagctccttcgtgatctcggcgatggcacacgcttcgtctttcccggcgcccccacgatcgagccagagatgcaggagtacgttggcctgcatggcccctgaaagggggcttttaacttaggcctgatatgcgtgtgactcctgaaagcccactttggcctgatagcagagtataatcaggagttgggtacccacgggccacggacactttcacagtcctactcggtccttgactccttatatatgttttacggaattgctaaatggccttcaaccaaaaaaaatcgagaggatttcttacagcttttaaaccaccccatttgcttgaacattcgtgcgtccaacttcttctccagctccagcgatcgttacctgacgagttaggatatagggtttagggtggggtgaattaggggatggtgagttcagattggagtactaattagttagtaatgattttggcaatcatttttcctgacttcgcccctcatttgtttggaggagacgtagggttcatccattgttaacaacctgtcaatgtagcgtcaccattgacaacttgctaagagagcaccaacgtgaaaggatcttattgttgaggcttcaaccgatgggaactagtggtggactagctctatggaattgtgtgcgtatgaaaaaaaaatataatctggaggtttctcacagtcaccggagcatgagggagggaggagtgggcgggggaatgaatgtggtgagcaaggagaatccaaggataaatatgcaaacaatgtgagggtttttataaaaaaattcctatgcggaatttgtgtgcttcaatctaggctgcaagatctcttatcggcaagattatggaacaactttgtttggattgctaccattcttagcgatcataatctataaataaaatcccttcatttgggaggaattttaccatccagcaagctgaagcggtaccaaatctaggtcattggctagtccaaatcgaacggttcatagaactcgatactgccaggtaccaatttaggctttgggatggtaccgtagaataaaagagacgtagaagggcaggttcatattttcacgttgcaaattttgctggttcaatctaaggttgatggaggataaggcaaaatcccgagcgccgccgccactctcatcgtggaatcgctgcattaccgtcgcctcgtccccgcacgagctatgccctcccctgtcctgctacttggttgtgcctccaccttcattggctgcccacgtccaccgttgtccactcggggcttgccgcctctaggggagacctcctccctgccagcgagccggaggccgtgatgggtggcagtctcgccatatcccctcactgtcgtccaagtccaaatccttgcctcgtctagatctcccgacctcctcctcctcctccctcctcccctccgatatacagcgcaggcggcgaccgtgggagtaggagacagcgacaggccttctccgcccatcttcaatttgtttccaatcttgcccctagtaattcaatggttggatttcatttagtacctgatagtactagtacctcgaggtactatctgctggacagtaacaaacctcttcatttggactgccaccacttaccagcactccaggagcaacagtcattcttttcccaaacagacccctactactcgttatttctgcttcatatctaatcagatccgggatcgcatgcctcatgtcagctttgtttcggtgtggcacatatcaagcgacaatgcctgatcctgctaagtgcttcatcgcactctcgatccatgatcatatcaagacatgacgctactgcaaaaaataattttaatgaacactcccttttgttttttacaag

SEQ ID NO: 46538 - DNA, 3455 bp, Oryza sativa
ttcaatttgtttccaatcttgcccctagtaattcaatggttggatttcatttagtacctgatagtactagtacctcgaggtactatctgctggacagtaacaaacctcttcatttggactgccaccacttaccaacactccagagcaacagtcattctttttccaaaagacccctactactcgtatttctgcttcatatctaatcagattccggatcgcatgcctcatgtcagctttgtttcggtgtggcacatatcaagctatcactgcgtgatccttgctaagtgcttcatcgcactctcgatccatgatcatatcaagacatgacgctactgcaaaaaataattttaatgaacactcccttttgttttttacaagcgcactaaaaaagacacgcctaagcaaatgtacttgcgtgaccgatcaagtcccgtccataaaaatcgtttttcacatactgacttcttattagggttgtttgcaaaaatgtgttagttttcaagcgggccccttaatagcttgtgaaaaagcgatgatttatcttcgtctcgagtccccgcatgcattgaccgcacgtaggatgttcctctcctccttaccctcctttttctctcctcatccttcctcctctccaccctccacttttcccttctctcagctctgtccctcactgcacgtgcgatggagggggcgattagatccgatgagcggtggtggaggcgatggcatatctgcctgcgcggtgaagaaggtgggcggatccgatgcacatgatggtggaggaggcggcatatccgacatgtgcggcctcgtgatgacggatccagctacgacgcccttgtgatagccggatccagtggcggcggccttaggataggcggatccgccatcgtcggtcattggagccacggatccacatgcagtgtatgcggggagtcaaggcaacaacaacctcgactttggccgtgggatgacagccacaaggacgacggtggcgacttcacgatgaccgattttctggatttgtttttcaattatttttttgaaaatgtctttgcattcagtgtcctaacttaggtacttgcaaaaaaaaaagaggttttcacaagcagcgtcattaggagggccacctacgaaactatgttttcgtgtgtagttatgatgcccgcgtatgaaaataccgatttttacaaacactagttagatgggtatgtacgatccatctgcccgtgaaaatgagttttggccgtctgcgaagaaaaactgaaaagaaaagagcatcaatataatcgacaagtaccacttgtttccgtagtatgatttgcaaaggatattatattaaaggtggacgtgatatttctttccaaactaaaaggttcatatacgtatacgtgattaattggacgggtctgtccggatcgataagcggctcatgatgactcacccactgtcctttttatagtgcaacaagtgtaataaggccaagcgaatgcgaatctctcgtgcttctcctgttcttaaggacgatggcaccatactccatgcatgcacatagcaagttgctagctagcgatcatcttatatatgtacgcggtgattattgttgttacaaagctccaagtctttggatccacccatgcgtgattgtctatactcccaacgtacgtgtttaaatatatataatggtgttaattttattatgtcaaacttttgaaacttggtaataagtggttgtagcttctattgaagtaaagaccagatattatccattatcttaaaaaataacttttgaaactttgactattaattcttgaaatgtttagttgaaacataaatcgtatggtaggtttttctttacaagtactttcacaattctataattttgttagatattatcattatattgtataaaaaatagaatagtggccaaagttatataccaaacaccgaaaaaaaaatcaacaatgttgtatgttttaaatagagaggtactactacttcgtcctccctaaaatacaacgtgtcctagttttgatcaggaaatatatatatcaacatttaaaatttttgactaataattgaatcgttagatttgtctttgaaaatattctcacatgatattaattttgtagttattcatataacatagtatgaaaataaatcaaagagatcaatgttagagaccgtaaagaaaactaactaatgtcataacttttattttagaaactgggggagtacttgataacaccgtatcatggcgctcgtgtgccacgatttttagtttaatagtgcaaggtaccaattaattgcagttgcactaattggcaggagttctgtatatatttaattaacaagtggagataaaaattttgaaccgatgtatctctttccaaaaaaaaaaaaactatgatcgatgcaaacttgtgtcaataataaaagtggtggccctccaagcatttggacgttgagactagtttatatctcgtcatgtgaggctcctgctagttaaaagttagtaaaattgtgaggacaatattgtgtccttcaatttacaggtttatgcagagtgcacatatatatatacccaccatgcattgaccatttcgttctgtatatatctatctctctgccgcctcaaagtcgatatgatgtgtgctgtgtgcagtaattcagtatctgcagagaagcattgcaaaatatatatagtgtgctaagtatttctaaagatatggttattaggagaccttttagaacataaaaattaaaatggatgttattactttgtcagcaagagatatctacttctaatttataaattgggtactctccttagatataatttgtctgaaaaataatactccttccatccacaaaagttagacatatttcacatttgagttttttcaaataattaagttgatttaatgtgtagtctttatgtatttaaaacttaaatgaaaatataaattaaatgcttgagaacctaagaagtcatctaaatactcgatcattggttgtatgcttacattcactcctggattttgtaacattcaagatgattttttttgtcttgatgataaaaagtagaatgtgtaacttttgtgatggaggaatagtaatcaagggcctcatgatgatgagatcaagtagcaatgaacaacattagtttacctcgttgctggtgtgcacgtggatcgattcgtagtttacacggtcccctacagtttggttaatcattgtttgtttttaatttactaaaccaacagtttactaggatgctgctcgtcgcttcccaatattaatctgttgtcgtctgaattcatgcgatctgggacaaagataacattaagagaaattttatggtactcttgtcgagagtaccaaaatttttaaatgccagctagctaatacttcctccgtactcgtaaaaaaaatcgttttggattgcgacacgg

SEQ ID NO: 46539 - DNA, 1371 bp, Oryza sativa
ctacatgagatgggttggattttgactggttttgatcctgaatttaaatctccatataaaagaatttcatattagattatttgatgatttaagttcctaattttaaaaagctgtatatatctgaatagatatagaaatcgggtaaaaaaataaccttctctataaaaaaaaaccgcaccagaccaaactaccaaagacaatacacatgcatgcataagggcatcttagtattttcaaaatggttctctctcagcaaatagatagaaaataataaaataataatcgctgcagtttcacctccaacaaattatcgagttttgaggatgtccaaaaacaaagcataatttttacagtacccactaataaagacagtaatattttaaatattacttcctccatcttataatataacgagtatcaaatgaattactatatagtacagcgaatatatgcctttacgttgttattatattgtgaactcgtactatattatgaacggaggaagtatgtagcaaattttgcttactattacctcaattaggagtctacatgcatgatgcatgatgccctccctcgtgtgtgtggatgtgcactcctgtactactccttggtggtgtaagtacagagtgtacatacgtatcggttttatttaaatggatttgctagaaactttcgtaagtttttttcctccaaaattcccatctttttgatcattggatcgcctcaagatttgtgcatgaagagaaaattttgttagaaagaaattttcacacgcgtcatgcataagatcctattactatctaatcaaagcattgttgaatggaagttttaataagttacagcgtagttacggtacagatacagtatagttacaatacaattacaatataattataattcaattatacaatagttatatttgaaagtttctgaaaaaaaaattgtgacaattttttagcttgtgcttcaatcccgaaatcaattggactttttttttactgtgtgtttcaaaaaaagaaacacacaaacaattgacttctccttttaccctcaccgagtagtacgccgcatgtgatccacaccaactatgtggggactgagagtctgaaacacactgtcgctcttatctcttttcctacacagactagcatgcatgcatgtataccaatctctggtcccttttttttctcgatccgcccacacacacccacccgaaagatggcccagtaagattggaatggtgtagtaggtgttcaaatttcagatcaagctagccaggctcaataatatagggtcgtgaatcacgcttgctctctcttaaacaacattttttttccatgcacgattcgcttacatatacccatattaatt

SEQ ID NO: 46540 - DNA, 596 bp, Oryza sativa
tagcatgcatgcatgtataccaatctcttgttccttttttttctcgatccgcacacacacacacacacgaaagatagccagtgagaatcgtattcgtgtagtaggtgttcagaatttcagatcaagctacccatgctcaattatatatggtcgtgaatcacgcttgctctctcctaaacaacattttttttccatgcacgattcgtttatatatacccatattaatttgctgggtgtatacttacatgtatatcaatcattggtaggcctgacaaaaatacagaaaacgccgggctttcgagttaggaaatattcctatatagtatatcagacgctaatgagagggctgtgttcttaaaaaaaagttctcggaaagaaatgaaagggctgacaagtgacaaacatcccaacgggaattgcctgcaggattgctggtccagtaacagtgacttacaagttagcaatactgcagaagacctgcactccaaacatccgtatatttgggcaaaaaaaaaagaagggcgcaccaaatgcccccccaaagaattcacatcaaattaacgatttacttgtggggcataataccaattaataag

SEQ ID NO: 46541 - DNA, 2527 bp, Oryza sativa
ctgtatgggagctttcaaccaggaagaatcctatgtcaaaacagtacggtacacgcgcatttaaacacatcttaataaccctgctaatcaaagtttcttgcgctacgcttattaataaggtccattcttacggtggaagctcatgtcctgcacctcgaacaccacgtcgttcggcaaccccgtcgtgcaaaacctgccacccatccccaccaagaaaaccccaaaaaattaaaaaaaacccagcgaaaccaacgcaatttccggtggtataaacaaaaccaccacaaaagaaagggaatcttaccacgcctggcccctcgtcgcgccgccgcgcacggcggacgacatctccgccgccgccgccgccttcttctctgagccgcggcgattcgggaatcgggaggaggaggaggaagcaaagctacatacacccgccgctctcgccgtatagtagcagtagtgcaattgggagggtgggtaggcgtatttagggcgcgaataaattggcctcagaatcccactccaagttcaccctctctctctctctctccccttctcatctgctccgagttattgctggctatgacatgtatggaaagctacgtctccttcgtcctcctcctcctccctggtctaaccaaatctctcctcatcatttgtttccacttttaattactcttctactatctactaattaactaacggtctaacgctatggattatggatactgtgaatctgtgatgaggtgtgtgagctaaccactccatgtctccatgccgccatgggagcggagcggatcatcacatttccattgctttgcttttgcttccatttggggattaaattggaaagttgtttggaggggagacctacttggcctggtctacgctttggatttggacagcgaagaaaaggctaggaaaaaatagaaaagggaaaaagaaaagaaaagaggaaagcatcgatgctctttcttgcgtcaacacacaagaaaaactttgtgaaaagtgggaatgaaaggtcggaggcgacaaaaggaacagggatgcaagaatggtcatcttccttcgtctttgcagcagaaaagaacaatctttcaccaacaaaccatgatcagtactactgctgcagccgattgcaggaatgaattttgcatcggtttcagatatcctttttgtgttaggtactcgtcagcgcctgactaatgtttgttttttgacccacaattcagcagttaactgtagtgatatactatcatgtttgattttgaacgatttatgtactatcttttttttttactttgcttttagattcaggcaacctgattatgaaactttcgtgtgcaattcctctgctttagcaccggtctcctctcctgcttccttcctttcttttcttctgccttttcccaaccagcaatgcacgggcgccatgatgaacatgaaactgcgaaattacacgaaacaaatatactctctccctccgtttcataatttagattcattaacatatatatggatgtttttttttgcggggaacatatatattaatgttgtcaatgctagaaaaaattatattatgaaatggagaaagtacaatgcaagcatatgtcggtaggatgagtgaatgaatgggtcgatgagatcacaacgaaaggtcagctgctcaatgctacgtagctgatacggcgcattgaagacgagctaacgaccctactcgtgaatgtgacgcagactgattgtgagatcacactgtcactgacactacggttaggggcatggctgccttgcgtttgcaggtgacaatatactcacgaggtcacgatcgattactacgtgtatacaaatatggtaccataaatttgtcaaattgaactagaaactgatgaagaacaggctgcctcatggcatatatacctgcatggttgcatcagaccaggacagtggcctgatcggatgcgttggcactggatagtagagaccaatgcatggtggttggagagaaggggaaaggtgccaaaatatgtgggcatgtggccgctgtgacgagctgaacattataagaacattataattgggatttcagatatgctgtgctcctatacagagtttcagaaaaccagtgttgctgctgctgtaagtctgtaactgtaaatatgctccagattaagctagctgcatatctgtgattccccaaaataaatctgataaaagtaatactagtacatacagtgtactagactgctagttaaaatcaaagcacaaggtgttgcacggactgtgcctcctccttgcaggaccatgttcttgctcgtggcctgttgcctttgagaggccggggttggagctcctgctagtaattgcatgttgccaaccgccatttacaccaagagagaaacagttccagcattcaacctctgccatattgcttagccccattcagaccaacagctccaaccatctccatcttggttgggtcacgccattactgcttaattggatttatcatttctcctagctgacaatg

SEQ ID NO: 46542 - DNA, 780 bp, Oryza sativa
ccaacatctttggaataattaatctctcactaccaaccaatgcaaagcttcagttttagagcagcagagtgcagtgctcagtgctcggtagctagtagtagtagtgaatatgagtgtgtgtgagttgtacgagcaaactgggccgctattaatagagaagaaggcgagcgatcgaacgactgaacgagaggctgatcgatttgaatattgtttaaggtgcacaagatatttgcgatcgatatgtacgtgaaaagcgtgcgtgtgggtcgcgcgcgcgcgcacatgctttgcttgcatgggcgccattgcggcgtgctttcttttgccttggccccgcgcgcgggcgggcgggcggacgtggcggcttcgtcgtcgtcggactcggatcgcgaggacgaggagtaccgcgtacgtggttgattcatccggccgtgctagagagattagagctttcgcgcacatatttcttcacgtgtaccgtgtacgcataccgtgttcaacaatgctccgatcaagctttcgcacacatttttctctatgtcacgcggatgacgtcgattgcatgacgtatatctaagtttttctagtacggtaagtcccgaaagacggatttcaattccttttcgaaagagatgtctcaccgcttgatgtagatgcacgtacgcttccattcacttatcgaatacaatgttgatatcctttacattctcccagatctcactgccagcatgcaatgaactttggacgtgatccgtctttcatcgtctcgtaggaatctct

SEQ ID NO: 46543 - DNA, 763 bp, Oryza sativa
atagctacatgttcctagaatttgagtgacaacctatattacttggggagctagagatctttggagaagctcccataaacataacctttgttaaactgaacaactctcgaaaagcgctcttaagcggtacctctattactctataaaaaaccaaataccactgatgaagtatatatagctctcggcctaaaattaaaaaaacaaagctatgtcttatgtaaaaaaaaagttccatttcccaacttatatcctctcattctttatgtgcatataaccccgaaccgctaaaagacgctcaaactctctctctctctatatatatatatatatagcatgtcaaaatgaaaagctatccccagaaaacaaagaaaacgaacttaggcttgattggccgaagcttcatgtcatgactgaataaagcaagggagtctctgtccgtttcattacgtctttctcttactgatctaggatcaaggtagcaattctactactacgaaacaaaaaaaaacttgatttttcagggaaggacaggtttctttttggcaggaatgcaagcaagctaggccaaaacaaggagaaaggctaaaactgtctgagccaagaaccagacgcgctcatggcttcacactcccaccacactaacacaatatgccatttgtttggcttaataaatcatctgcatcatatcaacctttccgtcaatggtttagtttatgtttgactctaacccatggcaatggattaagtaaagcacatgcaaatt

SEQ ID NO: 46544 - DNA, 584 bp, Oryza sativa
caatacaaggtggagcttctactgcctttccgcccgctggtgaagctgctgttgttggcgcctttccggtggctggtgggggtgttgcgactgatgccgcttttcctgtgcttggtggagcagggccacctgcagctgggacttcagctggaccgttgttgccttctggcggtggtgcaacaggaagtgcttcagtacaggcgactggtgggagtgctgtgtctgttgatgcgaaagggcaacccattggtgcttcagctaaggggaaggatgatgtgattgtttcagcggagggagcaatattggtgcttcatctgctgctgtgaaggctggtagtggagctattattgctttggccgatggaaaaggtgatagtacggccggtcctgttgcttctggtacaggaggtaatgtgctttctcttttgcatggtaacttgcatagtttggaacaacaaggggaggtaaacaaaggaaaggcaaaggttgaggtcaaagggtaaggcaaaccttattgttatagatgttatactaaagggcatacaatgcaggaatgttcttctaggttttactgtgagatttgtg

SEQ ID NO: 46545 - DNA, 791 bp, Oryza sativa
ttgttgtaagtatttgattaagaaaaaaattaaataacttataatatgaaatataacggagggagtactaggctgtgtttagttcagcgcaaagtttaaattttggttgaaattggagatgatgtgactgaaaagttgtgtgtgtatgacatgtgatgtgatggaaaagaattgaagtttggatctaaacacaactttagttgtaggttgtgattaaacaattattacactgacgtacagttccacgataatttagggcctattcagcaagcgccgcggctgtgcacagtgaatgtggcactgttcatgccggcagtcgcagcctgggcagcccaacaggcccttagttactaaatgaaattgtgtatattttgttgagataataatgagtgctatctgtaaacgaaatggcaaagaaaccggaaactgtacaagcaaaacggagtaactctggtaattcgctaagttacagcaggttattatcaatctcaatcaaatgataccaggtttatgatcacacgcatcagaagggaacaggagaaacgatcgaccgaggagactggagagtcgctgtaccgaaagaaaaagttgagtttgatctccagctctgcacgcgaacgggagagagagagagagagagagagagcagacagctccaaactcagttgacgaaagatctccaccgctgcgacagtggagagaaacagaagccgttccagaaacgccgacgaaaatgctcgggcgccgttcgttcggtcacttgttccgccctctgctcggaacgatcgacc

SEQ ID NO: 46546 - DNA, 1091 bp, Oryza sativa
gacgctataaacgtgtggtgtgttggttgttttttttttcatggctatatcctccaagggttgtagtgctgttctgataatacgaaacgcagtactatgttgtttattaaaaagaagcacatatctgattgtgaatgctcgctcgcacatttgtcatcgacttcggtattgtctgattgtctccgagcgactgggcgagagatgtagcggttggcgcaccaaccattgtccattgaacctgccaaccacgcctcggcgtcttctctcctcttctctcgccccgttaacttcagggagcgctacttgtacacggatgatcgacaagtcggaactactccttcacaagtcagaatttcgtactaccatttggcagcgattcgactactcctagttgcatacttgcaaccgagaggtacagtactcttctagctacagtatagcgagtgctactactccagactgcttctacttctctgtacttgcagggggtgcattgtggccgatacattcgtccaggttcagcgtgttgagcagatacgttcggtttagcattccagctgctagctccaagtcgccaacaccttgtcgtctcatcgtttgtcatctggtcaggtcgtcaagtcctgaactactgctgccgttggttttcgttcagacactgcatagctgcatactggcttgtcccaaaaagaatcaaaccttgtgtgtgacccagagtttgatttttttttatggaggggtacacaactgactatcgaccgagggtgtgtttagttcgtgaaaagaaaatttttaagtgtcacattagacgtttgatcagatatcagaaggggttttcggacacgaatgaaaaaactaatttcataactggcttggaaaccgcgagacgaatttattaagcctaattaatccgtcattagtatatgtgggttaatatagcacttatgactaattatggactaattaggctcaaaaaattcgtctcgcgattttcatacaaactgtgcaattagttttttctttttatctatatttaatactttatacatgtgttcaaagatacgatgtgatatttttgaaaaaaaaatttg

SEQ ID NO: 46547 - DNA, 744 bp, Oryza sativa
caggctccttaggcccattttcaggttctactctaaaagacagctcatacaagtgatcaccaataaccacatccaccacatcaggaatcagagatgggtcaagaaccaaaacttgtaagcgagctatatcataccttctagtaaaattcatatcaacagctttagtaattccaaggatggaaccaacagcccaaatgattaaatactctctcaattcagaaggaagacttttgcactgtacccacacttttggcatcacatatttcacctcattcccaactcccctttccacaatctccatttcagcctcaccaactttagtgtgtacattgccccattcgaccatacgacttaattcagctgcagaaggaaaaatagtatgaaaagtcccatcaccattatcatgcaccacccacttccatctaccaggtattaacctctccaactcagaaataatagaactcacagacatctgtcctttagtgaccttaaccaaagccgctttaggctcatgcttaaccctcattccagctgaaagaggtatatggaagaaacccaaaccatctctagtataaccacgtaactgagcaacaggtttaacatatgaccaaaaaattgggcacgagaagcaacatgatcctcactttcacaattctcccagtaaaacctagaagaacattctggcattgtatgccctttaggataacatctataacaataaggtttgccttaccctttgacctc

SEQ ID NO: 46548 - DNA, 505 bp, Oryza sativa
acatatgcttgcattgtactttctccatttcataatataattttttctagcattgacaacattaatatatatgttccccgcaaaaaaaaacatccatatatatgttaatgaatctaaattatgaaacggagggagagagtatatttgtttcgtgtaatttcgcaattacatgttcatcatggcgcccgtgcattgctggttgggaaaaggcagatgaaaagaaaggaaggaagcaggagaggagaccggtgctaaagcagaggaattgcacacgaaagtttcataatcaggttgcctgaatctaaaagcaaagggagaaaaaaagatagtacataaatcggtcaaaatcaaacatgatagtatatcactacagataactgctgaattgtgggtcaaaaaacaaacattagtcaggcgctgacgagtacctaacacaaaaaggatatctgaaaccgatgcacaattcattcctgcatctgctgcaacagtagtactgatcatggtt

SEQ ID NO: 46549 - DNA, 1665 bp, Oryza sativa
ggattaatcagcttcacttcagaactaactcttggtattaaatttagaaattgaagctttgctaaatagatcatgtatgcctctccctctcccgtccctacaatcatcatctcctttagacctttgctgctgatttgtttgctgccccctttgagagctaaggattctactgctaagcttcgacgccatttcctccgcttccaaaagctctggttagattaagcgccgctttcgcacgatcatgatcagcagcatcagcacgtgattcaattgctttcgccataaccattaactcgtgctgctgcaccaccaataggtacagtgtatcgctgattagctaggaggaattttttatggtacggcttaatgcaccgaagcagctagcaggagctagcaggactggacttttgttttttcacgcaaaaaatgatggttaaaaaaacaaaaggaaaaaaaactctaaattaattccaaagttaagcttatgcgccattctttttctgattatgatatatattttatctcagtttctgttagcatggtgttttatttgctaaatgatgcatttcgtacgaaaacattatatattaagttattttaaaaccttagataaatatatttttaaaatttataataattttaacttattaatcatgcgttaatggttttttaagagcaagtttaatagtataacccacaactagctccaatttatctatagctaatctaatagccaattcatacaataattgcttactatactattaatatatgttcccatctgtcatacacacactgtgtcttggagtccgtactacagctggctacagatctgtagtccgctcctcttctctctcattttttatctcattaaaatatgtttataacctgctattgtacctgctcttatactacctccatcacaaaattagttcattttttcacccgtcacacacatataccaatacaaaagtaaaaaagactaaaaacatctactttatctacttccgatacaattattctctatttttataaactttgatgcgatgatcactctaaaaataatcttattttgggataaataaaatgagctaaaaataaacttattttgaaacgaaggaatgtcctaaaacggcactgacaagtgggccccaccacggcatcgcgccacgcaagcagggatgtgcacacaactcaccgcgcactggtagcaaaatagactcgtagcaccctaggatgcgtgcacggtgtcacacacatttacgcgcgcgtactacaactactatagccccgctcccttgcaagctgtcctcaacaacctccaggttggcacgatcgcctcctcctcctcctttcgacactacccgacgcgacgcgtcctcctccccctcgcgtatatatacgcgcgaccgcacgccgcgctccacgcccaaccccgaccacgagtccccgaccgcggcgcgcgctcgggtcggctcacccaccgccgcgccgcgtccgacgacgacgacgagcattcaaactgtgagatgggggcgtgcaacttctgcgaggcgacagcggtggcggcggtgaacgggaggtcggcgtcgggggaggcgacggcggcgagggtggtgctggcggacggcgcgctgcggcggttcccgggtggcaccagggcgt

SEQ ID NO: 46550 - DNA, 3137 bp, Oryza sativa
agctcggtaccctgtgcagcgccgacgggctggagctcggggccgcggtggcggcggagggcggcggcgacgactaggagctccagcccgggcagctctacttcgtgctccccgccgctatgcggcggcgggcgctccaggcggaggagatggcggcgctcgctgtccgcgccagcgccgcgctggtgggcgaccacaaccggcccctcgtgttcccggaggccgccgcctccgccgccgatccccgcgccgccgggaaggggtgccgccggtcgaggacgaggcggcacagccgtggccgcgacttcgtgcccgatctcggcgccattgccgagtagcacttgaacccgccgtctcgaagagaaatcgatcgagctaaactagcccagccagctcgccgcggcgggaagaagaaaaaaaaaacattagattagttacgtgtaaactgatcgattgatcggaggagccattgaccaaattaagttaatttagctaggaggagaggagtgtagcttagctgtcatgctgtagcctgtagctgtaggtaagcacgcaccaagtgtatatacactacgtgtacatgcacaaccacgtatgtacatgtggctcgccacggtggttgagaaagccaaaaaaaaaaaaaaatctgcacttgattttcccgacccaacaatccgacgcctcaagcctggatccctgactcggggggcccacatcgtcagtgtcagcattcagcaagacccaattaacaggataactactgtgctgatcgcgtcggcatgtgatgtgagtcacccttggacgatcgagacggtgatacgatcatcaatctgtatctatctagcgtgtggtttggatttgttaatgactcggaaatggagacatagccgacgacgaggagaggcggaggcggcccgacacggggagacctttttctcggccgcgcgcgcgcgcgcgcccactgggatggggatgggatccgcggttgatggatgggtggttcgccgcgccgcgcgcgcgcgacgagcggcaacttgcagcttattttgcgaggcagctaaatgatcgatcgagctcggtgcttcggttgatcgatccgatcgggtgggcgcgcctaactcattccccaactgggccaagggagatacgcgttctgtacttctgtggcgtacgtgtgtacatgttaaggctagctgttaagggtcacgattctaacttacaaatctaactgtaagaaattagagtttgaagaagacatatgaagaatatagctctacttttctaattcattttgttaaagcattttagcttgaagtagcttggagctttaacaaacagaccatccaacctttccttcgttggttcccacgcgcatacttcataagcttgtgtgttttacgaaatttttctatagaaaagttggtttaaaatatcatactaatccaatttttttagaaaaaaagtcaatactttgttaaatatgtgttaatccactactttgttttcgtgcatagagaatgagttatcaactactacaaacgaacgcaacctagtcatatatagaaaaattaatcaaacaaaaagcaaatatttacaggtaaaacttttatatttatgtaatttgtggtttaaatacaaaaccttaactgcaaaatttaaatttctactagttgataagcttacggacagacaatgacatgccattaacatctttcaatataaatcctgtaatgctaaataaaaagcaaaaaagatattgctaggacaggactcagtatgtcagtcaacttcagccttagacttgtccaataaacgactgaagatgttgactaaatgtgttatacatctgatgagacttgactcaatttgttaggactctacaacatccgaattctttagaattcttagcaaattagataagccaacgaatctgatcgagtcaagtgggttaacctgcatgttggtgctgcagagataaaactgagataagtgcagtgcatatatgccttcgttctttgctgagctttatatattcgaacgagattacgtagctagtgttctcaaaatagattacatagctagacttgtgtttgcttcttacgcatgcccttttttttactccgtcacgtcctgatcgccacgcaggcgtatcacatatatccattggcggaagcgagtttcagcgcggggttttgtcggaatacattctattcccaaatcttttttcgtggacttgacggttcgaatcgatctcgaaccttgacgccacagtagcacacagaattgtggtcggcacttggcagggaaaatttcgcaaaataataaaataaaatccaatgatgtagctactgttaagctctaatgaactcactttgctaagctaaaaaagcctcgtctttcactcaggcttatgcttagcggtcaaaatttaatttttctttttttaaaccccgcggggtgtatttgtattaaagtagagggaaaaactgtacaatagcccagggggctaggagattacaataagaaaggaaaaagaaagcaggtggagggaggtgcagctacaaaggaggggtgcagctgatgagtctaatttacgtaatgtcggttatgcttccatggttgtgggtcgttagacattggatgccctttgccccgcttacacgctagagccagatctcgtcgatcgctttctcaacgattccctgcgtcgctgtctctatgttcttgaaaaccatgttatttctctctttccagatttcccaggatagtaggataaggatcgatttggcacccttccttttctccttaggcattgtactaacggtttgtgtccaccggtcctcaaggattgtcgttttagaccagttctgtggtcttagctgaggcatgccgagccttgttgctatggcatcccagattttccttgtgatcgggcattcataaaagaggtggtgtgccgtctcgaggtttctgaagcagagctgacagaagtagttatttggccactccctctgctgaagtcgatcggccgtccaaattctgttttggaggagtagccaggcaaagaatttgcacttcgatggtgcccaacatttccatatcatatttgctgataccgacggtatgccccctaggaa

SEQ ID NO: 46551 - DNA, 2354 bp, Oryza sativa
cggaacgcacgctgcatgcatactgtaacgcgcgccgtccaagcttagcttggccatgcacagggtacggtgttagtggtggacagcgttgcagatgttgacctcatctatctcaccactccgccgagagagcgatgcctcgacgggaggatgacatgattcaggtggctagctagcgagtactctagttgaatactactactaccctgcttgcatctgcatggatcggcaagagtataccctgtttaattttccgagattattttacggtggaaaaaccaaaaatttattttcaaaagttagtcttttcgagcagagggagtactcctaaacatctttagggaagacgtaatgtgatcgagaaagatactggtatactactataactgaatgggaaggtgtaaggtgaaaggtgaaagggagtatccaacatcgtcgaacaaacgtgttcactcagaatgtacgactactactttggctagctagtgtgtcgcatgccaagcgtacacgtcccaggtatggcggacgcaccacattgtcaatcagttcagacttgtgagtcaacatcagaggtactacttaacatgtgatgtgaaattgtgaacaatggtaagtttcacacacacgcggggtgggtgcaactgtgcaaatgtgctcagattatgcatttgtcgattctgacaggggacggtcgatcagtcacagttttctgaatggtgctattacgggtatgcttgggtttgacttgaagttgggccggaaatgtgagtttattggaccctatcacatactcctatacaatctctacgaaagcgcatgcatgttcacaaccattgccaatttgccatactataatgtactacagcatagtctctccgttcttaaaaaggaaaaaaaaactaatttctatgaatgaatatatgattatccagattttcatcctaaaaacttattcttttttatatgaagagcatagtatacactattacaacactagcttgagaatagactaatcatatcatgacggaaacctgaatggtttgttgtttatttctactgttgatgaggttagggtacgagaaacaagaaaacaattagcatataattattttatttttaattattataaacttgaaaatatatttatctaatattttaaagcaactttcatatacaaagatttcatgcaaaatacactatttagtagtttgaaaaaacatgccaatgaaaacaaagttaaaatatatcttaattaattggaaaagaacatgtttaatcatcaggcgtgcgatgcatacttgatccaacggctaaggaagtactacatccgtctcaaaataagtgcagctgtggaaatccgtgtccaacgtttgaccatccgtcttatttgaaaaatttatgaaaaattttaaaaaaattagtcacacataaaatactattcatgttttatcatctaataacaataaaaatagtaatcataaaaatttttcaaataagacgaacggtcaaacgttggaaatgaatagtgcaaaacgaatcttagctatgaatctagacatgcacttgttcacgtagatagctagaattgattttttttggacgtagggtgtacgctacagacagtggacgactttttgttgattagaacaagatttggttagacttataaacttctgacatgtaattttatgtaagaaatgaatttgtaaaatctaataagttatgatattgtgataatactttttatacaaatttaaggaaaatatccggcggaaacgtgaaaattaacctatgaaaattagatctaaaaattttatacatttataaaaaaaattatgtataaacatgatatggacgtgactccggctcgggcgtccgatggaaggagattaaaatcgggcgctgacgtcagctcccgatttacgtgcaaaactactttaaactattttttttctcttaaattacttatccaaatcatgatccgattgctccatttgaattcgtttcaaaacaagaccacacatggatatattccgacaaaaaaattagcttattattgaattatttttaaatgttgcacgatgttccaccaggtatatcggagttgtttcactaagtagatcgaaaatgtttcacacgtttaaatcgggtgttgtttcaccttatataaaacaatgtttcagcaaataacaaagaatgtttcaattcactgcaacattagatccatacatagtgaaacattgtgagtacactaggtgaaacatttttggtgaaataaaaaataaaatgaattcccttaatagagggttttcaaaatatgtgggtgatttgttgcaatggaatatttcagttca

SEQ ID NO: 46552 - DNA, 639 bp, Oryza sativa
cctctctctcacgaagcggctcactatggtgggcgacggtgacggcgccctcctctccgccagatccggcggttggggaggcaacggcgtcgacggcggcgtcggcgggcttcggctcccacgggcgacggcggcgggctctccaccgccagatccggtggcctctccgtccgcctcccctcgcctgcctctgcctctcctccattcggcgagcagcggtggccgacggtgtcctactgcttccgcctccggtgagcacccgtgccgacttgcatcctcttttttctctccctccatctcgttcaaccttaaccctatcttcgtttctagatctggaagaagctgatctagccgatggcgacgcgactacatgatttggtggtttttatgatgtttgattcaatgatgtaaaaatctgatgaacatttgatacatgaacttgttgttgatcatatgatgtgtagttttctctttttttttcttttttttttgattttgggaaccggcaccgaatgccttctctgtagtagtgggtttttttttgcgattttgtccatcgctaaccaaatcggattgggatacgattgacggatgaaaatacggaccaatcggagggtgacgaccggaaaaataccaata

SEQ ID NO: 46553 - DNA, 738 bp, Oryza sativa
agaagggaagccaggccggcgaggaagggaaaaaagacttgggctggaaacggcccaaaggacatggacggaattttaatttggtttttaatttaaataattgattaaatgaactttgtattattgaaattaccactcgagcactgaaaattcacgagaaatttcaaagagtactttatggccaactatgatttttaaagaaaaatttatttcccacattaattttactttataaattgcttttaattttaacataaattatagaaatgatgtactatttgatttttaacctcgaaagaaaatcaaggcataacattcattttcagaattttatagctacatgttcctagaatttgagtgacaatctatattacctggggagctagagatctttggagaagctcccataaacataacctttgtaaaactgaacaactctcgaaaagcgctcttaagcggtacctctatttctctataaaaaaccaaataccactgatgaagtatatattgctctcgtcctaaaattaaaaaaacaaagctttgttttttctaaaaaaaaagttccattttccaacttatattctctcattttttatgtgcatatttcccgaactgctaaatgatgttttttctctctctctctctatatatatatatatatagcatgtcaaaatgaaaagctatccccagaaaacaaagaaaacgaacttaggcttgattggctgaagctccatgtca

SEQ ID NO: 46554 - DNA, 1541 bp, Oryza sativa
caaacattttgaaacggagggagtagttattttacaattacacttaggctgtgtttagttcacactgaagtttgaaagtttgattgaaattggtacgatgtgatagaaaaattgtgtgtgtatgaaatgtttgatgtgatggaaagttgaaagtttagaaaaaaaaactttagaactaaacagggccttacatgctagatttttggaagaaagttttaagacaaagctagcaactgctcgcgcggcggctgcgggcgggagcccacaccgtggcgcgcatcaaactcgcccgctaggatcttgcgtcggcgcgccgttggacacttggacttggaagactcagctagcagctggccgatggagagctggtcgctggctacttggctagctagccaatctctccctcctacttgcaagctgcctcctccgacatggaattttcctgagcgagaagacgaattgaaagggggaagcttgatgacttgatgggcactgggatgggatgttctgccgatcacaatccatcatttacgtcgtgcttgctttgattgtcaaacagtgccagacgatgactctgctgatcgatcgcttttaatttgtgatctccaggctgtatgtattactgtacactacagcgctcatgctctctgtagctctctcgtcttaaagtcagcttcaaatctacaactggataactgcttacagagtaactgagagtactgtgacagcaacaacatcgaactggaaattcaaggcgagattgttagaatttatatcagatatgtatatatacaaaattagatataaattaggacttgagtgttaaagatatagaagtagaattaagactcttaccctaagctctctcttaaatagagtggcgcataccacacataatgtaatcgtatgataatgatagcgtaagaaaaagaaataaatggccagcaacgtaatcagtggaaggtcattgataccttgatagttatagttaccatggatagaggaggagcatccgtaactagtgctctcggatgtacttcctccgtcccaaaaaaaggcaaaccctgagtttccgtgtctaactttgactgtccatcttatatgaaatttttttataattcgtattttcattgttgttagatgataaaatatgattaatattttatgcgtgacttgtctttttaatttttttcatattttttttcaaatcagacagatggtcaaacgttgggcacggaaaccagggtttgtctttttttgggacggagggagtaggtttcgtagtaactttgtgcatcgttgttgtcataaaatttgaattttctaagggatttttcctgtgtttggttgtggacgggagttttggtgccaattttatactccctccgtttcgaaatgtttgacgccattgacttttttaaacatgtttgaccgttcgtcttattcaaaaaatttaagtaattattaattattttcctatcatttgattcattgttaaatatatttctatgtaggcatataattttacatatttcacaaaa

SEQ ID NO: 46555 - DNA, 1197 bp, Oryza sativa
actcggcggcgagggcgagcggcgcagctgggacttggccggcgtgggcgaacgcgcggtctcctccccacccgttgcacaccatgccaagagagaagagagagagacgaggaagggagagaagagggaaagagaaagcttacatggactgtctgatatgtgggtcccacgcgggtcccacgctgactcaaccgccacgtcgggtaaaaccgaggttaaaaccaccgaaggacctagagtgaacggttttgtaatttgagggatgccacgtaactggttttgtggttgggggacgattttgtatctcgatgtcaggttagggggtggctagcgtgcgcgtgcactccccccttccctttagtcttaactatatatgttaattaatatatttaacactaatgatagtagttaagaaagattttggagatttttttactaacagattaaaaaaatttaagttagatttgaaaactttcgatttaagatttaaattttaaagtcaaattttaaaaactttcaactcagatttgaaaactttcaacttgagatttgaaatctttcaactcagatttgaaactttcaactcgagaatcgagattcgaaaactttgaagtctagatttaaaaattttgaaaactttcgatttgagatttgaaaactttcaactcgagatttgaaaactttcaagttcagatttaaaaattttcaactctaaatttaaaaactttcaaactcaaaatatcactaaagataaaaaaaatcagaaacaaagtgagaaaaaaaaggtaaaaaaaaaaggaaaaaaaatcgtaaaggaggcgtgcgcgcgccggcgcagcggcgctgggcctgactagtttttccggacaagttgagggacctttggtgtacttttttcctatctcggaaaggaaagcccgcacgaaccccgcgcatagcgaggcccacaatcacggcgcttcggtgtcctaaccggcagcgcgcctccacccgcggatccggccgtccacgcgacggagccccgcgcgccgcgaagagccgcggtgtcacgcccacgcgaacggacgtggcctcccctcctgcagcggcttcaccggcgagagcgacgagaccacgtcgtccccgctcccgcctgagtccctccctgcgtccgctactatcatgtccacgtcgtccggttcttttttttttcctccc

SEQ ID NO: 46556 - DNA, 620 bp, Oryza sativa
gactcggccagcttgggcgagcggcgcaatctccttcccactcgtcgcccgccatgctaagagagaagagagagagagagagagacgaggaagggagagaagagggaaagagaaagctgatgtggattgtctgacatgtggggcccacgcaggtcccgcgctgactcagctgtcatgtcggacaaaaccgaggttaaaaccaacgaaggacctagaatgaatagttttgtaagttgaggggtaccacatatcatgttttgtggttgggggacgattttgtatctcgatgacaagttgagggaccttcggtgtactttttccttctgagatattacaacaccaagtgggctgggcctccctgggccacagtacagtggactatggccttggttgacattggattttaggcatggatcgtgcaaaatgaatggaaaaagtacgaattacacccccgaactaccgcgatcgtccgaattacccccttgaaccataaaaccggacattcttcacccccaactaggcaaatcggacgaattacccccctcgaccgaatccgcggtggtttttgtttacgtggcgtacacgtggcagtccagtcaaaatttttttcttaaaaaaat

SEQ ID NO: 46557 - DNA, 647 bp, Oryza sativa
cgatgcaggacttcagggtgcgcggcgccgacagcaccgtacacgtgcaagagaaggttgagaactcgttgagaagcgcacgcggagtgccggagacgacgacatactccagcataataacgagcggccggcgtttgcctcacgtgccagcggaggcccgggaggaccaagaaattaaccttctggcgccgcgcgcacacgtcgttcgtccgtcgcctcctgtcacctgcggcattttacacatcctcgtcagcctcacgcacgcccagtcgcccacgcgtgcggtcgatcgttccgagcagagggcggaacaagtgaacgaacgaacggcgcccgagcattttcgtcggcgtttctggaacggcttctgtttctctccactgtcgcagcggtggagatctttcgtcaactgagtttggagctgtctgctctctctctctctctctctctctcccgttcgcgtgcagagctggagatcaaactcaactttttctttcggtacagcgactctccagtctcctcggtcgatcgtttctcctgttcccttctgatgcgtgtgatcataaacctggtatcatttgattgagattgataataacctgctgtaacttagcgaattaccagagttactccgttttgcttgtaca

SEQ ID NO: 46558 - DNA, 845 bp, Oryza sativa
  unsure (1)..(845): unsure at all n locations
agctatatctagtctgatgcctgaggtcgactctagaggatcccatggttgcggttgaggattacattctttgtggttttcttcctccgccctccaagtttcttctccttgtcttgaatttttatggcctttccttgctccatctgaaccccaattccatcaccttcctcagtatcttctcttatctttgttaggcctacattggggtagagccatttcttggtctctttcgcttttactatgagttgcgctggatggaaccgaaaaaggtatccagatgtgtcggtttccgacttcgggatggcctgaagtcgcgatacatccccttccagtgcccctcttctcgtagcaaatggcgggcgaggtgattctatctccagatagagaactcggatccagtcttttgtgttcctgaggagcaaccagacaagattccggagtggaccgccaaacctgccctaactccctcccttcagtctttcatcgacattatcgatgacctncgagtacgcgggttgttggggtatgaagtcgctgccgactttcatcgtaggcggatccaaccgctccaggcccgagcccatatggcctttgattattcggggccaaaggacgcgacccgggtttctcctcggggtatttntcttgtatttagaattcattctttatngtgcatgtnctnctgacttatcgagtgcttgttctcgatcctacaggtttgaacagcgaaatcgtggagcgccgtgccagtcaagtgatgatcagcggtcctacaacggngaagcacaatcccgtncccattttgcaagaaagggaaggncnantgcattggctgcgaacaaaag

SEQ ID NO: 46559 - DNA, 1335 bp, Oryza sativa
ctgcctagctggagagtcgaggccaaataccatatagatgtagtgtgaatggccttaggttgtattcttttcccctctttcctaactcacttttatcattttttgcgcgcgtgctcttcaaactgctaaacggggtactattttgtaaagtttttttatatgaatgttgctttaaaaaattatattaatccatttttcaatttttttaggctaatacttaattaatttcattataatcatgtgctttgtttttcgtggtcaggaggcaaccttgcctcccgaacgtagtcgagttgtttcctagagttgggcttgtcctgttagttgtagtcgtcaggcttccagtggtctgcgttttgcccggcctgccagccatggataccctcgctgagtttcttgtggtctctgagacaatgcgctctgcgtagactccagcttctaggtgcatggcagagttgcaggagatggaggtgttgtccagtcctccatctctctattcatcaacaaggtactactagcctcctaccttccagtgatcagccttctttcttacctccaaattccaatgatggactttcaacaggcaagtgaagattgaagattatgcaaaaaatgccacagcctccaaatccatgaggtctcaaaagggtttgcaactaggccttttttttttttgctggtggtcttgggttctctggtattgcatcgccatcatcatcgatctggtcggagcataggaataaatagagataattgcttttttagaattttggagcccttctttttatgtttggtgtgcaatatcaaaattgaatggtttttcggagcttctttacaaatctagctatgtacccaactagctttaataaataataatattctgaggcctttagccttaggcctgtttttctttaaaagaaaaagggataagacattctgagatctatttagtatttgaggtgggttatgatagatctcgttttgcactaaaacttgtaggtattttggcccttggcaaacttattttgttttaatctaatctattttgcaaaagatagtatttctgctctttgataatattaggagattcatgatagtggggcaatataaatttgaaccttaattttcacctgtgtaattactataaaattgtaagatttcatttgacatcaacttaaaaaacagacacaacatagtaactcctcatcagtttgttgcaaatatggtgtctctaattaatttattgttattccctctagtcaaaagaacatgttagtgtgtacccggggtaccgagctcgaattcgccgtatagacatcggatcaaaaatcccag

SEQ ID NO: 46560 - DNA, 1320 bp, Oryza sativa
tatagagccacacacaacatccacatcccaacgaaataccccagtgaccacagctcacactcatcttaacccattcataataagctagacactactggccggccagctagctgtggcctctgggctctctataaagaagaaagagtatgttgtgtatgagagagagagagagagagggtatgaagaggagaggtggtgatggagggagaacattagacatgaaggatgaagagacgtcgacgatgaaggagcggggcgagatggaagatctgtgctcaaggcttgtctctctcattccacaagactacttgctgctggaaaccacctcacagcaggtactgtaaattagcaaaactttttacaaatttatatcctgctggcttatatatatatatgattagactagaaaaaatgcccgtgcattgcgacggatgaaggttatttttattttattattgttatacagtttaattaagtgaacttcattgggggaattcgcttaaaatcatgagttgtaattagagtccgatcgtctcaagttagcatgcgagtttttttaagagattttttatagatcaactcttatgtatttccaaaagcaaacaaacttaataaacgactcaaatacggatatgtatttctaaaagtgaacaaacttgaaaaccgactcatacacagatgacgtaccaaagtactggcaaaaacatctttaatttttataatagtatagatgtagatatagaagaaatagtgcattggtgatacaagtcgggttagaaagccgggttaacgaataatctgatttccaaaagaaatgaaaaagaattagctgctgctgctctctctctcgtttgcacttgtttgatcattaaagagattttacatacacaaaacaaatttttactacatgcaatctatgaacgtttttattataaggttgagatcaacagaatcagttaccaaaaaagaaaaaaagattaacataatcgggtatggattctacatggtgagatattaaaaaaagaaaaactatatatggagcatttatgtagtttaacatgcgtttttcacgtcatacaagttggagaagtggggaaacattttttattaggaagggatgtggtgctaattatgtactcaccaaacaatgtcttcttagaattttgactagtatgggtcctatctgggcatatgaaaatgatataaccaaatttatcatggaaattctttcatagtacctaacttgtccagatttgtgcaagaaaattcgatggtgaaagttatgttatgttgactatagaaaataaaatattagagcaa

SEQ ID NO: 46561 - DNA, 805 bp, Oryza sativa
atcaatcctgatttagcatatggtgtttgtctttttaacctctttaatgacgtgtatcgtttaaatcacatatttttttaagatctatttgcatcattgtactctactcaaaatataagacaaaacgagatccatattgaatatattcaaacatttcattacttgtaaaggtaattaatttaaattgtagaagtaactatctacaccctccgtcttaaaatataacaacttttaccccttaagatttgtcccaaaatacaataccttctccaccaacattcttttcccaaccaatcacaatcctccacgattcacttttctcacctacctccactactcaaccaatcacaactctccaccattcacttctacctacttttttaataaccgtgtccaactctaaaaatgattatattctggaatggagggagtataacattaggagtaattatattatgactgagttgaaataagaaactatatgaaataaattcacaagcaaagtgtagagaagatttgcaagtaaatacatttatgagagtaaattcaataaagtctgaaagtaatttacaaaaatcataaaagtaactttatacaaaatggaagtaggttgttacaatatttttaatgtaaacccgttgtagggataataatatgagtctatctagaaattaaatttaatcatcaccaattatggaattgactaaaaacaataataaaagtgatcaactcaaagcattatgaatgtataagaagtaatttaatcaaatataaaagtaatttatatatatgataaaagtaactt

SEQ ID NO: 46562 - DNA, 795 bp, Oryza sativa
  unsure (1)..(795): unsure at all n locations
tttaggctttactgaatttacttttatatgtataagaagtaacttagtgaaacctaaaagtaatttagacatatcataaaagtaatttgtgatttttcatcaaaatataatcatgtgagatcttgttgtaaagatttaattattacgaacacaacggtgtaatcggattgtaaatcggatgagtaatttaagagaaaattttatttgaagtatagatgataggaatattttccctacttgctcaatggattaatagcaaccaaaactcttaaagtactagcacgtggggcgtctctgggtaagactaattggagaggtttctccaattagattttaccttatctaaagtgtggcatggtcagctttaaaattgtgacactggatcctaagacttaaaaacacgtgacatgatatagttgtacttaaaaacacgtggcatgacatggttttgatagcgaaacaaacatacacaaaaattatggcaacaaactagctgattgcacatgagtgcaaacgtttgtgcgtgagcccagcgccagccgcacgaacatgttgcccagccatcttctctttgcatggtcgagatattttcgattttggtcctttggagtgggccatgaaaggccgaaaccaagtgatggaccgataagtagcgggcctcatgacacatttggcatgtttggcttttctccctctcttttcattttgctatatatttgncgataatttttttctcagatgccaanttacttacacagtaacttgtatataacttttaaaaatctctccataaca

SEQ ID NO: 46563 - DNA, 877 bp, Oryza sativa
  unsure (1)..(877): unsure at all n locations
agtgatgttaacccnattgnatagacccactcgngcangcctgcaggancgactctagaggatccccgacttgtatgatcatgtatagacaaacaaccatgtaagaactggtcatgtaagagttctcgccgtgcgtattaaccaatcagaaactaagttttccaacttcacggctgggggctagggtcagagctttttcaactgaggtaggtcaagggtccaagagccttattctccgagaacgtttctccgacgacaaggctgggggcttgggagagtgtatgactcaagtgactgatcgaagtcgcgaaatgagaaaacactcacacagcacatccagagtaagaaaacttagttagatagatcccttttctatttcacgagtacttcttacaattcataattgctccaaaatatattacacgtctccttgagataatttttataggatataaagactaccaggaaggccaacgccagtccatggactggaagactttctctttaagcggtgccatcgacttcgccagattatctatctctgcgggagtcctccgagaacgtgaaaacccttcgtggaggaactcgaggtgcagctgcgggcagtgatctcggatacaggccagcacgtgccctccagcatatcggctcgatcgacgacactcctgcttcagggccctggatgatacgcttgccgatgccttcaagcttgacgcacgccccgttcaaccacgagatatacccaccnccccgactcctccgggattccaaccggggnacctcggagctgctctgcagacttccaaccatcgcttgaacacagcttctgaaggtccgagttgaaccaccacctcgcgacctctcgagagcttccccg

SEQ ID NO: 46564 - DNA, 1107 bp, Oryza sativa
tttggatgtgcccagatgtgtgattttgatgatttttatggtttgtgaatttgtaagatgaatgcaattgcaacgagcaatagaatgaaatatattttgtttttttttcattggtaatctacggcattgatgggtcgcattgggctacccgttacaggtgagacacctatgatgggttgcaatgccaccagtcaatggggtcaacatcacctttgacgagtaacaatttgcaacccgccagaggtgtcctatactagtgatgagtcttcacctgttagagatgagtttagtcatcactaaacactcatctctaactagcaccctatcggttagaggtgtcgatttgtgtccatatatcattgatgacctgaaccagcatagcgaattgcgaatttttagcgagtcatgatgtgtcatgtttgcatgttaagtctagagctactgcgttttaattatatagaagataaaaatatcgctagaggcaatcgtgttcctctttaccccctatcacgaacagcacaaaaaaccttcgtgagaacccgaaccggcctcaccttccaccctaccaccctttttgaagattaaccaacctatgaaagcaaataaaaacaacttaaaacctataaaaccattattttgtattctttcagatccgttacaatgcacgggcatagcactagttcatatgtaagaaaaagataaccaatggtagttgatatcctgtatgtatcttgatgccttgcaagtaacataaaaaaaactgtcatttattactaagaataagatcaagaaggtcctctcgtagagagagtaagcacaacttctacatagcagctcagctgctcaggtgaaaaagaagaaaatgtttccactcgggagtaggcctgccactgggtaatcattacccattcccatatccatacccacattatttagataaggtatggataaaacaaagtttacccatttaaattttggatatgaggagggtattatccattttacccactttgtccatacccatttgttatgggtaaaactcggacctaaaatttttaaactcaggttcacattacaaaatcttatcaaatttgattaaaatttgaa

SEQ ID NO: 46565 - DNA, 1335 bp, Oryza sativa
aatgtaaacttggatgggctgattctgtcattaaaaaacttgactagttaagttaatctcacttcgcttttttattttatttttttcttcccctgggtttgggtggggaatatttcttggtgatggattcgcttatgctgcatgtggcatgtggtgtcgaccaggatctcgattgattctcgcgtcatggtcgccggcggggcggcctacactgccactgagctaaaccaagcgatgtgttgggctagctcctgttgttcttggtgaccctacaattatatttttctcaaaggaattattgcactagccgtacttgtaaaagctttccactttattcatcatattatgacaaccatttgctccacgtttttagaagtaagtgctaccttcgtcctaaaaagactgcattttacacagttcatgtttaatttaactgtccgtcttatttgaaaaaaaatatgattagtatttttattgttattagataataaaatatgaatagtactttaggtgtgattattttttaaaaaaaaatataaatattttagataagataggcggtcaaacattggacatgaaaactcaccactgcacttaaaataggacggaggtagtatttctcaagaaaaacaatttcttctactatattggttagatcaattgttttaacctctttattaggtttatgtctcaaaatatttaatttattccttcctatatttaaagtagataattcgtatgaataatatggtgagtactctgttccaaacgttaccttatgctagatgcaatgtgaaatcgaccaaccgctacgtaactgaacagagggtgatgatttgttgatctgaacaaggattttgtccacttttacctagttccattaatatgggtggggtaaaatcatgtgcgtgggttgcattgtttagttgttctttccatcccatgttagagatattcttgtttaactttttcagatgatatgattatattaccatatattatttattgtgagataaagggttgagtatttaaaacaatcttcgactgccctaggtgcaatgtgaaatcaaaccaacagttacataatcgcaatgaatgattggtgggttcaatccaccatttgtttttattttacctagttccatgaatggcacgctacaagtaatttagttaatgagtagcataaatcatatgtgtggggggtttcattgtttgttgttccttccatctcatgccggagacatttttataggagtatatagatttcacggactacatgattatattactatatatcattcatcatgagatcaaagttggagatctaaacaaatt

SEQ ID NO: 46566 - DNA, 641 bp, Oryza sativa
  unsure (1)..(641): unsure at all n locations
aagaaacatattttctaatagaaataggcttaaaggtactggaattatggtatnttcaatgtttaatgcatttttaaatanctgatctttccttcttcatgaaagttttacattcggataaatttaaatgtaaaaaatttagtgtgtatccctctcatagatccgtatgtataagtcaagtgaggtaccaagtggcatataattaaggaattatcgagtactcactttgtccctaaataagtgttaatttagtcaaaaatttatccctaaaagaatttagctttagagtggtgtagtagaccactttacatcattttctttttatttgtagtcattaactaaaccaatagtgttccttcatcctccttgttttcttcccctcctcattttctcttcatattagtaataaatgtgtcagagttacggataagatataccctttacccttggatgtatgttgtataccgatacggtatacctgcgcgtatacagatgtttcctgtaatccgtcacgtaacagaaacggagtccacggatgaaaggagtcctactcggacagaactgggtcgttactatatcgtgtggggtccgatatctccgagttctacttggagatcaactgacccgcggtataaaaggga

SEQ ID NO: 46567 - DNA, 725 bp, Oryza sativa
ccgttatatgactcactactatgggcgaattcgagctcggtacccagcttaacatgcaagtacgtcacattaccacccactagtgattattactattctaaagcatgttaactctcatgcaagcatgatacgtcatatagaatataatattgtagagctcaacatataaatatgtcaaatgatcttccttacacctttttcacaatatttaacatttagcatttctataatattttatattcatccatatattccagaacgaagcgcgggtatactagcaattgtaaagaagaaaaagtttgagtcaccacatggcacacactaagattatttaaaatatactgaatcattttgtgatacattgtagacattgatataaactgatagcatccaaaaaattaaaagccttgaaggtgaactcaaattgggctagtggtattttcttaataattttcccatgcaccaaatattttttaaaaaaatatttcaaattttaaagcgcaagaaattttattgctttagttaaaaccccatatttcaattttattaattggtctattcatggaacctttcttttagttcaaatattaaaagccttgaagatgaacatgtcgatgggctatacatcactaaatacgtacctatatatatgccatatctttaaagacgtaaggaacagctaatttgaggatataaatgaaactgagaaagagccaggagacatg

SEQ ID NO: 46568 - DNA, 1490 bp, Oryza sativa
  unsure (1)..(1490): unsure at all n locations
agccgttgggcccacactactatgggcgaattcgagctcggtacccctggtgtatctttgtaatttgtaattattttagcaaggtgaaattatagttattttcatttgtacaggatatttcaatctataccaaagttaaaagcttggtactagaaaataccaaatcatctttcctaagggcccccttgatttgttggaaaaatgtaggaattttggaggatttcaatcctatggggaaaaaaatatcctatgaaggtctttgaaacaaatgattgaattctatccaattctttaaaaatcctatggaatgggtaatcatatgtatatttggaaagttagtaagaggtttaactttttggaaaattttctctgggtctatctctctcatctgattcccgtgtttttcctgtggtccaatcaaacggttattcctgtgttattcctgtgtttttttttttgtgtttcacaatcctctattttataattgtattccttttagaattatgtgatttttctattcctctgttttttcatccttactattcaaatgggtcttaaaccagtagcagagtgcatatatataatggtcaaagaacgaacatacaagtattgcaatcaaaatcagtcatggcaaaagaagtatatctctaccatcttaaatgcagagttctccactcgtgcaatgtgtatgcatgaaaaagtaaccatcatctctctaattatatcagcttggcctattaacatgcgagcttttagtctacccctaatatctactattataaaaattaaaatatttttaccagtactttggtagatttgtatttgagtcgggttttaaagttcgttcgcttttgaaaatacagaaggagtcgtataagaaatcatttttaaaaaactagcaagcaaactcctaattaccgctcatgattttttagaataatatatatccaagcgaattcctacagtgaatttcaacttaactaaactgtgtaccaataccaggattaaaatattaaaataactttcacccgttgcaacgcacgagtattttcctagttatatcaatatgcgtctgatccattacaatgtgcgggcatatatctagcaaaagtaaaaaaaaaaaaggattgtttgcaattgtgaggtagaactagttcagtaattcaatacgcttgctagcaaagcttgctttgtttttgatagttgcggcatgtcatgtcctgtcgtgattttttttacagggagtaactatatttacggcgtcatattttttataaaaaaaatagtcgacatgtatttacattataagtccataaattacatatgtgattttagtgcatctacaatgcaagtcctaaaattacatatgcaagtcctaaaattacatcctaattatataactaagtgggggtgtaactatggtgtaaatttatataaatagggtaccgagctcgaattcgcgtgatagtcatcggatactcactngcact

SEQ ID NO: 46569 - DNA, 1059 bp, Oryza sativa
  unsure (1)..(1059): unsure at all n locations
ttattatattcttaagtatggcaaaagaaaagtattgaccttgtataattaagtgaaagtatgcttcggttacatgagtataattaagtgaaagtatgtgaaatgtataatatgtggccttaaatttgaaaattcatagagacaactggtgtattttaccatgaatagtacttctctcttttttttttcggggatatgaatcgtacttgtcaaagagaaaattcaagccacagtactattaatgagattgaagaacactattaataggaaacccattagaaagctagcataatatatcctgatagtaccggacaataccttgtgctaactcgtgatgcttcactgagaagtttggtactggtcgagtactacctttactcttttagcattaatatttaatatattcttaagtattgcaaaagaaaagtattgaacttgtataattaagtgaaagtatgcttcggttacatgagtataattaagtaaaagtatgtgaaatatacaatatatgaccttaaatttggaaattcatagagacaactggtgtattttaccatgaatggtacttctctttttttttcggggacatgaatcgtacttatcaaagagaaaattcaagccatagtattattaatgagattgaagaacactattaatagggaacccattagaaagctagcataatatatcctgatagtaccgaacaataccttgtgctaactagtgatgcttcactgagaagttggtagattcagaatttctatttcgtgaaattaatatattggttagcatggaggaaatcgttaatgatgccattggggcccttcaaggtgagctagctaagagcgctgatgaaaatggcaatgatgctgacggaaagggcagcttgcgtgtggccaaaatgaaacatgtagctngctgctacattgatggggcaatatggatnntttnctatgatgnatctctatgaagggctggaatctnccgaagatgaagatgaagcattagtgttcacgtnaaaatgaggcgaatnaacatgtgatnaaataagnttaattt

SEQ ID NO: 46570 - DNA, 719 bp, Oryza sativa
  unsure (1)..(719): unsure at all n locations
tatcaagagtctgatgatacaactgaacttaagtagtattttctaagcattcagtctttttttacntagtagtgtttttctcctcatatatgtatgcaatcatatctccatgcacagnatgtttttcaaacatggttcatatgcagcaggacaanctgaagcacaatttaatttaggtgcaattgtaaattacccactgctttcaatcgttattgcaagactgccactagaaaattgcaaaaataccactagaactgttattcgagtggcatctttgcaaaattgaaaaaacgggtggcaaatttacaaatgccccattaatttagaggcttgctaacccacggtataccgttagagcgatataatcattagtcggacacctcacccctaatgcacatggcgggcacgcaccagcttgcgtgcatgtgctagtgctggtcgtggatactgtatattttttttggaagcaattcacatacacaaatacactagctaattactactctgcgcatctgccatgcatgacatgacaagtgctcctcactcatgcacccatagattatatgaatgcctatctttttggtcacacataactacaaactcctctataattgcgtgcttagctatatgacatgttattgttattatagctatactcagtggggtaccgagctcgaattcgcctatagtagtcgtgtatcaaaggggctcaatcacgg

SEQ ID NO: 46571 - DNA, 688 bp, Oryza sativa
tatatttttttttaaaaaataatcacacctaaagtactattcatattttattatctaataacaataaaaatactaatcatattttttttcaaataagacggacagttaaattaaacatgaactgtgtaaaatgcagtctttttaggacgaaggtagcacttacttctaaaaacgtggagcaaatggttgtcataatatgatgaataaagtggaaagcttttacaagtacggctagtgcaataattcctttgagaaaaatataattgtagggtcaccaagaacaacaggagctagcacaacacatcgcttggtttagctcagtggcagtgtaggccgccccgccggcgaccatgacgcgagaatcaatcgagatcctggtcgacaccacatgccacatgcagcataagcgaatccatcaccaagaaatattccccaaccaaacccaggggaagaaaaaaataaaataaaaaaacgaagtgagattaacttaactagtcaagttttttaatgacagaatcagcccatccaagtttacattctagttttaacacggatgctttcatgtatgattaattatttttttactgataggatgctttcatttatgattaattattcttttactgatagatgagttttactgatagatgaggcagccatacacctgttgctcataggtgcagagagt

SEQ ID NO: 46572 - DNA, 521 bp, Oryza sativa
aatccttttttttttttacttttgctagttatatgcccgcacattgtaatggatcagacgcatattgatataactaggaaaatactcgtgcgttgcaacgggtgaaagttattttaatattttaatcgtgttattgttacacagcttagttaagttgaaattcactgtaggaattcgcttggatatatattattctaaaaaatcatgagcggtaattaggagtttgcttgctagttttttaaaaatgatttcttatacgactccttctgtattttcaaaagcgaacgaactttaaaacccgactcaaatacaaatctaccaaagtactggtaaaaatattttaatttttataatagtagatattaggggtagactaaaagctcgcatgttaataggccaagctgatataattagagagatgatggttactttttcatgcatacacattgcacgagtggagaactctgcatttaagatggtagagatatacttcttttgccatgactgattttgattgcaat

SEQ ID NO: 46573 - DNA, 796 bp, Oryza sativa
actcaaaccatatgactgaaggtagaaaaatagttgttctggaaagaatgaccaaattgtaggaagcctagtctcaaccaatgtcgtaaaaatcggccagaatggctgcttactttgacgcttataagtacgcagagtcgcagaggagaacatcacaaaccagcgaattggaaaggaattagcttgtgtgaatgccaaaacagccacctcacctgattaaccgaccaattccatgcaattgcttgattaaactggtaatccccaactaagcccagaaacccactgagcgatcctgaatcagcccgataactagcggcccaattagatggcaaaaccagctactttgtctaccttgcatctctagaacagataagaatttctatcccatcccattcattggattctacatcataacgggagagtattacaagtaagtctcataatatgacaatacaacgtgtgcagatatctgatatctttaatactctaaccgcatcaattatcaaatataaacatatattgggataaacacaaaattagtataattcgaattatttggtcgtattctattcatttggcagtaccatgtctgtctaataactgtattccataatccatactctataacacttggtggtttcaacaggactctttatgaatactcttcaaggatttattattaatctactttcagcataaggggcgtacaatgagaaagcatgcgcatgctctgataaaaatcactaccacatttcaccaataaagtaaaacatggatattatgttatgcttaaact

SEQ ID NO: 46574 - DNA, 682 bp, Oryza sativa
ctgcatttttcaagtcctccagattgaagttccaaccactgattcctcgtatgtactctttctgaaaagcaaaagtcagtaatagcctattggtcaataatacttgaatctatatgcaccgtgcaattcatgactacaataagtcatttttatacaacacagtaaaatatataaatacacagtaaaatatataaatgtgagatatgagcttacttatggtcaaaatatgagcttgctattagctaactataaaacttattattatttaaaaatatatatatttggcacagttgtagaaatgcagtcaccatttagttaataaatccaataaaactcaactcaatctaacacatggagaaaggaaatgatgaaaaacaagctagcaaaactatttggttaatgatgggaatcaatcaagaaaagttgtttcacaccacaaccactgtgacaatatatctatttttagagcctgggtgaaatatgtaaaaactagaggtctttttgacgggaactcccaaggcacaggaacttttaaaatttacacccgcctccccgggaaggggaaaaaattcgttcctttaggggacagtctcatagagagaagatttctctccctattattttctgagaacacaagagaggagtgtaccctctgaccattgggctctgttctctgaaaaag

SEQ ID NO: 46575 - DNA, 679 bp, Oryza sativa
aataagtgtaaaccggcccatgaacttgtgagttgcataacatcccaagattgacttgtaatttttttagagaatctatttataccactgagtttctccgagttcaataatttgctactgacattgtctctttctatgatataccggtaactttatcaattgttttacaatacgccattggaccgagcattctttttttaaaaatacccaaaatacccttttttggacacacaagattaacaattgatttatcacattagaagtttcacaaaagatatgaaaattttcatgtggcctccttacctaacatggaagtttgtatttaagtttctagttctttgcatttctattttttttgtaaaatataacttatctgttatatgctatacaaaatactttttggtggtgtttttaatataaatcatctttcatacactgcagaagatattttttactattatcttttgtgtaagcaaattgtctctcatagaccacaaattttttattttataaaagttaaatatactaaaaaaaacttgaaacttatatagaagtttccatgtttccatgttgtgtaaggaggccatataaaaattttcatattttttcgaaacttctaataagataaattaattgttaacattatatgtatatagggtattttgggcatttttttgaa

SEQ ID NO: 46576 - DNA, 833 bp, Oryza sativa
  unsure (1)..(833): unsure at all n locations
taattgcgaattgaagctagctagctaactgcctattggttctagcttacttggttagttacgagagttaattaagtaaagtcagatgtggtcgtatgggtgcaactgtgcaagcctccatttaaaagaatgaattagtgggcgtgatattacattgtccgtatactgaattactcaattttgaatgggtgctatttagcgaccttgtttcgaattggtgtattttaatcatcgatatattagactacatacggacatatgtaaacataaactgaaatacatcaaaaaccatatcaacaatcattttatacattaattaatatgaacgacagattaacatatattttgataattacacgagagacgaccaaacatatcaaatttatgcataattacggattctaatgcgaacaagagacatttgtacatagtcaagcaatcattccatagagtcaagctgccaaggtgttaaggcgaatcgtgattcatggtttattatttctctcgtagctattagctaatttttgtgacatgatacagattacgcgtcaacgtcatcgtccaggcatccactaagctgctagtgagttctcacgtcttctagctggcaccccaaatcaacagatcctggcttcgccccttgcacgggaatggtaaaccctatctaccacgcaccatgtttgaaatctaggacgccacgtggccccacgaagtcactgccaggtgaggccaaccacccaccgcgcctgtccggctgggttgtggaaaatgtgcatgcattggggtaccgagctcgaattcgccctaagtgagtagttgcacntactgcgccg

SEQ ID NO: 46577 - DNA, 691 bp, Oryza sativa
ttatgcaggcagaaggactagtgcagacgctaacttcgcagaatgtgtttggttgcaacatgtatgtggctgttggcggctgttaaatgccaaatttgtgccaccaatacctgcataaacatagaaaaaaaacatccaacatagtggtagggcttcaatcaaacattttccacgagtgttggtgtatatttggatgcaggtactaaaccgccaaagttgggaggaaatccaacctacagtgaaggaaaatttcatccatacaagtgttgggctctagaactccattttaacattagagaattggccgaactctcgaagaaatggataaggtaggctgtgaaggagcaacaggccagtttctaggcctgttgggccaggccagggttgggccgaaccccaatctcagtcgttcaggctgaggtttggcatggacgctccagatgctctcatgatggtggttgaggggcactttagacattttgcgttctccgaccgtcattacctacttatataaggacatcacctttttacttcactcacacactccaagattgagctaaattatcagaggctctattgtactttattgtatactagaattagggagagagtagagtagaagaagccggagaaattccggagttgtcggtaatcctcttcttttttctgttactctgttaattactctact

SEQ ID NO: 46578 - DNA, 746 bp, Oryza sativa
  unsure (1)..(746): unsure at all n locations
gcggcttganattgtaaaccttaatcccgcangcccgcagggcgactctagaggatcccccggcccaaagaggaaggggagattttattttgcttttctttttattttaattggttaaatgatctctgtgactttcaaattatttcttgagctccgaaaattcacggaaaaatccggagagtatttgaaggcacaaagaatattaaaaattattcccggccaatgatatttaaaaggaaatttttaattccctcaataattcacttgatgaaattgatttaacttttattaaatttctagaaaatacattatttaatgatttttaatcccgaccgaaaatcggggcgttacaatagggaggcaatgcacaccgtccagaagaagtccggcatccaacggcacccagaggattcggccgaaccatgggctgggcctccctggcccattttcggcaggtggcctcctcttttgctctactctgcagacttgtgaattttggcccaattcgacgtgtcatttctaagttcttggcccattcatacataagtctgattctcgatatcgtccgattgattgatcatttggtttgatgtcgattctcctccactttatggttattctctgcaaaaggttagtaatcctaatactagtggaatattattattctaacttaaatatgcattgcaagtataactagttctcctctattttggtaatattggcggtcgaaacttgatcgctaacga

SEQ ID NO: 46579 - DNA, 733 bp, Oryza sativa
  unsure (1)..(733): unsure at all n locations
atgcgttgaatttatcttaagaccctgcagagccggagccgttattatgggagatctattgagttgctcttctgtcattctcttacacgncaggttttggttgtgtcatactaaattccccgagcaatgcgcgggggtttcacctagttactctggtaaagaagccaccacattgactcttgtcattgtcaatttatcatccgttgaatatcatttggatgtttagaagttcatttcatgtttgattactcatttactttgctattcacatgtactaagcgcgttgagaaataagcagtaacctttcacgtgttgtcatattccaatagaagtaattaatattctactgcacataaacaactgtgcaacatgatttatactaacaaacttcacatttagagccccaccaaaaaaatcaaaaagccattattcagaaatttccgtagcaacgcacggggaatcacctaaaaattcaatgaccagtctatgctccagtcctctcgtttctcactattcatgaaggatgcgcgtgaaaaagggaaagtatatatagaagttgaaaaatatacaatcgaacatagccaaatgttctgtaatcaaaaagaaaatggctacgaaaatctgtttctggnacactttttgattggttctggttttagctatatataacatttatatatatttttaatttcttttcacttcatatttgcatcgccactaaatttgataaatg

SEQ ID NO: 46580 - DNA, 648 bp, Oryza sativa
  unsure (1)..(648): unsure at all n locations
tgttgaaaccgatacacacaaagttggggttttgaatgaagtatctgggtgaactatccagcaaacacaattacagtgaagtagctgaagctaaatctgtatctagacaaaacgcagggttgcaaaaagaggctactaggggtttttataagaggaaaaacgacgaggcggggtggtgggagcaaaccctagcctttggggtggtgcgagcaaaccctatcctttgtggacccctgatgggctctactgaagacaaggcccaagcccaagtttctggtccaaacattgtttctattattctaggcagctccactcaaatttgatagtgaggctaggctcatttcaaagtagtcgacgatatctttacaatgagtactcatgaggtccaaacgaagctcgtatgtaaatttggtggccgttttaaaacacttaggacgatatatttttttcacacttaggagcacacaaaaaccaatcatagaaaaaataaactcaaatggacgaaatatgtgacatgtagaattttccaaagctctaccgaagagctttttgccttgaaaattcaatctggcaagcagaatttagaggttctaatttcgctggaccgtacaaacggnggaggntaggatgtagcttttttgcacatgt

SEQ ID NO: 46581 - DNA, 747 bp, Oryza sativa
  unsure (1)..(747): unsure at all n locations
acggtaggncntttgagaatagattgcacgatgcatatagcgcgaattggagcttggtacccttttacaaattacaccacacatgcaccactgcttccatcaagatttttcactgcacatgtataaaataattcaatagaacatattagtgggatatatatcaagctaaaaagtaattgaaaaggatgaaaatacaagtgcaactacaacgctttccactatttgcctaatgtggggtatcatttctacaactgccatgaactaaccattccctactaaaagataaatcagatgtcaattacaataaatgtgggagctccccagagtgctctatttgtttagtttaagcccaattatagattttattcgcttaaatattagagaactactatgtgcaataaaagaaatctaaatctctaccacttaactcaataagttgaaggttaaagaaaattaagattaaatcacagtgtaccccacctgcgtttgagaatgttaatttgtaagaatgttgcacgggctatattaatattttaaaaattttaatcatatgctagaatattggttatttattttcaaaaatatctcataaaggcaattagttgatttcatattagcggatttgagtggagatcaactttaaaagaatcttgattttcactcagaactaccatatatatatataatgtataaatgggattatacatagaantatatatttttaattgacaaatagattaataaaaa

SEQ ID NO: 46582 - DNA, 741 bp, Oryza sativa
  unsure (1)..(741): unsure at all n locations
tcgggtttcgtaagaggtctgtatgtgaaattggatttttttttcatgtgggtcataactcatanccaaatagcatgcaaatctttttgcatgtgaacgctcttttggtccgcttgtataaaatagggagtgtgtccacaaaaatcggtttttagtagtgatacgtggacgacagtgatccacttaattggggagacgaacgaatgaaaacggtgggtggaagcagaatttattttctaaaaaagactggaaaatggcccgtgcattgcaacggggaagaaaaaaatatcaaatcatgtgtatgtatatgttcagctttgggaggacaggtgaggtggttggtgctctcagtggctttgctcctgccctgccgtcgtgcaaacaggctgttgacggtcgtttgcgatcagtttcgaccatcaatattaccaaaatagaggagaactagttgattacaatagagtattaaattcaaaacatgtgacatgcaatgttaatgtaatagcttcccttgcccatgcagtagacccttttgcaaaacgttagctttcaataacttcgacattgcactattggtgttagcattatccaaagtgatgaaaacaatttatcttcacaatacaatcttatatggtctctaggattgtattgaatataacaacatccatgtgcaatgtttttaagtgtgagaaccttaanattctttgggtggcgggtacgagtcgcagtntcaaccacgcg

SEQ ID NO: 46583 - DNA, 728 bp, Oryza sativa
  unsure (1)..(728): unsure at all n locations
tagcgaaagccaagcttgtgggaaacatctctcccccactgaggtacttgtatcatatgaatatttcctttcaaattgcatgtttgctttctaattgcatcctataaacctgaaaacaacataaaacttgcaaaatagaaaataccaaaaagataggtagggtttgtcatgctaggtaagacaaactagttctctttgttgaaatgatgaatagttgctttgttttatatctctcatatatgggttcataggtaagtgctctctcactcttttttttctttctttcaatatcatgctcaggcttgagagagcataactttatttttctttaataaccatgcctttccctcccttcttctttctttttttttcagaaaggattttctttttaaggagaagaaagcacataaaagcatggagaatttattttggtggtagtatacaaatggaatggaatggataattgctaactctcagtgtaggagtttagcatttgcatatatgtgggtgtatgatcttgatcatagagcatgagaagtatctacacaagtcacaagaatttgataaagttcgatggaatagcaagtaaccaaaatttatatggtttaatcaatgaagcatatttttggctctagtaggaatttatatcaaatgaggaacttgcaatttatgagaatcctcaccaggnggaccttaccaantgaatacgaatatcgactctttcccca

SEQ ID NO: 46584 - DNA, 665 bp, Oryza sativa
  unsure (1)..(665): unsure at all n locations
cttccccatcctcttcttacacaaggcgaccagcccaacggtcatcacttccagtagcagcgctagggaggatagtggtaggtcgttgcgccgcagccccaaggtcaatctgttctccgagctgagctcgtcgccgtgtacctcatggcaatatctggcgctccagaccagggttgactctatcggttgacgcttttgtatagggggtcaccgaaatcccgaaattttcggaaatttcgatatgatatttccgaaattttaagcaaaatttagttgaatttgaacaaatattacccaaattcatgaaaaaatgaaaaatttcggtcgaaataatatcgtatcgggggtgaccgaaatgaccaaaattttcgaaatttcaaaaatttcagtccgaaatttccaaccctgctccggtccttggccggatctggacgacgggatggttaaagcgctaggggcaggggatgaggaagggagacacagatgggaaaggtggaggaggcttcaaaaggtggtgggaggagccgactttggtcccgcacctctgcatctgagaggtttctcgcgggctttgcgcaactcccatggncgncgcctctattgtacagaggagagaggangtaggatagtttgtcggcgggaccacaaccctgcattgncccact

SEQ ID NO: 46585 - DNA, 1145 bp, Oryza sativa
ctcgagcactactacacgtaatatttttttactaatagtcatctcaatgtaggcttttgaagttagatttttagcgcaagtaaaacaaaaaaaacttcattagcacataattaattaagtattaataattataaacttgaaaaatagatttattaaattttttaaaaccatttttatatagattttattttggcaaaaaacacatcatttaatagtttgaaaaacatgctaacagaaaataaggaagttgaagtttggagttggaaaagaactgggccttagttagatactccctcggtctcattttaagtgtaaccataagcttctgtgtccaactttgatcgtccgtcttatttaaattttttataattaatattttttattgttatgagatgataaaacatgaatacatgacttatgtttttaaattttttcgaataattttcaaataagacgggtgatcaaagttgggcagggaaaatcatggctgcacttaaaatgtgacggagggagtagaagttacaaaaaaaatttagatacactcatagcatgacacgtccgtgttagtaagaaaaaattaatatgtatagccttttcatttttttatgttgtttaaatagtcgtaaaatgtttttctttcaaaaaagtagaagatctaaattattactgcctcggttcgattttaagtgtagcggtgggtttctgcatctaacatttctccatccatcttatttgaatttttttatgattagtatttttattgttattagattataaaatatgaataatactttatgtgcgacttttttttataaacttttcaaataaagcggatggtcaaacgttccacacggaaacacacgactacacttaaaatattggatggagggagtatatggtatatgtcttcacaaacatgcaagcttgatttgatccaaaaagcttgaatatgtcttcacaaatattcaaatctgaatatgaatgggtggcatactagtggttaatctgtgtcatttttttctcgagtgtagatcaaatttagaaatgagttttataggatgataacaactattgtataagtgttattaatatttcgagatttattattatacctactttgataaatttcattgttggaataacga

SEQ ID NO: 46586 - DNA, 822 bp, Oryza sativa
  unsure (1)..(822): unsure at all n locations
catcagcttcgtacatgatgaatgcgggcagcttcaccatcctcttcttacacaaggcgaccagcccagcggtaatcacttccagtagaagcgctagggaggatagtggtaggtcgttgcgccgcagccccaaggtcaatctgttctccgagctgagctcgtcgccgtgtacctcatggcaatatctggcgctccagacaagggttgactctatcggttgacgcttttgtatagggggtcaccgaaatcccgaaattttcggaaatttcgatatgatatttccgaaattttaagcaaaatttagttgaatttgaacaaatattacccaaattcatgaaaaaatgaaaaatttcggtcgaaataatatcgtatcgggggtgaccgaaatgaccaaaattttcgaaatttcaaaaatttcagtccgaaatttccaaccctgctccggtccttggccggatctggacgacgggatggttaaggcgctaggggcaggggatgaggaagggagacccagatgggaaaggtggagtaggctccaaaaggtggtggaggagcgactttggtccgccacctttgcatatgagaggtttctcgcggcctatgtgcaactccaatggccgccgcctctattgtacgaaaggaaagaggaggtaggatagttcgtcgggggcaccacccccctgcatcggcccacctctcgggaggtagccgccgctcgggaggtagcagcataagccagacgctcgtggccactctagggttgccagttttgattcaataggtcnnncngtggtttccaccagagcatcttacgttccacat

SEQ ID NO: 46587 - DNA, 751 bp, Oryza sativa
  unsure (1)..(751): unsure at all n locations
gcgtggccctgttctcgtcgcacacggtggtatactggccaatgtatatgctagggcgcttgtggcctgtgttggtatttcttagcgatattactaggaataaaatttacagcaatgacgtagaaatactcctgatatattatagttacagagttcatccgcaagcacactaatatacctttgtaacattttacccgagagtattccagcggtattgtatttatttaatcccgtcggaagatcatagtagagagaaccagactaataatttatatgttacttataataattatagtctaagtaggggttacgataaattaaatgatagagtgatatacaagtagagaaatactcattctcatactaaaatatctaagctaagtggaaagaaaatagaaggagaatcttttcctatacttctagtatacatagtatacgtacattctagttatctgattaactagtttaataccctctatccgatgccctcctggtacatcgagaagccatccctgactgtcgagttccttacgacagcctatcattaccatacaaccggggctaaatacggaggactaccatcctcagtaaattaacttaggactatagtatacagtcgggtacaaaaatttgcatacggactttttaacaaacagatccgcatacaaaaacagacttttttttatggggatcatctagagtcgncatgcnggcatgcngcaaagggctaattcaatntcaatngccctcg

SEQ ID NO: 46588 - DNA, 1093 bp, Oryza sativa
cccgtaatccaccgtactatacggacgacgacgcggtgcccgccgtgtactcactcgcgcgcgatcgccccgcggacgacgcagccgccacacggacgacgcggcccctgcgcacgcacgcgcaccccacgggaaactacgcgccccgcggtccgatcgacctgcctatatggctatataggacctgcctagacgtggtcgcgccagccttcaattgatcgatggatttaattaacagcaggagtagctaccaagcatttgcaggggtagtagtgcccggcctattggctattgcatgagttttccaaacctggggccggccggttttgcaaaccagccctgggaaaggccggacagctgagctaccccaaagttcttgcacaatttttgacaatttgaccctctgcaaaaactaattttgcaaatgaatcgtgaccaaaacttatttaaaaaggaaaaagtccgaattaccccctgaactattgaggtcgaccgaataaccccctcaaacttgaaaagcagacatttcgtacccaaaactaataaaaccatgtatttaacccccctaagctgatttggggccggttttgactggggaggtggacacgtggtcgtccaacgtacgtggcgacccctgccatgtcaacctagccccacacggataacccgaccggcgccatcccccttactctctctcgacaaaatttcccctttcctctataaaccctagtcggcggcgactagggcggcgattgcgggggtgactccggtgacggtgggcggtgacttcggcgacgggacggcggcacgctctgaggcagagagggcggcgcgttctcaggctgtctcaacccacgacgatgtcgaggagctcaggtacgtcgcagggcttgtcttcgtcttcttgggctggacgtggtgagggagaaaggcgtcacctgccggtgccatatagggaggggcctcttgattacgagcctccagttttttgtgagtgtaaaatgaaggcagctaggtggatttcctggagtcccagtaaccccgggaggagatatttaccggcctccatgcatgggggagtaaattttcgatt

SEQ ID NO: 46589 - DNA, 581 bp, Oryza sativa
tacattcgcataccgattaggagtggaacaccgcgtgactgccccaggcgtcgccacaaactgagcaaccctagaggtggccacgagctcgtggctgatgcggcgacctcccgagcggcggcgacctcccgagaggagggccgatgcagggctgtggtcccaccgacgaactatcctaccttctctctcctatcgtacaatagaggcggcgggcatgggagttgcgcagaggccgcgagaaacctctcagatgcagaggtggcggaccaaagtcggctcctcccaccaccttttggagcctcctccacctttcccatctgtgtgtcccttcttcatcccctgcccctagcgccttaaccatcccgtcgtccagatccggccaaggaccggagcagggttggaaatttcggactgaaatttttgaaatttcgaaaattttggtcatttcggtcacccccgatacgatattatttcgaccgaaatttttcattttttcatgaatttgggtaatatttgtccaaatacaactaaattttgcttaaaattccggaaatatcatatcgaaatttccgaaaattccg

SEQ ID NO: 46590 - DNA, 832 bp, Oryza sativa
  unsure (1)..(832): unsure at all n locations
gaggggggagaaaaaggagaaaggggaaggaaaaanaaaaaaaaaaaaagaggaaacataaaaaaaacaacgcctggtnncccaaaccccccccccccccaaggggccaattggaggacgtgaaaacnccnnnnnnnnnnaaaaaanaaggggggaagaaaaaagagggggcgaaaaaaaaaagagggannaaaggacaagggaaacagggagaaaagagagnnngggggggagngcnacnaaaaggagccgaaagaagaaaaaaanccaggacaaaaggagagagcaggaaagaaaaagcgggaagagaaaggacggaaaagggaaaaacgggaaaagaagagggaagaaaagagaacgcgagacaaagaagggaaaaaaaaagggggagaaaaggaagagaaggggacaaaaggggaagaaaagaaagcggaaaaaaaaaaaggaaaaaaaaaaaagagggggaaaaaaaagagggggaaaaaaaagaaggggaaaaaaaaagagagaggaaaaagagaggagggaaaaaaaagaggggggaaaaaaaaggggggggaaaaaagagggcggaaaaaaaaaggggagggaaaaaaaagggagaggaaaaaaaaagggggaaaaaaaaagggagggaaaaaaaagggggaggaaaaaaaaaggggagagaaaaaaagggaggaaaaaaaaaagaaggggaaaaagaaagaggggagaaaaaaaaaaagagggaaaaaaaaaagaggggggaaaaaaaaaagggggggggaaaagaaaaaaggggaaaaaaaaaaagaggggggaaaaaaaaaagaagagggggagggaaaaa

SEQ ID NO: 46591 - DNA, 733 bp, Oryza sativa
  unsure (1)..(733): unsure at all n locations
agagcgtnattgatgatacaccttcatgcttgcctgcacgcacgactatctatagaggatccccttgaaaaaaaaaacataagattttctttgctgtcccaacttttttaatggatataggtgagacacaaactgtctggtggttgggtagatatctagccgccgggtacctcatggcaatatctggcgctccagaccagggttgactctatcgggtgacgcttttgtatagggggtcaccgaaatcccgaaattttcggaaatttcgatatgatatttccgaaattttaagcaaaatttagttgaatttgaacaaatattacccaaattcatgaaaaaatgaaaaatttcggtcgaaataatatcgtatcgggggtgaccgaaatgaccaaaattttcgaaatttcaaaaatttcagtccgaaatttccaaccctgctccggtccttggccggatctggacgacgggatggttaaggcgctaggggcacgggatgaggaaaggagacacagatgggaaaggtggaggaggctccaaaaggtggtgggaggagccgactttggtccgccacctctgcatctgagaggtttctcgcggcctctgcgcaacttccatggccgccgcctctattgtaccaaaggagaaaggaggtttgatagttcgtcggcgggaccacaaccctgcatcggcccacctctgggaggtcgcccgcgctcgggaggtcccgcataag

SEQ ID NO: 46592 - DNA, 516 bp, Oryza sativa
  unsure (1)..(516): unsure at all n locations
agtgcngtaggnccaaaagtgcagtgaagannacncccngcnnggtaggcagattcttgatttgtgcgggcttaagaagtctgataatcacaaagtagtaaccatctcattgatcaaccccgatagagtctttcttttcatctaaattattataattttgtcctataacagatagatggagacattttttcttatgaatgtagtaattttctcatagttcattcatgcaaatacctccattatgatggtatatgtattgagaatggtgggaagtcccctcctgcccacatacgactctgcttcaatgttcagattctcataccgcacttcaaccgtcggtagcttaattccaaccctgcacagaggaaacatctttcaaataggagacttagcaatcaaagtttccaattgaatttagcatggttatccatgaaaaggaaaaacctagttattttccttatatttaaccatgccttccaaattaatgtcgtaaccatgtgaatatattttttcgaa

SEQ ID NO: 46593 - DNA, 500 bp, Oryza sativa
gcgtgggtgagagcacatgatctactatagggcgaattcgagctcggtacccaatttattccgtaaagcccatttcactgttctgcaacacctgtactgtagctcgtctattttcgattttttgcatgagcacgtctgcatgtttgcagcgtgagcgtcgtgtgttccggtcacgttcgtgcctggaacgcgtcttctcatggacaattaaaggcagcagcgcacaaactacattttacattaagatatttctaaattaattaccgctactatagaaacgattttttcggatgagaccccttgaggttgctggcaaattaaactgctcccgcctgcaaaaatcgctgccccgagagcgtggttcaaagaccacatgcgaaaaaacaattttcgtaggcaggcttcttaataggcccgcctggcaccaagccgtttacccgtcccctccctctctttattctctcctcttaaaatatctcatttcctaacttctccacact

SEQ ID NO: 46594 - DNA, 534 bp, Oryza sativa
ttttataaaaatcataaaaattctaataaatgtttagccattatttttctaaaattgatggacccattaattttaaccgttagatcttcatctaaaaagaaaatctgatacctgcatcctcaccaccacctccatatatgcgcacttacgtacttacgttctccctctaccctcctaactctccccttctctcctatttcttaagctaattgctattttttagctgatactcaatctatcaaaaattaataatcggatttctaaatgatcataaaactcaagttacatattttctcaattttttttgaattattgtgttatttataattaaatacataagtcaaaatccatatacatagctcaaacttctaatataaatgtttaagatcaaatttttaagcatcatattaaatactaaatattaaatttagatcatgtaacgccgctaaatcgccatgtggcaataataccaatccccctaaaccgacatgtgaccatctaataaattataaaaattcatataaattatattaa

SEQ ID NO: 46595 - DNA, 518 bp, Oryza sativa
tatcccattgggctatgaattgtctttttttaagtgtgaaataccgcacacaataaagagggtccgtgtgccttttgggcgccattcttttttccaatttatacaatcaataacacactcggcggaatcatcctcggacaggagtagggtattactttttgaataagaaggcccgaacttgtataaaattcttcgctccaaacccatccactctactatgttgatagaccgcccttttattgttatacgactcactatatggccaattcgaacttaggtaggggtagcgttaagttctcaccgacttactgccataagttttgactttacccttgattaaatcctaccttcaaaatttttaccctgtcttattgggagcctcaacttcatcacgaacgacttcggcaagatctttcttttgactcgattcaaaccaacggggagagaccagaatcccgtccctttggtatttcaactttggccaatgcttcttcaagataatcttttccgagggggtt

SEQ ID NO: 46596 - DNA, 686 bp, Oryza sativa
acggctggggtctaggacgaaaccctaatcttcacttcacttcaacttcatcttcagagctggcagaactatatttatatagagagcaagggtgagtacttacgtactcagcaagccaggggaacttaggtggttaatgcaagtttcaaagaataggttgttatttttcaatcagttttgttttcaaggttttcaacaatctaagtgtgtgctttccacaaccagagcgagacaagtctcagctcagtcggggtgagaagtaacaaatttatttatcaagattttcacaactcccagagttggcctcaaagctggttttcccaaaccaaaccatttttccaaacttcccaataatagtggtccccaaacgaccaatcacttccagggactttcggtcccactgtcccccggacagctaattgcttcccaagcattaggtttcccaaaccttaacaccttttcataaaacagggtaaaacaaaaactacgctaaggaatcacctcacattcgcccatgaccgtgggcacggctgttcgaacaggttaataaccttttgagagggggtacactatacccacacgacgtttctagccttggtcacccagcccgtgcagaaccaccacctttggtgactttggggctttcacgacagggtttttcgaaagccgaccacaggtttaccatt

SEQ ID NO: 46597 - DNA, 680 bp, Oryza sativa
  unsure (1)..(680): unsure at all n locations
tttacagtcatctcaaatgtccaaaacttaaactcctgcttcaactaatcttgtgaaacgcacttagcagcttgcactttatagcccaaacattanaaatattagagcatttgtgtcatatgaaaaaataattctatagagcccattgaaagaaggactaattttttacccaatcccctttaaaatttctacgaaaatagactattgtagatganttcgnagggagnaataagcatgaggccccacctcccgtctatttttctgttgttgatgtgtatttttctgctatgccaatctactgatggtttggaaactttcctgtatttgaaaattctccataggaagtgaaatgatcatgatatagccgccttgcgctccgtgggtattggtaattaaataagtgaatagttgtgatgaaatgattgcagtttgtcaaagaagcattaattagatcagtgtacatacaagaccttttttcgcggtccgggtatatagcgaggtaagcagaagacaattgacaatttgagagacaacgaaataatcaaatattccggccgttgctgtacatgcgctatagagataaaaaatgctatgtgaacgatttcttcttatagacttatacgacggtcctagtgcgattgggaacgtatggtgaacgccaccatgcatggttagctggg

SEQ ID NO: 46598 - DNA, 742 bp, Oryza sativa
  unsure (1)..(742): unsure at all n locations
atatatatatatatatatatatatatatatatatatatatatatatcagctctcatattaaatgaattcaagtgactgtcaggacaaatatggtacgtatgattgtaccgtgttcgacgaattttcaatactcttgggagccgcatataaagaagggataagagtatgcccaacaacctcctataattaggagatgaggggaccatatgaattttcaacgttctaacgggcctatagaaacaagcgaataagtatgagacgagagagacagcctatagaaacaagcgaataagtatgagacgagagagacagagataataaggtactggatgatatagatactaggaaattccccgcgctttgcttcggaaattactaagggggtaatttttaatatgttttttcaataatcgagctaagtgtaaaaaaaaatattagatattaacaacagataaaacaggtttgctaaactatgtaaggagagaaataaactttatagactctgtagcagattctggatgaaatatgatatcccacgcttctattacatggatgaatatatatgttaagtattataaaaatgttggatatgtatgttgaaaatattatgaaaataatgtgaatggtgatgggttgatatacttgcactcttatttgcataatttaatgaattgtaaatgatgcttgcatgtttgtggagcttantacgcattattaggtattgacgatgagatgccatgtt

SEQ ID NO: 46599 - DNA, 874 bp, Oryza sativa
  unsure (1)..(874): unsure at all n locations
catgtgtgatggatgctgaggtgggtgtcggatttttaagctaaatatcgtaccgatccaagcacttgtctaaatattactgagtgcatgttcaaatattcagctgatagcgtgagctcatatcacctataccataaagacaatgccaatacatatgcatcttcttatttattaatttcagattcaaaaattattatatttaaagcaaacaactatcaagggctacataaaccataaataaatatataattaatgttacttaatcttctcgatacaatacatcaactggacaatatatagtagtgtagttactacttctcgacactttgaactatatgcatatataggagatggattttcattccacaaggaaactatacacacaactttagggtgaatctatcataggggcatccggatcttgagcctttactactttctccgtttcacaatgtaagtcattctagcacttttcatatttatattgatgttaatgaatctagatagtatctaaattcattaacattaatataaatgtgggtaatactaaaatgacttacgaaacggagggggtacgtactaatacgaggacaataggagccctatgaaacccatcaaatttttatttcttcttaaatccaccgctgcacaactcgtcgcacagacgatgcagcggccagacatgcatatatgcagtggtcgcgtgcgttttctgtccatggctagctccgtgctacttctagctagtgcttcaggtagaggtcgatctcgacgatgccaccggtggcgaggctggaatcgagctcttggtgaccatgtacccgcgcgcgagncggaaangnnccgttgccgcgatcaccaccgactgcggctg

SEQ ID NO: 46600 - DNA, 731 bp, Oryza sativa
aggcgcttgatattataatcctgtatgcccgcacgtcgactctagatgatccccggcgaggacgacgagctcgagacgacggcgagatacggcggcgtcggcgcggggatttgccctaggcagtggcggcgaaggagagaggccgagagagatcgatcggccgaaaacttttaagtgttggcgaagaagacgagggcgcaccgggaatatatatacccctggatctttactcccggttgatcaaagcacgctggagagaacatttttataaactatttagcaaatgtggtactcaccccttattaattatgacccacttacccctcctatcgcgctgcattttacattgttcttgcaaaccgagcttgtcaaagacaagttcaccgcgaaatactgctatttttaggactaacagtgagaacggtttcatctgttcattgatgtctgttgtgatatttgtggttgtcatgaccgtgctccgaccattgtcgacttatcttacagccaaggttctatctgtcatacatcttagcttgactatgaaggaatttttgatatgggttaaagctttgaatatactatttgagtcgattcatgtgccatcccaagagtatgaaaccatcccgctattctggcccttatggggcgggggatattgaaatggatagctcaaatctttagggcaagatatggatacgccccatgcctttatgaatactttttacaatttg

SEQ ID NO: 46601 - DNA, 988 bp, Oryza sativa
cagaggaagtattagctaagtgcaaggaaatatagggtctgtttgggaagcttaagattctgcgaagtagctggtcggtagccagcttatgagaatctggaaaagctgggtttcccagcttatagcttctaggctgtgtttagttcacactaaaattgaaagtttggatgaaattgtaacaatgtgatggaaaagttggaagtttgtgtgtgtaagaaagttttgatgtgatggaaaagttgaaagtttgaagaaaaactttggaactaaacatggccctagtttattttctggtttatacaattacagcttctcaaaatctagaccaaaagctgaactgtttgggggagcttctgattctggaagaaactgcagcagctagaagctctctcaaacagggtcaatccttgcatataatttttttactcctttcttgtcattttcgaaaagaaaaacttcgctttagttagtactactctattggttcttttgacgccgtcaatttttatatgcgttttaaccatttatcgtatttaaaaatcttatacaattatgcaaaaatagaagtcttaaatgataaaattaatcacaataaaacaaataataaaataaatgatattatagcatttttaataaaataaatgttttacatatgttaagtcaatgatgctaaagagatactatacacaagcatgatgtgtgggagtggtaataatatttaacaatgaaacatagagaggcgtttttaagggtggcatttctggttgtgtgcgagtccctcccgtaggggtgaaaatggagcggattcggacggatagtggtcataccatatcctaaatcattgaagttaaactttatccaccttacattacccagggcaacacactttcattttgctttgttaaaaaaaaaaagaatttacaacatctatttttacataaggttcatttaatttaacaactgcattttttttcaatccctatttttt

SEQ ID NO: 46602 - DNA, 520 bp, Oryza sativa
gaaaaaacatattaaaaattacccccttagtaatttccgaagcaaagcgcggggaatttcctagtatctatatcatccagtaccttattatctctgtctctctcgtctcatacttattcgcttgtttctataggctgtctctctcgtctcatacttattcgcttgtttctataggcccgttagaacgttgaaaattcatatggtcccctcatctcctaattataggaggttgttgggcatactcttatcccttctttatatgcggctcccaagagtattgaaaattcgtcgaacacggtacaatcatacgtaccatatttgtcctgacagtcacttgaattcattttatatgagagctgatatatatatatatatatatatatatatatatatatatatatatatatatatatatattatatttatttattctagggtgtgtttagttccacgctaaaattggaagtttgactaaaattgaaagtttgaagaaaaaagtttaaagcttatgtgtgtacaa

SEQ ID NO: 46603 - DNA, 766 bp, Oryza sativa
ttctccgccgtaatcatgtcggggactggggcacacaggtaacaggccttgttgtgacttcaaactgctttactacttctcgttgttgcaaatgttgtttatgatgctttagtttgttgatcctgtttgtttgatgctgcttggattatgcacagtctgccctaattttttttccctgatgggaccgtttcttttgcttctatcttcttactccctccacatcgcaatgtatgtttgtggagttgagagtagttaatataacttcctaccatttagccctaatttcgtgcaacaaaataggctgggtaattgtggcatgccttatggtaggggtatgttggtcatctgcattaacattttcttatagttagtgcattgttggcgtgtgaatgatggccatggagatatattgtgaactgaagggagtacctagatgttcttcatgccttcaatttctctacatcctgatgcacttaaggtttagctattgctatctgttgtgcctgcaattagttgaatagttccgctgacattattttccatgaaatcttacgtaggagggtagaacactttagtttactttatttattgccaaagtatgcactatttctgtactctggtacaatttaactttcttacattttataacccaattttgatttctcgacctgattattgttgtgttttcctttagctgcgtaactgaactttataaccttgcagtggctaggttatactgtcaatatctagatttcctttctatgga

SEQ ID NO: 46604 - DNA, 1639 bp, Oryza sativa
caggtgcacaaaagcacactaaaaacatcactttgcgagcatattactgtctctccacatggccatagtaaacaattcatcacgggggaatgagtatggcctttaaattactaccttcttccacaaaaaaagggttaaaaactgaaggtctcaaaataataggcatgcttgcaattctacatcacaattatgttgtagaatgcaatcagatagtccttttagtaatcaagctattaccaacgagtctgtatgtacaaaaacatgccaatataaccagcacattctaatgcaagcagacattatggccaaaagtgtagttatagcaacaaaggaaattgttttctcaaatcagcagaataaccaaatattacccaaaagtgtcactacccaaggcctattatattgttcaaacttgtgtttcacatggtacttaccaaagcaccataaccaagctatgctagaagggcagggtgataactaataagcaggagtacttgcaaataattccagaatttctttgagacaagatgaattacaatagcaccaacacagagagatagcatgaccataagatgcctgtaggtaatttttaacggtgaaccatgaaaaggataaatatagtatgaactcctaggtcatactttattgactggcaccgacaaaagtttgaccagccataacccaatgatgcagaaacaggttttgaaattgaatcaagaggaggagcacatatatataggcctgtgaaaaaagagaacagtgctgcagaagatggctgcaagaaatgaaacaatacttccccggaattgatcccctttcctatctcctgtcaggaggtgctaacctttttgctccaaaactaggaactcatgtcctttgatctatttcttttctctatgacaaatggaaccctgcatattccacctttatcacaatttcccattcctatttttcaggaaaggaaaaaaaatcttaggaaatttaattttcctcctgagaatacaaagggatattacttgcatgagtatgcagccatattttctctcttaacaactcaaaactacaaaaaaaccagtgttcacttctagaaagatgtacccttggaataacccagcacactattaaagcagacaaacatgatggaactacaaatttggaaacaaattaaatctcttggctcatatagaatcagcacaacaacccacaatattccataatactatggaaaaccaaaagaaccaaaacttaaatgcatctaatatgtactgtacttggcatcatcacactggaagcagtacctaccaaagcaagcattacatcgaaacaaaccccaaggccacaatatcatttcctcacactagaagtaataagttgcctcatactcttaccctgatttatattttgtcatgaacataccgtaatttagaagctcaaacattacgctgatatggcacaattagggacaaatcaaaaccaaaatcaaacagaggcgagatcaggagggcgtaccggtcgttgcggttgaggcgcgcggcgtattagaaggcgacggagacgagccacgagtcggagtggacggcgacgagcgcgagccagtcgccgcggttcatcccgtcgcgggcgaagttgatcccgagcg

SEQ ID NO: 46605 - DNA, 977 bp, Oryza sativa
tcatccagctagcgatgagtcatccactcgagcccacccacccccgaaagttccggaggaccccgcgccggccggccgccacgtcacccacccacttgccaagctccccatctccgccggcggggatcggatcgagctcgccgcagccgcccgctcgctcgaggacgatggcgagatcgatcgatggatatggaggaggaaaaaaagtttggaggatttgagctcttctcacgtcgcaagccaacttcaccacgtatatttaaaagcgaaagggcagcaaaactctggcccacctgtcagtctccccatcgcctcccaggccatcgggattctgtgctctacggccactgacaggtggagtaacactggcacgtgcgggcgtgggccccacctgtcagtgaggctacgcgacgtggggttggccggaagtgcagtacggatagggtcgggaaggcgtgattacgtgaagacctcgtccgagtactgcggtggctctgtatgtacaggagtggtgggacccacgtgtcagtggaagggaagggaatctagtgctgtgttcttcccctattttcccaaaccacatctcttattttctcgcgcgtttttcaagctgctaaatggtgtgattatgtaaaaactttctatataaaaattattttaaaaaattatattaatatatattttttttaaaaaaatagttattattgtaataatacgagcttttgttttatgtgccggaggctaaagtcaacagctagagcgcttgctggcttgctgcaggatgtagtacgtgtctgtttggtctggcgtgagcaacttgatgcatatctatatttttcttcttcttttcttcgagacacatgatgcataggagtacatatctctattcggtagttggatggatagctttaaaaacgtaacacatgcagcagtgtcagggtctgtttctattcataattattcttattattattttg

SEQ ID NO: 46606 - DNA, 1015 bp, Oryza sativa
attcgacatattgacacatgcatctgattcaagtggcaccactagcctcataagacaagtttttttttccgcctctcatcgtttacagaaaaaagaataaagcaataaaataatttaatgataaaaagttatgatgagaaaatcttaaaatgaaccctaaaactaaattatgttttaaatttaaaattataagtcaacaagcaaattagcctacttgtatattgaaaattgtgtcaaaatcctcgattttcgacaagtaatgaagcgtataaaccaagcagcgagtagcgacctttattttctttctgtctttttttttgttgtgtcaacgatctaatacgttccttctcgtccaaaaagaagcctatttacttcaaaccagaatttgccaaatttaaatctgcttcttaaacgcaaattcaatgttgacgtactagcaatattaggcttagtttttctttttaactctaaactttaacttcttttttcgttaacacaattttcatactgttaaatgatttttttaaaaaaatttatatacaagttatttaaaaattcaaataaatttatttatcaaattataattattaattaataagcttttctcgttttacgtgcctaggaaaactctctccaacctgttacctgtcgcccccgccgccgaggggggaagggaacagtcgcccctatcgtgtgggggcccacgtctatcctcccgggtggggcccacccgctttccccctccggacgacacccccggctaccccacccgccgcgtcgccgccgtcgccgccacacgagcccgccacaagaacggatcagtcgctgccgtgtgggccccacgcctatccaccctcccccgcgtgggccccacccgctttcctccgagctccgaagcctcgatcgaagcgcgccaccaccaccactcccatcgctctccccgattccccgccggccaatccaatcccccaaatattccaaattcccagccaccaccaccacactagcaagctca

SEQ ID NO: 46607 - DNA, 1540 bp, Oryza sativa
attttgtaaccttgttctaatgtaaaattatggtcaaaactgaacggttaagaaggcgaagaaaatgtcaaatgtcttctttttttcccaaagggagtacatatgctgataagtacaatatttttaaaagtgagctcttatcagagttacaattgctgccgctctgctcaacggcccagatgtttcgctcggttcagttacaagatccgacggataagaagcttcagtgagatgtaacgtaaatcgagttatccttagtttagctatttgttacactgtttagtttatttaagacgcactgagcaagctggtgcagttaggaaggatagctaataaatgtgcatccagcagtagtattgatttgtttaaatgtgaatgacggttaataaaaacagtaacttaacgtgcatgacagatgataaatcatggtaaataaatatgtgagtctagcattgctcacatatatgtatagattcattaatatctatataaatgtggataatactaaaaagttttataaactgatcacatatatgtatagattcattaatatctatataaatatggataatactaaaaagttttataaactgatacggaggaagtatattttttaataatataaagaggtcccttgcaaaaaaaagttctatcacagggaccaacatccctctttgggccacatttgggcctaagcagcgcaaaaaccgcggcccaccagagggaagcggggccctctcctctactctcccgcggccaccttctccgagaaatccgcttcggcgcttctccccggctgcttttttgctccgcctcggcgcctcccatccaccaccgccaccgccatcgcctccgcctccgcctccgccgccgccaccgcctccgcaactcggcgctcgccccgctcaaccggcaggaggaccaaggtgagtcccctagcttgctggttgattttgcttggattgtggcgttgtgcggtggtctctgttcgacggcgcgcgcgcacggatttctctcctcatgccggagctcttcgcacgccgcgctgcctgcctccgcgatttgttggtgaaacctcacggtctcccgtctgtgcttggcccgtttgcgtacgtgtgccacggcgtgcgcgctagtctcgccgggcgccgcgcctcgtcttcgtgtcgcgccggcctgttgaaactaggcagtttcatttttcatggcatttgtttttagcatagtctagggcgcattgagaaagatgcttgttatcgggggttgtggattggtatggggacggtgggggcattccgtcgagcacttgttaggcaccaggattgttaggctttgtgtaggctaactgttacgttcccccactccatatgaatcaatgattcaaactcaaaacacaccacactgtttctgacacttgatacaaacaggattatttgggtatgcaagtagggaaatagaatcaaagacatgaaatcagcactaggttggagaagaggggaatagctgatattgaagaacaggggagagccgagtggacgaa

SEQ ID NO: 46608 - DNA, 740 bp, Oryza sativa
ctactgagcctagatgtatattcagtccatgagcttgttattcagttaaggtcatgtagtagctactctatttttgttattgaattagaatgtactagctcctccatcccaaaataatatcatctttgcctcctcttgtttgtcccaaaataagttaatctttcaagcaatcattgtattggagtttgtcatagtgaggaacaaatgcattgtgactaaacaaagtggaagacaattgcattgggatttgatgaagtggagggcattgcagttttttgcttttgtattgatatgtgtgggatgggtgaaaaacgaagttattttaggacgaagggaatagtagctttctttatttttgttattagtgtataacaacgttttgtgttgtcttattcagatggaaaacatacggccaaacatgttctcgaacatacctcagcggtatgtgggaactaaaagggcagattctttgtttttcatcaaggtgcaagtcgcatcaacagattataaggttcagataaaggaacatttggtgaataattgtggtatcagaagtaaagctgtcgacaaatggtttcaagcagttactgtggccacaggatttacagctgttgaggttgagaacttctactacattctaacatgtgcccatctatttgaatatttctattcagctgagatcaaagttgactgtgacaaattaaattcttggtttaacattttgatcatatgccaacact

SEQ ID NO: 46609 - DNA, 700 bp, Oryza sativa
tagtacttagtgatggtgtatgaagagcattgatagtctcatggcccattgctaacatgtagagaaggattttgagttccttggaagtattgactggaggagtgtgaactacttcgcaaatagatgggtgtaaaatctgggaaagaaaacttaaagagctaaatgttttctaccatattagttgatctgaaggtgctttccaagtcaaaatcagcttagcatatagaattgacttggtgatggcggtacctggacccttgaagcagcagttcagaactgattgcactgagtattttctctggagatatccatttgatggaggtggaaggaaagagaggctagtcaatagtaggtcaactgatggtgtttgaaacaagatgcacttactcataagcagaataaacaagcacaacaatgccatgaagggaaccttagcaatgccgtacatctggcatcatttaaaacggggcttgttccactgttatactatgaccatccgccttgatggttttgcctggctattctgaagctattagttagcgttacaccttttaagttttacacatccagtgttgttcttttgtttttctaatattatgtacagatatctcttccacatgtcatagctcaatatgacaagggctttatcctttttcatgtaaatatttgagattcagtcagattcttatacttgctactt

SEQ ID NO: 46610 - DNA, 1273 bp, Oryza sativa
ccaatggatatctcatctcatgattgaggggcccggccgttaagaggctgttctcttgccagctgcagctggatggttcggtgttcaccatcggtgaaggtgcttgcgatctcgtcgagttgccgttgttgatctcctgctgatctgttgcatgctaccaattttacctgctttgtgatggatgcaccaccctcctgacccagatagctagctggttgtggctggtgcaatgttgtctgctcatcatgaaccaatccagcttaggaagcctcaattccaagcccccccaaaaaaccaaaaagaaacatttctggtaccggatctcaagcgaggatgacctcctttgaaacatgaatggtaaaacatactaggaagaacatcatttttggtacagggtctcaagccaggatgacctcctttgaaacgtacgagtggtaaaacagtacgaagaacatcaaattttcatgagaattttcataggagacaggttaagagagaacttcaagagattggaccttatgttaacttcttctagagattggaccttatgttaactttcttctataaaatattagtgaagtgaggaaacttctaaaacaattatatggagtgatgaaaaaaattatttggtcagacggtaactatgagtactccataatccgtataagataataacatggtaattctattaggcgttcgccaacgaagccccaagcagccacccaaggtagctaggcggtgcctttgtccgtgtatcaaaaatctccatgcacgggagccattccaaataaaattttgaagctccaagtttttgttccgaaggatcaaatagaaaaattatccgtagaaattgaatcctaacaaaaattccccacaattcctctaattaaaacgaggccgaagcggcttcctgatcggacggctggaaggccatacatgtcctggcattaattatcactcaccttagattattacagctcggagctagaaagccctgcaagttgcaattaatggtgagtatgatctgatctgcagcgaaatgatctatcgatgtccctagttaagcagtcattgtgtcccttacccacctaaatccacgagtgtcagagctaagcgcgatcccgatccttaaaccccaaccccactctcttgctgctccatcaagcaaccaaccccaatccacacaccatacataattacatactaccagctaattaattactaataatgacttaatattccatcatctcccagctcagttatcacttcttga

SEQ ID NO: 46611 - DNA, 585 bp, Oryza sativa
aatggaaaagaaaagataaaagcaatggatttgtatataaaattagtgaacattataagattctattgggcaaaccccacctctatgatcttacaattctaagaggagggaaaataaatttgaaaagaaccaacatgtttaagaggaggagaaatgagaagattgaaaagatacctaaagcgaggcttgccattaattgagtattaattatttaaaaatccaaaaaatagatcaatgtaacttttaagcaatttaaatttaaattcatcgttaaattgtttggaaagcatgtacggaaaacgattgactattcctctaacctctttctcaaaacgcagcccaagacataaatttaagcccaataacgtgatgcacccggcccggtccattaaacgccaaaagtctatgacatatgggtccacatttgtctatgacatgtgagtccagtggcaaaaagttaattgccacatctaaatgtggcaaatgggtaaatatctcccaaaagtcggctacaatcctcgcgcgtcgccgccatagccctctcttcttcttcctttttgctattccattgtttttttttttttt

SEQ ID NO: 46612 - DNA, 602 bp, Oryza sativa
ctactcctgtgctacttgttagccttgaaaaaacaccatgccttaaagatgatgtgtgatagttttatttggctatctaatttgtactacttccatttcatattataagtcattttgacatttttcctaatcaaacttcgttaagtttgaccaaatttatagaaaaaattagcaacatctaaacattagattagtttcattaaatctagtttgaatatattttgatcgtatgtctgttttgtattggaaatgctactatattttagtaaaaaatcaaagcgacttataatatgaaatggatggagtatgattttaatattgtttttaagataaaatggtgtatcccctctgttccaaaatgtagtgttcaaattttgttccaaacataagttatgcaaaagataatttttatcactaaactacctatactattcaatggtgactatagtccaaacagatctcgttcatcccaagaaggcaaataagtctttctacccctctccttatggctgatgctatcccctaaaattattactccctccgatcaataaatatttaacacaattaactttaatcataaaatttaaccattcgtcttactg

SEQ ID NO: 46613 - DNA, 2209 bp, Oryza sativa
tagaatccggcagatgcgaattattcggtaggttatttgctggataatctgaagttgtcaacacatgtaaccactttatatgttgcatacaacgtgagttggcccatcaaatggcctaattcatcgattaacttggattgcttagactacgtctctcaccgtctcatcacacacttgcgtagctatgtttttatatagagagaatccactcagtgccactgagttttgcccacttctacaatatacccctgactttgtcaagttgaacaatatgccattgggttttctttaaccttcactgcgtgccatcacagcacagttagcatctgttagcgatgtaaaaagacctatttgcccctaactcattatatctgttagccatctttattcccattttcaaagaaattcatcgcgtatgcattttcatatatacatcggtgctcatatattaaacctaatctgagtagcagtgcttccaaaaacgaatggattcgcagaaactagtatcggtaaaaatgtaaatacacgcctctaccacctgctaatctcaactcaatggatggattcacagaaatggagatggatcaatgcctctacaaagctcgatcagaccttgagcttgaagctgtagttgttggagcggatttggatccgcctgccggcgacgaggttgtcgacgacgaggttgcaggtcgccttcccggtcatcttccacagcttgatggcgccgaacttgatgcggatcggcacgcgcgcccacaccgtgagcggcacgaacccggtctattgctgttgcagcagctgcgccgccatggcgctgtccagccgcgtctcgccagcgacggcgacggcgaggacgagcacagcgagcagcgtccagcacacgcaccggcagcaccgccgcccgcggcccttgcgccgacgcccaccgggtggattcggtggtagtccattgagatggagacgctgcttgccgggcggctggcggcgcgtcgatgggacctcggcgaccggccgcgcgtcgatggggaggccggcgagccaccgcgcgtcgagggggagccgagctccaggacgcgcgtcgtgggggagccaggcggccggcctcgcatcgtcggggagcaagacggccgaccgcgcgtcgtcggggagccggccggccggcggtgcgtcgaggagtcaggcggctggcgttccatcgatggggagtcggcgccgctcactagagaaacaacaatagatcgatttgggggtggatggtgtgttacggttttcagtcaacaagtacaatgatattttagtcaaagggtattttagtcatttagagacaattcaatgcggtaaacggaggccaactaacggctcgtggacggcgatggcacgcagtggaagttaaagaaaacctgatgacatactgttcaacttgacaaagtcaggggtatattgttgaagtgggcaaaactcagtggcactgagtggattctctcttttatataattggcataatgtattcatgctatttaacacttcagtatatagttattatgattgatcatcattgattattgggttgttgtctattatattgctaagctgatgtggcattgatttgcatatacacgtaacgaccgataattttaatctgtttttaaatcaggtccgcaccattttcaacatccaaaacaatctgctcgatatcagtatccacacactaaccgcatccgcttaaaaaaatggtttgaccactattcgtctgaatccaatctgttttcacccctacttcttgtagccccaccgaatgagttgatcgtcgggcttaggaggacgagggcaatagtcactgtcaggttgggcccacacctgtcctcccgcatagggcccacctgcttcacatcactccccctgattccccgccgcaaaatccaatcccaaattcccaaatccaagccaccaccaccacaacgagcccagcttagagcataccctatctctctctctctcgctcgggcgcgcgtgagcgcaatgaggactttggggtcaaaaggaattgatgccatcagagacatggggggagtcggcggcgtggcggtggtggcagggaaggagaaggggacagccaaatatactataagttccaaagtgcgagtaaaattgtttgataagggccatcccaacctaaaaaccatctagtggtttccatacttatcac

SEQ ID NO: 46614 - DNA, 947 bp, Oryza sativa
taaaactagtttcttgcatgagaaatattttttttcatcttttttcctcttttctcattaactctttcgccacctaacttttcacttatgtgaaggattgggattgccctaatgatgaagagagaaaaaatgtttgctcaatggtcaagtgagaatttgtgagttgtaagatactccctccatcccaaaatataagtatttttttacttcaacacaattttcgagatgatattttgatcaatgatatcttataaagttaagatgctttaaatcaaaagacttgaatattatgatagtttgtttaatgattaatctagtaacatcaattgtgcactttttttattttttgactattaatagtcaaagttaaaaaatgcttgacttagtattattctaagattgcttaaaattttaggacggagagagtactaagatagtgatggtacgaatccacttacaattattgtttctaaagtaacgattgaagaatgattgggaagaaggtggggctgtcagctggtttgatctgcggtaaaggtaaaaaaagaaaaaaaaaactcccctacaggtatctgtacttcttttaaaacaaggcaatggtggtgccagtaaatctgccacctcaccaactcgattgtgtagagcattatttacctattactccatggttgtacctactcttctttcatgtgctttaatattacaaaatagtcctacatatgactcttatcttatttcatttctaaaacacaagtttattatgcaaagacacatataaggacgaatttgtcccaaacatcacaactaatttgttccaagcaatattagtacacatctaatttattttatcatagcaaagcacggtgtcggtgaaatgggaaccagggtacccatttatccaacaaaaggatcattatcaaataagtagcatgctcaaaatatcttta

SEQ ID NO: 46615 - DNA, 2628 bp, Oryza sativa
gtcctcagcaaaaggggcgtagaaacctgcaagacctatatcttaagagaacgagctaagatccactttgggcctggcatagtcttgggcccccgggctcaccttagccagcgcaagtcgtgctactcgataaagaggagtgtcgagacataccaaatataaaggtgtaaactgaggtttgcctctagcctagccttgtttcgggtcacagtttcaccttggtccttgtataactcacgtccctctgcctagaggggcactgaaacgtacaagacacgtaatcttggaataatttttcatcaacgacatcttcgagaagctcatctgagaataaccaaactacttctttaaacgcgggagggcgcgacctcagaacttgccgggaagatgggcgtgctccacagccagctgtgaggcagcatgccccgccataaatgaaacaggtttatggggaatccccagccagtctggagttgaaaggacgtggacaagacaccagcgctaagtcacttaggacggtggcgcctgggacacacgtcgcacatgccccgcgccacctaatttagccaaacgggcagagaagcaaccgtgatgctgtttttggcaggtcaggccttgtcaggcccaccacgcaccacatggtgagcacactggcggaggcccaacttgtctcagacggagtccgacaggcccggggtaatatgattttcaagactcgaagggtttcttgaagactgtgtttgggaaccagccggcaacgacaagacgactgataagacaagactaagagtagatttgaaataatgtgagcccctccttggactataaaaggaaggggaccagatatgggtgaagggttggactattttagatcagtactctcgctttgtagcctgaaaaggcctcctttgtacttatctgatctagagaagacaacaaacaccgatacaggactagggtattacacctctgggtgatgtgaacctgtataaactcctgtctccctctcttcgcgcgagggggcgggcacgaacccttatgatcacagatactccgtacctctcaccgtcaatccccctggtcagatcttcactctcgggaggggtctccactccccgctgtccgagggaccaccccctcgacacacgagtatttaactagttgggaagaaagactctggaattttccctaaataaggggtcaacattagaactttgtctggatttgctgatggcttgaaatttctgcgaaaagagccccattagttgcttaataagccaaaaccaaagctaaaatttaaattttcaaacttaaaaattgttttttaagatattttcaatatagcttctttgtcaatattggtttttaagtcgataaaaacatatacatatatgggaacactacaaaaggttagctccacgaccttgaacctcactaatagaggcagttaaactagattgggtcaagcctgttgtgcacgacagcaatgcctcgccacgccacatgctatgtgcatctatgaggcttctggccaacaccaaatctagcaaaaggagccagatccagccaagcatcctcgccaacagtatggaagatgacgatgcgcgatggatccactgccatctggtggaaagaggggcaaacagccttccaccggagcgggcaaccacaactacacctccgttgtagctccgcatgacaccttcggctaagatgattgaaagcaaggaaaaagaaaaaaagaaaaaaaaaggagaaggaaagggcatagcatccttcaccttcgcatgacaccttcacataatgttgtgggcagagcaagatgatatctctaaatatagcataatgtgaaggtgaaggagagaaattagaagagagagggtgagcgatctctcgtgcaagcagcaacctctacatcatctccaataaaaatgcaagatggtgtaagattgaactaataaaaaaatattaaagtttgtgtattaaagatgatatgctatacttatctcctaattaataaatagatcatatggctcaaattagagatagcatccatatgcactataaaactttctcttatagaggactcgagggaggtagcaacaggggcaagtgcgtccatctccaccgccaccaacaacgttggggttgatgccttgatgggagacgactcaagggttgtggcaagatctaactcccgagctgccggatgcgttcttttctttcatttcctaacttctactccttgtttgtcacgcgcaagcttgccgaactgctaaacggtgttttttttaaaaaaaagttatatattaaagtttatttgaaaaaatatattaatttattttcaagttttttaagctaatacttaattaatcatgtgttaattgatcgatccgttttacatgccaagaaagggttcagacacaaccttaggatgcatattagtggacatactaattaagtattaactatcttaaactttgagaattgatttattaaatagaaaaattttgtattaaacgcatcatttagcacttgatgtccatgatcccttcccatgctgctaagccacgcttctacagttgctaagccccctgccacctgtgtagcagtcagccgcctgttggg

SEQ ID NO: 46616 - DNA, 742 bp, Oryza sativa
gcatataaaaaatattgagatgtttaatgtcacattatcaaaatttggactattggagatccactatgttagccaaattctaccaatcatcttgaagaagatagttgtctcaattcacagctgcacaaacacacaaactccaccaatcatcttgaagaagatacctagttgtcccaattcacagctgcacaaacacacaaattccatcaatcatcatgaagaagatgcatagttgtcccaattcatagttgcacaaacacacaaactccaccaatcatcacgaagaagatacctagttgcaccgactcacaactgcaccaacacacaaactccaccaatcatcacaaaaaaggtacttttcctactcccaccagtgacaaattcaaagctgcacaaacacaaaacaagtcagaaaggcccttagaagattgtaaatgctgctacaaagttgtcatatatatatatacctggtgagctcccaggcaaaattcatagatatctgcagcagatactgcatatcccaaagactcaatacggccatggtataaaccaatgactgctgcttggtgactcagcactggagcaccagaacaacctgctcctccaactacattcagctcaactagatgcatgctgtatcctttccacaaatactgggtcagctgcccatatactctgtctcttgcaaccaattggccagtgattactgagtcttttctgcaaggtggccaagacactaaca

SEQ ID NO: 46617 - DNA, 1043 bp, Oryza sativa
cctatctaatatattgaaacttcctaagcagtgaatcaaataaacttgtgtgtaaatttagggagcatagaaaactttacggttagtaaccagaattctactgaagcaaaatcagaaccatttcggcctcgatctgtcacctttgtgcaaacgacggcgagtcctgctcccacatcttccatgattgtcccttcacaaagcaggtttggacaaggattcgagatcggcttagcctttcctgctcggtgccatcagaagatctttcctcttggtggtgttcagtccgaaaatcagtgcgcaagcaagacagaaagacatttgacgccggggtgatccttgtgacatggctcatatggaaggaacgcaatgctagagtgtttgatggaagagcaacctcagcggaacatctttgtgccacaattgtggaagaatgggaagcttggaaagcggccggtctgctgtgcgaaattgaagcaagaagccccatatccagagggatcagctagttagcagcacaggggtgtgtgtgagcttcggctctgttagtaggagctgtgtcacctctgatttttttttcagggtgtgtgtgtttgctctcttttgtttttgctctgtacagttctgaattttctccttcttaatactattgtttggtcggcaaagccgacccggcgaaaaaatcagaaccatttcaacccctgtggactgcataagtgcaaatcaacttaaacaaatgaggcatcagagcaaatcacctataactgatgagtacagaagaattatatctaggtgctgatctgacaacactcttcaaagacattcccaatcaacatagttcaggtttcagaagaaaaacagcctaggttttgcatcacagattcacaatccaaccaaatgcaagggtttctgcagcctgtattttaccgagcgcccgtcgcagccggtgaatccccaccacgaacgccgtccctctctccctccctcatctcctcccgcaccggaggagcgttcgccgtctcgccggcgccggcgccgccgcccct

SEQ ID NO: 46618 - DNA, 2012 bp, Oryza sativa
gaggagagagagcaccaaaccctcgtctcctcctcctccggtggtgggggaagagaaggcggcggcggatagaacgagccgtctactggatcggccgcccccgagaaggtattgcccccgttcccctccgattcgctccccccaaattccccccgcgtaataatccaagggtttgtgttgatcgggtggggttttctcgccgggtagaccatttcctgcggttgattgttggtgcgtgacggaagcggagcgtgatcgggtatcggacgtggtcggattgatgggggaatttctgggattactcgtcgtcggcttaataatcgatgaggcgggtgtgatgtacagcggcgcgattggtcgattcaggtttcagagtgcttgagatcatgtgatttccgctgcgaaggaagttttcatctcctgtgactggaatcacgcgctaatccgtaccgaactctctctattggggcgtcctgttggtgtcaaacaagccgttcacagcgatcctgtctgttcataactattgtttgcctagttgcaattaactgtttatctttgtcagtctaatcttttggccataggttgttctcgccccctaatcagttgttggaacttatctttgtgctttagcttctatggatgagtcgtaggtgtgattgtttagtagtaaaattatttgagtttttgtcttgttcaaatcacgcatttaattggaaaatgttcctcaccaccactgagtctttcagttctatcaaggagtcagcatcttctggcccagccttttttgcgttgctacactttagttcgagagtctcatacatacttgagccaccaactatatacctttggagatttttcttattttccctcttaggcacaatattgacatagtaaaagtacatcataaatttaacttcaagagctaagctctactaattaaagtggtcctttattcttcttattgtccatgtaagaatagttcagtgagaagagttatttgacccgtgtaacttttaagtcagcaaacatttttgtttgactccttgtcctgtctattagcagcctagcatggcatctttagttgaactcttctacaagggactacactatctaatgtgttatcacagtttcttatgtaatagaaatgcaattcatgtcatttcttagcatctaaatgatcaacggatagaaaaaaaattatatgacgtgtataactcatgctatatctgaaccttcaagtgtaccttcttctcatgatgcttctcccaatggaaagcatccctttaacccttccatccatattggttcttaaatttccatgtcttccatcagacagagaacatataagttctacaacctcggtttatccttagaagcagaaatgttcaatatgtcaaaggtacaactccgtgtcctttgctttgaaattcaacatcacttgcacaacatgtcttctgcatcttcaggtactccttattaacatttcaagactatctatatagtattttattttattagaaatgccacgaaaccaccatttattatgcaaatgcaggctatagtgagattcggcttccacaataacccacgaccttgaaagctgttattaagatctattagagttggacacaatctttggaacatgattcagttatgttgtgtgtttgactccacatttgggacacgcgggaattaggttgggtaagcaattgccatttcttccaataatctgatggtcaggtattcaggttagtgaatggttccagacatattagttgcatatatataatgagtaaattggaagttatcacttttaatcatcttaatcctttgtgtcattctcacctttacaaaaggacatataccttctcattcttctcccttttctcaaactgttataaacttataatagtttcctttgttttctctagcccttatagtttgttgctgttctaactctaaaaatgaaaactaaaacaaggggaatttatatctttgggaatactacctag

SEQ ID NO: 46619 - DNA, 508 bp, Oryza sativa
tgaaaggaaaatattccaacatctcctatgttaagcttttttttaaaaaaaaaattctgtagctaggtaatgttctttatcctatcattgggaggaagcattagcttttgttgttgtcacatggacatccaaagttcatgtaaatgatcagtgtgtataccaatattccatgttatattaatgactttcgaatgtgccgtatgcagaatcccaaatcctctcagtttgccgatcacaaggcgtagatcgaggcggttgtcagcggggacgagcgtttggaccaggaggcagcgactcgcacgccgctcggggcatctggggggccaggacagcttcctcatcctccaccacggcagcggctgggtatggagtactaccactcatcggattcggagcagggcttgcggctcggtatctctgccaccacaaggcccaccatggactcatctgctctgccacgttccaccgttgctcatgcagcagacgtggccacacaagacaggaaggg

SEQ ID NO: 46620 - DNA, 576 bp, Oryza sativa
ccttgatctgtggaatggttcgcgagagagcaaatgcgcaagacacgggtgatgttgacaggttcgggccgctgagaagcgtaataccctactcctgtgttctggtggatctgtgtatgaaggagttacagagagctggagagcaagagagttcaaactctagagaccctctcactcctctttgttcccgtcttttttttagtctacgagctcaggtcttctcccctctcctggtaggcatggtcctccttttatatctcaaggggataccacatacaccatttctacctacccttcttttgggtggggacccatcctactttgaccaaaacttggctcgtaccttcgcctgacaccgggataaccctgtcctccctcattaatgggcggagatttgcaatggctgctgtccgaatgaccctccgatgggatgggtcataccaacctccactccgccggaagcaggtgcaacgtggaagcacggttgtttgctgatgacgcgaccggcgtcagaccagtcacagaccggtcattcttgtccaccacgtgtcagtttagcatgcctgcaggtcgact

SEQ ID NO: 46621 - DNA, 588 bp, Oryza sativa
cacatttctggtggtagaataatctaacagttcttttttgggttaattggttcagtctgcagattttttccgtgatgataaccctgaagggattgaggcacgcaatgaggttagcatgctttctgtacagtatttttgcaactctatcatattccttcaattcaaagtttcgatttcatcccagatattgtagttcaaaaatgtacgttgttattgctctacattttgagaataatatataacatggtaataagataaactattagggctagcatggtaattttgaactacaaattaatcctgatgactgtctacaacatcatttatttaaagataaagggagtacaacaattacagtttctgtgaaaacttttatttagatttagaacacatcatatttgtaattttaaatcttgttttgtatttgtataatctgtttgctgcctccttctgtgatatagttgcattttgccattgctcctcctccaccttaaggtcatgctaaggcatttcatttgaattatcttttttcccaaggagaagtaaacctatactattctcatgaaagcaccacaaagttgatattaa

SEQ ID NO: 46622 - DNA, 561 bp, Oryza sativa
gtactcatcggcatcaaagccgtgcagctgaaagcttcattaatgcctttggttgcctcaacctccacctcatgggaggccccatttgggtttgtgcatccaaggcttcatctcttgcagtttaccataatttcttcgagctcaccgtcgtcactctcgcagatctgggcgtcattgttgtggagctggtgtagtgaaggatccaattgcttttcatatctttaaaagttattgtttgcaaagttgttgctcaaggtgtaattttcccaccatataggggcctcaatataaaacttgctgacctttcacgtagtattatctgaggctataaacaaacaaacaaattcagcttggaagctagtgttttttctctaataaataattcagcttggaatgcacgaatttcacatggaacatttcatttcctgttatgatatttttttaagtttcaaattgatatgcctataaataacatagaaactctgacaacagcaaaatgcacagaacaaaactactgtgccaaatcgatgaggattctcaaagttattgctggtgcgatac

SEQ ID NO: 46623 - DNA, 3513 bp, Oryza sativa
aaaaaaattaagcttatattgaatttttttaaatgttgcacgatgttccagcaggtatatcgaaattgtctcactaagtagattgaaaatgtttcactcgtttaaattgggtattgtttcaccttatataaaaacaatgtttcagcaaatagcgaaagaatgtttcagttcactgcaacattagatctatacatagtgaaacattgtgagtatactaggtgaaacattttttggtggaacaaaaagtaaaccaaattcccttaataggggtttccaaaatatatgtgtttttgttgcaatggaatatttcgttcactgcaacattagatctatacatagtgaaacattgtgagtacactagatgaaacattttttgtggaacaaaaaataaaccaaattctcttaatagagagtttccaaagtatatgggtaatttgttgcaatagagttgtgtgtgtggacacgtggtgggctaggggaggggagcgcgcgtgcatggggcggtggagcgcccaatttctcctcccccgcccgatcgcccaacgggcatcattatcggtctgaaatatgccaagaaaatatacttaattaaataaaccttcgttttatactataagtcaattttgattttttttctagtcaaattttccttaatttaattaaatttatagaaaaatttaacagcatctacaataccaaattagttttattaaaactaacatttaatttattttgataatatatttgttttgtgtcatattgctatactttttttctataagcatgaccgaactttaaaaagattactagtgaaaaaaatcaacataaaagggagggagtatgaacgacagttataatggtttcagagactgaactcatcattcttttttagaagttttgttccctaggtgtacaaattgcattaatttgttaatccaactattctgcacctacagcaagtctgattgaaagaataagccaaacaacatatttgtaaataaaaaataatttgtgaatgaacttttatatacgtgttcttatcgacctaaaagtaaaagctgaaaaaaaaacttcaatgaaaaaactccaaaatcaactctaaatttaagattgaaaatttaaattttggctgataagtataagtataaacgaaaagatggaacgtttaaaataatttataactatttggatgagataaaaaaaagagtagaggtccctttaagagccaaaaatgactttctcatgtcattaggctatctgctcagaactctgaaacaacatgattaggagagggttttttcagacctgcttagcatcagggagtatcctcctcagtgtagccaggtgagcattaatcctctcccgccgccgcctctcagcctcgctgtggatcgtcatcgccgtcgcctgagccgccgcgctcctccccgacgacgatgacggccgcggcggcggcggctccggcgccaggccgccctgccgccgtggcagcacaaccgtgcctctgtacactgaagaaagatcatcatagccaccgtggtgcagatgctgctgctgcttcccttcttgccaaatctgctgctggcatgcagccatctatccaaaatcctcaactatatgaattaatgacgattaactcaataatgctgcaagaagaatcagtagactgttaattcgaccttcaagaacaagaaaatgatgaagtaattagcactgtaattaaacatatatagatacctatatgaggttcgattatttctgtcggtgcaagaatagcaatgaagagtgaagtgaagtgagggctgaagagaagctaataagagggggtacttaaactgctgcaaaaggaagaagaacagaagcctgcaggccctcaccacattaatttgttaattgtaggatagatggatatgctcgtcagaccaggatgatcagatcatatctcacctcatgataaatctatgtatagatgatctatcaatatatatgtgcatgtgtttcaattcattattggccaaccaaccacaaacacacaatgacatgtacacctaggtgcattctttttccacatttgatccccactaggtgatgctcctttggactattcagggatagctcacatcatatcatatactactaaatttcaattagtcactacctagggactatcatgagtttggaggaggattaactactacttaattagtctgagataactgaattttgtaagcttggcaaatgcaagcctgctgtccaactgagacttctttcttggcatcattgcctgaaaagcaggggtctttctgcatctgaatgatttaattaagaacacacgcacgtacgggtgtgactgatgagtaggattacatggtgattaaggcacgcaattagatcaattggctagttatactaatcaaatcagtgacaaacaaatggctagcttagctaggttaggacagttgaacagttagatccaaatccaacagttacagccagccgccatttggtttcacactaggatcgctttgcggcttcacacaggaactctcttggatgcttccttcgccacaggttccaacgtgtgattttgcgcacgtggttaattcattaatccttctgttttcattctcggctggatttttttaatataataataatatgatgaatagtcattggtaagtaggacccacttgtcggtcccttttgttcttgctttcggtttgccacgtgaaaaagcagggcatcggcttcgaggcatttatttatttctcttgtttatttaaaaaaaatgcttgatacatcttaaagcggatggttaatgtacatgggacaaattttgcaatatatatagtatagcaagaggcatgtctgaaagttgcataaatatatagaatcggaattaacatgaggagaaattactctctctggttttaatagatgatgtcactgttttttttcatgagcaccacataatattcactatttgtcttattttaaaatttctgtgtaaatatgtaaatttgtgtttaaaatacctttagtgataacctaagtaacaacaaaacaaatattaattatgcaatctttttaataagacgaatggttaaatgtatatcgaaattaatggtgtcatctattaaaaaccggatggactacttcatttggcgagaaggtcaatgcagatttttaccacctaatatacacagcttgggatttacagacatatcgtataaagtttagagcgatgctttgtttatctctactgatagtattatattaccaatagaaataatttgaaccattcgttattaaaggtaaatcagtaatttactaatacagtgattaggttaactttatcatttatgttttttttcagggctagatagatatgtggtcatttattgcattggtatcgctcctattccatcgaaaaaatcaaaaaagaagggaaaatgtttagtaattgataaatgatgattagaccctttcgcaacttttttctctttttgctat

SEQ ID NO: 46624 - DNA, 867 bp, Oryza sativa
taaatggcttcaagttactccatccatttcacaatgtaagtcattttagtattttccacattcataatgatgtgtctagattcattaacatcaatatgaatatgagaaatgctagaatgacttacattgtgaaacggatgaagtattaattatacaaattaatcagaaaacatatatatgtctatatatcctatgtagttggcaccagaagcatgatatgcattgagctacatcatcttaaaaaatagtagtctttggatccctatcatgctttgatctcaactatgcatccatttgtcatatgcatttacaacgtataggtgtagttattgctataaatctcaatgtgcattgaaccctaacacctaaaatactaatattcattggatctcctcatgtgttatacataactactattgaacaaatattatccatttagatattatgagtaaatgattttttttagattgttttttatgagctttctctatccatttagatattacgagtacatgatttatagacgagtacatgatttatagattgtgttttatgagttttcttgaaagtatttttaaaatttttcgctgcaacacgcagggtatccactagtttatttgatgaggtgccaatacatttgagtagtacctgttatgtttttttttcaaagaggagtacacctacctgttatcggtatgaagtggaaaaaatatataactgatctttaatgtctcagatatagaacaatgtacttttagtgaactcgccaatccatgcccccgtttgtctttatcaccctttttcctctctgcgatccaacatgccagtggatatgaataatcagctacgaagtaactcctttccgtc

SEQ ID NO: 46625 - DNA, 3042 bp, Oryza sativa
atgctcatgtttactaaactgctaaaaggatgtattttttaagaatatataaaaatttgttttaaaaagccatattaacatatttttcaagtttttaatacttaattaattataggctaataaaatgcctcattttcggatggggtgaagttcctaacttctcttgaacagtcttagtagagagaatatcatgtgccacggagtagtgatatgttaccatgctatcaatgtcaaaaagtgtataaaaaagtcaccaaaaaaatctgaaaaaaaattctaattaagatgtaagaccataacatataccatcagtccaaaaaaaatcagctcaaaatacgatgtgcataattagaataagaaaaacaaatttcttgctctaatagtgttcaaacacggcactttactatttatctgggatttttctttttctttctcctgtacacatcgtattttgttgtataatttttatgattgtgcatgtcactgcgttggacatcttataattattttttatatttttgtgactttttagatgtattttttggtaggtagtacagtagcatagtaattttatagcaccagatattttctcgggccttattacaccttgctaatgatacactgcacatacccttaagaactacgcattgagctgtacgcatgttgtgtttcgaccactccctccgtccctgtacatgtgtgcatattgtgtgcattaattatttcagtaataaaaacggattacgtattcagtccctgtcatcaggtatattttgttagtactgtttgtaaatggactaagatgtgacatgtaggtggtttaaaattaaattatattatattgcattaattaatggatgcgcaccgtatgactcgtacacttaagggattaaggtgcgttctttatactctcttcccaacttttgctcaatcattttcacatgcacgcttattaaactgctaaatgttactctttctgctctgaaatatatgaagttttggttgggttgggacacatacctatccaaatttgtagtaatataatgtggcccatcaaaccaaaactacttatattttaaaacggatgaagtatatttttgtaaacagaaattctacaggaaagttgttttaaaaaataatattgatctttttttttaaaaaaattaactaatacttaattaatcatgcgttaataagatgttccattttacgtgtttagaggattagttcctgatacaccgtaccgaacacaacctaagtgaacgtgatgctgtgtaacgtgttcgagatgattttatattatactgtacattatacatagtggtattcgtttcggctaagataaaatttaagcatgaaaaaatatactgcataattaattgagttttagttattacgatttttatatgatactttaaaacaacttctctatgtataaagtttacacaaaaacatactgaaaatggtgctaatagaaacgaaggtacaatctatattttaaggggaaaaaaaaaaggccacggtgacgattcgaaacagtctggacttgaccaagctccgccttgggttcaatactacaatacctgcaatactattcgaaacatactcccttcgtactcgtaaaggaaggaagtcgtttttgacagcgacacgatctctaaaacacaactttaacttcttatttctataaaaatatttattgaaaagtgatatatgtatacttttatgaaagtatttttcaagacaaatctattcatataatttttacattttcaaactcaacaacttaagagttattcatgatttatattcccaaggtttgacttaaacattgtcctaaacgacttcctttacgagtacggagggagtataaggtaaaatggctttgacgaattggaggaggtgtagagtccttggtacaatattatacacggaaaatgtacacatacacatatacatatttcacacaatcaatccctcatcttgccatgaactttgagcatagttttaactagcaaatcagcaacagaacaacaataaacacatgcacacaggatatagcaatttacatggacaaaacctcctcggtgtgaggagtaaaaaaccacgggaccaacggtccactacaagctttcactataatcaacaaagggtacaaatagagtcttctctagaacatctagaggcacattacaacaatagctatatcaccaagttacacacttgacatcatcaacatcaaccataacaactaacaagaggtataacaacaataagtagagaaatagtaggttttgtcctctttggttctcagatgagatctaccaaaccatagatgcaaattgcacgaaatttagcagaaatgatggtttatgagtcccttccaagttatccaaaaaaacagcctaatcggacactgtttaacctctcaaactaacattttaccaaatgctgcattacctgaaactacaatcactcgagttgacaaatcaccactcaaatccggtgctctattaaaccaatcctcacacaaattgatcagattgaagtgctcaaagtgaggaacgaaatcacccaagtttggtgctaatccaaccacgtttgtgcctctaatcgctgacttgatgaagatcgggtaagaaccaccaagatgaacaaactgtaactcttcttctccactctcccctccctctcttgtattttactggtttcttctcctcctcaatggctactgctctcactctcccaatggaggctagggtttttctttccaccacaaatgatgagacaatccccaccatgcatcaagacatgaatcaatcatcaatggctcacgctcacatttgttagacttttggattgtaatgggcagagaacaaaggcttcatgtggagggaatttattccaacaaaagaagcatataactagttctcgatgaaaactaattgatatgctagattagatagcttgctctcccttttaaattggtgtgatacgtcccaaaactatttataaaaactaaattaaggttattagcgatct

SEQ ID NO: 46626 - DNA, 995 bp, Oryza sativa
  unsure (1)..(995): unsure at all n locations
tatatttaagatagtagatcataaanctataatttaccataaaatgcatcccaaacctatatatttaatatggagtatcaaaaacaacaaattttataatcaagttatcatacaactccaaatttaccgcaaatgtaatcacataactacaatgttatgaattcgagcatgataatagtgctaaggatttaaactctaaaatagttttgtgataatttaatttttaaatccttagttttgcgatactctaccttaaattttagaatgattttggtgtaaaaactataatttaagatacactatcgtcttaaatatgtagttttgtgatagtttgatcaagctatctatatctatagtactcattttatttttctgggtgcatgtatggggtgttaatcagcggccctctttactgttatctgcattctgcaaaaacaattgaaaaggagtgcataatctcataaacccatgcgcaagaaattggtgactgggatgtgactgtatgacactacaaaagcaagttcgccataaaccactgcttttgtaggtcaagtactcaaatttcaaccaagcacatacttttgcatagcataacttcatgcgttggtttggtaccgtcgacaggtctcttctttcatcaaaagatccgactttgcagtttcctaacctactgatgtgatacctgtaagcaaactaattcaatgtttctgaattcagaacctgggtttgcactggtagttaactgaactccgtgatggagtgttgttacatattcacctgtatgagcactgaatttgatttgtcagatattcaaatcattatgtccaaaatatcaagttgtttttcttcaaccaaaaatagataagcatggacgtaattaagtttgatatgggatgaacactgaagactgaaagttactctcaaattgttgtcaatacacgtcacattcttgttcataagtacattgtacttctcgcccggctattttcttgaca

SEQ ID NO: 46627 - DNA, 3362 bp, Oryza sativa
aaaaagaaagggttaattggatccatgccactgtaaatatgacaaatcagaaaaatatcattactattcatgaaatcgggtagatgctactccaatcttctaaaattaaaaccataccactccatcacgatttccgtcctctccgtcacatttttcgccgtctccctcttatcttcgtctcggtgcctgaggaggagggcatggcggcacgccgccctcaccggcgccgagctccatgagggagatgatagccgggcttcctctcttcgttgaggtggttgcgctgagagcagacaattagggcgatggcgcaaagcggctgaaacgcgcggtggcagcggagagagaaggaaatcgttgggagaagcggccagggcatggcgagctcgggctaaagttgggaaaggaagaggagacccatgaatttcgtttttgcaatcaatttaagaagaagagcaactgggaggtcgtattcgaacgggaggcggaggcactgcgtacaggcacggccgcacgggacttcgtatagaggttgaagacgatgtgctatagcggaggcgcagcgcacgggcacggccgcgccggtgaagcccttccccatccgccgtcgttccccatccgccgccgtgctcttcttctccggcgccggtttgtccgtcgagacgaagacgaagacgacaagaagataacacggagacggctgaatgtgacgaaaaggacggaaattgtgatggagtggcatggttcttattttagaaaattagagtggcatctacccgatttcatgaataataatgtcatttttctgatttaccatatttatagtggcatggatccaattaactaaaaagaaaatggtgtgataacctgtgtttgaaagaattcgagctcagaccaatgcatagctctggcagatcccagctagtcaagcactcgagctagcagccgttctcaacggaaccacagattagcaatttagcattgccaggctgccagcgacaccacttggctgtgttcagatatgggaagttgggaactaaactctccgtacggaaaacggagcggtccattagcgcgtgattaattaaatttttgctattttttttaaaaaataaatcgatataatttttttaaacaactttcgtatagaaactttttactaaaaacgcaccatttattagtttgaaaaacgtgcacgcgaaaaacgagggagaagggttgagaacatgggattgcaaacaaaactgttcgcttcacatttctactagttttctaactacactgctaactgcttcactgtacccattttgccattgagtcagagtactcgcctgtactgtacgatgtagttacataccaatacggagtactgcgattttcagaccaaccgtgcatgggatactcttgcgttttcggcttcacatcagttacagtacacgcgacggtcgggccctacgttgtaaagccacctgatcaatgccaattgaaacgttttaacgctccccaagcacgggagttcggtgactatttaaggttttgttagcttgtcgaattgaatgcatggatgcgtacatacatttacatacccacttgtttcactttcacctttcctccgcacgagcgacctaacaattttaactgatttataccagcacaagctaaggtagcgggagactagtgcaaccacgctacagacctactccctccgtctaaccaaaaaaaaaaaaagacaatccctgggtttccacgtccaacgtttgactgtccgtcttatatgattttttttataattagtatttttattattgttagatgataaaacatgatcaatactttatgcgtgacttatctttttaattatttttataatttttttaaataagacggacggtcaaacgttggacacggaaacctagggtttgtcttttttttttttggatggagagagtatagtacaggtcaaggaaacgatgcacttttaacttactgtaataaaaaagaaaagaaaactactaaaactccagctgcagcctgcagaaacatgccgtgcccagagaggtgttctctccgtctcagacaacaagcaagcaactaatcaaagccgccggatcttccgattctatttcaacttgaaagagcaaaaacaatcaagttctccgggggattgcattcggtgtttgggctctaaccctttggtctgtgaaattgtgagtccatgggctatggcaatcttactcttggacttgaacaagacagacagctatgggctttgcggtaaggaaataaaagcccaacccaatagtctaacacggatacgatcttttggtttggaataagttcatcagaggtcccttaattttacgccgaatccgattttcgtcctcaaacccaaaaactacatacaactggtccctgaactattaaaaccggtgtaaatgaggtccctcgacgtttttgaaggttgttttagctgacgtggcgcctacatagctggtttgactaggtctacgtcctacgtggcattgacgtagcgcttacgtgacaattatatcatgaaaaaataataaaaaccatagccccacatgtcagctgcacacaaaaaaaattaaaaatagtggggcccacgtggccccacatgtcagcctcactcctcccttctctcttcttcatcctcactctctcttcttccctcttccccctatctctctctttctcttcttcccgagcagcggatgagcgggtgggcagcagagcaggcgagcgcggcgagcagtccaagctccggcggcggcggctcgacgtgcgccgcgtcggggctaagggagtcggcgacgggggaaggaggcaagcctcgaccggagagaggaggcctccggtggggtggtgggcgcctgttgacagaaaacacgaggcctgggagatctgcttaactccagtgcaggtccaaagctcgccttcggatgtatgagcgtgccagttgatttgatcctgcaatcaacaagagatagaacaaagaaaccgcaattaatcctataaatgatagccgatcggctagatgccgatgacatattatttatttcaagccgatgtcatgcgtacatcgatcggcaaatatcaataagcaattcagaactaaatctactcgatcaactgtagacattaatgatatataatccttatatcgggatatacttaaatcaagtgattgggatatatcggtcatcttgccgagacagtataaatcacttagatcgaaatatatattaatagtaggattatatacattaataacatagctgatcaggtagacctaacatgtatcgggtaatacttcgatacaactctatactaagatattaaag

SEQ ID NO: 46628 - DNA, 1983 bp, Oryza sativa
ttgagtttgagtttgagtccaggaaggaagaaactgtataccggtgatgaatcgtcgcgcaactggcggctggtggtggtacggggaggctttgcaattatcgggcgactttgagacttgagatcacgtatccacgtcgttcctgatgacctgatgattccagtactcgtgcgaaaaaattttcgttgggctgtgtaatttttccgatgttcaggtcattgagggttagtacaaggcactcgagaaaatactcaatatgtccttgtaccatcgccattcgccggttcaccaatcaccatggccgttggacttgatgagagagtcagacgcgtctgcgactcttcggcggcgagacgtggcgggctgtgggggaggaggggcaccaggctcgatgggcctcactgaatctaatgacacataagtgccacgttagcactacgtggtacaacgataaaatcaatatcgtcacgtaggtgctacgtcagcgaaaccatcctccaataccgttgagggagtcaaattgcatcggttctaaagagaagaatcagattccatcactcgaagggagtcaaagtgaacttattccgcgatctgcgaccacattggtttcacatggtagccatctgggccatgcaggacaagggtggcgttgcatccggccggcccacgtggcccgttatagctttttgtctgcccgctgagcttttcgggctggcccatacagcccatgccttctttttttttttaactcccgcatgccttcttttttttgttactatcaaactgtctgtttgtctctgtcaactgttaaccatgagaaatgaaaatgatacacgcacaaaaaaaaaattctgacaaactctttacaaaaactgatttggaaaagtgttatcaactgatcataagaaaaaaaacatacaggtagtacttcctacaaaaaaaaaatacaggtactcaaacgatacgttcctcttggtgtcatgctctttgaagatttctgaaagataagcgttgaaaaagcattggttaaaccttttctttctctgtgaagaagaagcagtccgtgtgcagactttgcagatatggctgtttaaaaataggtgatgggagagaaacggcaagaggttggatgtgtcaccaggtgtcaactatggcctcacagttgcaaccatttgacaaggtctgtctgagaacatgagggccttctattgcccggctttctctgatggcgttgtcttgtatccccttctatctaccaaacgccattcttggccgtttcaagcttagaaaaaggtatcaatcttctctcctcctcttagtttgaagacatggaaagctttcgtgtgttcatgtgttcatggttgatggcggtcaagcggcgatgaattgatatcactgggttctaggtatgctgtctgttcgtccatgtcctttcctcaagaaattcgcttgcctttgtgttcgtgaaaactcttgttgctgtaatgatcaattaaaagacgatcatgatatatctgcagaaacatgaactaattaagtgattttggtttatatcttgagtactactattagttttatcctttacatgccatccaattatcaaacaaacagagaaacatcccaagtcccaaccttattgttcttgtataaacaaaaagttctaggagtaggagtgcaaaggtattgacaggtgaaaaagttttgcagcataaatagtaatcaacaaggccaaaaaaaaaagataataaaaaggtggaatcaaattagaaagccaatggctccagaacgtgcaaggagtgttttgtcaggtcaaacaattacaaaatcctgaatatgcccaggaaactggttcacaaaaagaaggcataaacatgcagtttaacctttgcatgtctagctagggacattaaatcagtggtgaacatgttgccaaagtgccaaacaacatctaaatcttcgagggcaaccacagaagatcaaaac

SEQ ID NO: 46629 - DNA, 1940 bp, Oryza sativa
  unsure (1)..(1940): unsure at all n locations
atccagtacaattgttactatcactgcaactttagcagttgcaaggtagctgatggatcaaaaatcagcggctcagatcattagaaaatattgttcacgaatcactgtagcaattttctactgtagcgtatactgtgcagggggtggcagagcaaatccaagctgttggctgcatcgatccaacggtcataatatgctatcactgctaaagttgcagtcgttattacaactgcattggatctcaattcataggaagcgcgtgccagcaccaaggctgtaaaagatgacaaaaaaaatggcgacagcttgagagtgatgtttactactacggttttaaacgtatgacgcttttgacgttaattatttgttcttataaaaaaaagtatgttactattctctccattttttaattacctgacatcactccttcaaaaaaaagactggcgtaagacattgttcatttgcaaactctgatttgccttttatgtggaaaaattatagatatataagaaaataacatactatgtattacacacattaaacataaccatgaaactttcatttatcatggactagtcttttaagagttattaaatggccaaagttggaatagtaatagttaacgtgaacaaatatttgaaagcggaagaaataccatttacttttgtagtgacttatattttagaaaaatattttttcagtggtttctttgttgtacccattgaagtatgatatttgaattataagtacgtactctgaaacaaatctttgatgattttcatactatatacgtccattcttccaatattaatgtttgaaattatatgcaccatgcatatatttaccctgttgcgctgatccactacaatacatatatgcagtcttcatcagtgactatgacttttctacagagaaaatggagggatatgttacttttcgttaagaaaatgaagtgcattttaatatgagttccatagagccaaattaaacctagttggttcgtgccaatgcgcaccgaatctctcaccaactgagctcttgagcgatagtgatcgattaattttgttgccaccattatcaaagctagtctataatgttctatcacttggaaacctacgtttcaaagaaaaacgaaaaggtgacacacgtgtccctcagaggaccaccaggcaagcaacacaaagtgatcaccaatgcattagcactaatcatagagaacccaatgtggttagtccactgaatgctcatgcattgtggctgactagctacaaattaatatacgtagtacaatatatcagttggaggctggaagaaaaagaacagcctacagctcatcagtgcggatagctgaacactctgatagtctgatgtatatgcatgattcccaactttaccagccgacccattatcatcctagaaattggcgacaccacttgatccatagaaatgattttatgatataggaatcgaaggccatggcgaccattactgtcgcaacatgattcttgcatgcgtagctccccttttgatctatctgaaaaagataggtttaacaagagctaaagacggtggacaattgaatgggatgggtgttgttgagcagataaggctagctacatctacatggtcatggaatggagcacttgtctaggctagctctagaagagagcattatagggtatatgcttgttggattgattattggacgagcggtatgcatttgggattctgaagcttatattagcacggtcagcgttacatttttctgaaagtctgaattcgcctcgttcacgaagtgccatttaatnttgcagtacgtatgcataaatgatcagttcgtcgatgcatgtatttccgagttcgattgatgctacgataattattgacagcctgatctaatacttcaatccctaggggtttagacagagtcggntaagctg

SEQ ID NO: 46630 - DNA, 1136 bp, Oryza sativa
tttacaacataatcgtttaagtcgcaaagaaaataaatgtaaatgttttaatcacacattatagtttttcgctaatacgctatttggcgtattttgtgcatatagccatccgatgaggctatcagttaaaagaattgctcctacaactgcagatcagaatctcttgctgagtagtacctttctaaggattgttaaaaaaaaaaaagcttaatccatatatgttcatttaatcagcgtgtaattgacaagcaagcagtagcataaatttccataacaagctagctaatgaataggacatctaaacaaactaatcctaatcaccatcatgctcttattagttcggttcggtcacatcgtttttaaatccgcacccgtttgtttttgcgtgcatcatatctcttcattcatgtttcgttagtacagctgcaatctgtgcgtacttatcagtgatcaatgcatgcatttgagtgtcactccacgactcctcagcttgggatcagaataggtgacgagaggttgccgatcattcggtatttcggtgcagtgagccagccggacatacaacctctgcccacatgtcaattgcacacagggttcatagtcccgagcggtatcttaggttataaaaaaatatattggtaaatcaataaaaaccaatggaaatcgaagaagttttttttttgtcaaaaaatcaaattttagtttgattttttttaacttgactaaagaaaaaacgagtgctttgtgctatcgtggtagtccagaaaatccaattttcgcgtaaactagactgatttttgttgggattgtaaacgcttgcacctaatacatatatattactgcacaacagcatagcagggcagaggcaagactaaggcagcttagacttgagcccggcttacctccataaatatgcttaaatccttttaaaccattacatatttttctagaaaaccaatatcctattaattgagccctactcgagcgctaggcttagaaaatttttggctccaccgctactacacagaattccgttccgagccaggaaccccttttcctgcatgcgcgtgacgcacaccaatcatatcacaacactaaaccgagcaaaactaaggcccaaaaaagaagcaaactgg

SEQ ID NO: 46631 - DNA, 2610 bp, Oryza sativa
  unsure (1)..(2610): unsure at all n locations
cgctgtgcgttgacanccattttanatccnactcggtacccaattagctcgaccacggtgttgctgcaataaaaaccggcgggacgggacggcaaacggcatgcatggcatgagtgcgcggcacgaacggagcggaggctggtctggtggtctgctttgatttcatctcggctggccgcggccggtgcgggcggtggacgacaccgtggactggtctcgagcgcggccgctgggtggtggttggtttccaaactttaaatgcgagcgatcatcccgtcgggtcgtgcggtacacgcgagcatgcctctccgctgcataggcgtaggacgcttaccttcgtgtagcgaagttagtacaatgcaatggcttcacatgcgctgcgaacaggggcgcgggcagtgtgatattccaattctcgtctcttgttgtgacttggtcgccggtgaagctctggtagcgtttttactgtggcaagttatggttgatgctgtctgttgcatgtgaccctgtaggttgaggaaattaggacctgtactgcggtgggattcggtggataatctggtgatggcgtgatgctaatggaacaagcgacatgattacacgacccgctcgatgcaaattaacagtcttctctctttctttagtcagggcacaagaaatcagatcgtgtcccatttttttctcttggaatcgaattgggaaacagatatctgtttgtgtcttgaactcttgatgatactactactgagtatctatctagtgaggcatgggatggatgacgtcaccgtgaagggtgggcgtgttacggcccacgggacttgtgtattgcctgttgggcctcactggggcctggtaggtatttctcctacaaggtaaaaaaaaaatcataactatcgatcaagtcgaaattaggcaggtgaagtgggccgtattccaaaattttcaatgtggttactggtgagccggataaaggctgatgaagttacaaatgagctgggttggcaagctgaaggaaaaagtatgccgaaggtccttaaacttgtcatcgagttacaaaatcgtcccccaaacataaaaccggatacaatacatccccaacattcaaatccaatgaaaactaagtctctcggcagttttgacttcggttttgttcgacatgaccgctaacttagcgtgggacccacgtgggccgacacgtcagggtgaccacgtcattatcatctctttcctctctcccccctctctctctctctcccccagttgtcggcgacgagaggtgcccatttcctccaccagctagcgcatcgccgaccgccacgtaggacaaaaccgggggcaaaatcaccggaggacctatagtaaacggtttttgtaagttgatagatgttatatatctaattttgtggttgggggatgattttgtaactcgatgacaagttgagagaccttcggtttaccttttccgcaagctgaatacaagttctcatttcccgggcttcattcggcctgacaattggaccttagcccttaagttgggcttatttacgaccaactaagttaaaatcgaaggaaaatgatacatgtacagaaatgtgtttagaaacattttacaaaaactgatgtggcatttgttatatattgtatcttgttttttcgtaactatccactgattaaatccaagtttgtaagagtttagtaaagttctttttaagtacgtatagcattactcagaatcgaatcacaacctgtgattaaaaaaataatttctaattccaaattggttctaatgcatcatgtggtgacagtttgacagaagatgatcagaactacgctgcaaacagtggcacgagaagcagtttgtgcaaacaagcgattgggtgcgaatcaaaaattttaagcaaaacatggctggttgatcaaaccgagtgcgagcattagttttgtttaatccaagcagatcttatcgtttccaatataaaatggttcgacgttttcgttagcagtgttgctgcagctgcagatgcgaatgttggtccctcggttaaattaatcaaaaccggataagctcgatctccccccacgcaaggctccagttttacagggtgtccattgtcgaaggtggccagtctggctggcacgcccagtactagtacaggtttatttcagcggctgagcacacggaaaacatggccaaaacccacaaagggatccatcttctggctaaaagcagctcactaaaatttatcaaacttggtacgtacatcgaccccgtgttacaaaaagatatcaaagaatgcgatatgcatactacatttacatctccgtggcaacaaaacacattcattattcgccatctgacgtgctcttctcatcatttttttcatcgatgacggatcatgcatgcgtagcgtacgttatgatcatcttctcgtgtcgatctcaacggagcttgcactcggcgggggtgccctgggggaaccgcttggcgtcagtgcagtagttgtagatcatgaactttctctgcacccacctcatgcggcggtagctcatgtcgctgagctcctggttccaccacccgccggggccgccccttctgccggcgggcggggc

SEQ ID NO: 46632 - DNA, 712 bp, Oryza sativa
aattcccgtgtccccgacggacgcgcccatgcacgcatcggggactcggggtcgacgactccggcggtgcgcatttgtggcttctactgcaatattgccgatccatcgatcggtagtcggtagagcagctctgccataaacttggacttaattggttacttagccaaaagcccaaaggagaatttgcagctagctaggtagatctgatacagtgaacacaacgcattgcaactgaggggtgtttaaatctaggattataaagttttggcgtgtcacatcgggtattatatagggtatcgtatggggtgttcgagtactaataaaaaaaactaattacagtatccgttaataaaccgcgagacgaatttattaagcctagttaatccgtcattagcacatgtttactgtacccccatattgttaaatcatggaccaattaggcttacaagattcgtctcgcaaattagtcgcaatctgtgcaattagttattttttagcctatatttaatactttatatagatgttgaaacgttcgatgggataggattagaggttaacatctattgttattggtaaaaaaagacccatagattaaattgttggagtactaagaagaggttaacatatattattattggtaaaaaaagaaccacagattaaattgttggagtactaagaagaggttgggtacagagtgagattctaacccacg

SEQ ID NO: 46633 - DNA, 1525 bp, Oryza sativa
cgcattcttaaaaaaaaagtttgcaataggttatttggagtatgtagtttcatgaaatttattcaaataaaaatataagaaaatctcctgtatgaattgggctaggcatgatgcatggtgtgtgtgctcgtcgtgtaatggtaaaaaatggtaggcttcattacagattttagtttcttctaacattttaggtttgcctggttatgcatgtctgaaaatgtcacatggtttctggagggcattcacagctcacatgctggctgaatttatgagagaacctggaccatgcatgcatactgaatcctctgtcatcactcatcagcctgtagccaatgtgatgagagttcaatgtatgtagtacaaaattcaaccccatcttcctttttttgtgactgacttgcaaatttcaaaaaggaatggcatatgtatgggatatacttgattaactggaccagctgtaaacatctattatattattaaaggaatagaaaaagaagcctccacgttcgctctcatggcatagaaattctcacattaatcggagaaaaagaaaaaacagagtccatatagaaatacaatttagaaatagctgaaattcagaattaaaaaataaagaatattagaagaggagactagagtccatatagaaatacaattaggaaataactgaaattcggaattaaaaaaaaaggaatattaaaagaggatactagagtccgtatagaaatacgattaagaaataattgaaattcggaattaaaaaataagaaatattagaagaggaggctagagtccgtatagaaatacaatttaaaaaaaaatagaaattcggaattaaaaaataaggaatattagaagtagagtatagaatctatataggaatttaaaactaactaaaatttggaataaacataataaaattaaaagtagagtttagagtccatataaaaatacaatttacaaataactaaaattcgaaattaagaaaaacatgggaagaagagtttaaggtcaatatatgaatacaatttagaagtaactgaaattcgaaattaaaaattaaagaatattgaaagatgagtttagagtgcacatagaaatacaattataaataataaaaattcagaaataaaaataaataatattagaagaagagcatagagtctatatagaaatacaatttacagaaaattcaaaattaaaaaaaaagaaatattaaaagacgagtctagagttcatataggaatatatataatttacaaataactaaaatttgatattaaaaataattaataactaacacgtatataaaatataatatgaatattacccattaatagttttgtaaagttattccaaaatttaaaattatattgttcctccaatatatttaaataatataatgaaaaaacatatatgctattatatgagagaaaatataataatgttagccgcgcaatctgcgtgggccaccacgctagttttcatcgttgggtaccaccaagttgacaacaatgcacttccc

SEQ ID NO: 46634 - DNA, 1519 bp, Oryza sativa
tacaataattaaaattctgctcgattggagtgttagtaaaaattcattcactttggcccccaaccacatattagatttgcaattactgatttggtgtccagtgtttcaggtgctttgtagcctggtttgagtttggagtgttcgtaaggtgttatctgttgggttggtactcggatgtgtactcttccttgggtatcaatgtaataaggcaaagcttttgcctttgtctcaaaaaaaggatttgcaatttccttgatcttaatgaaatttggtcagcaccctttcgccgacccggcaaaaaaagatttgcaattactgatgacctctgaaatatgaaacatggataatttcttgctatttatttcatcattgacatcactgaaggacagaacatgtttttataggcctgtattatcactcttactcatacatattttgagacggaggaagtatcaacctggaacataccaatgaaacgaggtgatggtgatagggtgtgaaattttaattgccaggacattaagactacgttgttatgctatgattttaggcaaataattccaaagtggagccttctgcatttcaggtccagccttctgaaagtttaaagcttttcttgatactttttgaaaccgcagtctccaaaaaatcctgaggtagctttactgcaataagagggttattcatcccaacttgtaaggcccatgagtgcctttctaattgcagcccacaatggcacaaccaatcccctcatcttttgtagattaagcatggataacagttctctgggttcattaaatttaaacatgatgcagcttttctctcttctttcaattgatgcctacttttattccatatatctgttaagtctctggttttcaatgctgcaccatattactacatagctattccttcatatttcttggtagaccagcgtgaataaatgcaagaatggagggggtgctcgtcttatcatttcaagaggttttgttccggatgtactttctcttttttttaatgccactattattatgatcccatatttttttaaggcacctatgcccatatcacaataacaaaataaatggatactattcaactcggtcatataattcagcgatcagaatcttttcttgacaaggaccagtgtgagaaaccggcaggtttattatcactttatggcagatatgcagctattcagattggccgtatctacacaatcatgttgccattcaatatgaactctgcaatgcagtgtttttgcatgatatatttttaagaccttggtacgaaatctgacaccattaatttcgtaattagccaccatcacatgggaggattcccaatgttttatgctattctgtgcagaggttgtcaacattgtttttcttgcatgtgtgcgtagatttgtaggacataaagcactgttctttccttatctaaacacatgccattagatttctgcttcatgtgaccatgggatggggtaccgagtagaatatcaatccaaaggcccata

SEQ ID NO: 46635 - DNA, 2364 bp, Oryza sativa
  unsure (1)..(2364): unsure at all n locations
tctctctctcttagccgcacagaaaagtgattagtatacgattaattaagcatttattattaaaaaaattaaaattttattttcaaagtactaattttttatatagaaaaatttcacactaaacacacggtctaatcgagaaagcagccaaaccaaccccactttataacagacccaaagctatttgttaagatcatttcttaattaaaatgtttaatttatccctatatttaagtagataatccgagacaatatcaattattatagtagattatttgtttcgcattctaaaagttatgtttcttataactattgtactccttctttataccatttgtcctaactttttttattaagtccatttcttaagagtggatcatttatttcattttacgcgttcatcaaaccttggtcactgttttcggcagcctgagtacttttgcactggagacgaccaacgtggtcacactatctctagctgtgtgctacaaccgtggcaatgtgttctttcaaaaaaaaaaacaaccgtggcaatgtggcattcagctgcttattgattatgcagtccgttaggaagtactatctccgtcccaaaataagtgcagccgtagatatccgtgtccaacgtttggccgtccatcttatttgaaaattttgtgaaaaatttaaaaatatttagtcacacataaaaaatttttcatgttttatcatctaatggcaataaaaatactaatcataaaaaaatttaaaataagatgaacggtcaaacgttgaacgtgaatagtgtaaaactacacttattttggaacggagggaataccgaaatggtatcaggaggacaccaggagaagatcaccgaattatagtagaaatcaggcacgagcttgtcctggatttttcacattttggttcttttgaaaaacttatttcgcaaatagacccctagaaaaacttatcccaaaaattgtcctttttggggcgccagagtggctggcgccctcnattcaacaagacggcgccagcctttttagtgccgtccccctgtatacgtggcggggcgatgctgaggtggctagggggagtaccccagaatggcttggcgccacccccccctcgaaattttaaatttttgtttaatttggttgatatttttttcacgcttagggacacacaagaaccaaccatagaaaaattgaactcaaatggacataatatgtgacctgtaaaatttttcctctcctctcctctcctctctctcccaactagtgcaaaggaaaaagatgtgcaacttttttatttttattttatttttttgatacttttttcacacttagaaactcacaggaaacaaccatgtaaaaaataaactcaaacggacgaaatatgtggcatgtggaattttccaaagctccaccgaaaaacttctctcctcgaaaacacaatcttgcaagcggaatttggaggttttaatatcgccgccgaacccgacaaagctggggagaatcagatataactttttctgtagatgtccgtgcatatattatttgcctgattccgagtccgtaagataaagttacgcttgttttaatagatgacatattttgtccgtttcgatagagttttggaaaattctacatgtcatatattttgtccgtttgagtttattttttatacagttagtttctatgttctcctaagtgtgaaaaaagtatcaaaaaaatgaaataaaaataaaaaaaattgcatctctatgtactgtttaacttatatatgtcatttcatgtggttatattttgaattagattaagtaatttcatatagtggtagagtgcattatgtttaacatgctgatcaaagggttttactaaaggagttatggtctaattttagtgaatgtgcaaagtagactaagtggaatgctagctattttcagatttagctaagtgatagttcgagtttaaattttttttgcggttggttatatcgtgatcctgagtgtgaaaaaacatccgacaaaataaaataaaaacaacaccgttgcaactccatacagaaaaacaggaatggaggcggcggcgccagccatgcttgcgcccttcttcctggggcggcgccagcatggctggcgcccttctcctgccacgtaggttcgcgtgcgccatggtggcaggaggacgactacagagaggctggcgccgccccgttggatgacggcgccagcccctcttgggccctaaaaaggaccatttctgggataaagttttttaggggtctatttgggaaataaagtttctaaaaaattacaaatgggaaaaatcggccgatcaaccacagtgggtttcatagttcattaaccctactgtt

SEQ ID NO: 46636 - DNA, 995 bp, Oryza sativa
  unsure (1)..(995): unsure at all n locations
gtcgatcacatgtatgtaganctgttgtgatgantttttcgtctagacgtttgtgatgtgtcatttgtgaatgatttagataatatcactctcncccnnnccgcggttgagatcnaatacnctatgccgcagccgacantagaggatcccgcctcacagncaanacaaaancngacaaaccaacaccatctggacacaaaccatattttctttaccggaactatctgaaatgtgaccttacttgacattgcgcctgatgaaaacaataactgcggtaacctcgcatttcgtgtactacgccactaagtttacatgactttacagatattgttcccctaaaattgttaaagattacccttacattctccagatcaaactaaactacatcttacaattaacactactgtctatgtctcaattcatactattatattctatgctctggatctacacatatgtgctgtgtgctacagatgtgctaaaatatatggaactaaaactaaaacgcaacatatatactcaaacataacatattagtacaaatacaaaagatgtatgggagcatacctgtgatgaattgagcgaaccaacagggcttcgccgctccccttttgctgccctaccctctctctcttttgttttttttggatttttagtgaatataatgaaatttcacagaggagggactgggctttatagggggagaggcaaaaatcgccctcccccagggcggcaagggggccgcctgtaaaattccatgccccctcgccgcccatttgcaggcggcccccccccacagtacaaaatcgtcctagcggagggcggcaagggggccgcctccaaaaatccatgcccccccttcgccgcccatttgcaagccggcctcccgcacagtataaaatctgccctagcggagggccgcaaggggggccgcttgcaaatttcgttgacggccgttcccccagagcgaacgggcgtctggcaacttattttcc

SEQ ID NO: 46637 - DNA, 1611 bp, Oryza sativa
  unsure (1)..(1611): unsure at all n locations
ttcgaattttgattaatctcatattgggttcttatatggactcttatttaaatattgcatatttttaattctgaattttagctatttttagattgtatttctacttggtctctccttttcttttttttctttttctccgattaatgtgggaatttctagcccttacagcgaacgcggtgcctcttttcaaagctgttttaataatataacaaatgttagttattaattatttttaatatcaaattttagttatttgtaaattatatatattcctacatggactctagactcgtcttttaatatttcttttttttaattccaaattttctgtaaattgtatttctatatagactctatgctcttcttccaatattatttatttttatttatgaatttttattatttataattgtatttctatgtggactctaaactcatctttcaatattttttaattttaatttcgaatttcagttacttctaaattgtatttctatatttgtatttctatattgaccttaaattcttcttcccatgtttttcttaatttcaaattttacttatttgtaaattgtatttttatacatactctaaactctacttttaattttattatgtttatttcaaattttagttagttttaaattcctatatggactctatactctacttctaatattccttattttttaattccgaatttctattttttttctaaattgtatttctatatggattctatactttacttctaatattccttattttttaattctaaatttatattatttcctatttgtatttctatatgtactctatactctacttctaatattccttatttttaatttcgaatttcagttttttcctaattgtatttctatatgtactctatactctacttctaatattcttttttttttaattctgaatttcagttatttcctaattgtatttctatatgaactctatactctacttctaatattccttttttataattcggaatttcagttatttcctaattgtatttctatatggactctagtctcctcgtccaatattccttattctttaattccgaattttagctatttttaaattgtatttctatatgtactctgtcttttctttttctccgattaatgtgagaatttctagaccatgagagcgaacgtggagtctcctttttctattcctttaataatataatagatagatttgaacgatgtgtagctctagcccctttagtaggtctcattaccttctgaggaagagctaaactcatactcctacatgtctgttgtgtgccaaaatatttgcttttttttttgctcagcgccaaaatcaatgcctctttggcacaggtcagcgcggctacaacagtcatcaaggcaggcatagcgtgatagcgactccctccgtgagtcctgattgattttgtttataattttgtggcattacattcatcatcagaaatgagcatagtttctgttcagaccagtgtcaattttgtatttttgtcattttttaaaacttctaaaaataagtggttttgtcatatttgtatttttatattttgttgttnagtggaatngcattcaaacccac

SEQ ID NO: 46638 - DNA, 1118 bp, Oryza sativa
  unsure (1)..(1118): unsure at all n locations
ttgggcgacttgaatgctttgatatcgagctcgtacccgtttagatataaattttgctttccaactaatagaaggaaaaaataagagagataatggagtgaaaagagaagaacataataggatggtacggagtacgtacatatacaaacgtccatacaaatagggtgggttcagtttagaggtagattgggtttttttttcattctaatctaacggtttaaagaatggatccatcaatttaaatgaaaatcgatggttatatagttttcttccacgtgacagcttaggaccgtttgtagggtgccacataacggtctaggagcgtttgtagaaagtttaataaactttttaatatataatagattgcaatagaaattaattggagacaaacagttcaattcaatatctcatacattatacattcatacataagtggatgaattgaatgctttgtaaacaagcattgatgttacatcagtgtgacgttcagacttcagaatcgatcatacggctgctgcagctggccgactccaacaagggtcttcttcctcctctggttctctctgttccatgtgagaacttctcccatgagacctccgagcaaaccgtcgccaccttcgtcttccaatcatggagaggattccattttgctaatccaagaagatccaataactctcatacattcgcatcaaccaacgtcacaatttagcttcttcttcctctttttcttggtctgttcttgtgctggctagctccgatgtgagtcagtatagatcaccatgtcaccaacaccacagcagcatcatccaaaagcttctttgatgatctttgcacgcgcagcaattgcagttgactccgatcaaacgatctttgcgccaatccatgctgatcagtgatcacgcacggactcgctggtgaagcacgccgcgccgatcgtcctcgagcttttcccagacggggaacgggaccatggccgtgccgggcgtncagagcctcgccgccggcgcccgcttgtacgcctcgtggcacagcgcgtcggccacctggttcccctcgcggtaggcgtgctgcacctcgcacacgcggaaggagtcgagcagccagaggatgtcgtcgag

SEQ ID NO: 46639 - DNA, 1953 bp, Oryza sativa
  unsure (1)..(1953): unsure at all n locations
tggtggccgaatgcttgaaatcaaggtgaaattaataaagatgagctgaaaccgaatcaaacttggagtcggattgtgttacgaatcggagtcggagatcgggctactcccgcgctcgatcacgccgctacgtcaaggtgcggaacgccgtctcgtactgcgtgaggatggacgtccaggatttttgcttagatgctaggaagggaaaatagaagaattcaaaggatttgttggattcaaattttgaacttaactttgaaccagggtttcggaagaggggcttttgatggaatttttaaacaaggaggtattcaatgaatgatttcggaggggaaatttgaatagcaaaaattcaaatttcgagatttgaattcggatatggttttttgaatttagtactaaggaggaatctaattgagatatttggcgcttattccttaatgacacagagagaaccaactttttgtaattagggtttatgtaaaatatagtattttttaatgacttaaaaattggggtgttacatatatcaagaaattaaaaaaaagtaacaccccaattttcaagtcattaaaaaaagtatatctagtgcacagcccaatctatatttgtttttctccctttaatatgtacgttgattttaaagatgatttttttgaacgactcgcacgagacgatgtgaagttctattaatagagtaggaaaaaaaatacaagattataacccaggaaggtcgtaaccagaaaaaaaagaaaaaaatataccaccacccacacaccgacagcaccaacacacaggtccagaagaaggctagaaccagaccggccgtaactaagcgtaaccggacgccgctaggccaacaacggatcacagacgagatcacccaaaaaaacgcccttacaaccaacacaaagcccaactctatccacatcttccggatttagggagaaagagtgagagagaagatggaacacctctccccctaggccctccgacgtggccaacttgtagaaactaggacaccgtcataagaggatgagaatctagagcgtgcttgcaccaattgctcgagtggttttagcaaggggatgcctaaacgacgtctccaaggacagaagcgacggaaaaccgccgtcgccgtccatcaaggtctcaaaggagctaagactaggcttttgcccggcaaccacccttttgaagatgatttttggtcgagttagatgtcagtgtcactatactctacagccaatttttttaatcaaatttattttacaatcacttagtcgaatttgaatgaaaacgttatacaagtagtacaacccccttgagtatcggcaaaattagtagtagtagaatcaatttccaagtttgcaacagatcggaaaggtgttcgcgccgcgtcctcatgcccctcttgctggcgccgccgccgagcgccgcccgcccgctgatcgccccgaccgtgccccacctcgcgcgcacccttctcgccggcgcgccggagaccccgccgctcctcctcgcgatactccaggcctcgccgcctctcctcacgccgctcctctgccacctcctcctctcccactccccgccccttccggcgctctacctcttccgtcgncttcctcgccctcccgggcttccccgtgccggaggcctccctccccgccctcctccgcctgctcgcgcgctcccgccgacacgccgtactcttgatcaagctgctcgactccttcccgtccaacgaccaggacctcctatacactacggcgctcgctgtgctgctctacaccgcgcttttcgcgttcgacccgggcgcgttcttcgacgccgctgtcaccttgttttacttctccacgcgcgtgttgtctgcgcccccgacacaaatttagagtccgncaacataaacgggctgatccgngcagtctgcgccccgaggtcgacgtagacgag

SEQ ID NO: 46640 - DNA, 1897 bp, Oryza sativa
aatggtttgcccccacgctttatttatggggtgggggtaaaccggaaaagctagtaagggcatttttcggcctttgttgcattatcaatgcgggtgggtttagttccccttttctaaattaagagttaatataggtaaaaaaatttgaagtaataaaaaattgaaagtttaagaaaaagtttggaactaacaagggctcaaggggtgcatctcttgttctcttgcaagaccctagcactagctgcagtgctatactgccgttgacaagtcacgtatagacaagagcaagtataatagggggttgtaattccgctaaatgctaaagtaaagaagaaaagagaggaaaagcgggctgtaaacttccagtcagcttgaacgcaataaccaaaaaattacgtaaaagagacaggtgtgccatatatgaattgtaaatagctaactattatatgcgtaggctaagaaaaggctataaagaaccagcaagttagttgtattattaatcttgctctaacttagttttcttttttcttttttcttttttttaaaaaagaactcgaccaaaaggagacacatcccgaagacattgcatttaaggtcgggaacttagttaagcattaatttggatcataattcaatagaaattttataggtaggcgtgggaaaaaatatggggtcttttggatcgtaggattaacctcgaatggatttactccctccgtcttaatataaacaataaatatagattcatggtattaggatatatcatatgttattttattttacgtgaaaattgttatagaatttggctccttgctagtccacgctatttcttgccgcacatgtaacatgtttatttgtactgtgcaagctataagagaaaaaaacatcataattgctattactaaatgatccaaggtcttacatagtagctgtataccacactctctttaattaattaatcatttgatgattgcaagatggtcctgaacctagtggaagatgagattacatgcaatccattccagatatgctgctacatttccagatttcacttgcctaacagagtcacaggttaaaattcgcactacaaataaaacagagatacagtagctgagttggactcattgcaaattccagcttcagtacattcatccaaattaattgcacaatttcagcaccaacataattggcacacctgagttcagacaactaccctggcctaacctgcatatgattagatattagaggatcatcatctagcctaattagcatttgggaattgggattactacttttgatgcatcaatggcattctaaagcgactttctgataactgagggaccagtccctctcctgcggacagctgctatacgtgcaagactagtcctcctcttggattggatcacgccttagatagtcctggacatcattaagtttggtcaagtatgagaaaactcggttgcttcttttctgaaagaagataattcagttgcttgtcactacttgggtttcagttactatctagatctatcatgtatgcacttcatcctagttggaaggtgatggagatgcaagctataaatcacactatctgtttaactataagcttggagaacacatgtgatggcacatggcctgaaacaacccaaattatgtcaatcatctcgcagagatgaaaggcatggccttgaaagttgaaacccatccgaatttaaaggaggctttaatagccactgacgagcaacaagaatgcatttgctgaactttcaactcggcctatgaacatcgagctggatccaactcgatcgtagcttgctgagagcttaaatgtgtactctgttctgaactctggacactgtctgtgtccagctaaaccgtggtgcggcgctcaagaggg

SEQ ID NO: 46641 - DNA, 974 bp, Oryza sativa
  unsure (1)..(974): unsure at all n locations
ttgatgctacgataattattgacagcctgatctaatacttcaatcctaggggtttagacagagtcggttaagctgtcgctttgatttgagaaatgagaaattcagagcgcatctcccgtgctcccatttttgtcaagctgcagacggtgtatgatgcgtagtcgcctatggtgatctttttatccacggggaatcaaaactggtcaaaacctagctatgcgagggaaaacggccaacagatcgttcgttaaggtgtcgacttggctttacctgattccctttgtgcgtgtgttggttgtgtcaggctttcatcttttggctcaaccagcatatgctaatactaaaatttaaatttttaatttaattttaaagtagtttttgagttttttttatcataatttcttttacaacataatcgtttaagtcgcaaagaaaataaatgtaaatgttttaatcacacattatagtttttcgctaatacgctatttggcgtattttgtgcatatagccatccgatgaggctatcagttaaaagaattgctcctacaactgcagatcagaatctcttgctgagtagtacctttctaaggattgttaaaaaaaaaaaagcttaatccatatatgttcatttaatcagcgtgtaattgacaagcaagcagtagcataaatttccataacaagctagctaatgaataggacatctaaacaaactaatcctaatcaccatcatgctcttattagttcggttcggtcacatcgtttttaaatccgcacccgtttgtttttgcgtgcatcatatctcttcattcatgtttcgttagtacagctgcaatctgtgcgtacttatcagtgatcaatgcatgcatttgagtgtcactccacgactcctcagcttgggatcagaataggtgacgagaggttgccgatcatttcgtatttcngtgcagtgagccagccggacatacaacctctgc

SEQ ID NO: 46642 - DNA, 1083 bp, Oryza sativa
  unsure (1)..(1083): unsure at all n locations
ggacaagccgttgcacgcagaccagcggtcgcgcggcaccgtcgattactacgcgtggagcaagagcgcttcttcggcgggcttcgccgcngccatgacaaggctcggnaaggtcggcgtcaagacgncggccaccggcggcgagatacgccgcgactgcagattcccgaattgatcggctaactcgcaccgtacgtgcgtgcacggtgcactactacttgtacatgcaaacattcaatcttgctcggttcatggacttcttactacagtacttagttgacgatgaacacgacgactgtcactgtaataattaatctcgatcaattcaataattcatacgtaatagatgtccgtaactgattttttagataatggaatataatcccggcttttgattaaagagctacagccaattattacaccaatttaacaaaacacacgtctaaagaaatagaagcacacacaacctactaaaaactcccacatcataacaagatcacactgctatacaaaccgtctttaaccccgatatgcaactccttcagtcccgggtagcatactgagattacgaatcaaaaaattattgaattccatttgtaaatctcatctaagtatatggcgtaggtgttttctttttcctttgtttcaatctcgatccatgactttatacagtacacgttgataaactagatagattaatttactcctagcgataaatttgatttgaccttagaaactacaggcccattaatagcaaagaagcccatgggctagtacagaaagtggattctaaattgtcgaggaacgttctctcgttgtttgcatatactccatccgtttcaaaatgtttgacactattgactttttagcacatgtttgaccgttcgttttattaaaaaaaatttgtgaaatatgtaaaactatatgtgtacatggaagtatatttaacaataaatcaaatgatatgaaaagaataaataattacttaaattttttgaataagacgaatgatcaaacacatactaaaaaattaacggtgtcaaacattttaaagggtaccgagctggagtatctaangcgcct

SEQ ID NO: 46643 - DNA, 1166 bp, Oryza sativa
  unsure (1)..(1166): unsure at all n locations
ttatatttgcacaaattttctgaataagacgaatagtcaaacagtgcaagcaaaatgttaaaatcccttatattaggggacggatgaagtatcatgcatatcttgtattgtattctgatttatgacttgtatgttcctcccaccgcgcttttccctcctccttccgcaccttcgtctacacagcaacgcaaatggatggccggtaacggcccacggcatggcgggggcgacacgtgcgatggaggtggctgaactgattccacggagccacaacgagagacgccggtggtggctggtaggagcgggacgaggaggtgacccctgcgtggcaccgcttgggcaaacgcagggcgcggcgtgaaggaggaggtggcggtgctaccatgtgatcggaggaggcaaagccaatccctaggttggggttgccatggtggcgggggggggggactcttgctgctgaggggcaccgctaaggtcttggcgctgcccgctgctaccgcgggctcattctcgactgcggtggcggtggcgatgaccttgggggaggagagggcatcagccggcgacatcggtggtggattggaagagggaaacatggcgaaggcgatgcggttaaggcggcgcaggcaatgcgtggggatcgtgtccaacggcagtgggcagtgacagtgggcccaccgttttttaatctttgtcattaacatgtggggtcctgcaagctgattcagccaatcaacaaggtcaaatataccacgtgagacaaaaccacctctgtaaccacccgaggagtcgatttggaatggttttaagagttggaggacggattataacctgttttaccgttaagggttgccattcaaccatgtacatgagttgagtgaggcaacgaattcaactaacgaattccttcccagtacgtgtcagtgtgtcaggtcagcggaattttcaatgatgagaataagcaaccaaagtgggaatagagcaaacgtgcatgtcaagtcaagtcacacacaaattaatcgagcaaatcacattaacatcgttgtatataacaactaattagaatcgtggacaaaaacaccgattttgtttggacaaaatataatgtatgngggatctggaatttctctgcggctgcgggcatagttcacgatttaaaagcccgg

SEQ ID NO: 46644 - DNA, 1304 bp, Oryza sativa
  unsure (1)..(1304): unsure at all n locations
agcactaaaaaaatgctttgtaaagatatttttctagtattgtagagacacttttcaaatgcctttacaatattgtagaggcattaattacccttttaaaaatgtctcataagtgtcttatggtgaattatctctacaaacgaagagacattttataaaatgtctataagatggtagaggcattttctagagacattaaattgtaccacaaacatatgaaaccagtccaaaaaaggagaataaaatagtttctttgcttttgtcaagccttgaaatcaggatctcttggacaaatcatttttttatcttcaatatactaaccaactcaactctatgtcattacttatatgtttatgcctttagttacttatatttagtcttttaatacacattatcattctaaaaagtgtctttacatagtttaaaatgtctgaagaaagtgcctttacatatcagacgcattttacaatgccgaaagaatgcctctacaagataaaatctaataaattgagctgaaaatgtctctagtgtaaaagttttctagtcaatttttaaagtggccctataaagtgtctctactctataaaacttctgatcttagaagcaatttataaaacgcctctacaaaagtgcctctatataaggtttttgttgtattattgtgattttagattttgatacatatgaaatatgcaatttatatcattattcaaaacccacaaacgcaactatttagctgctggattttagtagaaaacatattttgaatctgagaatccgcttccaaaatcaagtttagtgtaaattttagagagttgtaactatgaagtactatctcgtctagactataggtttgctgtaacatcagttgggcatttcagagaaactgcaataatagttgaagattttattattaatcgcaacttattcatcttgtaggtctgggtccacgtgtacatatatataatactcaaattgttgcactttgggcccacatgtcaaacgctcatagcattgtagttttctaataaaagtgtactatatagtttagttgttttaaatatttagattttagataaagttgcaacatagtaattttttttactaaatagttcaatttaatttgtggtggggaaaaaatccataatcaaaagcacaagaaaaaagcctaagacccctttacatttgtagaaaacatagaaaatttagaggattttaatccaatggaaaaaattccaatgtagacctttgaagcaaagaattttttttagcggggtaccgagaaggaattcaaaanngacata

SEQ ID NO: 46645 - DNA, 868 bp, Oryza sativa
  unsure (1)..(868): unsure at all n locations
atgtcacgtcttccgtctgtataccgtggtggtatgtggcacgtggttacacgtgagaangatgtgtcttgtgggtaaagatgtacacctctgatcagagtanaatctattcgaatagccgcgccctcggttatgggcagccgagcaatgtacccagttangtgttttaattcttaaaacctgcttaacaactaaaatgtggaatggttggcctgggttggcttgggacgagctaggacccagggtcgggttgccagttcggtctgaatcatcgtaggccttgggttaaggcaggttcgtgtgggttcacggccttgataaataatattgtttagttctagaatcgtgtttacaaaatagccctgagcaactaaatatctttaaatgctgtttactgcaaccataacccctttatggtataactcctttgtactcccttgcatttattctgcatttgtgggtgtgtcttgttgagtacggtggttgtactcagtcttgctcaatttttcccaaccccagaagaggaattccaggaggatgaaggcttcggtgtctagctcgtgcctgccatcaagcgcctgtggtcgtcgccctagtcttccgctatttctcgtttgtctctgtgtgtgctgggccttcgttgcccatgtaataagttatctaattacgcttccgcttgttaaactctgaattgtatcaacttttggtgtaccttgcctcctgggacaaggattaatgcacgcacgtaaggaatgcccgttgggttatttccggtcgtgacaagttggtatcagagcccctttgaccctaggacgagccgtagatcccaagccttagcagagaaaccgagctcgaatntcaatcacac

SEQ ID NO: 46646 - DNA, 749 bp, Oryza sativa
gatgtcccttttgaattgcatatctcgctcggtacccattattccagcccaatccggatttatttggttttctttgtcagcactaaaaaatcagtatccgggattttagtgtgttttccttgtcaatccgacagtcggagtcctgaatatcggtatctacgagtaggactagcacaacaatggtttgaaacctaaaaggggccactgggaatgagttcaactaacctgctagatagacgcgtatatcaccgtatcaacacctgattgaacgagcatcactttttcactgcgtgtacattgaattttgagttgaaactttgcaaaataaagtggagcatgttaccatgttatacatcgcaaatttttatcacaatctttcatgtttatttgacggcaacttgaacccctaaaattgttctccagtatagttcgtacatatgaggctattactagttcactaatgtggcccatgatgactcggccggttagactaggtcaatgagccacgccagcaaaaactaactaaactgcctttaaactacgagggaattattttaaatcggttataatagttgggagccaatatatttgagattggaccaaccagtgagggagtcaaaatgaacttattcttactcttaagtacgagtattttggtaggaccatgggctgtatgggcttttggctcgtccgaaaccagctcgccggcccatctcggcccatgaaatcttccccttcggctcagtctg

SEQ ID NO: 46647 - DNA, 1502 bp, Oryza sativa
  unsure (1)..(1502): unsure at all n locations
agggccnattganaancctgatatgcgagctcgnaccctacccggaaaccacgcacgccaccgttgtattgtcgtacagcttcaactccaggtctccaagactccaagtcgccaatcagcgtgcgtacgtttgacctaatcttcgagctggcactgcatcgcaaggctgattcttcagcgagcgagcgagcgggacgtacgacgcgcgagccacccgtaccgaacggcgagtgccccgtcaattctcaattctgcccgcatgccccaccgccacatacgctgtattcggctattcccccacgcgtcgcgtgtgcgcgcgcgctgcgtagcagccgcctgcctctgcgtggagtggacgcggccgcggccggtgggcgcgcgcgcctaacgctacacaccgcctctgaattcctcgtgcgaacacacggttcccccccccccccccccccacacgattcgcgtacgtgcgtgcgtgaataaacagtcgttggctcgtgcatgcatgatatgcacggggaaataatgggaaagcttgtgactcaagaattaacaatctggcttgtgtgtgaaccattctgcattctgcaatgtcatttacacgttcgagagctcacacctggctgtctgccatcaacagaaaatgcggcaatcatttgatgaaaccggacgcattgatcgatctgcagctaagctaccagctgcattgaattatataaagcttcactttcaaaataaaagcatttttttgggttagcaccaagctcaatcagctcccaaggcccatctgccattgagccaagagaaacagtactccctccgtactcgtaaaggaaatcgttttggacaacgacaaggtctccaaaacacaactttgacttcttatttctataaaaatatttattaaaaagtgatatatgtatacttttatgaaaatatttttcaagacaaatctattcatataatttttatattttcaaactcaacaacttaagagttatttataatttatattcctaatgtttgacttaaactttgttctaaacgactttctttacaagtacggggggagtagttagtgatcgatcgatcggttgggccaaattttaatgcatttgttagtctaaaagctgccaatatctaattgggcttatgctaacggacgacaagtaatgacatactcatcactcatcatcacgccaatccggtgatataatatttggatgaacggcatctgaacagacctccaaccgtaccattttcttttggcattgatcaacgaacttttttctgttaaaacctaaacatggttggataaagaaggttgaaaattctatggaatttcttgcaaattgggactcaagttgtgttgtggaggttccacaaaacttttcatggcagtgaaagaaagctggggtccaaatgctaaagctgggtggttcaattgttgcccttgagaagccattctttgcgaaggggagaaaaagaagtaagcactttatgct

SEQ ID NO: 46648 - DNA, 2307 bp, Oryza sativa
  unsure (1)..(2307): unsure at all n locations
ctcacgggctaggttaccacgcgtccatttcttcttgtttgctctctcatcactcgagctcactccactgtaaaaagaaagtttctaccacattatcattggtgccgtaggtaaacccgtgttcatttcgcttcgtgtgtttactcgagtgttttttcatccatcccgtttatttggccgtgacgaaatcggtttcctgacatggctgaatgctccctgattccatcgtactcggctggtttttcgtgccgtttttttaagtacgtttctcgggcaggcgagcacacagcggcacagcggtgcgtctgcaacggaggtgtatgggcgtggcagtcgccttctctttttgtcactactaggcgggcgatggccgctgtacctcgtatgcgagcgcgagcaaaacacggcagcagcgatctgattcgcatcagcaccgcgccctgtgatcacggcccgtgagcacatggaagtgaaccagaattttgcacgtactactgctactcgtgttctccatctgaaaaattgatgaagtgtgttggtaacgtacgaaaaaaacattgatcatgattcggcacagttcgtctcctcgtgacatccagtgatgatcactggatcgatacggtatccggtgccagaggatgcactttttgtatggtgtgcacgaagcagaagcattcaagtactagtatctctctcttttttttctggggtggtagacagggaacgctgcgttcactgcctcagaggttgttgtacagccgacatgtttctcgtgacgaacaatcaatggctctccgactggatgattgtacatcgtgttcttctctgcacttgagttctctctcgcttttttattcaccctgcctcggatgaaagcagcgtactacccgttgccactgtcaaggacactcctcctcataatcctttgtggttaaacaacttactattggttgttactgacatttgtcgttttcatctgaatttaaaacgggcaaagcattccctgacaccctatgtactacagtatatctgcctaatcttcagagttcagctagagaccatcacatcacgtgcactgttcctttcaacgatcggctgctactactacccgatggtgaacatgcacgtctcccgtcgtcaatctggcgatgtgatagttgtaagggtttctctgatagagacttggaggaccaccgacgacgatgttctcagccgatcaagcttgctaggaggaccggatggtagcaatagtagtactactactcgtagtagctataactaagctagctatggactgaaatcatgcatgcaagccgtctgtttctatatgtaacgttgtgctgtgaaactgtttgcacggttcaatgattgatgagatgggagagaactatactagtggctgctgattagtttcactgttgagccatcgtgcaacattgcatcaaactgcagtgccaaaaaagacgccagctcaactagcgagctggagtaggactagctagctatagcaattacgggattgaccattcaatcgtgacttaacctactaacaactgattccgttcaataatggtgccatgttggatagcggtgtgatgctgacaagatagcatctggataatgataatcccgcttcctttttcctagttagagatagtgacttggataatcaatccagcgtaaaccatttgtatttttccggaacacaaagctgccagtttctagggttgcgcatgtgtgctgtggtatgtggagccaaagctaatgacaggggaccagcaagggcatcagattagcagttagcttttgggccatggagaagggatagaactgggcctgaaggcctgatctgtcaagatatgtgaaagagaaggaatggacagaaggccccgtccggtacagcccatagaaacgttcaattggagttctctttgcgggccttacatgggacacgaattgacagaagcccatatggagatagcggacgtcccacacgcttggtgtcacgacgagaggaacctgcatgtgcgtctcggtgcgggcgtcgcctggtggcgtagctatccatgaccgcgcacacggtccacgcggaaaatcctgcgtacgtttccgtcgtaccggtgataaccacggacaccgctcgcgatataacctctccaaacttttcatcaccaacaccaagttgccgatgtgcttatctggtcctggtgttttctggggtaagagctagcaaccgaatcttgtatttcccacacagatccacggcaactgtcngggtnccgagctcgttagtcttaccttgcacac

SEQ ID NO: 46649 - DNA, 767 bp, Oryza sativa
  unsure (1)..(767): unsure at all n locations
ctaatgaacgaatgctaggaggtggaggtgttgatggaggtgattgaatgcagctactagtgagctatcatttatctcatcacggattgactatctcatactccagtacaattctcattgtagctatacatcgagctgctggacctgaactcgtagaggcctgcccagtccagagacgcggggctggcagattctcctacgccgacgagcttctcaaggcgttctgcgctgcctttccttcttcttcatcgtcgtcgtctctgccgacgcctgcgccgccgccgacgcagccgcagccagagcagcagaaaccagtggtggtggtggtgtaggagaatctgccagccccgacgacggcctctccggcgaaggcgaagctggcggccgcgaggcaagtgccaggcggcgtggctagatccaagaggaggtgagctttcttcactttgccttcacgctcacccacgccgtcgccttcggcttcccgcgtcgcagccgccggcgacgacttctttccgccaccgcgctcgcccgccgacgccgncttgccctgccggcggcgtcccattctcccgtgtcttcgccaccgcatcggcggcgacctcctccccaccgtcgaccggcctgccaagtccagagaggagtgagagagagaaagagagagaagagaggaaaggagaggaagggagaggccagcctgctgaagtggcatcctgacatgtgggtcctacgtgggtctcacgctgactcagccggcacgtcggacaaaa

SEQ ID NO: 46650 - DNA, 1241 bp, Oryza sativa
agtgacttggtattcattccacatggcatcgatgtggtgctacgtgggcactaaaataaaaccaaccttaaataaaaataaaaataaattaattcttggacccacatgtcagttacccaactcctcctgctttatcatcggcggcgaccaatatgaagagaccggcggaccggcgaagcggcggaagcaaaaccaccacgggaaccgaaaagaaaccagaggtgaggaagcctcgccatcgccgcttcccctcatgcacccctcctcttccgcacaggtgaattgctcctatagttgcacactcatattgaatgcaaggacgtcgaggacacaaggggatcggggagtcaaagtggccagggtttaaactagactcaagcttagtttagcagcaagggttcccaacccatctttttcatgttccgtgcgcacgcttttaaaactactaaatgttgtttttttgcaaaaagtttatatacgaaaattgcttaaaaaatatattgatctatttttgaaaacaaaaattagcaaatacttaattaatcacacgctaatagaccactctgttttccgtgcgctggagatacgttcccaaccgcctgcagcgaacacatcctcactcactttacaagcatatggttctcggggtatattcgtacttttcacatgttctatagcggatacatgttcttgttatgttctacagtaaagatcacaacgtttaaatatcatttagcaaattttatatttcgaaatcatggctaattgtctctgataggatcataggaggctggcgtcatggcgtgcatgcgcgtctgtggaattctgaggtcctgagctttggtgcgcaaagttggacccctgatgaaagattgtcttcgtacggaagtccagccgccgccgggtgcccagggcggttggttccattccatcaatcatttttccaatcgttctaattgcacttcaatcctaatctttgggtcgaatttggcgtaatggcgcgtgaaccggtccccgtcgcatatgtaccatgtcattgtaacaacagatcgaaatgcccaaagaatatttctcacaatctttaaagccacttttgacaaacaaacttattatacatccatcgtcgtcgacttattatcttcctcgtatccttttcccatctctctactactttttacacgacaataacacatacagcaatagatagggtaccgagctcgaatatgatttcaaaggccgcg

SEQ ID NO: 46651 - DNA, 1000 bp, Oryza sativa
atttttaaaaaatactagaaactagaagttgtgaaacttaacttttccaaattcttatctactcgctactcgtcaactgattattagaggcttaaacaaggtctaaagctagtgcaatgtacttgataaaatggatgcttaatttgtctaccaacgtaagtggaatcttgcttcaaatattttttttcttagaagatgtcactgcttgctaacgtcagttgagtgggacatgcatgtcaattggtacgcctctaccaacgtggcgatgagtaacctacagtaactagaatcttccaagctcgtggctgacgtttcaatgcgacagggggacttattctaagcaaaataacagagggcgttcaatatattatctagaaaaaaaaagtaaaaaacggtcaaatttcatatgattcatgacaaaaagaagttttaaaaagtcaaatttcataagactccgtgggattgtttaggggagcttaaattctaagaagcaacaggtaaggattcggctggtgagaatatgtagaaatttggaaaaacctagcttctgctctagtttattttttcattctacaactacaactcattttaatttgaagataaaaactattttgaaaagtatttttattgtgggagaaactacaactacccgaagctccctaaggttgtgtttgaaggtgcattttggaaacacttcctctatagcacacacaacaaaatgactcattagcacctaattaattaagtattaactaaagaaattgaataataaattaaagcaattttccaaagcaacctttccatagaatttttttttacaaaaaaacatatcgtttcgcagtttaggaaacgtgcacgtaaaaaagagagtaaaaattggaacagcttaaaaattgtagttaagaacacacccttaatatgccaggtttttcaaagctataattttaattttttattccaagttaaaattgattcaacagatccgatctactctggcaca

SEQ ID NO: 46652 - DNA, 1347 bp, Oryza sativa
  unsure (1)..(1347): unsure at all n locations
cagcaagtccaaanccaactgatttggttcttccccctctacgtatgtacgggtgtatcatggtgtggaatgtgatggagtactttctctagtcaagaattttttttatttttcttaatatcccctccaactggatggcactcgaggatatatttggctgtgttattatcacagtttttccaatccatctatctcgttttccgcgtgcacgctttttaaactactaaacgttgtgtttttttaaaaaaaaattctatacaaaagatgtttaaaaaacatattaatctatctttcaaaaaaagagctaatacttaattaatcatgcgttaatggattactccgttttctgtccgatgggagtgtcccaaccagaaggtgcgaacacacccaaatatatatcctaatatgtagtactccctcaaaaatcaccccccacaaagtttttacgaatcacttcctttctctcgtggaccaaacaaagattttatataaacttaccccgaaaacaaaatgattattgatctaaaccgtttttcaaaaaggcatattcaaacttatttaatttcctagctgaaattcggttatattttcgtcgtccaaacaactacagaaggctggcgtgttcgtttcggtgcagaaccagatccatgcatgtctggtatctcctttaccaaagttttagtactaattaatacatacatttcttgtattaatatattgcagtggccaaagtttgtcacttattaattcccttattaaaagaatatttcacatgattaccatttcgtaactgcccagcttgatcgagctacctattgattgtttttaattgttgtcccaggttcccggtaaaagtaaattatccaaggctcagttacctgcttaagacgctatcttccatttaatcaaggatctcagagtagggagagaaagaaggagagcaaaggtcatgtcatgccaaaagcatttcactttcacgcaaatgctgcttgttcatggaaagaaatggttgctgctctacctgcaagtacccctacggtttatttatatttacgtagcaagtttaaacgcgctgttgcgatgtatgatttctttttagaggtattatgatagtgatttcttgaaaagaaaaaaaacgaaaggagcttctggtagggattaggctctgtgttcgtttggggttgagaaccattcctcaatacataaaacaaagagttgaataattaattaagtattagctaaaagtttttaaaaaataattaatataatttttaagcaactttttggtagaactttttttaaaaaaattataccttttaaccgaacgggaaatgtgtataaagaaaa

SEQ ID NO: 46653 - DNA, 754 bp, Oryza sativa
ggggctttgtgttgactgctggtggacccacagagtgatagtatggctcccctcctgggttagctgtccctgacctggccctttaaatttgaggaggtccattttcatgccatatggcatttgaattgacctcacctactgccaagttcctgtcaacatgggtgtaaacaactacactgcttgtattttggtacatgtatgatgtatcctctagctttcccctatattattattgcagcttgtagaacacatcttaattagcactgcgatgagaatatggagagaagccccatgattgaatttcccttttcgatgcatgtcatgcaatagttagccgtttcagagagttagcttcgcactgatgattagagagatcaattaattagtggaccaaatttcctaattcttgcctaagagccaaaaagaacattattagggggccctttcgaacgcgaaaatttttcatgcttttgtactaataatgaaaattacacataattctgtgagagagtttttagaaaagagaaacttaaaaaaaaaattctaaatagtaacagagttcttgatctcgaaaaaaaaaagatatcttttttcctgtcactgtgaagccactgtttgactttgattggggagattttataataattcccagtacggcaccaaaatcttgagaaaaaaagaagagaagtaaataaaccgccgccaaatcaaaaggttgtggagatttgggcatgatcctaagagatatcgccat

SEQ ID NO: 46654 - DNA, 2688 bp, Oryza sativa
  unsure (1)..(2688): unsure at all n locations
cacttctagatatagattatgagaggtgaaaataggaaagggaaatgaatgaatgaatggctatgattaaatgagatatgaaaaatggatggctatgataggtactctgttttcccaactctctcttctacggttttccgcgcgcacgcttttcaaactactaaacgatgcttttttttaaaaaagtttctatacgaaacttgcttaaaaaatcatattgatctatttttaaaaaaagctaatacttaattaatcacgcgctaatagaccgctccgttttccgtgcatgggagatgggttcccaacacccacctccgaacacagccttagagggtgggatataatttccctatcccatttgccaaacaaagccttaggtcgtaaaaggttggaacccttcctctccaacatgtaaaacaaaacacacattagcgtatgattaactaaaataaactttaaaaataaattaatatgatttttaaagcaatttttttagaaaatatatataaaaaacacatcgttgaatagtttggaaaacgtacgcaccgaaaacgagagaggttgaatagtttggaaaacatacgcaccgaaaacgagagaggtgagttaggaaaagaggggaagaacacatccttatatttggaagtaagtttatttttattttattttatgaacggaaggagtatctcgctgatccattcatatgcgcatgaaggcgtggtccaggacaacagtacacagacgttactatagtgatccaaatgcatggaggatcgatgtagccaaggtttttctttgatctgtggatttcagcggagaccttgctttcgatccgttgatcttgtctccgatcgcgcgagactctacagcgtgttttcgtcctatccgttttctgggcgatcccaagcaagcagggggtaagttcctttcaatattgttttataatgatttctactaaaggagaaatcaatttacagtatgcttttttatcttttctaatttaatacgtcatatctatttatactacttagtaaaataaattttctactagcggtaaaacttactatacatcatcgattgtgatcatttaatagtgataattaatatatgagatgtgcttctatacttcttaaaaaaagttgcacgaaaatcgaagcacatcagtggctgtgattaaaagtgggttaacagtttaatcctcattagtgaggggtattttcgtccatagaaatttcagcccacaacgatatcgttctctcctcgtcaggcagcgccactgcccgctggtttcctctgcaacgtaagcgccacccgcttcccctccctgccctgctagaccaccctaactagatcccatcgatggatcgatggatttgcggtgatttgagtcggtagttcactcgcaacatgatgagcgggagctccagtgaataatatgctgccccacaatgaagatcgtcgccgccatgctcaacatgatcagcctcgagcacgaggactatatatagcaacgtcgacgtcctcatcaagggccaccacctcgcgccgccgccactgccacattgagcacgccgccgtgccggcagtagtcaggccaccccagcgacagctgcagcagcttctccggtgccatgatctacacctcatttaaggccaagtcgcaattcgattgaaccaaagtttaaacagaagaaataacacaaaataagcttgtgcccttcgtgctttggcttgtttgatatttgtctgtctgcaatctgcaacggcaagttcgatgtgacttgtgatggtggtgagctgtaaatgaacggggtagacataatggcatgcagatacttgttttatgactactggctgtgagatggacaaaatggagcgtcgtgctgcaccgcgcgtcgagaggaagaagagggcggagcggcggcgctgtttgcaagaggaagccgggcaacgaggggaggaagagagaggggaggtggcgaggcaaggaaagcgcgggcggtgcttgcgaggctgaggagcggcgctacccaaggagagagcatcccggactagcggtcgtagtcgtggaggaatncgcgttcccattggtaatttggtatcgctccaaagtggaccggggctcaaaatttcatggatgaaaatacccctcgctaataagattagagtgtttatctctcttttaatctcagccacctatgtggtttgattttcgtgcaacctttttttagaagtatagaagcacatctcttaatatatttgttaaagaatattacaagtaaaaagaccaccgtaaattatactattttttaaaaatatatggtcactgcgtactcgtatgtaagaagccatgatcacttaattactagtacaagttttccaagggaaaccataaaatggacctgaaaaaatgcgtattcccgtgaagtccctttttcgagtaatggataaactggccgatgcatccgatctacgaagaaaaaccgagtaaaacccatcttaattgaacggtagtttctcggagaaatcattttagcagaattgtgagatcggaggaatcatgttagcagaattacgagatggatggattgtttatcgcattttttttactaggacttcaacactactacagaaatgatatttgcaaatggctaaaagccattttcacaagggtaccaagctagcata

SEQ ID NO: 46655 - DNA, 725 bp, Oryza sativa
ttttagccgtaacaaaaaaaaaatgacagttttaagggtaaaaatctgttaaattttatcttttttattacggctaaaatataataaatttgaaaataaaatttcacatgtaggtgtaatactatttagagtatgtgtagaatttttcctgatatttgctagttggtgtgcacgaaagtttgtgtgaataggatatgttcccttttgtaaggaagggtattattggcaaagttaacatatgaaagggactagcggttatttctcgagtacgcgttagctctgttattgtttgttgcattcagtttattaatatttttttttgtttccgctcatgcaacaatttctaaactgctttgcttttttcactaatctactttgtattctacttttcaagctaggtaattgttgcatgccttttgtgctaacagggcttggcatgttggaaacgtaagaggagtttttttttttttgaaaaaaaaattgctagctagtgaaatggatcggagatgatgcttaaatttctcgtggaactcgtacacgattccgttgttgttctaagctaaaggatgcatggtccaggctctagggcgtttaattttacgcctccttttcgtgttgacagattcggagctgttgaaacagataagcagctatagtactgctactatgcgcatgcattgtcaccttcaatcaatttcatccataaatctccaacagttcgatta

SEQ ID NO: 46656 - DNA, 6234 bp, Oryza sativa
  unsure (1)..(6234): unsure at all n locations
atggctggtagtacactgctgcaagccngcangncgactntagaggatcccctctccaaagacttgaagaactaaggaagactattctaattctaactctactagcactttagcaaaatatgtaaactaaagagcttcttcacttgattccttcttgggggggctaaaagtaaagtagataagggccttttatagctgtttatgacagttgggagcgccaataccagtagtaaccgttattggaaggcggttaccacctaccttagcttgggcttgggccaaccgagctggtgctgggtcgaccgacccctggcaggcctccctggcccagtgattcctccagaatatctttagatggatcctcggcccagtggcatagtggttaggtccatttgcaggtgtttcaatgaatttgtgggcctatccatccatatgtccccacatgttgacctctgattggttgaacgattatgtttcatcatttctactccatttatatagtgatctcctataaacaaatggctttgccaagtacaagtggaactagattatttctaaataaatatgcatgcaagcattactggttctccattatttttgaaagtatccacggtcgaaattggtctataacgactgtcaacaaaaacagaggattgcaaagcacaagaaaaacacaagaatggccatttgattggaccgtaggaaaaccacaggaattagagaagagataaagacttaaaaggaaagttttcatgaggtagaacctcatgttagttttcctccaaaacttgtatggcattaggcattccatagtattcatttctttaattcaaagggctatataggaaaaaatcctacaggaatgaatcctctaaaatttctatgaatttcctttgaatcaaatggtgtcttagcaagagctcaaaactcttggaatttttttttgagactatctctcttatccgattcatgtgtttttactaagatccaatcaaacggtcattcttgtgttttgcaatactctattttacacttctattcttattagtattctgtgtttttcttattccttcgttttttttttcattcttgcgatccgaaggggcccaggatgttgcatgaacttccaatcaaattttagggctcctttgatttggaggaaaaacataggaattttggaggattccaatcctataggaaaatttcctatgaaaccctttaaaaatcatatcctatccttttaaattcttatggaatggataatcgtatagagattttggaggaaatatagcaagagctccaacctcttggaaacttttctttgagtctatctctctcatccgattcctacatttttcctgcggttcaatcaaacggtcattcctatgttttccttgcgttttgcaatcctctattttgtacttgcattactattagaattctccagtaggtggtgtttgaatctcttgaagatgaagatgaagattaaatgattcacgcaaaatgatatagtaataacatgtgattagttttaattattacaaactttaaaaatggattaatctgatattttaaaacaactttcatatagaaagttttcacacgaaacacatcgtttagcagtttgaaaagcgtgccacgataatccaaaattttatcctctcctagtaggagaaacgaacagggcctacgttttttctatttctctgtttttttcattcctatgattgaaaaggccctaagggtgatatagacattttccttattatattaattatagtacagtaatgcttagttgcacacgctatctgaatgaagcgtacaatactgtgtacgagtttaaagtcggtcggtagcagcgaaaacaccatgcgaataccacttgagtattcaacgcattgcctcacaagtcacgagggtgtagtatttaaaaggagagacagaattttcaaggaaggcatggcatccttttccttgccctttattcgctccctttgtttgtcccaactaactccattctaacacgatataattaagcaagctggatatatctttttttttccggggaaaacaagctggagttgatgtgcatgtgtccaagaaacgttagggaaatttgcaagtcaagatcaatggtactcttttataaaacgaccttgcggtaacctagcaaatggtcgtatcttatcttattttataattagggattgttttatctgtcaattgtgtagttttgggctaatttctcactcacctttgaactaaaacaagctggggttgtggtggtaaatatatggtggaaatcttaatttgggttaaatttgatgtaaaccctgataaaaagccgtctaaattcactaaaataatcacacgtacgcaagatgatgttacgctaccatgtaatttttttcaaactcaacttcatttgcaagctataaaaccaaaaaaaattgaacgaatcatcatgacaaattgttattttaatatctcataaacggaatcgagagtttgtacatgatttttttacatggtagtttaacatcatcttatctacatgcgtaatctttttaatttagatgacttcttaattatggtttacacgagttttcacatgagttaagtttccaacacatatttgtacagatgttagaataagaataataatatagccaacttattactattagcccatcttaaaaccaacatatataattgattagctataaggttggctacaattttcttctcctgtctctatctctcacttatacatttaatgtatttgtcttggagcttgtgataagttagctcttgcatgagagtcaacacccttaatttttcactacctctctcctccacttaagcttatagtaagcttatagctcactattatacttgctcttaggcaccggaagactgcagcttttacattcaggcaacacctaaaactggtagaggtgggcattcggtctgatcgaaaatttcggtctcggtcttcggtgtatgtcatttcggtctttgaaaagtgaagaccaaatttcaacaaaaaatgtcaagaccgacaaattcggtctcggtctcggtcctgactgaaattcagcaacattttcatatatgcaaagaaataatggaaattttcaataaaaaatcacaaaaaaattcgtaagcacgtataaaactcttattaggttgcatgtctagaagaagtagggatgtgaaaaattagagtttagtcctattgaacttagtggatcgtaggttgcatttagacttttttttaattcggtctattcggttaaccgagaagactaaccgaattgaccgaacaaaattcggtctttcacggtctaggaccgaatttttcggtctcggtcttttcggttcgacccacccctaaaacctggttccaaatagctacaaaattatttgcctttcaatccacagttggtcaatcggtagtgatggataggcataatcctaagaaatccatgcaagtgacagtgtgtgacaccagcaccaaagttgtggatagcagcatctttgatctttattctgataggttcatgtgggggccaaagggcatggacatacaattgccattgccatgcaacacagtcatggacaaaaggagagagataaataaagatgcatttatataattagacgacgcatataataaatagtttcagggtagattgaagggaggcgtcagtctgtcagatatgccttttcctttgttgttaaaaaaagcatagagaaatttaaggctgccccatggaggaggcaatgaaattatgcagcagcctgacacagctagtagattcctgtaccagtttttcatgcataggattgtttttatatgtattactagtagtattttattgtatactaggagtattctttgttgctgcaaaggcttgcatcagaagaaatgagcccttagtttcattgttgatgctcactgcatggtcccccaagggcccagcatgatatgatatgctcagcagtgggtgtatttagtttacgccaaaattggaagtttggttgaaattggaacgatgtgacagaaaagttagaattttatgtgtgtagtaaagttttgatgtgatgaaaaagttagaagtttgaaaaaaaagttgggaactaaactaggcccaagttcatagttcttcttctctcttttttccctctctcttgctgacaaaaaggttccatgctttttttttttacaatccagggtaagggtgtgtttagttctttgggtgtaaaagttttgaaatatatggacacacatttgaagtattaaacatagattaataacaaaacaaattacagattccgcccgtaaactgcgagacgaatttattaagtctaatttatccgtcattagcaaatatttattgaagcatcacattgtcaaatcatggcgtaattaggctcaaaagattcatctcgcaatttacatgcaaactgtgcgattggtttttccccacatttaatgctacatgcatttgtctaaacatttaatgtgatgtttttggccaaaattttttaggatccaaataaggcctaagaagtattcctactacagtagaatctagttttacaatttttcttttattatctttcacttgtccattcaaagtattcgacgccaaagatgtgcttggtttttgagatgttgtcatgataaccacttggggtgtgtttagttcaagtgtgtttagttctttgggcataaagtttttaaagtatacggacgcacatttgaagtattaaacgtagactaataacaaaacaaattacagaatccgcctgtaaaccgtgagatgaatttattaagcctaattaatccgttattagcaaatgtttaatgtagcaccacattgttaaatcatggtgcaattaggcttaaaagattcgtctcgcaatttacacgcaatctgtgtaattagttatttttttatatttaatactccatacatgtgtccaaatattcgatgtgatagggtgtaaaattttgccaggggatctaaacaggccctaggactctatgaggggtcacatccccttgtagattgagttttttttatgaacggatggagtatatatcatctgcctcttctctcctaaaataattttattttatatccatcttgtacataccaataaaaaataaaaagactaaattgttatggaagattactcacttgatgtaatggttgtattaaatttatttagtactagggtaattagactagtggaatatcagggcctgcttggaataattttaatcgcctgaaattgttgcatattgctaatccttgaaattgtaagtttagttcatttttgctgtagtttttctaatgtatatggatctactttatttttaaccaagtttcaatatttgtatctttagtttttacaaatgtttatcaagtataatttattttatgtcattgttcgacctttaattaagaaagaatttaaggttagttcaagtatagtttaagtgcctaacatatgtctagtctaggttagtgcaattcatttttcaacccttttatgtaagaaaaaatggatagtatttaagtagaaaatgaagggagtgtaagggtggttattttttcattcgaggaaagagaaaactcattaaaatttgatataattccaataacataaagcctagagtccataataaacaaatggtagagatgaactaactcggtcactccaaattacccttgaaatgttcaatatggaactagtgaattgtgatccatccaatcatctctatatctttttctataggcacatgtgcatctcctattggcattagattacattgaggggctatgagggagaagaccaataggagataggcatgtggcgattaggattaggtcccacaaggggtagggactctgttcggcttcgataatggttttgtagggccctagtgcacaaagaaaattcgctcattcaatgaaattgatgaggcatgttaaaaaggatggctagataatttgtggaggcgaactcctattgatattccccatggatttttgctagcatcttcatgttacttgcattgaggtattgataatgattaggcatgtaggacaactgcccttaataagccaccccctcctccaaggctggcccatgggtgacatgaaacaattttttacatcaaaagtgcctaagtttggtccacatgtcaacaactataca

SEQ ID NO: 46657 - DNA, 2778 bp, Oryza sativa
  unsure (1)..(2778): unsure at all n locations
atcttacaatcttaatatattactccatcgcacttgaggtatcgtggcaatagtccttacaaaatgtgataggagaagacaataatagaaatacacctgcctaggtcatataaactcacgcttggggattgacttggcttaggtttctaggctgtccgcttagaattttttctccttatccttcctttgtcgctattccaaaaaaaagtttggatgatattacatttatagatggatgaagtgggtaccattttgtcttaaggtccaaacattttccatgtctcacatcgacttggatttagcaaacacacaggccatgaaaaaataatgcacatgctgactaacttatctgaactataatggtaccagatacttttgacatcaacaatggttgaatttattattttttggtagtatgaaatcaaaggtggcaaataaaggaacagtgggttgtgctctccctccccctctccaacctaaaggcatggatataaatgagtagagttgggatgttatacttcttttggttctcacaaaagttggatcttgtaggcgcgtggtgtggtttgtagttttttttttcctagtcatggactcctatagctatgattttgtttttttttttgctatatcaatatgaaatctcgcaccgtcttgtacagttcagttcgaaaaaaaaaataaaggaatagagaactaacatgcatggctttggtggtgaccaatgtggccatggtgctgcatgaacttggaagcatatgcattacagtttttagaaagttggtagaaatcactggtaagcagctcttttactatacttcatgctcattttggaataccttgcagaagtcacaaaacttgtgcaccaagaagtagtagctagtatcagtaatttgtatttgaggtgatcaatgctgcacatatctatctttagctatgactttgacaaaacgtgctccaccaaacatatgttgtctgcctaaaaataaactactagaatttataggactatttccgattaaaatttgtaacttgagcaatttgagggaaataggccagcctacgcattgtttgtataacaatattgttaatgtttgctgcttataatcgcataaaaggctatttttctcattatctaaaattgatcgttttctcgtcgaaccgcctaatgtaatcaatgtgttgaaactgagcaaaagtgaaatcagtatctaagaaaagggcatgatgggcatctatctcaatcggacaaaggcggaggccgaggagggaaagaagaaaggttgtatctccacattcactaaaccaaatacggaactcatgtttgtaattccatacgagatgaaagtctcatgcacaattttgcatgagagaaagaagcgaagaatcctcttttcgacaggagccatgctttcactaaaaacacgaatatttctataaccgttacattaccaacatattagagctagttaacaaaagaagcaggtgcgactacgaactaaacccacatctaactcggttaaacttatgtaactcaaaactcatagtagtgcgcaaaagcataaccatgagccactagctaagggcgtgtttagttcacgccaaaattggaagcttgattgaaattggaacgatgtgacggaaaagttggaagtttatgtatgtaggaaagttttgatgtgattgaaaagttagaagtatgaagaaaaagtttgcaactaaacaagagctaaaagacacaccatatggtcaaatacatcgttctcagaacgtaattttatcatggtcaaatacaccgttttcagtaatttaatctctgctatagttagcaacataatttattacggcccatcaagaagaaaaaggaaaaaggagagagaaagaagcaacgtttgcatctttttcttagtttgagctgtcggtagtacaaaatccaaggccagcgatcaatcttaaacacaaacataaaaaaaatggtgtactcgccttaattaaacttattttgaaatcaacttgcaaaccccatccaatgaaaacgaattgacaaggcttagtttagattaaccagtaggagtactaccccaaaagtacttaaggatatgggtcaagactagagaaaatcacaaccaatcggagcaaacaagaaattgaaaaggaccttccctgcttactgtcagatggactactttgagaaaaaaagggggcaaaataactatatcaataaattaacctctgtcaaaacaggcaacaattaaaattaagagcagcttagaccattctttctaattttctagttataagatgcacattctacttcagttttcgttagcgcgtttttcaaactgctaaacgatatgttccgtgcgaaaactttctatataagtagcttaaaaatatcaaataaatccattattcaattttgtaataatcaaaaactcaattaatcatacgctaatgactttatattcccttactcaatcttcatctatcttaaattgggccatgtctctttttttaattaagatgcagattttacttcggttttcattagcacgatttttaaatcgctaaatggtgtgtttcatacggaggatctacttttgaaaatttttaatgatttaaactcaattatttatatattaatagctctctcattctgcgtgcccttacttaatcctcatcctcattacttacaaacactgcataacggagtaatagtattattattaatgttatgttaatcctgatgggtaccgangtctatctacttncacatcg

SEQ ID NO: 46658 - DNA, 1284 bp, Oryza sativa
ttacaatttgttgtcattttatttcttgcctccaggttactctttgctcaaaaacattcttttagggggaaactctggttgcatcatatactttttaccaggattaaggctgcctgcctttgttgtaagtttgtgtacagtagttattagttgcagccttaaactggatcatttgaatgaagtagttgcagttaacctcgtgtgatggttagatgtatcagtaattctgcatgaaaccctgagcaaatgttagcctcttctggattggacgaattcatggaaattttatggaaattaagctgtacattatgcgattcttgcattcggaagaagccaatatcaatgtgtgacaacagttctcggtttatgaagttatgttattttcatggtaacatcgttgagtcttaacaatccataccagcaaaaaaaaaaagtgccccctcccccaatcaattttctactattccatacgttccaaaactccaaaatatagttgcttctagcatcattagtatactacaaccatattttagcaattgagatctcctgcagtactgcagataacctgcatctaaattacttactacaaccatccataatttaatttcttcacatatttttctcaactaataaaaatatctcttatttaattttcttaccaactttcttatcttacccgtgagtcacctaatcatttaattttaccttgtctttaatcaccatgaaaaactcaagttcctatattttggatagagagagcatttgttactttgacaggtcccccctacagccaaatgaccacaccagcttgctttccttgctttccttttctttgtctagcgacaggttttcatcaaaatatgtgtaatcattttcttttcttgttttgattttcgagaaggcacaaactagatccaccgaaattaaggcgatggatgaaacgaacagttccaaatgttgagggatgaaaatcaaacagttcaacagttgagggacaaaaattgtttaaggataatatggacttctattcgaattgagatgcccatgggatggtggcacaaacttttgctttcaccaagtagtgtacgtatcttgtgggctgctgtgcagatcgaagcctagcagtaacaaggttgtgcatgaggtatttgggctgatcccatagaaaacaagagccttgactccagtccaatgttccattttgcaccgagttgtgctggattggcaccgagacttattatactccgaaacttttttacccgggtcgacaagcattcaatccgg

SEQ ID NO: 46659 - DNA, 2262 bp, Oryza sativa
  unsure (1)..(2262): unsure at all n locations
acggcattgatttgcgattccagctcggtacccaccaacaatatgtccaccttttccaaaaaagaacaagtatatttttcacgatgattagacacattggtagcattagaagatttagcaacactagcaacaacatgaggttttgcatgcacaacattggattttgaagaagatgcactaatagtagacatgataccagcagatttaaacacagttttgttagtattagatttaaccaaaatctcaccacttctagcaccaacacctaacacaacaggaggatgcctagaattataagcataaggattaaaacctaaaccacggttatgtgtgctaacctttgattgatccaaaatcatgttgaggttctttttaccatcagaaaatcttagtaaagaatttttcaaataagaaacctctttatccaaattagcacaattttcacaatctaccatgacacatttgcttttacgacatttagggcaagaaagaacttcattgtttttcacaacatcttccatgaactcaacatgacctaaagcatctttcaatttcaacttattcaaattacatgttgagcaatccaaaatatcatgaggttgttttaactttttaacagaaatcatgttaaacatcaaactagcatgaaaagcaatttgatatttttgcaacaactttttagttaaaaataactcatccaaagtgcgtgtgtgcaaagcaaaactacaagcaagagaagatctatttttcaaatcatgtacagcattaacatctctaatttttgaaatctcattcattaaaacctcacaattttcgtaatcatcatcattaggaataagagattttaatctaacaatttcagatttaagagattcaatgataaatttatgttttctagacatcttctcacacttcttattcttttcactcaaaatattaatagcttcctcaacctctgtgtcagattcaccacgcgccatgaagcaaacattggagatgctctttccctatcatcatctccactttcaccatctacatcacttagtggctcgaaggcggcgcaaacttgttgaaaagccttcctgagattctctagcttcctcccttgggatgaacccttcggcttgttgttgttgttgttgttggtattctcaccatctttgtcttctcttttgcctctcccaagcttaggacaatgcgaacgaagatgatcaattgaaccacactcaaagcaacgatttggaccacctcttttcctgttcctggcattattcatagctcaagcaattctgttagcaaccaaagccaaattctcctcctcgatttgttcgagttgatcattggatgtggcattaaaaacagcaagaaaagaaggcttagatgaagaagcatcaacatccaaagaagaagaagaagaaaccaaagcactcgacttagaatcaacttcccgagaaagaacattcatctcatgtgttttcaattttgtgtaaagtgaatccaaagtcaaagtagacatattaacagactcctgaatagatgtaactttcatctcccaaatagacatgtcaagaccattcaaaaagtgacgagaaatatcagattatggataatttgtatcataagaagaatcaacagatctaagatcactcaaaattttattaaacctagaaagatagtaatccaaagcttctccaggtttcatctcaaatttaatatactcctttttgaaaatatcacgacgaagttctttaatgttatcttttccttgatgaaagttactcaaagctttccaaatttcgtgagcagttcgaaagtgcgcaacacgatcataatcagaaagagaagtaccactcaaaagaatgttgcgagctttgcaattttgttcaaactcagtttttaaagcagcagtattaatctcttcaggaatcacataaggatgagaaacttttctctaaatatcataatcttcagccataatgtaagattgcatcctactacaccaatgagaaaaatccgttccatcgaaaacatgaggcttagttgaaaacctagcaggagtagccatggcaaaaactctagatcgataaaaattcaaagaagaaaacaaggctctgataccacttgtaggattgaaatacaagaactaagacaaccagaggaaggggtgaatggttggtatacccaaaaaccgaaaacttttagcgttgtcggagatatgggcccnngggtntggttactagttgcatgtatattcatcgcgcg

SEQ ID NO: 46660 - DNA, 2934 bp, Oryza sativa
  unsure (1)..(2934): unsure at all n locations
cgcgggcagggtagaactaacggcagccngcacgccngcaggnnnactatagaggatccccaaaactaatttgatattgtagatgttgctaatttttatataaacttaatcaaacctaaagaacttggactaaaaaaatcaaacgacttataattatatataatatgaaacgggggaaggaatatatatacaccaccccacgagcacacgctatatatatacacacactagtatgtgcacgattaatacatgttcaagacattgagaactaacgtgatcattttacttaaattcctataaccgaagtgcacacgcgtgtataggggccctttgaaatggattggcaaacaactttagagaattcaatttcttctaaggatcttttttttcctatatatggaacctttgattcataggaagaagatagaaaattttctacataattgcatttctatgatctataggaatacgagtaagagattagagattagacctcttgtaaaacttacttttggcttaatttctttttgtgcaatcaaacggattctcttcttatttcatgcattttcaagtcatgcaggattggaaaaactgaaactttaatttctgggttttttctgtggggtttttcctatcctgctggcctaggatttaaacctagcttgtttcatgtatacactcacaacatgtaatgattgaaacaatattcacgctaaatcatttggatgataattccagacgcccctatcctaataacaagcttatacggagttcttgcaactagacaatatagttgctcatttggctttaactcgagaacatgaacaatggtcatgtgtctgggagagtgtaagatatattttgtaccctcaattttttagcactacgcaaccttcctcacccttcattcggccgtggacaaataaatgtacttcaaaagtaaaggtacatttggatggctattgctcatggacagacttaagacaagatatatgttggaccataagaattgtgctccactagacaatgagttatcttgtgttctctgtaatcaagggggtgatagagacaatgatgcatctcttctttgaatgccccatttcatgttgggcctcagttgggatcatatgggacttgacaaaaaaaattgatatgatgatatgagggaagccaaaaaggcggtatcaagaggtgattgcttctggagaaacgtttgccaactgcgtgtaacatctggaagataagaaacagctacattttcgatgaaaagcctttttcttcttcttggaggtttattctcaagactggcctcattttacttctttttagacttaatgagtgagataaatatatagttaaagaccttcagattatttaaagatttaactacatctttaatttcagagtaagtttcctatgacagtagctattatggtcgaataagttacataaaactatgggtctatttggtgaggttaagattctgagaagcatttggttggtagccagtttctgagaatctaaaaggctgggtttctcagcttcttgcttctagttcgttttttatattctacaactaaagattatcagaatctgaactaaaagctagactgctagaaactcccccaaacaagccctataagagttttggcacatgacacacaacccatgtattatggctataaagtttcacaaaaccatattattgatcattttaactttgatctaccatacttttaagttctacactcctatatgagatttgttttctttttattcacatataaatgctacatgtatgcaagtatattttaaaatttttgatataggagtacgtcaaattggttaatggtgtgattttgtgaaacttttaggccacaatatttgggtttatgtatcacatgtcacaatttatgtggttttgtataacttgaaccataatatgtgaggttttacgagatttactccttttaaatgaggttttaagacttaatgagatagtgaaatttagacctcggggcctcacctgttgtgctttgatatgtgaggttttatgagatttactccttttaatgaggttttaagacttaatgagatactccctccgttccaaaatataagcatttttagcatagtgacaagtcaaacatttttaactttaaccattaataaaaaaaataaaaaagatcaatcatataaagttgatgttattagatttatcattaaacaaactatcataagatacaactatttttatttaaaacgtcttacttttatagatattgttagtcaaagtagcataccggagaccgtgtgagggtccaaaaatgctactccctctatctacttttgatagtcatatttccaaatctgaaaaatttatttttgataggcatatttcaatccaacaacttatcatcttaatagttttcttatatttaatgcgtgactctccattcttccacacaagattggctacatgggcatcgagaaatgtaaatattaatgagtcacttgtttacgaggaataactagtagcatatttaaatggatgataagtagaatcatttatccttggtttgtatgtcaagatgaaatatgactatcaaaagtagatggagtgagtaatattttggacggaggaagtagtaaaatttagaccgcggggcctcacctgttgtggtttgataaaaaaaattattcatgctaaatcaactaatatctggcacgtataaacctgaatcttttctatattgttacaaaacgaatttaaagttcgagtccgcgcgtttcgataatgtacatttgctcccccacggtagtactatatacgttgatagtgtgtaaagagcctctgtactcgctttagtgcgtactatatatacaggcgtatgttcggtacattctagaccaaacccaaattaagcctggcac

SEQ ID NO: 46661 - DNA, 2195 bp, Oryza sativa
  unsure (1)..(2195): unsure at all n locations
gcgagcttgagnatcgaatctcgctgcctgcaggtcgactctagaggatccccttcatgctcttaccttttggtgggtcgccttttacagttttactactactggggccctgttcccacacaaaaaattttcatcctgttacatcaaatgtttatacccatacataaagtattaaatatagaaaaaataactaattacatagattacgtgtaaattacgagacgaatcttttaaacctaattgcgccatgatttgacaatggggggctacagtaaacatttgctaatgacgaattaattaagcttaataaattcatctcgcggtttagtacgtaatttgtttacaggtggaatatgtaatttggtttggtattagactacgtttagtactttaaatgtgtatccgtatatccgatgtgacgcattaaaacttttcacccagctatacatgactaaccatgccacttggagggtatcgtgtaaccaaaatttattcatccctatttccaacaataatttacttactcatacctaaatcaaatgagtattatcctaacccaacgaataaagaaaaaacatactcctatatgggttccactcgtagaaatggactactaaaatttatataaaggtgctctttctacataataaatcattcctctgaattttagtcaaattagataatattttataatgtgaacgcaagtctaaaagttttcggcccatagtgtgggtatggggatggggaaatgaaacccattgataagtgtattcatagtattttgtgtttagacttggagttaaatttttgtaagaagtgttggtatataggtttagttgaagcaaatgcctgtttatatgttaattatctaaaatattgttagtatctatgtagtaataatatattatcagtttcctaattatgactaccgtgatagatgtacatgagtatgtgtttgagtttctgtatcagtttcctaaattttgtaggctgatgagtgatgacagtgttttgcgtggtcgacttgctagtggctattgcatttgttgtgcccctttgtaaacggctacattctttcttaataaattttgacaggcaaataattcattatctaaaaggaaaatattatcatttgtttgcattcatatgatgtatcatatatgaaaaacctttaaatttgcatatatttttacactatctttcttttaatcataatcattcgttaagttgaccctgtcgtactcaaattctggcttcaccactgttttcatgagtcatgactatatcttgaaaaaatacaattgcagctatataaaaaaaatacaatatttgtatcttcacaatatgattatactttatatcatgggcagtatatttgtcctccattggatcacaaatataaatatatataggatttaacttttttacacaacaaaagcatttatgtgatactgatactaatgcataggaatttagacatgtttaaaatgccaatcatatgcttagaaagtgattctaaccatttcataattctaaatttgacaagtgaggtgagtttgatggattttccccctcaactttaatctttactaaacaacctagaaatacttaaatttagaaacacaggcagtacactcttatctttcttttttgttttgcattagatatgaaattacaagtgtaaaacactttctagtaattttttatttttttatataaaaagcatggtgctacaaatatatatactaaatagcaccagaaagaattcatcaacaccaactaaaaattctgggctaaaaagatatatagtatgagagagagagaggaggtactattggtggcctcaaaaataaaaatcaaatagaaaggatcggaatggggatattctccgtccgttgtttttccaaatacttcgaatggaagatatttttatacatatctttggcaccaccattattattgctaggttaccattatctgtcctgatcattaattagcataactactagattttgacatgacatgcttgggtcatgccacattaggaattggcccaagttataccgggcttcatatcttgaacgaatgctgggttacattccttcagaccagaattttacacagattcaacatttttagtttaattccaatgaaagctctctaaatttctggatcctactaggtcgagttgacat

SEQ ID NO: 46662 - DNA, 3600 bp, Oryza sativa
  unsure (1)..(3600): unsure at all n locations
agcaaatgcaacatccncggggncagnnnanngcacgncttcacttcggcaacggcaagcacttcaatcgggatcgagccatgaggggtgaagtagaaaagaaganagattgcgcgnntggccactttcgcgggccactccggcngtcggccacttgcgccgccttcttgngcgctncctcngcccttttgcgccgcccgcaccgccgcccatgccactcctccgantgcgccgcccctccgcccggctgctcctccgactgtgccaccctgccggtcagctctcgtcctccccatcctctcggcggtagaagagagagaaaggtggggagattattttttagagttgtgaagggtgagtataaatatgtggtagttgtaaaatattagtaaaatataggatgttggtatatggaggatgtaatatagatgatctgttgaaatgaaaagtaatatggagtatgaatctttttagatgactatctaaatgggagtatggaggatgaaatttagatgagctactagggatgctctaaggattggaaggtggcatggaagaatagagggttaaggatgtagaaggctctgccatatcatcctcccagtaggcatggaagagtgtggtacatggaattggaatctatgtaagtgttgatttcttttatattcattctatctcaagcatattttattttttttaaaaaaataatcatatttatagttttcatgcatccaagacttaaataaatatattatctttttgttttagtgttagattaaattgttgatggaacctgagaagttgttgtaatactcgatggtctcatgcatgatacaatttcttggtgtttatttacatgtgagattattttttccttagtcttgataataaaagaaatatatcttacactttcggatggagagatggagagagtacattgtaggcccctgtcatgctacatgtattgacatggtaatattttactcattgccaaattaaggactcattttttgcaaatagctaagtatcggtttgttcttaaccagaaaaaatgcccgtgcattgcaacgggtgaagtctattttaagataaaattcactgtgggagtttgcttaaatatatatatttttagaaaatcatgacctacagttaggagtccgattgtctcaagttagcatgcgagtttttttaaatatatttcttatatgattccttctgtattaccaaaagtgaatgatcttaaacgatcttagaaaccgactcaaatatggatatgtatttctaaaagcaaacaagcttaaaaaccgactaaaatacggacggcgtaccaaaaaaccagcaaaaacattttcaatttttaataattgtagagaaatattggtggagagaaaaaataaccttcttatgttttacgtggtactgtctccaacataagagataacatgtttttcttttatcatttctcgcctctagctaaattttttatgatgataccatgctaaatggcgacaaagatgtcatcaccaacataccctcaccctttactttgtagaccagagatcaggttcttctaaccttaaagtcactgtgattttattattaacatgcagatttaggtttttttggactcgtatgttagcgacaaaatcacgtaactttaaaattaggagatcctggtccctaaagtgatcataagtgatatactccgttaaaaccatgttgttataatatgtttaatttaaataaatatttttaatatccacatcagacagataaaatcagctgcgaattggggtttggggggggggggggtagtgtatgcagcacacatcaatatcatacttcctccgtttcacaattatctagattcattaacatcaatatgaacgtgaaaaatgctagaatgacttacattatgaaacggatggagtagatctagattcattaactgtaacaccccaggtaaccatgtacctagagtggcacaccaaaactacactcaaaaccactaactcccaaaattattacaaatttcggcaaagtctcccctaaaaaatacggacatccacgacaggcaattataagataacacaataacgatataaaccacacaatccaaaccatcctagctccataagttccacgcgaaaataaggaccagaactttaaataacctctacaagttctatgcaaaactttgctaagcagaatcatagtctaaaactaaattccaataatgtgcaataataatgtgtagtccagggtgctactcccgtcccatgccaatcaatgtcattaggtacctaaaaaccaaattaaacacaagagtgagtaaagaatactcagcaagtacaatattgaactagtaaaacatacacaggtttatgcaataagaaaaccaatatgaaacatttgacttcctttaatttaaaacgaaggaggcaaaagtagtagttccctcccgggcaggtgtgaatatcctcttagcattaccggtaagccgagcaaacgtaatcagcgcttctcaaggatcatgaataaagatccaaattgcactcccatgactacgcatggtacttgaataatgtaaacaaaaacttccggaagaatgaaacatgaataacgtcgtgaacttgaacatgaagtgaaatatgaatacgtagcataataccaacaccacacaattgataataggaagcttcgaataataattgggtaaatgaaaccaaacaaaataacatagtttatccatcacacaagtccgtcttgtacttgccttaactccttcgataatccgactcaactcctccaacgttggaaccctccacacccgtggagccaaaactacgtataaactactatatccaactaatgatagttacaaggatatttactaaaatcgaaacccagttcatacaaatttttaccgatttgtgttaaataacctatagctattccattactgttttgttttatatgtaactcacaaaccgtctaacggaacctagcaaataatacaacttcggacatccagacaaaattttctaccactttcatgttgagcacaaaatcagattatgcctatgaaatcccagattaaggaaaacgaattgctatcatgattttcggacccggtcagcagtactatttttttgttgtttctcccaaaccgtttatcggaatcgagcgaaaccagcgctattagaaagatatcaacgatggctacaaactttatttaggacaaataacctgaatcctaacggtttaataccagatttgaaaatacggtttcagcctataatcaataacctcaaaaattgcacaaacggctatctaataaatttctatttaaatattatacttctagggagtaaacaaaagtaccgttgcagcgaagatactagaatttgagaacaaacgcactagttacgaagtcactgaaatccccaaaattgcttggcctttctctcccccttcttcctcctgttctcctgttctcctgcacccttctcctctgaccacgcagcagcaggcagcaagaaatcatcagtagcagcagcagccaancaaaacaacggtcgacaagcagcaagccaggtt

SEQ ID NO: 46663 - DNA, 1878 bp, Oryza sativa
gggaccactggtggtttgcgaaatgacaatgggctccgggggtcaaaccacgtttgtgcaagcggcgggggtaaaaccggccccggcaacagggagcagcagggcgacacgcacgcacgcagggacggtggcggctagggttagcttcttttttttttctttttcttttttcttctgtgggttaaatagagaaagactaatgaagatcgaatggcccacattaatttggtcactgggacttcgttcagacctcgattactataaactttattttacactactcggcgagctctacgcatccacggttcctgatcgcctattcgaataacggttttaaaagttaaaattttgcatgtttgttctaatattccccgaaatatacaaattgtaaatttggggtattacattcttccccccttcaatctaattcaccctcgaattcacccaaccataatctagaacactgggtattacattaacattaatataaacgtagaaaatgttaaaatgacttacattataaaacggaggaagtagtaacgtatttctgcgaccgaagagactattatataaaaaagtttgaagaacgacattcgtcatctagatatttacgatacaaataaattaatctgcataacatcacctcacacctgaagaagtagtataagaaaaactttcacgtcagaatttatttattttttgaatgcttttaccaccgcagctacttactcctatatgagattctggccggacaatgattggcaaggaattaaagacactgaaaaaaaatgctgtctaaagagacacaaagaaaaaaacaaaacaaagcagcatagcagcttgatcattctctcccaagacagtactaattattttttcgcggtgatgttagttagtactactgctaattactccctccctccgtttcaaaatatttaacactgttgactttttagcacatgtttaaccgttcatcttattcaaaaacttttgagagatatgtaaaattatatgcctacataaaaatatatttaacaatgaatcaaatgataggaaaataattaataattacttaatttttttgaataaaacgaacggtcaaacatatgataaaaagttaacggcgtcaaacatttcaaaacggagggagtagtagtactagtacgactacttagtacttaatttgatcggccactcacatgtactatgcttattgtttcttttgacaagaaatcgagtagatcttgtcttatcctatcattgatgattaacctaatcgtactatagttcaatatcactaattaatctactgcatcttgtgcaaagcgattaattgtttacacaaacttcaacacaatcgaaggattaggtcagtggggtttggttcttaccttcctgtggtgttcgtctgctgaatactacatccatattattttaatgtatgacgccgttgactttttatctaacgtttgaccattcgtcttatttaaaaaatttatataattataatttattttattgtgacttgattcatcatcaaatgttttttaagcatgacataaatattttcatatttgcacaaaagatttgaataaaacgatggatcaaacgttgattaaaaagtcagcggcgtcatacattaaaatacggagggagtttttttttatgccccaaaatataaagcatagtatacggagttctttcttaattacatgctcatcaacactactatactttaatagttattaatttgtttgtggttatattatgaataattatgaagctaacatcatataaaactattttcaaattaatacgactgtaacgatataacatccatgataatagggtaccgagctcagtgtcaaatcaatcgcg

SEQ ID NO: 46664 - DNA, 1115 bp, Oryza sativa
  unsure (1)..(1115): unsure at all n locations
ccgtgtagaagtacaacatcttgnacccgccaccacccacgggtacgccgcatctcagcagagtatcaaaagcgcgcggcggagacggcaaggaggtcgacgagcggcgaccggaagtcgtacacccgcgcgggcgggcctgggtgacgacacattcacgaacgacgcgtccccggcgcggaggtgcccacggagaggaatgtggacgggagcggattgctgggccgcgtcgaggccgacgggtgagggggacgaccgccgtggccattcgcgcgacagtagccatcggcggcggcgcccgtcacatcggccctccttttcggagcgctcctccctgccagccgccagccacgccagccctcttccccgtcgcgtggaagacgctgccgccatccacatcaaggcgaaaaatgagagaggaaggagagaggggaaagagagagagagagaggggtgacgtggacaccctgtcacatggggcccacgtgggtctcacgctgactcggctgccacgtcagacaaaaccagggtgaaaaccacctagggaactaaagtgaacggttttataagttgagggatgtgatatatctggttgtgtggttgagggacgaatgacaagttgagggaccttcggcgtactttttccttatcttaattaaagccataataagccgggccgagctcaccagcaggtttgatattcagccctaacaatggcgaccgcaggcttgatcggttggaggttttggttggctgggctaggccagttccgagtagaagctacaaggaataagttcaccggacgttcctcaacttaacagagagatttcctgagattcctcagccacaaaatcagaaacgttcacctctaaactcatttaaaccgtgcaaagaaggtattatggcagtatttacatccagttttgctcacgtgatatcctagtcagtaaaaaataaaaaaatgaatatctaaggcatacatgtaagtgagataaaatggagagagacggctggcgcgattgcgagctcnacngccgaaagtancggcgcgccgtgcggcaacgggggagaagaacngtaaaagagggggaacaccggccgtccttcatcgtgat

SEQ ID NO: 46665 - DNA, 1733 bp, Oryza sativa
  unsure (1)..(1733): unsure at all n locations
ctgtcatgatgatacgtcancttgtaccccaactcaattcaaacctaccctatcgaatcattcttttacattacttactttcagtcatgtcttttactttatcctagtttcatctatttttctcgattttcatcataaatcgcctgccttcgctacgagagtacgataacctttgtaggtttgtctcgtaaaccttccgattcacccatgagatgggtgattaactccatattgacctaaatcaacctagagaccggtttacatctctaaatcggctccggtagcaggtttaatcttcaaaacccatcttgctttagagttttctatcaagatggttggcgactccattaatgcctcaaatatttagatgagtccgtgttgatcagaaaaagcacctgcagtactatcgtataattatttctagagtgaattgtacattggaccacctattttgacctaagttgcatatctttctgttcaagcaagtacacatacattatctttatctttgattaatctacaatatacatataaattatcattttcaatgaaattcgatgcatataggaaatacatgataaaaacagtatgataacatgacatcatacttcatccacacaccacactgcagattaatttactgaaaaaagtggataaacttttggataaaagtggcacgcttttcaaactgctaaacggtgcatttcgtgcgaaaactttctatatgaaagttgttctaaaatatcatattaatccatttttcaagtttgtaataattaaaactcaattaatcacacgttattacctccttattttgcgtgaaatatttaatctttatattcatctttatgttaaggagatttaaacaccacctaaatgtaccatggtccctctaattttaatgctctgaaaagtataactcaaatttgtgcattcctatgtgatatacattccctaggtccatactccatccacgccacactgctgtgtgtactgtccactgcctacctaccctgtaccagtacatggaccatagctaggacagtatcacagacggtacaactgttttttcatggtgtccgtatgcccttgtccgtttacatacatgcttgtattcatcagggagaaaaaaaagatagaaatacggctaaaagaattgaaacaagaaatccatagacgagaggaatttgaaagagagaatctctgccagggcccacacatggacaacccttcaaagcccctggtctgacatgtacaaatccctggacggccttggggggccacagagagagagagagagagagtgcatatgactgatctgtggagctggagttgcttccaactttgagaattgagattgaaccaatgtgtgtgagagagaggaagaactagtaagtacagattttaatgcggactcttgaaaatatactggctttaactttatctcactggtaaataaaaggatccacacactaacactaactatctataaggtggagttttcacacttggttaattatgtaaaaaaaagctaatattatgatagcaacaaccagtagtccaccaccgtaataataaaaatgctatccattaagcggagtcgtcctccttccctccccttctctcacacacgtggcacgtcatacgctccgtgcacgtgagtaactaccgtatccaatattatattcttaatcatcttctaagctaattctaaatatataaccttgacctat

SEQ ID NO: 46666 - DNA, 678 bp, Oryza sativa
  unsure (1)..(678): unsure at all n locations
catttctttacttgcaaagtattgatcacaccctcttgctgccaacntgcatgccattgctagctagtagcagatgcaaggtggaaattaattgaccttacacacgttagagcatctgcgagatggcctctcaaatgacccttgctaagccaaattttggtaattttagaaaattaaaaaattcgtactccaacaacctctctaattggattggatagctaaaccatccgactgcccaaatctctcacctcattggccaaacttgtctatccaaaatcacttacggatagtgagccccacgtactattccttctccccatatggccactccactccactccactcttaattctctctcgtgctgcagcgtctgctataccattaaaaatcgttggagtgaatgttaaatttggctcttgtaaattttttttgacaagctaataaccaaataaacattcgaagtagagccgataatagcaaactctgttggagatgctcctagcaaataatcattgtcaacccggctggtcgtcggtgaaatatttaaccgatccatctaacttggccagccggcagtccggcacatgcaagcattatgcatatacgtacgatatgtgtacgtggtgcttaagtgcttaactaattccagatagatcatcgatatatacatatattctg

SEQ ID NO: 46667 - DNA, 676 bp, Oryza sativa
caacacgtgcctttagatttactggggccatttgagaccactttgcattgtggctagtgtagcatgggacttgggcttacatggcacttaagggagtgccccgcattgttcatggcctaaccccttcaggctggatacaacttttggttgtgccagccaggtaacaatccttttttgttctccatgtcctgaacgataatcagaatgccgattaatccaaaatttttattctcggaatattgtttgcatattggctcatgaaacggacgtggttctctggaattgaaagtgttaacaaataaacatggtgatgctaaccataaaaacaatctttttaaacgtgtctatacatttaataatcatggatatcatggcttgttaaaacctgcctaactgcgaaccttttaaatcagactttcccgcctctaaataatgacctttccagctcccctttaaatttctaacccgggtggtttttttttattccaatgcttattctttgggaataaaatttggtagtttaatctaatatagctatagtcttacacggaggttttgactttattgaaaccgaagggataccccatcttacctttgtaacatgcgaccgattaaaagaattggaattgtaacactttttctgaaactgctaagctgttggtggaaaaaaaataaa

SEQ ID NO: 46668 - DNA, 2612 bp, Oryza sativa
  unsure (1)..(2612): unsure at all n locations
aggattgattgtgatttacttggaccatcctatagtgaccccatcgtcattttgggctggttccgcccctgtctccaagtttctctcaattggtcctattttctggtttcatgtcggttggctaacgaatatcaacctatagcaaaggaaacgtatgtcagttttggtgcgagaaactgataaatcagttctgcacttctgctaaaatcaatcataagatgtgctcagatgcaaactccataaacacacacctgccaactgtatatcgtttggcaaggtaagtaaggtgtgccagctccgctctactgcatgacatgcatatcacttgccttttatactggtagaaagcagtgttgtagcacaagagccctcaaagcaagattagctgccaaatgcgacgtctaatgccttatcagtgtggctatggataactcctagaacactgatgtatgggacaaatacattaaagtgtaattttaatgttcggtttgatagtatgtagtatcaatatgatcaataattcaagatgtgcatgtaaaatatatagagtaaaatgttatgcggaaggttgagtatgtccattcaaaccatagatcaggagggaaaacaaaaacatcccaaaaaggaaacacttcttggtgatcattttgtttaacattgtcaatatttcataagcaaatagacattaagggcctctttaaatcgcatgaatagaaaaactgagtaatagggaaaaaaaacaagattctaataggaatgcaagtgcaaaacagatgattatgaaacacatgaatgaccgtttgattgaatcgtaggaaaatcgcaggaatcagatgagatagattcaaagaaaaatttccaagaagttaaaactcttgctaaaattcctccaaaatctctataggattgtccatttcatagaaatttctaaaaatatgatatgatttaatcctttgtttcaaaggtattcatataggccatcttctgttgtcctgtgaggagaaggaacattaacattgatccttcctgattttgttctctttttgacgcaaaagattttgttctcttaagtagctcgatcgatctttgacatggctttgccccctacagggttttgatgtgtagataaatgtgatgagatgaatccacgttattgcagttctcatttctggttgattgctatgtgcggagttgatttctgtgcatcttttcccttgaagtgtgattttttccctgccggcttgagtgccttatgagttaattttgaacttaattattgcactctatatgggttttgattattggcattggcagatagtataggaagtggtaaggtttttactgttttccgtgataagaatcttgcttacccatagtgttgctgttgtcagttggccatcagctggcttaattgtggcttgtgagagttgggaattgtcttgcacggcaccccatctggctggattttgcattttgcaatataaaataggagataaaacttgcaggggtttcttgtgcttcaccgcagtgttatcatgttgtcacctgattcagatagcaaatgttatcctcacttgtcacaatgagaagagcttaagctcttttttaccattgtaacaacatatatatattgggctgcgtgcaaaggataaacaggctggttacactaaactgggaaggatgtttagtggcttgggattctgtctgcatgcctaagaacgtaagcgggctgggggtcaaaaacatcgaaaagcaaaatacagctctcctagtaagagattacaccacctccacgctgatcactcttcctgggcttcctggatatggggggaacatctaaactcgaacttagctgctcataattaacatgcttggaacgcattgggactccatgatgtccctgctgccaattcttcagaaacacacctcagtacgttcaggttggagatgatcaacgaacctcattttggcatgaccactggtgtggcgatgtgctggctgacaagttcaggcctctgtatactcactcgcttgaaaaaaatgcctcagtggcgcaggtccttgctgacgacctcagaacccactttgcccccaggctctccacagcggcggaagatcaatccaaccatctcagcagcctcttgatgcagtgcctagtgactcatcatcaagatgggaaaatatatagtgcaaaccccntatgttgggggaactctgaaactacccgttggatctataaataaactttcctaatgagggacctattaaactcaattaaaatcacctgccatttacattttaacatttgattgtgttctggatttagactttgtttaagggggttcctttttagtccgacctgtatgcattgcaactttagattttctttatgggcacctaaaatatctttgccgtaatcaatggttatacctgtttccttggtgaaaagtgttttccgctttaaaattcctacaatttaccgggctcggaggtattaaatttataagccgtggctcctaatttgggggcgcccactacatatatatgcgttgggcttaatggcccgctttctacatgggaaacctcttgggcgccatttttttattaatact

SEQ ID NO: 46669 - DNA, 987 bp, Oryza sativa
  unsure (1)..(987): unsure at all n locations
ccccagtgggtttgattgacaagctctctgnaccccactgagcttagctgnttagccaaatctctgctgattcatatgcaccatttctgtacacacgcagcacagtagcaaaggtgccgtgcaaagtgtccaaaatataatcaccacctgatatgtgtgcccgccgactcgcattgatcacttgccgacccagctttctttagaaccaagcaagcaacacaaggggtcgcgagaacgaacaaaaagtgaaaaaaaaaaaagaaaagaagcttcttcactacttcgcagaagagaaagcaacaaatggagattacttgagtacctgacattggatatagcccgtgtcttcccccaaagaagaataaaaagcttagaccgagggtttaatcaaagtgggccattcggatcaccaccgggtctcttcttctttctctccgctcaagcgatgaatgctccttggctccggactcaaaaatacaagcagctagcaggcagcaggtacaaaagctctggacgcctcggggtcccacaatctcgtcagaccattccgtcccgtccgtccaacgattcaatgagacnaaagctccattcggttggattggaccaaaaagatgcctgcggtcgatgccatatgtaaggattgcanatgcaggcatgcatgcttgtcgtctgatccgaccccgatccgatccgaatcgactctgttctttactggcagcacagacattcgcgcgtctaaacagnggtacctggaaaatggatgggtcgccctgcactgaccttctctacacaaaatcttaaggcttaggagacatgacactggatttaactaataaaataagaggatggacccgggatctttggttgttggttggttaattgaagaaccatncccccataaatgctctattaccggtccttttggggcctttgcttttgcacgcgattgatataaacaccactttcacggttcacccttaaccgggg

SEQ ID NO: 46670 - DNA, 2537 bp, Oryza sativa
  unsure (1)..(2537): unsure at all n locations
cccctctacggcgtcgggggggttggtcctccttgccggcggcgttcgtcgtcgtcgtcgtcgcattgaggggggagaggtgatccgcccgtagtccattccagctcggggaagggggggggcatgggggcaactggtccgcgtggtggtgccgccgctctcgaattcgtgcggggattttggttttgaagagggaggtgacccgcacgcgccgatctggtgaggccttgctcgttttgtgctgttttttgtgcctagctttggtcggaggtgtttgaattgttggggaattttgagcttttgctgtgatctgagcttcaaatttcggtgggggttaacttggcctgggcacctcggaatttctgtttaatttttggtggggtttctttgatcacaagatacttgcttgcttggagctttgggagcccgaggcgcattaaattccacatcttctgcgctgttttatcgggaaattaaacatttcgtgctcaagtctgtgggggggtttttccctcggatttgtcaaatctggcggctcttgttcgaaaattttcatcttgggagcttacgaacgcaaaattcttcacatttcttttgcttcctggcttggaagctgtggaatccaaatttttatgtgctgaattgacatggttagccatgttttttttccacagaaccacatgattttagcaaaatttcgccatttctactttgatccggtggaatctagttgccagatgtgtcgactggtaccttgtctaactagctccatggctatgcgcttgcaggatgccatctcaggtcatggatcagaggcatcacatgtcccagtacagccaccccaccttggctgcatcctccttctcggaggagcttcgtctccccacagaggtactccataattgcgataattttggtccaaatcttccttctggaagtcttttctatgtgatggctaatggtgatctgtctggaaattttatttgtttagcctttcctggtgacctggttatgattcatatctacaaatctttaccaattattctcaccatgtttatatattcattatgatgaatatctataatttgtactaatttttctctcaccatgttcatctcttcttctatctttgcagaggcaagttggattttggaagcaggagtcattacctcatcacatgggttagtgctgagtttgatttaacttatactgggttttgttctacatttgtctattagtatgccttgcggttgcagctttaaattttcacgctgttgggggcatgtacttagtcgtttctttatgcatggatagcaaaactttggggacatctattggctcttttttctgcatgaattacaaaccatctataggagggctttctttgaaaggtttacctggccttgacagccatctagcctgcctaaattgagttaacactaggtgctggccttgccacctgattagtgccttggtgaacattggttttaagtattttcccctctatttatgttagattaatttgcaataaataaataaataaataaataaataaataaacatgcatgttcttcttatatatgcaattggttgttgtgttttttcttgttatggttactttctttgttctattgtactactctttgagtctttgataatgtgatggttcataaatatgtgggtttcccatgatattttctcataactaggtgggtttccaatattgacaggaagcaagtctgttgcatcttcaccaattgaaaaacctcaacctattgggacaaggatggctggtcgactagaacttctacaaccatataaactaagagaccagggagctgcatttagccttgagcacaagctattcggtcaagagaggcatgctaacttgccaccatctccttggagacctgatcaagaaactggccgccaaactgattcatctttgaagtcggcagctttattttctgatgggaggattaatccgaatggtgcctataacgagaatgggcttttctcaagctctgtatcagatatttttgacaagaaatgtgagtggtttttctttatcatttgcatttgcttcatcaaaatgcttgattctatgaaacacagactcgagaaatttccattccattgatagtaaatgtgctgaaatataccatcacatgacatatgtattggcaactacaacgcttccttacgatcttacattctatacttaatgcttctcatgaatgaatagaaatgtacaaaagtaaacaaaaaatacagctgaaatgaaagggtagtaaaatgaaatgactttcattcccttcccctttttccataagaatcttgcctcctttatctcctgtcttacatccctacatgctctgaagatatctatctcattatgctcttagtaccttgtaattattattcgctggagctcccgctcatcatgttgcgagtgaactaccgactcaaatcaccgcaaatccatcgatccatcgatgggntctggttagggaacagagtgtctatcaaaggacgcg

SEQ ID NO: 46671 - DNA, 2002 bp, Oryza sativa
cgatatgatatacatgtagggctaagctagtactccctccgtttcatatcacaatattttctagcattgcccatattcatatagatgttaatatatttctagatttatatatatatatatatatttggacaatgctagaaaatcttataatataaaacggatgaagtagcatatgcatatattccctccgtcgcaaaatataacaacttttagcttaaaatttgtcccaaaatataataacttcttcgcccacattttttttctcaaccaattacaagcctccaccattcaattttcccacctaccttcacttctactccaatcacaacactctcccatttaatcatacctactttcttaataaccgtgttcaactctaaaaatacttatattctagaatagagggagtatatgcggccccagataaatgggagatggatcgatcggtgttggtgtacatgcatgttactattgctagccactgtgtgtccggtctgcgtgatgcatggatggatgcaaagcgcaaaaaaggcatagagagagagggggggtcatggatgcatggaaaatggatgggggatatatatgctatgccccatccccatcatgctggcctcccctgtgagacacagtgccctcttgtctccccgtgacacatatattcgtcgccgctaaagcatgaactgctgaagctaagctatagcccctcatgcatctgagcgaccttcaccaacctcatacccatccatccatgcattgtacgtaatgtccggccatggcgagagatcagtgtagtcagtcatgagtcagtcgtagctgatcactagctcgagtgagtcgcgtcttcgcacgccaagctgccaacccatgatgcacccctagctacaatcgccctggcccctgtccatgcatgcatgtactctcctatagtatattggaggtacatggaaactgctgttagatggacaaaattttagggcatttttgaataacatgagtggaaaaatgaggaatagaaaaaagaaacatatgattctgacaggaatgcaagtgtaaaacagatgattagaaaatacagggaaaacaaatgaatgaccgtttgatttgatagcaggaaaaacgtagaaatcagagatagactcaaaggaattttttaagaggttgaacctcttgctaactttcctccaaaatctctataggatttaggatttctcattcctactaattttaaaagataagatatgattcaatcctatcatcctatgtaaatccttcaaatttcctacacttttcctacaaattcaaaggggctgctaatagacatgcaaattaaggagatttaggttcaattaattgtttgttttctgccatccagcaaatattttatctctagagttgaataatatacaaatggttttggtcaactgtagcttaggggccgggggtgcaagcccacattgtcgcccgttgggatcgtcactctgcgccacgcctaaccgtacagaaaccttatagctaagataataatttctattctggataagataataatttctattctggatatagacctactctaaaattaagtgatttttaaattagcagttatgtttatgcatgtgtcacgctttgaggatggtctatgtcactaccgaattatagacctacctataattcggtagttcaatcatcaccgttggctcattatcactgtcaaatcgtgataagaactgtcagtgatactcaacataccagacaatatatatacctccaatcctatatcatgtacaggaaaacaatttaatcgaattcacactaagtcattccaaaaaaaaaaacaaataagtgactatatattaaatctgttgctggaaggcatgctgactatatatagatcgcgaataaggaggagtatatggaagacgctgtagagagggaggagaagcaaggagagggttttgtgggtattggaaattgccgcaaaaatgtgttaagaatagaa

SEQ ID NO: 46672 - DNA, 5248 bp, Oryza sativa
  unsure (1)..(5248): unsure at all n locations
gagccttgattgccnnttgganaancgaccttgtaccccaatcagtattagaaaaaacaatacagattaattaaattttaactattaaaaacttgaaaaacctagacttatctgatattttaaggtaacctttatatataaaaaagttttcatacgaaatatgttatttaacagtttaaaagaatactaatgaaaattaagataaaagaaaagaacggagtctaagcgtgagggtcggggggggggggacctccccttcgtcctttcttgagttgcttcctcccttgtcatggcagctcttgcaaggaggtgagcaagcaagcagccccctgttgtttgtgaattctggtcacaaatcttttagttgcatgtcttgcgcatcttctctcttgctgtagctagcttccaatgtgcgtgtgtgtgtggtacgaacgggtacgtcccctctctactctgggtgtttctcacatcgatgtgtcacttttgtaggatatgtgtgtgccactgtgtggttcccctcgacttttgtttcccttggcacaaagaaacaaatgggataaaattagcggacaagaggcattttgtaagcttgtatcaaaatcggaagatatatgtagcacacgagcttaattatactcctccatgccctattcacgagaaaaaatatctaataattttaacatacatctaaacaaaattagaggtttggccttacgtggtacagatatacaaccatcgaccgtatactcacgtgcgcatgtacttctactctggatcgatatcggtcctgaggaaaatgcgagcctaacaatatattagtttctaatatgctttcgcaacattcttcccattcaaaactatataaatatatatttatatctcattatgtgtttgtccaaaggtgaaaagagaatgacaggatgcaattaataacttggggatggggaagacacgggaccggctgagtatatatagaacgatggcggatggatctcctctctatctcctgcctacgagctgctttgtttgcttgcaggatttttagctgtactttgctaggggatgccacaggcttctaaaaagtatgcccattttgttcccatgcgtttgttgcattccttggctgcattttttttttgtatggtttcaggcttgtccgcgagtgatttcagctactatgctgagtttgctgccttgctatacgtgggctttgtccgtttgctccaggtcttaaaaacagtgaaaaatccacggctctgttggttattacctctgcttctgtggcgtattaatcctctagctagctacctcaagctttgaccattcttaccctcgagtgtgcatggcctggcctggctggcaggccagtcatccttgaaagttgaaagttcttctcttttttttttcagaaacttaatttgaaagttgaaagttgaaacttgcccctctgatcacaatacaaaccttcgttttaacggtattcatgcactgatgcgatttctatgtttcaatgcatgtaaatttaatcagatgcttggaaagaaaatctaattaattcaaaattaaaaaattgacaattaaagtaagaattttttgacctaatattattgtttgctaaataacccaaaaatccttatatttcagaacgaagtgggtatattttaggacttttgatgtagtcttcgatattgtaggagtgatgttaagaatttatttttaaatacaaatctacgatacattctttcacagcgtgcttttataaagacttcctcgatcagaccttaacctctacgattttaacaaatccaatactagaactagcattaatgaagatatttatatttaaaatcaggccttaacctctgcgattttaataaatctattactagctagcattaaaaaatatttgtatttgaagtttttcgaattttacatgaaccatacatgttcaaaatggcatgtttttgttactgaaggagtatgtttttagccaatgtcctatgtgaaaagaatttggctatattggtttttgaattggctttccccttcagaaaacttccgaggaagcaaactaattaaacatcttctgaaaattgcgaaatgatgtccaatcgactgtttttaagaaatcatggtataattctggcctataacaccaactatgatgtacaattacatcggcatttgctaaatgtaaattaagacaaggagcaaaagaccaaagtaacaatttggagcaacattgtttggactcgatgatgatgataaaagttgtttatacttctttcgttaacgagggcacggctaagatatttcaccatcgcagatcaaaagtttctccaaagcaaattcttcaaacaaaaaaaggccgcttaatacggtgcggtggaggcctcgtgctgcaagtgtggtggtttttgagtggatgggcgacgaacttcaagaaaggttgcaggggttccaggcgaaagccatgtctagtagttcaccgggccggcaatggctacgccttcgggtgttgtaaccccctctagggcactgtcgaggattcatctcttccttggcgagtttctcgaggtgatggcggcgtctttgatgtcgtgatctctgtgggggcatcgttttagagtctcgtctttgttgttttgtcgtaggcctagtggcgatcggccacgtatagccgaggtcttttggtgctaggttcctctctcggtgggttgtgtttgtgtggttagcacgtggttcttagtcatgcactttggtgcacttctgacttcgatagtgtctgtcgattgttgtaatttttttcctttttaatatattcggatggtctccttcggtctttcccggtgaaaaaaagccgcttaagtcgatgccgtcgatggatctaattaactggtgtaggtcattgagagttttcacctaagttgcttgttctccaaaatgaccaaaaccatgccacaaattctgttggattgaactagaaaaggctagattttctaaagtctatagctcagtacacatattcgactattaaaattaagattattgtaggttataccgatcaaacagagacgtcagttgcggagacagggacggctagtagcatggcctcctcgaacaatacttctatatctatatttatattacctaattaaaaaatacgtaaggtttcgtaaaaaaaaatccgtccgtcttttttttctttttcgtccttttttgcaaatttttttcgtccgttttcctttatccggcggaaaaaaaaagcgtgcaaaataaccacatgcaaaaaaaaactggggaagaaaaccgcgtgcgaataaaccaatcggataaaaaaaccgatcggacggaaaaaaaccagcaagaaaacagcctattggacttttttttctcagtcctttttcaccctttttcttttttcttttttctgtttttaagtctttttttggcggtctttttttctgctcttttttcatgtgctttttaattttttttgtgggccttttttccggttattttcatatgtttttcttcgtggctgttttttagttgtatttttccgcacgcggtaaggatttgtgccatgtttttttcatcacggggcgaacactaacgtcgccgccatgttgatctatcttcccatgcgttccctcctccaattgattgccaaacatcaatcccccctactccctcaccattttcctcatgattttcccttttaactccgctgtaattcactgaatttaatctctatttaaaaatcaccggcttttttttctttccgtcctttttcaccctttttcttttttctttttttttctgtttttttcgtctttttttgtccgtcttttttctgctctttttccatcggctttttactttttttctaggccttttttccgggttttttcatatgtttttcttcattgctgtttttttagttgtatttttccacacgcgataaggatttgtgccatgtttttttcgtcgcggggccgaacactaacgtcgccgccatgtcaatctacctccccatgcgttctctcctccaattgattgccaaacatcaatccccctactccttcaccattttcctcatgatttttccttttaactccgctttaatttactgaatttaatctctatttaaaaatcacctttttatctcgagttttgtcgcttcgatttcaataaaaatggaaagaggagaactagtgtatcaaaaactctctaccaatttggaagatcgagaaagattcgactggatttgatgtgggggatttgaccagatttgatggggagaatcggggacctacagctccacttgacaaggaaggaaagaaatgagtttttgtccaaaaccaaataggaaaatatatagcaatctaaaaatgtttttacccgttgcaacgcacgggcattttttctagtatattgttaaaatacgtaaggtttctgtttttttgtccgtcactttttttttattttcatctttttttttccttttaaccgttcctccattttttttcttcgcttcttttttccttttttttcacccgttgtttttttctcttttaacgttctgtttttttttctttttcgccgtttgttctcgtcatctccaccgccatgtcgatcggtctccgcattctctcctttaattgatagtaaaaatcgattcctcactactctcttattattttctccataatttttcctttcaatgccgctttaatttaccggactccctcattatttttcccataatttttcctttcaattccgctttaatttaccagatctaatctctatttaagagttttatggattcgctcagattttgataaaaacagaagagtagaataagtgcatcacaaacccttaaccaattttagaagatcaataaagattcgatgcgatttgataggagatcagttctagcatcacactcttccgggctttgatggggaggatcagttctagcatcacactctttcgagctttgacgacagcagtcggctatatgagttgctataatgtatagtgatcgaaaatgtttttatctattgttaaagacgacagtcggctatgcgagccgggcctacanccttagttcccccccccccganaaannaanagaaanaaannaaaccnaacgcaccgcctaaccacaaaccacacccccccanagccgcacccccccaaccacaaaaacccaaacaaccccaacacanaaggctagagg

SEQ ID NO: 46673 - DNA, 1406 bp, Oryza sativa
aaaaaatttaattataaaaaatattatgaagaaaacaaatctaaccatcaattttcaattaaattggtggacttataatttcatcaattttcatttaaatcagtggagttataattttaaaaattggatttaaagacataaataattcaaacagatgaacgcattaaatctacctcaataaaaaaaatctccttaccaaattacaacaaaacatttaaaaacatgacaacgcatattagatattcttgaatcattttacatagtaaagatcaattaaacgtgctctatagcactcttaagtcaccacgtatgatattttaaaactttgaaaaaattgaaattcaaagaaaaaaataaagtactccctccatccacaaaagttagacatatttcacatttgagtttttccaaataagttgttcctatttatagtctttatgtatttaagacttaaatgaagagataaattaaatgtttgattagaaccggaggagtcatctaaatattcattggttgcatacttgcatgcttgcatttactccttgattttataacatccaagatgatttaatattttcttggttttggtgacaaaagtaatatgtgtggatggagggagtatatatctatacattggtttccacttaatttgatgacccattatttttaactattagatcacctttctctttataaaaaaacttaagccaccacatgtcttgtcttaaagatccttagaatgagaaaacaacaaatcataggttctcacttagattgtttacaaagattgaaaaaaaaataatgtaccctccacctccctctccaatcacatgcacataacactattacactgcgaaccctttcttatacctgattcgagttctatgctattcgtttttctccagtctcctccctattttcagctactaaactaaagagagaaacaaatattaaaaagaccataattttaagctacacttataattttattttatatatcatctaatcgatgatggtttctttttgatataaagtctccacatgttaccccataaatcctcctaggcgtttttaaactgatgaacccattatttctagccattagatttatctcatattaaaagacaagtgtgtattcataatacatcatcttccaaaataatatattgcacaactatatttcttcatccaatattattcacgctaagttgcatggagtctcacccacactctacatagaatgttcacatatggattctctctcaaactaaacaataatattagactatataaacccatgcatttagtggagcctcatatcccacccaattcatccgtcaacaaacaatgacaacctacattcaattaaaaaaacaccttacttttgaatttacacttaatttgct

SEQ ID NO: 46674 - DNA, 1899 bp, Oryza sativa
ccccttgagtttcttaaaaacaataaatttgttttttcagctaggtttacaaatatggttataaaaaataatacaaatatatggatggtcagaagatattaacaacatatagaaaattgtgatatgaaggtatatggatgatctgttggagtgaaaaggaatatgtagagagaatcgttttctataataatccatatagggatatgaagatttaaatttggatgagctgctggatgctgtaagagagacaacatagactcctttcgaattgagttgcccatgggatggtggcacaaactttgctttcaccctgtagtgtatctcgtgggctgcagtgtagatcgaagccagatccaccgaaaacaaagcccagcagtaacaaggctgtgcatcaagtttttgggctgataccataggaaacaagagccttctacactgaatttttttcatttttaaatttttattttttaatatttacaaaaatattataccgacgaaaatatttatatagacccggccgcccaagtagagggcatcaaggtgacgtggcacatggcgccgtgtgcatattttgcgttgaggtcccttgccggcaagggggtaaatgtaattttcgccgcatgcaaaattcgcatgtccgctcagtggcctctagcatctggtcacacaagtcaccctgcccgagggcgacagtgtctattttttaaatatttttgccggtataatatttctataaatattaaaaatataaatttgaaaatgaaaaaaattccctacaccgggtccagtccagtcgtgaggacaaaagatttgggctatttgaaaaaaaacatagaaataggaataacttctattccggggagggcggcagagtctattttttaaatatttttgccggtataatatttctatatgtattaaaaaatataaatttaaaaatgaaaaaattccctacactgggtccagtccaattgtgcagacaaaagatttggactctgtgaaaaaaaaaacagataaataggaataacttctactccctccaaaatagacccagaaaatatcccattatattttagaacaaaaatagaactagtttggaaaatgtgttcacagagaacgatgaaatagctgttgtgaaaagctatatagaatgcacccttactacttctagagttcttaatttataccgaaaatattatgacatatagcattcaaaatttattttaaaatataataacttgttcacctatattctattctcaaccaatcataaccttcgaccatttaaattcttcacctatactactctttcgaaaacataatcttttttatgtttaatttcacttacttttttaacactacgatctaattcttaaaacttcttactccttgtatattttaggagggaggtatttgtttgatcatttttacgttttacaaatcatatttttcataagcagcgggtgggaaggatttcggctaagggtgaaaatggtataaaaattttccgaccgtaccgatacccgttccgtaaaattaatagtgataatatatttaccgacggttcttgttgtcaaaatttagtttttttcaattcatatcaccgtgataccgaagtgatactatatagttcaattcattaatatgaaaattttcccaccatttccacccgcttttttttaaaaaaaacaaaaaaaacaaaattaaggtatcgtttccgaccgttttcatccgtaccggctattcggtaattccggccggaggggctctgaaaaccgatgaaacagcacgtacggtgcgaggccctgacttttgagcaaggctttttgtagccttgcgcttgtgcacacgccaccccttctcccttcatttaataatgcccacaccaaaggagcggga

SEQ ID NO: 46675 - DNA, 1471 bp, Oryza sativa
  unsure (1)..(1471): unsure at all n locations
ttgatcatttttacgtttacnaaatcatatttttcataagcagcgggtgggaagattttcggctaagggtgaaaatggtataaaaattttccgaccgtaccgataccgtttccgtaaaattaatagtgataatatatttaccgacggtctttgttgtcaaaatttagtttttttcaattcatatcaacgtgataccgaagttgatactatatagttcaattcataaatatgaaaattttccaaccatttccacccgcttttttttaaaaaaaccaaaaaaaccaaaataaaggtatcgtttccgaccgttttcatccgtaccggctattcggtaattccggccggaggggctctgaaaaccgatgaaacagcacgtacggtgcgaggccctgacttctgagcaaggcttttgtagccttgcgctgttgcacacgccacccctcctcccctccattaaataatgcacacacacacgcacgcgcacacaggatgacaggaaggcacaccgatatataactcctccctcctagtatgatccttatcctgttgtccttcgtttggggtggagcacagcaacacagcatgattgatcccgtgattgattaggccccggattctgtctgcccatcatcccactgcacagcttaatgatagacttaattaacagattgtataattagttccttgctggagaggaggccatatattggctggcactctcaagacggtaggggaaaaagaataaaattcctaaatactaactccatattttaacgtatgatatcgttgactttttgtttaacgtttgaccattcgtcttattttaaaaaaaattatgtaattgttatttattttattgtgacttgatttattattaaatgttctttagcatgacatatatttttatatttgcacaaaaaatttgaataaaacgaatggtcaaaaaagtcaatggcatcatacattaaaatacggagggaataacatttatggccttaggcacatatcgtgattagtgataaaataatagtgtatggataaaacttttacatatatgtttttaacgatttaaaagataattaaaaaaactttgttaaaatcgtcaaaatcaaatttataaaatttaaaatttaacggtggtttataagcttttggtaaaggatgagaccctatgtagaaagtccaccctttgtttctgaatctaccgtttcttcttaatacgttgttcctcatattattaacgcatgcgccaccatttaatcatccgcgtcccgtcttcttataatttaacgccggtgcttttaaaatattcctgatgcgtgtcttataccatattgtgttttgtccgtgtcctcccttcttttcttgactcgggcctggctttcttttttatattcgtccgccctctcctaaatacatcaccgctggtccactttttatataacgagttcgtcggggccttctatatacg

SEQ ID NO: 46676 - DNA, 3868 bp, Oryza sativa
  unsure (1)..(3868): unsure at all n locations
ttcctctctgtgaanttagtgactgnatgttcatattattnttattctctctcatcacattacttttattntnataataantccgtcgtctttanaattcanttttctcttattnnnnnaaaacncnccccccccgtggcttttgattgatcgaacgncctgctaccccaagagnaanaattgtactatttttactcatgatgatatagatgaatctcgaatatctatttttcgatctaacgttagttttcaagtttcacaatatttatttccaccacatattttcctaacatgtgaccgggatctcacttctatctggcacacaacttattcaaccatactttgccacggagacgtggccgtacgatggtgccacgtacgacagcacaagcatttcacttctctactattataaaaattgtacaacagcaccagcatttctcttctctactattataaaaattgaagatattttttccggtaccttagtacgttatctgtgtatgagtcggttttaagtttgttcacttttggaaatatatatttgtatttcagttggtttttaaattcgttcattttgggaaatacatgaagagtcgtataagaaatctctttaaaaaaagacttacatgctaatttgagatgatcagactcctaattacaactcatgatttttctagaaaaatatatatccaagtgaattctcacagtgaaactattataaaaattgaagatgtttttaccggtactttggtacatcatctatgtatgagtcagtttttaagtttgttcgctttaggaaataaatatctatttttaagtcaggttttgagtttgttcgcttttggaaatacaggagcagtcgtataataaatctctttagaaaaacttacatgctaacttaagatgatcggactcttaattgcagttcatgattttctaaaaaaatatatccaagcgaattctcacggtgaatttcaccttaactaaaccgtataacaataatgaaattaaaatagccttcccctgttacaacgaacggataatttttctagtgaataaaatattcctttatagattaactacttaattatatgataaagtaataaattaataaataaacgtaacaaatactcattttgtcccgaaatatggttgctttctgatgttaatttggttttaaactatagctacttcttcgcctcctctatcacactattaaaaaagtatttatgcatgtggtcaaaatctatttttccattcagttggactctcaatatgcctgaaggcgtctgtaaaagtcactatttttccatgcgggtggagcacctgcacgcaaaaatccgtttttcgcgggtgggtgcttatgtcacctgcttgcgaaaagaaaaatcacgaaaaaaaatcccaaaaattgaaacccgaaagcctagctagctcttagtctgtcgttgctcgttgtcaccactgccgttgccgaggccccgtagctcgagatccatcgtcgtggtcgtccaccaccttgccgtccccactcctttgcagacaggagcgcttatgacccacctacagtttaagtttaaaatgggtttcgtccagaaaaatcagttctctcaaccttttgcttttgtatgttttgtgtacagttgattataagttgtaatgcttgctagcaaccaaatttaatttgtgggtgaaacttttatttatgtatatgtgtgtattattagtaacttaaaattaatactgaaataacatgcaatcagcaaacttcaaaattgttgacgggctatacccgtagacgggatttataagtatggggattgttgtaaccagggtatacgcgagactgtatcaagcagacaagaacgcaaagatttatactagtttgagccctcaagaagattaataatcctagtctagtttatattgatttatagataaaaatagcacaaagattacaatggggtgtaagacgaataaacaaaccgtcaactagaagctgtcgacattggcccgacgagatctattcggcaaatacgactatggcttctcccggattgcttctcaatgtggctctggctaccgcttgtaactcgatccccttctcggaattaggggaccttgtattcactatttatagtgtagatctatctttttctccaagtataactcgaagagataaaataggatacgggttggaggagaccttatctttttcgaataagattctgaaacattctattccaggaaaataatttcctttctatttgtagtatttccttaatgaaaggatgtgttcccgtaaacaattggttatatggtgttgtcatattccatgagtccgtgtataggagatatctattatccttacactaacaaaaatcaactctaaacttaagctttaaaaataaattttaactacaaataaataaagagcaaacaatagagtgcaacatctcaactagttacaaatatctcttatttaatttctctacctacctctcatctggactagtcgtaactaattttacccctctctcttggagagaaagctcttgaagtggttatatttagagatgaaaggagtaggttaaaataattagtgtaagcaaaatacggtaaaataaattttctattactcactccgttcctaaatataagggattttggttagatatgatgtattttagtacaataaatttagacatgaagcctgtccagattcgttatactaggatatattacatccaactaaaatctcttatatttagagacgaagggagttgaaatgtaaaggaggagtataagacaggccaagactacccagtacagagttagccaagattgacatgtggctatgttagttacctatggttgagaataaatcggtctaacagaactgacttattagcatataattaattaagtattaaataaaaaattaaaaaataaattaatatatttttacagtaacagttctataaaaatttaataaaaatatattatttagtagttcgaaaaacatacaggtgaaaataagagagttatcttcacttaaaagaacatttagtcaagaacacaacagttgggtgagcaagaaagaaagagagagaaagttcgaggaggccggttgagaaatgaatttatttgaattttttaaataacttatatatagaaatttttttataaaatacacatcatttagtattttagggcctgtttagattccatggcaattttttttatcctgttaaatcgaatattttaactaaacaggcccttaagcaaacatcagttgagtgagcaagccgcaggggatctatgggggccagttgagagttgagagagagtgagtacgtcacgtcacatcatcaaagcggagggacattaccaataccagcaccggacgggtccactccaactccatccattcatccatcgccgtatcgtccgtcctcagaggcccagaccaggcagtttcagtttccctggtttcatgctcttaccttttgttgtctcgccttttacagttttactactactggggccctgttcccacacaaaaaattttcatcctgttacatcaaatatttatacacatacataaagtattaaatatagaaaaaataactaattacatagattacgtgtaaattacgagacgaatcttttaaacctaattgcgccatgatttgacaatgtggtgctacagtaaacatttgctaatgacgaattaattaggcttaataaattcatctcgcggtttagtacgtaatttgtttacaggtggaatatgtaatttggtttgttattagactacgtttagtactttaaacgtgtatacttattattcgatgtgacgcgt

SEQ ID NO: 46677 - DNA, 1986 bp, Oryza sativa
aggaggaatcaaaattaatggtcaatgtgggcctctagggttcttctaagtgaagctaaggttcacatcagtagtgtccggaaagtggttatgttggaattgtttttgtgcttcaattataggcagatcgatgtgtgttgaatacgggtgtttatcagttgtttataagctaaaaggttccattcaacggtagaatttcatgagacacggatgaaagcggaatctgtgctgcgaccatcctgttggaacatgtagagttgaaaatcactagaacagtgcatgcttcttttgataattgatagtgactatgaatgtttcatcagaatatgacagtgaaatcgataatgttcaaggtagccttttggctgcttcgtcaaaagcctattctttgcttgtttaagtccaattataattccttttgatagttcatcaagctatagctgtatagcttctggctatggaatctttggtttggttagttttctagcacacttttccttgtgttgcttggcccaatgctcatttgctctggaactcaaagagaactattactgcattttgggatcaatagcataattgggcaaaaaccatataatctagttcgttacaaaatgctgcactgcttcaactgttggctgtattgccatttcttaaatgcttgagttgctctcgcattctctgctgcattgttgatagattgcattgccaatgattactatttagcagacttaaaattttcttgaggatcaaatgatggtttttattgtccatgtcatgtcatgtaagcctaagcttacaggttaacacttctagctttgagcaattgcaatttataacttttatatttttgttggttggattaaaaggtttttggggggttgaattgaaatagttaatgtgcttgtctaaatagccaattggagtttattgtgatgggcaaaatttatgtttaatattacattgcaattggccatcaatctttgaactgctcaggctctacaaggagttatggatgcatgcatgtttgagcaccctgcattctatacatgcccttttttttttaattttgtagcactttcaatttctacttccctccttagattatagatttactatcattttcagtgttgtggagttattctgattcaatttactatgttctgcagattgataatctgagtaacttgtccgatattgatgatcttgcgagcacttttgcaaaggtttgtttcacaagctccactgttttaaattgaggttccattattaaaaaaaaatgcttttgcagtaacccttggaagtattagatatgttaaggatacttatgctttaccattgttggctaagtggttactctaattcttccgtaatccattctcgtatcaagaaatgttttccccagaaaggttgcatcttcaggctgcatgtcactaatccccccaccttccaccccacaaggctaagctaacttaaacatcaagtgcacattttattcatttgtagttgtagctatctgcctatttccactacaactagtcctgcctgctgccaagcatgtacgggataaatgacacatggttagtcaagtcctttggctgaatctagcttcttctggcattgcaataatctgttttgcaatctgcaagtattttgccgcatctaaggcccaattgtacatagaagatctagatacatctgtaatgtctgaagttgttttggattgattagcttggctgttgttctttttctaaggatattttatatcatattgcttagttgaagcccatgcaaccaatggattaggaattcaggataatcactaatgaggcctcaacttttatctatacctgacaaattgcttgcatatggaaccgtaacttcataatattttgttctagccttaaaaacttatgtttttgtggatgccgtccgtcttgttgccgccacctgattaatttatatctttttttgtcacgtgaaccggac

SEQ ID NO: 46678 - DNA, 783 bp, Oryza sativa
  unsure (1)..(783): unsure at all n locations
cttgtatttatacccataggtgtccccttgtccaagtagaattagggaaaccaatatggatacaatctgagtaatccttgccgtttacatgtagaactctggttgtctttccttatccggaactcctcctatatccgaaggttgtttccgtataagacatggtatgtggtgggtcctgccgagatttaatcaactactattaggtatgtggtatccataaccctaacactatgtctctgcagatgatatcgagcaaccacataaatgaacactaagccaatatcattgcatatctctggtaagctagccacacaattcatacgagtgaagtataaactaaagttggtactcgaataattatgcaaataaagtaaaggaccaaaactatataaagaagaatatttcattaatgaataaagtcttataagaggggaaagagttactagaaccatactcaaattctccaaaagacttgaagaactaaggaagactattctaattctaactctactagcactagagcaaaatatgtaaactaaagagcttcttcacttgattcctttctggtgtgtctaaaagtaaagagataaggtccttttatagctgtttatgacagttgggagcgccaataccagtaggtacccgtaattggaaggcgggtaccacctaccttaactttggcttgggcccaacgagcttgtgcttggtcnaccgacccttgcaagccttcctgcccatgaatcctccagatatctttagatggatcttgggccaatggcatag

SEQ ID NO: 46679 - DNA, 2016 bp, Oryza sativa
  unsure (1)..(2016): unsure at all n locations
tcttgttgttcccgtccggccgttgaaaccgaaccgtacccatactccgttaaccggtaccggaanccgtaaccggtgcccgttcttttgttcgaagggccaaggcngcngcgcggcggttgaccgcgcccacggacgacaaggaggtgtaccccgacgacgtggtggtcgacaccgcggcggcggagccgcctccgccgccgcggccccgcgcgcgcgagcagcggcgggaggaggacgacgcggaccgcgacgccggcgacggcgagtacgccgacgacgagcgcggatcgatggtcgtccgggtgccgtcctcccagttgatgtagtaaacttgccccgtctgcatcagcaaagccaatcacaaagcacatttcacacaaattcacatgaagtcatgaactacacatcaaaattcatctaaaaataataccaataaaggaaatgcgcttgaactagacagctagtggtacagattaagttaatcttgcaaatggcgaaatgctgtttcaagaatgtggtgagtaaatgtgcatgatgcatggagaagtttgggtggggaaaatctacaagtacattttggtgacagtctgcaagaacaattaatgcggtggcattcagttgcttccgtgaaacaaggttgagaacctattaataactgatgcccataacaaagtacagcagaacaggggaaagaaaaaaaatctggatcaaatggtgtaatgaatgctgctctctttgtcctcttgtttgtttgcaaatcacagggcaaggttggcaatgaagaacaccaccaccaaattctcatttcatcctttgtaaaaaaaaaaaactctaatctgcaggaaagctgttctacttaaaaagcacataaatgtattgcagtagtatcttcagaaaaggctactgaaataaccataagaagagcatttttgtctactctgttgctggagacaaggtggagatgaacactccattttggtgattaatacgcatgaatcttcattggggtaggcattcattcgtctgttcaaagtactagcagggatgaaaaagaaagggagacactttgtcacaatggaactgaagatttcccagaggtgagaatcatctggtgtttaacaaagctctgcgattagattagaacccaggaccaaaaaaacagagcattgtggtccagaagaaatctatagcgaaatctagagtttcagatagagacagagcaaaaaggaatggatctacagggatgtgtcagaaatttagaatgcaacacagatctgaatgcgcgcttagatcagagaccagagaaggtgtggagatttgaagagccttgatatcatcaacaaaaaaaaagaaaaaaatagtaccatcttttccgaggtttcttttctgaacttttgtcatccctgtgttaaaaagaacggcctgaatctctctgaagatgatcgaatccccaaccaaacgaagataagaaccgaagaaaaaaaacagagataaataaaaaaaatatttgcatagacgaagagaggaatcgcagatgaagcaaggatccaagaacaagaacaagaagagagaagggagacgaggagcagaaagagaagaggaggaagaagaaaaaaaaaatcagcgcggacgggtcgtctcgtctcgtctctctctccagttcgagcgcccgctttcgccattaatgatcaaatgattgatcccaatcgagcccaaaccaaaccacacccacctacctcggaaactgctatccatttatgtcttcaaatgattggacaaagggcggngcgccggcggccaccgncgncggcgccgaaagaatcgatcggggaagaaaaaggaaacgcggcgtatgcatgtatggatgcatgtgtggaaaaagagantggcgagtagtaatagacgtacccggatgtcgaggcactggtcccagtggtanggcanggcgaccctcgaagtgagctcgacggtgaccccctcgttgtggcgttcccttcggcggccgcgggcgct

SEQ ID NO: 46680 - DNA, 4837 bp, Oryza sativa
  unsure (1)..(4837): unsure at all n locations
cgcagaacgaccagagcacagcgacaaggcgaccaccacaaagancgggccatcaacaagacacaaanaaananannannnnaccccccacccctccccctttccaacaagaaccaaacggacggcgaggaagaagaagaagaagaagaagaagaaggaggaggaggagaaggaggaggagaaaggaatttgcttttgctgttgctgccgcagcggctgccgatgccgcggtggtggtggtggtgcgcgtggccccccgggggtagcgtaggcagcgtatgacgcgtgaggctacagtggtgaaggtgaaggtggtggtggtgcctggttggagccactgttatatatactgccattgttgctcctgctgctgccaatcttgggtgtttttggggtggttttttggttttggttttggtttatagggttctttggtttggtttaggagggggtggagggaattggaggaacagtctgtctggacgagtgccaactgtgtgccgacatagtatgcgctgggattaacggacggacgccgatgcctgcccagggtatcgggcggtttctggttcacttcctacgtcttgtatgcctgcccaaggtatcgggtggtttctggtgcacttcctacggctgatatggtgctggcgggtgggggtgggagcgtcgtgatatgcgccgatggtttttccggcgcctatgtaaatctgggggccgtgagagaggttttgttttcgtgcgctggattcactggcgtgtaagtatgcgtattaggctatgagtaattgacggcttgtccgcttccttcttagtgaagtaatgatactgtaataatgagatatgcttccaaaacaacgagaggtcgagagcgatcaaggtgaaagttttaattaaccatgcctagcttcctggtattcatgaatggtattctatgctacgatagtccaaaggcctatggaacctgtttcacatgtgtataccgagtctatataagtaattgtgtgttccttatcaatgttgcattgaggatgctatagaagacaataatatttttttaatgaatgaaccagccttgatcttctttttgtttaagataaaagaagaaggaaacctgtgataatgtggtgtacgcccaaaggaagaaaagtataagcatgaaggggttgaaaggtgcaaatgatgaaagctttctgctgcagccaagggggagagagagagggggatcgatgaatgatgctagggggaaaggtaacatcaacctactaccatggccactctctctctctctctctacatatcgctctctctcgtatggtgtgttttggtgttgcatgttgtccctgctggctgatgcagctagcggagctcaaaccaaaccactggcccggcccggctcttgggccaccatctcctgcgcagattcctcttctgccaaaccgaggaaaggttccccccttgtccctccctcctcctctctctttctctctctccttccttgaatcaacctgaccatttcaaaaactccatcacaactagctgaatttgtctcttggaaaatggcattagcttagcagcaaaatgtggcaataaaattatagaaaacatgcagtgttatgtacagtgtaactgtgtagagagagagagagagagagagtgtgtgtgtgtgtgtgtggaggaagaagaagctgagagcctgagagcaagcacggtcagtggcctctgatgtctttgacctactagcatgcatgcatgtacaccactgttgcaacatcagacgagatggatggatcgagctgggacgcatgcgagttaatacttttttttattctatattgatcatcatatatataagttttttcatgaaaaccaatgtgagttgagaacatttgaaacgttgtagagagttttagcaaaatttgttaagtcttctgaatgtgtaacacatctggtcgtcgccttcatataatttgacaggcacatatcaagctgaagttgactggatatgtgagattgtctcacatgttcactactcgatatcacatattttatttaatgtaattaagttgtgatggaaaaaatgaaagcttaacaacctctaaatgcgtgcatgcatacatgcatgcttaatttgcatgcatgcataaatcgcatcacttaacattgggtgagtatgaattatcccaagatctgaaatcagacatctttcatgctcaattattaatatcggatgaagaacctctaacttaatccggagtggttatgatcttagttggtagtcaagtcagcattttatttaaaaacaatatgcggaatccacctatcagattctctccgtttcacccctctctaacagatggatcccaccgatttcttaaaaaatgctacctagactgtcatgtaggaccaaaaccactctagattaagttaggagagttcttcacttgatattaatagttgagggtaaaaaatatctagttttcagatctaggtgtaattcgtactcacctaatagtttagaggtgtaatttagactttctcctaaatacaatactgttgcacgtcaaaccaaagggcactggttatataatgatcaatttaaattttttagtattatatgatgatcaatatgtgaagggatcgatgatgtcacactacgtattatgttagtttattttagaaagaaaggagcatggagaatctcttattaccatgtagcttgtctctgtcctctcctctccggcatgcatgcacgcgcttgcgttgcttcgtttcgcttggttgcttgcacgcttgtccatgcatgcatgcacgcgtggtgtaccgcgaaaatcttttggatggctgcgcctagctcgtgttcgtgcatctatctatctatctatctatctatctgtctatcttgcatcatcatcacgtactctatctgcctatcttgcatcatcatcacgtactggatcgatgtatgtatctctttcctcctcctcctcctttttttgatctagcatatagcttaatttgttctcgttctcgttgttgcggtgtacgctctgctagattccaatgcagatgcgtggtagtactcctacgtgggtaacatgggacatggccgttgttgcttgctcgctttgctgatctctggtggtttctctcacgcccaatgacgacgacgaccatgatgatgattgatggaactccggaaagggggagattgttttgtagggccgtagctgtctctggaacagatatgctgcatcgatctcggaccaaccctgctactagtagtggtagtggtggtagcggagatcggtcgatttttttgggccctgttgattcaagtggacgggcaaatgcgaccctccccacacggttgtgcatgggatcgacgttttcctcctcccacgtactacctccttccctaaatgtttgacgtcattgatttttttaaatatgtttgaccattcgtcttattaaaaaacttttgtgaaatatgtaaaactatatgtatacataaaagtatatttaacaataaatcaaatgataggaaaagaattaataaatacttgatttttttaaataaaataaacggtcaaacatatttaaaaaagtcaacggtgtcaaatattttgggatggagggagtacgtacgtactacctccatatatttcgatagaatcgactaaggcagtgtttgtttctatggaaggaagataaagttagtgcacagaaaacacgaaaaggacccgtaaaaaaacacgaaaagtcattattaactcataatttattaataagttttcattattacaaaaaaattgtgcaacaactttcatttatcaccgctacataacaggtttttccatacggtccaatcccaattttcacggatggcagggcgatccacatgcaccaaatggtctgtgaaaatcgttcacgcgaaaatccgactttttacgtgcgggtgcttatgtcgcccgctcgcaaaaataaaaatccaaaaaaattaaaacccaaaaatggcgaaacctaacctgccctcctcgtcgtcgttgtgggggcataggggcctagcggcggctgggtccgcccgctcccgtcgccggagccagagccagatccaccgccactgtgcctcccactgccgccgcgcggggtagggcagccgctgcccctccccaccgttgtatccgccgccgccgcgcctcactgttggtatttattatgaccacggaataatctataagcgcacaaataccgttgtagccttcacccaagagtattccagtgtatcgtatccacagtaaacgtgtgtgtataatctaagaacgaaattcttcgaaggacaacaactaaatgataggcttgggatagagtggactcctgtgggttagttatcttaattaagttaacgtaaaactctatcacatgggcaagataacttgtcaaaaaaccaaatcagtgccaggtccattggtgaaagactatcttagcacaattttccatttgaaaaaataatagtaaaaggacctcgacaatcctttgctagccaataattcacatacctattcatgtaaacaaatcacaactacgaaaaggattttttcgtgcggtggaaaagggttttcacgtgcgagtgggcgaaccgcacgcacccagttgtctgcgaaaatcgctattttttgcgtgcgggtggcgcaccctcatgcgaaaatctgattttcacgtgcgggtgcttatatcgnccgcnnacgcaaaataaaaancaaaaaaaaaaaaaaaaaaccgaaccctaaccttgcaccaataccgtcgttctcgtcagatccgncatcngcacgcctct

SEQ ID NO: 46681 - DNA, 4655 bp, Oryza sativa
  unsure (1)..(4655): unsure at all n locations
ttaaacatagtctaataacaaaacaaattacagatttcacacgtaaactgcgagacgaatttattaagcttaattaatccatcattaggaaatatttactatagcgccacattgtcaaatcatgacgcaattaggcttaaaagatttgtctcacaatttacacgcaatatgtataattggtttttttttctacatttaatactccgtgcatgtgtcaaacatttgatgtgacagtataaaagttttcgcatgaaaactaaacagggccttaggctttaagagtatgtgatgattaaccaagctccttggaacatattcctcccagccatccccatgacaaagaatattctgtccaccaataattctataaaagtctcgtatgcatggtagctaaaaaggaaaccaaacaattaactgccccatcagttctaaaatataacaacttcttcaattaattttttatccaaaatatagcaacctagtaaatgtaatagttgatttttaacatcttttcttaatacttgtgccgaatgctaaaaattgatagattttaagatgggaggagtatctagtttgtgcagcaaacacccatcaacaatcaaacataattttacatccttaagtatcaaaaactggtaagaagaaaaaaaaaccctagtgcaatacaacctcacttatactaagtggttttcatgatttgacatccaaatatacgtgttttacttgcatttaactactcatcaattgtaaaaagaacaccttttgaatttcagaatcataaaaagcacgatatgaaacaagtttgtattctatattatattatctacttgtattagaatgtatataaacgcattagtgatttatatgcttcattttatagctatataaataatgtgaaaacttagttagaaccacatgctacataggatcctgccctcaaatatcctcgagtattcacatcattccatatgattgtcaagggacgtaaaatatctagttttatagttgataaatttttttaataaatagagaggtgtaatagggatttatcccacacgaagaaatacaaaagtggtcctgcaaagcgctcttttaaacgaagggtgttttttacttcacgccaaaattgaaagtttgattgaaattagaacaatgtgacgaaaaagttggaattttggccgtgtttagttcccccaaattcccaactttccattccatcacatcatatcgaaaactttcctacacacataaactaccaattttttcttcaaactaccaactttctcctaacttcccaactttttcaccatctaaacacaacctttgtatgtgtaggaaagttttgatgtgatgaaaatgttaaaagtttttaaaaaaaagttaggaactaaagcaggacgaaagcaaacggaaccgaatacttctatccgcacaatgcagcttttgatcctttcagaaaaaaaatgcgtgttccttttgacatgtttggtaccggccagtgacagcttcttctagacggcgtttcagcacaggaagcttttgagaaaattaaaaaaaaattagagaaggctgaacaattggagaagggcaagaggccagtggcatatttatttgtttggagggaaaaaaaaggaaaggaaaagttcatgaacaaatgaaatgtcttcagaaacaaaaacaatgaacaactgaaatgatcaactgggctgtttgcctgttggtaggttatggcgtttggtgtgagacgctgatggctaacaacgtcaaaccccaaatggaccgatgaaacagtagtgaacaaggttccccactcgcgtcttctgttgaaaacgatgttcttctctgttgtagctgcacttttttttttaccctatgtgagtgactggaaatattgcatgagaagattccaaatattggttttgtgtggaattacaggggtgtatctgcaggctgcgatattttactggaaaaaaaatatctaaagccattttttttgatatttcgaaccatttaattgactgaaacaaaatgtacatttagtcatatgctctctactaaacgtgcattaggatgctagggatgttctttttttaaacggtgggagtaaaatgtatatataggttgactttaactgattgaccttaaacatagagttgccataggctgtgttcggcattccctcttcccaacccctatccctcgttttccacgcacacgcttttaaaacggctaaacggtgcatttttttaaaaaagtttctatacgagagttgcttaaaaaatcaaattaattaattttttaaaaaatagctaatacttaattaatcacgcgctaatggaacgctccgtttttcgtacagacggttctagctgggaaccaggaatagcgaacacatccatagtctctaaatctccacgtagccctttctgaataaaataaagaccacaaaacgatcatcaaattttacgcttgttatctacttgtattagaatggatatagatgcattagtgatttatatgcttcattttatagctatataaataatgtgaaaacttagttagaaccacatactacataggatcctgcccccaaatatcctcgagtacattggaaacctaccaccaccactggcaattaacaattcctctattcaccactaaccaattgctaaccgagtgccaaaatccaccccaagaccttcttcagtgcaacagataatcatagaagagagagaagaaagataaggattagcagtaacactagaataaatttaagcatcagggcctaaaaaatgcaccatgaaaagagagaaaaggtgggaaagaaagcaagcacaaaaagaaaataaatatagattgagtaacaaacaagccaaagctaaagtctttcttctctctcctatgcctacccccttgctaatcccctctctctctccttatttgtgtgccttccaagtgcaaccctaacaagtctcctacttaaaaaaagaaaaaaatatatcgttttgctaatttacttttgtcattcttatttttgggattgctaaattctcctcctctaggagtacactagtacagtacttggatatcccaaaaacttttttttatatttatttgtagttggatatcccaaaaactatttttttaatatatatttatttaaggcaggggaggggaggagaaaaggaaaagagggagaagtaattaagcaacagtgaggccggagctatctatctatccatctatctatcatctactatccttcctctctttcctcctcctcgcgcagccgcgctcagatccaaagccgcgcgcgggggagggagggaggaatcgcggtgccaagaaacgaagccctagccccccctagatgcgcgccgccgcttgctgctgctgctgctgctagggttcttgtacggagatgcggggcgtcgagtcggatggcggcggcggcgcgcctttctcctcctcctcctccgcggccgctccaggtgaggcttttttttttttcttgaggcttcttgatctggtagctgctgctgctgcgagtagtttggggtgctgtgttggcgttgaatttggtttgcgggaaaagtcggcgccttgatctgttttgctgtctcttcccgatgcgaatcgttgggttatcgacggagaattgctcgaattccaactaggaaaggatgtctgttggttttctttttttgttggcttgattggtgtttcgtgatgttcttgctgttgttctttgttctcggttgtaattttgggggtaaaagatgtgggtttttactgcgtacgattagtatgatctgcgccatctgacgcttttttctcgatgcagataatttcgatgccgcgcagtactccttcttcgggaaggagccactggaggggctcgagctcagttgcttgaagaatggcggcgccgccggtggtgatgccaatggcggtggattcagtggaggagcagaagaagggctgtaccggctctcctctgttggagaagaggtgcgaggattcaggagccttcatgcccatagattgccgtctttgttgtgaactatcgtcgtgctattcgtttgtgttcttgggttcacatgcatgctttagctctttttctcgataacacagtcctttcggcatggcggcaagcgatagtggaggcttagtgctaggaggaatcaagaataaatgtccatgtgggcctctagggtcttactagtggagctgaggttcacatcagtagtgtccgggaagtggctatgttggaatgtttttgtgcttcaagtgagcccccccccccccccnnnnnnnctcnnnnnnntnncttnnntnttnnnncncatnctcccttctctcctctttttcctctctcctttcttctcttatatttcttttttttttccccnntttgctacagtagagttgagaatcactagaacagnggctggcgttttttgataattgatagggactatgaatgtttcatcaggatatgacagtgaaatcgataatgttcaaggtagccttttggctgcttcgtcaaaagcctattctttgctcgtttaagtccaattataattccttttgataagtcatcaagctatagctggatagcttcttgctatggaatcttggtttggctagttttc

SEQ ID NO: 46682 - DNA, 1128 bp, Oryza sativa
  unsure (1)..(1128): unsure at all n locations
aactgaagaggaacttcacctgaacggctgaacacccctgtcttctggactccggcggatggtgggctggtgcctggcggcgtccagtccggcctccaacgtgctcaacggcgagataggcgatcgctgatgaagggcgaaatcacacaaaagcttgccgccggcgccccttttccgttttttggcttcgtcgctgatggttgctgctcctgctcgcctatggcattgcgcaatgcgaaggtgaagcaacggctagcggggtgatcgagacgaggaattaacgaagaaggcgaggcgtttttttcctaatggtgggctgagatgagaacttgccttgggctattgggcttaccactaccagggagatagaagagggttttggggggggggtcggcccaaatctgataggggggtgttggcccaccccggccccccctgtagcttcgccactgatgatgatgcaaaaggagaatcgaccatgttgattaattgtcgaagctgagcgttattcggatggatagggaagggtccatcagtctccatgcattggctcaacaagatatgagggcaaattggtccttcatcctctccgcgcgattaatattagtagcgcctttggcgagggcaaaatcggctattgtcctgcggtcacaaatagttccgcttgtttgctataatacattatgtcgattaaaattatatgttcggataatcaggcaaaagcagggtttagaatcttgttaaggatatcgaacaccaaggaatttcaatcagattaactatttcaaatttgggtttctcaaaaaacattcaaagttctcctagagaactgactttagcttggttcaagaagcttaaagttttaaaaaatcaaatggttttcgttgagattgttaaccctgggtgaaggaaggaaaggaagatgggttgatcatattatttcccttcatagaagtcagtcccataagtcatactcgcatacgtatttctttttgttaccaaatagttcttgtgacatatttagaaaacggatatatcaaatagagtgtccaagcgcatgtaaataaccgtcgtttttgtaaagttctantttnnaatnggggactcagtgtctcagntttcaccact

SEQ ID NO: 46683 - DNA, 1638 bp, Oryza sativa
gaggcgggcagtccagtaaggcgcggggcgccacattcggcccggactacaccggaaccgaccgagctggtagaacggcagccacctccctccaccggccaccgagcggcacagtgcgtgccgtccgccctgagccgacaagcgcgcgagagaggggaagagaaaaacatgagatagatacagtatatatatgccaggtgggccccaaaataaaatgctgactgaattgccacgtgtacgccacatagaccaaaaccaccccggattgggttgaggggggtaatttgtctggtttgcatagttggggttgaagaatatctggatttgtagtttagggagtaattcagacaaccgcgatagttcaggggggtaattcgtactttttccttatttgtataactgtgtatccaaatttatagccaaacgttattatatttaggacgaatgtagtagtttttagcataaaacttttatactactacttttagcctccaaaagccaaaactgaaaatagaaagcgacgaaaaagcctccatgtcaatctaaaattaggttctgaaatgcaaaggccgcaattcaaataagccaacatagattacctgcatatgccagattgttaggaattgcgcaccgacattaaaattgttattcttatgttaggggggccacaattgtctgcttgaaattgtaagaataccaaagataaaaatttgagattatgtttaagctcaaattacacaagcaggtaagccagtctgtaaaatcaaagatataacaactagtatatccgaaaggactggtacttgatcaactttccctatcaagcccactttttagtcccaatgcacataaaacacatatacccaagagaagagagtgaatgacacaaaaaattcctcccaacagggatctttctttccttactaacctgatctggcattatcaaatctcattacttgcaagcaactcacccagcaaacagtgacaactgacaactcgttgatccattccagttctgaaaccggagagaattgtaccaacagggatctttcttttctcactttcaggcttcaaccaccagccgctaattgcaatggattctttgttctgccatccccccacaaagccctactttatggaaaagaaatgagggaacaagtgcctatcttgcataggatatgtatttaattgcaggattaatattaatcaattagtaggtgagaacatgaggtgatagatgtaagtagatagatggtgtgtgtctgtgtagagatagggtggcttaattagaaaaggccaggtaggggatggttgttggtttgtcactttgttcagtgccacagctaagaccccacattattttgcactctctctgattggatggattaagtggttgggatcataaatggattgtgccactaatagtatcaaggggattaattctagcaagttgattagtatatgccatcagaaggtgattgtgtgctttctgtattcttgttcaagtatgttatggttttctgtttcttgtccaagccaagatctggtgattgtgtgctccctttttttcctcttcttgatcagatgacacatcatttgtgtatgttaaagaggaaaaatcatttatgtgtgatctgg

SEQ ID NO: 46684 - DNA, 6744 bp, Oryza sativa
aaattatgtttgatgttaatgggtgttgcctgcacaaactagaaactcctcccatcttaaaatctatcaattttagcattcggcacaagtattaaaaaaagatgttaaaatcaacttattacatttactaggttgctatattttggataaaaattaattgaagaagttgttatattttagaactgatggggcagttaattgtttggtttcctttttagctaccatgcatacgagacttttatagaattattggtggacagaatattctttgtcatggggatggctgggaggaatatgttccaaggagcttggttaatcatcacatactcttaaagcctaaggccctgtttagttttcatgcgaaaacttttatactgtcacatcaaatgtttgacacatgcacggagtattaaatgtagaaaaaaaaaccaattatacatattgcgtgtaaattgtgagacaaatcttttaagcctaattgcgtcatgatttgacaatgtggcgctatagtaaatatttcctaatgatggattaattaagcttaataaattcgtctcgcagtttacgtgtgaaatctgtaatttgttttgttattagactatgtttaatacttcaaatgtatgtccatatatccgatgtgacacgccaaggctaaatttttttttgccaactaaacagggccttaattctggagcaaacacaaaaccttagtctggctgccccagaacccaggaatctgcatacggcaatggcgagagtgatgtgagcttccgctattacgaatcaacattgacttctactccaacattgctttcggacccgtttggtagagctccaactttaaaatttaactccagaatttggatttggggtgatgttgtgaaatagcctaacatagctccacctctttagtttattttgggagagcgctttatccggctatactcttattttagggggagctgaaaatgtttgactgagctccagctccaatagaagtggagctataggagctggagagtcaaacatgcccttcctctagctacacaagtgaagtacgtatgatagtaagggtccatttgttttgaagggaaattatagaaattttataggattctaatcctataaaactttttcctacatgaccctttgaaacaaaggattgaaaactattaaatactgtaaaatttctaagaaatgtctcaatccatacgagttttggagaattttaacatgaggtccaaactcatggaaagtttattataagcctatctctcttatctaattcctacgattttccgatggttcaattaaatgatcattcatatatttttttctacgttttacaatcctctaatttttatagaattcctatcaaaaaaaattatgtttttcatattcctcccttttctcaatccttcgattcagaggccctgaaagtttatacattgtagatatactccctccgtaaaaaaaatacttggctgctgcaatacggcaaggggattaaggctgtctttagatctaaagttttttttttcaaacttccaacttttccatcacatcaaaactttcctacacacaaacttccaattttgacgtcaactaaacacagcctaattacttggcttgttttggctcaggagttgtaccagcaacatgtactactagtgtactatattactggaagctagtacgactatcttgtagttgtagctacagtgagcttatgctacacgtgacagttccctttcgagctaagcattaacttgatgaacattagttaacttcttcataaagttaattaatatttgtctccaagaaacctaaaccccacaaattaaatctccacaaagatagtaaagtgcagaatacctactacggagtacccggtcaaaaaaaaaacctactacggagtatctagtagcacgccatcctttaatataaacaattgcagcaattacattaaactctataaacctagtaatgccagccaaatatttaatacaacttcaaacaacataccatcggatctagtaatgcccccatttaaattacttatcattttagtttggcctaaccattaatttttcgaaatcagtacaatttaattacaaataaattagagtaaatttcataaactacatatactttacacgatttatcacaaaactacatatttaagaatttatttcacaaaaccacagatttagtgtcttcgtttattacaaaactacatgtacttggcataatatatcacaaaactacatatttaagaacttgtttcacaaaactacagatttaatatctccatcatcacaaaactactacaggttttagcaatgaagacactatatgtgtagttctgtgataaataaatacactgaatctatagttctgtgaaacaagttcttaaatctatagtattatgatagattgtacaaagtacatctagttttgtgataaacggagacactaaatctgtagttttgtgaaataaactcttaaacttgtagtttcgtgataaattgtgcaaaatacctatagttttgtaaaatttactcttatataatagaaatatatttcttatgataaatataaattataaatctaaaacaaactgtacgaatatatagagattaatggtcaaatatagaaatatccatgcagccacgccaagtcccaaattcttgtcttagagtgtgtttggcaccccttgctcccaacataaatagtgtgtacggaaaatagagcgatccattagcgcatgattaattaagtattagctatttttttaaaaaatagattaatttgattttttaagcaacttttgtatagaaactttttaaaaaacataccatttagcagtttgaaaagcgtgcgcgcggaaaatgaacgaaaggggttgggaactaggggtgccaaacatggtttacattaccgtccgtataccggccttaccgcaggggtagggtaatagaaaaaccgctgtaacctccttaaattcaaataaatttaaaaaataatttaaatttttgataaattttacacgaaacagctttaactgccgaacacacccttaatccacgtcgccaaccttaatgttcgtagttgccgtgaagagaggtttgtcagatcagtgtcgtcccatgtcattttcatgcccgcccatgtcttatctgccaatctccattcacgccacaaccaccttattcatggtgctgttgcgaattcccttcctcgtaaagttaataaatatctagctccaagaaacaatattaataacttttagttaaacgccccaaacctcccctaaaataaaaaagtccgaatttcccctaaactattatggcagtataaattatccctcttaatttaaaaaccagaaatttttcatcttcaacttttcatatcgaacgaattatcccctgacccactctggaacggttttagttctacatgatacacatgtgacattctagttagcatataaaataaaaaatgctaagactcaattgtcagttctacctcttctctcgtcactacatatgggccctaccttatatttttatgctacctgaacggccacgtgtacgtgggccaaaatcgctcaggagaccagtagcgaaatatttcaaccttataaaaagttaagggtgaagaatgtctggtttttaattgatcgagtaattcttgttgctacaacagtctataatagtttaggggtaattcgaactttttactttttttactgaggaccaccccatatcaatttttcaatttctctcttctcttccggtttcccactgcacccaagccgccatgttcttccacaattaagttggtggcgaccgaggtcattgagctgcatgataacaacacgctcgacgctgctgcacaggccatcacggctagcccaaaagggtcgtgctggtgcctacaggcgacactccacgatctgtcccgtgacatttgttgccgctgctggcactagtgatcaagccatgatcaccatggtcgacgaggagaagagagatggagaaggggtgatccaaaataataaaaaaaaagagtaaagatatctagctttatatgaaaataggtaactatatgaacgtttggtagatacatataccagccaaatattcgatgcataattcagacaaattaaaatatcatccagtgtaagtaggtagccatttttttataatcaagcttaataccgactaatcgtgaggacgcaattacaaaaccggatacgtcaacgtacctagaagcacgtaacgatgacaagtttttctgtgtgactctccataccatttttattactactatctaagaaaaattgcggctttcgcttttagacgggtcaccaacgagaacgacgagaccgcggttgtacgtactctccccacgtgtacagcccaaaaatcggtgacacgtagcagtagcaaaacccacgttttgttgggctacctggaaaggttttagacgcatgcggctgacgactgacgacgatgggatggagatggacggtgatggatgctctctttgttactacttcttttggtaaaaaaaaataataaaactactggctatactcagatacataaatagaagttatgttttctttaagacgaagaaagtagtattttggacaacacacggcacgcacggacggtccatactagtctcgtactcttgaccaagcagatgtgttggatgctgtaatgcccccgtgcttttcttactataattccacttctgttaacatgttttttaaaccgcactagaactttctacgtagaaattactttaaaatattaattaaatctatttttaaaattgataatatttaaaacttgattattattatacgttgataattacttttttataatattttaaaatttataatatttttacacgttgataattttttccttaactctcattttttttaatcagtcgcgaacagggcaccgagaggcagaatagtagatcgatcgtacgatctatcatatatcgatcaggccatatgcacgcttgcccagctagggacgtgtgaccggtagtgggctccggcctccgcggtcttgggctgtgtccactgtccaccgcttcgccatggatccggatcggccggctgcttgtgccgcgcgcatcgtctcgccggggagctgaccaccggctctggggactgggaagggcagatcaacgagaagtgaacagcgtgaagagaaaaactgttttcgtcaacaaaagatgcattttggagggtccaatagcttttagatactgtggtggtacctgccaaaaacgataatattattgcggtatgacaaaatataaaacaatctgggaatctttccaagtgaaaagagaatctcaaaacatcatcttattgatccacataaaataaaaattctagaccatcagatagagaaaaggagggtgaaagcggccgttggattggattagtaaaaaaaccaatgaaacgctatctagagctttctagccttctttcttgcagggggagagagacagtgcacatcaggcaacgattatggctggatgggctggcttggccgatcataaataaatataataattcaagcccaaagatcgaaaacatagctctaagagcaagtttaatagttgctcttaatatatggtaaaaacataagatcgaaaacatagcccactattaactccaattcatctatagccaatctaatagtcaattcatataatagttgtttactatactattagtaaccatcatgatgcttaaaggtaaaatctccaatgacaatacaatatcaataagacgcatgcatgctcgacgaaacatttgatagtgcaattaatgggtgttttttctaacattattggtgagtaaacatggcaatccattttactacttcaaatcggacaacaatatttcaaaccaataaaagaaaaaaaaacatcttaccttactattatgatgctatgctcaaacgtagacctataatatttagcaacgaagggagtaataaaattagtatttattttcatgataacatttatttattacatacaagatagatatatttgtattgtatgtatagatttttggtcaaataagttttccgaacacctattaagtacataaaaataatatgagaatggtagggtcatacaaaaatgcaaacgatgatcggtggcaatgaggcggctaaactgctaaagcaaaagctaaaaagatgattagggagggagaaatggcagcatagaagacaaatacaaaacccaaccctgtccgctacaacaattctaaaactctattctgcatataaattctttaaaaaacatacaaataaacccacttctcatatttataaaccacggatccactgtcgccgataagtatagctatagactaagtataatttatcagtacaaacaacgtgtaaatgtaaacacgtttagtacataaagaggttaaagtcgtgcgaacgtatgactgtatacgctagttaatcatgaaagtgggataatgtaaccgcaattcggttggaaaatgctataataatcagtataaatttatataaatttctagagcaacataaagaaaataataccattcgtgtttgtagaataatctgagtcaacgcacatgtgacatcgtgaaaatttttataccaacaaaaagggtcaaaaagggttggcagattccgatacatattctagtattttaga

SEQ ID NO: 46685 - DNA, 1062 bp, Oryza sativa
  unsure (1)..(1062): unsure at all n locations
aagcaccgattcctctggttaagccccaactaactctctccctccaggacattttttttctttaagctagcttatggaagtggctaagactgcaactatggcaattaatatcctaagttgatcacttaattaagccatccattcctacacggatataccaacattgttctaagcccatggctgttgaacaatacacatgaccctcctcccttactaatccttttaattgaaaagctccttattggcttcccacctaagcaatattgtcatcaaacatttagacataaaggtaaggacattcataaatgattttattttccatgtaagctattgtagtctcctgattcgttcatgtcgatgttcaaaaggaattctacttttgtaaacaactcacatgttgagaataaagaataaatccatcacataaatttagaatacaatcaaaattaccatctctccattttaaaaagtgtccctaataataccaagtttaggagaatgaaaatgccatgagaagaacaataccttttttgtataaaaaaattatggatggtcattttaaaatatatccctaataaaaccaagtttgggcatttgggcttggatgcttgattacaatttagtactagtgtactacataaatgtcttatctcctccacatgatgagtgtctaataactaaagcaacccctccaaaatcctcctaatcccttctcttaagacacaacccctcttcccttcttccttcatgccctctttgctctctctctctctctctctctctctctcccccttcccttctttcccacgcgtgccctcccctccttgccgttatctctccgttacaccacccgcctcacgccgtcacgttaacttccgccacaaaaaagaaaagaaaggcacacgcgctgtgcatgtccaccgccgcgaccccgcccnggctgccgtggtcgcggtaggcgccacgccgttccgggccgccccgaggctgccgtggtggacgctgcacgaaatcttgtgcttatcgatgggagccgcttgttggagggcccagggggcggcg

SEQ ID NO: 46686 - DNA, 716 bp, Oryza sativa
  unsure (1)..(716): unsure at all n locations
aaggaattgactgcnattctactggtaccaacacccctataaataaaatcggtacattacatcctccaactttaacaaccggtacaaatcaatatttttagtagtttgcaaagtggtttttactgacatgataggttgatcgtgcttagactcactaagtcagcatgggctactgtaggacccatgtgtcaacgcccactcttcttgtcccctctctttctttctccaaaccaagccaacaagcccctccgagcacgtccacttgtgagtccgtccaacatctagctccgagaggctatgatgcaacaggaggttgatgatcgaggacggagatcacaacggcatgggagctcaacaacgcgctcattgcaccatccccaagtcggcgctctctccctcatctcctgcgctacgcacacaaggagctcgaagctcctagcgaccacctcccaacggtcggacaaggggctttgggaggaggtcaacagaccgaggacgaaggtcatagcggcacgggaactcgaggagacgctcgccgcaccatccccaagccgatgctctctcccctatctcctccgccatgtgcgtgaggagcttaaagcttcccgcaaccaccccctagcaactagaccaggggctttgggagggtggtagactggggatagagggtgggtggcacgagagctcaggaggcgctcaactactatcctctttaa

SEQ ID NO: 46687 - DNA, 3441 bp, Oryza sativa
  unsure (1)..(3441): unsure at all n locations
gatgggccttgattgtcannttganaaccaccttgtacccccaattaagaagcctgaaaaacgtgtcattgaattattaaggaaaaagtcaatatataaccttaaactttacacagaattttatttagcacctaacttcaaaaccggatcgaacattcaacctgatgtaaaaccattcatattatctctaaagtagttttggatagttgttttacatatttcgaagcttcaacaagggttttgaatactccccccgtccttaaaaggaatgtagtaacgtttttgccttaaaaatttgtctatagaagggtgtagttttagagtgattcactacgcttctttaatagtgcttgaccatttcttatcatttgtaaccattgaaccaatagtactcgttcctccttgttttctcccattcttggtttctctccgtattaactccttgttttctcccattcttgttttctctccgtattaataaagggcatagaagtctttttaatctcttggttactatgtatttgattagttaaaactatattatattttttttgggctgagggagtaactaatataacataaaattgtcaacttccgtcctcaatttatacaatatagtaatgccaagtatgtgtttgcactcatttgtgggtgagagaaaaagaggtaaagatgaaatatttaagtagagattttaacatgtaccccaatgtgtatatcacatagtcaagtccattcaatatgtatgcaaatttgataaaaacaaaaatcatcttactataagtgtaaagtttggaggttgaatcttgggttttaaagtttagggcccctttaaaacataggaattttggagcatttcaatcctatagaaaaaattcctatgaatgcatttgaatcaaaggattgaattatatccattcatttgaaattcctatagaatggacaatcctatagagattttggaggaaacttagggccctttgaatcgcaggattgagaaaacgtgggaataggacaaacacggtattttgatataaatgtaagtgtaaaattgttgatatttctgaacgatgttaccaggaatataatcccccgcaatggtgccagaaatattagacgatattcttatggtttacaaatataaattcgcaagtgcacggatataccgttgtaatataaattcgcaagtgcacggatataccgttgtattattttacccgaaagtatttccagggtatcgtatttacttaatcccaaggaaagttatggtcagagagtactatgctataaattcatatcacacttatgcaaatcaaagtctaatgcagggtttaatcaagtcaaggtaaggataggttgacacatagaaggaacagtttagaatactcttactaattaataagtctaggcttagtgaagaagaaataagaaaagcatcgtttctatacttctagtatatcgtcattttagtatacgcttgctaatatacaactatgtggctaatacctcctaactatacccttctggtatatcgaaaaaccacccctaattgttgagttctttatgacaatccgtcatggctatccaaccagttatagatacggaggagtaactgcaccgggaacctttattagacctatatacgtacgtggaggaatacccgtattgagctgtcaccatcagcgtcctacctctacagatctgtggtgactagcaccacttaatgatatctaataatctaggcattgtgcttacattactaaatattactctatgtgtcgacgtttgatgtcgcgatttcggtatttgcatagtatggggatcgttggtactaggatatatgcgagattgtagtaaaagagatggagatgaggatttttatataggttcgggcccctgaattatcaggtaataaccctacatcctgttggccgaagccggccgttacttttattcatcataatcacaccagtacaatatttggggtagcctatctaactgttgtcgacatggcggtctgaaagtctgactcgtagtcgacaatagggtagccttttgttagtgatatgccctagaggcaatcatagagatgattgtatcacacactatgtttacatatttatccgactttgttccttgaaatagataaactcattattggttaatgaatatgtgattctttcatgagactctttatgttgtgtgttgctatttctaaaggatccctgatcaaatatcatatgtggaacaaatatgtttagatgatcagcacatgtattaattgatgatcatgtctcatggatcatggtatagagataccaaattaataatgtggacacatgttagtgaacatgttgttggatagacccaatatgagacactgcaagagccgtatgtgttgtatcatcagtgatctcatttagtgttggtgttgaatccttagacctgagattatcatggttcccaacatgtgtagtagcttacttagggactgctaaacgctactccgtaattgggtagttataaaagtagttttcaggtatgctatgaaacatgtagtgggatatgaatagtcaagatgggatttgcccctcctatggagagatatctctgggcccctcgatgttgtagattatagaagtgcatggccatgccaaaggtgattgaggagtcaatcacaagttatataatctatcaacaggttcgagtgaatgattgagctattagaggatgacacatatctagccttgagcttaatcgatatcgtgaggcaaaggggttcatacaagtatacactagaggttcagccgatatgatctttatgtatgcccggtgggtcaatacgttctgctaggggccgctgttgacgcgtggaacgaaaaggagtttttgggttacagccgagtatatatgaacctatagggtcgcacgcttaatgggtcggaataaggggattggatggagatccaatataagcttaattcggatagggatccgaataggagtcctacgggccttggaggtccgagtgatggatcctatatattcgtgaggggtgtgaccggcggaggcattgcatcacgtgagaaaccctagccgtcacttccctcctcgagcaaaaccctagctgcgcgcgggtgctagcacatctgcgcgtggcgttccgtccctgtacgtgtgggtaccggtagaggcgctgctggtttgcggtgctgatcggtgtgggagtacggcgaggagaacgcacgaggaggagaaggtcgagccggtgcgatcgactacttcctctacatcgacgcgcgctacttcacgagagttccttcgacttctcagcgtcttcttccgctgcgcagcgcgtcgagtggtaacgatctatgatctaatacttgcatggttcctggtttacgcgatagaaaattttgatttatgctatcgtagcct

SEQ ID NO: 46688 - DNA, 686 bp, Oryza sativa
aaaaatggttgacatataggtccaaactcatatgttaatatttgctactacatcgacagtaccatagacaatccccactaatttttgttaccttgcgctgttgcacacgccacccctcctcctctccattaaatacttcagatacacgcaacacacacaggaaggcacaccggatattcttcctccaaagaaccctatactggtggccttccctgggggggagcacaacaacagcatattgatcccggaattgattacgtcctggattctgtatgctcatcatcctactactgagcatgtataatagcacactataagcaagctataaatatattttaaatagaaaaaagaatagagaagaacagcgggctaaagatatatagccagctatagcacgaacttcaagatgtaatatgtgtatgacaggtgggaccagatattaatagtatagtaagcaactattgtatgaattaactattacattgactatagatgatttggagctagtagttggcgaaaattctgagcagcggttaagccctggcaacgaacggttttttcttttttttcctttcctcctttaaaaaggtataccccttaaaggtacaccttcttaaggtatatatcttgagtttggaaaaacgatggttttaaagaaaaggttttattcccccgtttaaattcaa

SEQ ID NO: 46689 - DNA, 1255 bp, Oryza sativa
  unsure (1)..(1255): unsure at all n locations
gcatgatctgaatgaggcggttantttggttgggtgctgcaagttgcnggatggcataagaaaaanaggaacgccnaatttggcacttttcctctgcanaatagagaatgcaataattntgtatggtgggatggagtatctgctgaaggacgttttttttctcctaaccgctattttctcgatggatgtttggatggcatatctgttgaggatgctcttactctgctccatctcttctatcttcagccggctctgttttgagaacctttggaagttatagctatttcaaaaatctctagcttcatgaaacaatctatgttcttatttcaaaatgtaataggtttagtgaatttttttaggggtgaataactaatacggtccttgatatttcatttcgggctcagtttagtccttgagatttcaaatcgtccaaacaaatcccccaaattaattattgggataaatatagtcctttgacccacaaaaaatgccacgtgagcacgttaagtcatcttcgcatcaagcagaatgaatgaaatgaccattttacccttatataccatatagaaaagaaagaaaagatacaaacagaaaaagtaacatgccagcccaggcccagcattgttgcagatgggtggccgacaaatgaatttacatgatcagtcctaagtgacagttccaaaacgatcatacacgtgtgaaacatttaccttcttacttttctttcttttctatatggtatataagggtagaatggtcatttcattcatgccactacatgagagaatgacttagcatgctcacgtggcattttttgtgggtccaaggactatattaacccaaatgattaatttggtggacttgtttggacgatttanaaacataaggacttccccccccccccncnnnnnnntnnnnnnnnnnnnnncnnccnncccnnccccccnncccccccccccnnccnnccccccccccccncccccccccncnnnccnncnccccccccnnnnaaggaaaaccgtcaaaaaaaaccttacaaatacacgttaattgggggaaattcgctaagggccacaccaggaattaaacaggatgcatgcgggggcacaactgaagttaagacacaagttaacattgttaaccttaaaagagcagctttgtcttctttagaacaaacccccgactttatgacccaaacgaccaagaaaaccgttggccaggtcttttataccaaaacctccaagagggaagaaga

SEQ ID NO: 46690 - DNA, 931 bp, Oryza sativa
  unsure (1)..(931): unsure at all n locations
ttggaaagggagggtatggaagggtattgatttatanctaaagaaggctagagttcgtaanntatgctatttaaggatgtaactctantcatnnnccccacccccccactggttganatgnattacnttgttgaanccccnctnnanangagcaacactagcaacaaatctggaaacaaagcagcaaaaggagagagctcgatcgagaaaagatgatgtaaaatgaagtgaaatccgattacctcctttctcggttcttctctggaaaaagaaatcacgaggaaaaaaaaagcaacatgaatggatgaacctaccaaacgaaccatctctaccagaacgaacacgaaccagaaacaagaaagacaccaggcaaatcattcaaaccctcaccccaaaatttcaatatgaggacgcacagactaaatttgagcactggaagctcaaacaancgcggcaanacaagacgacaacgcaaagaggacacgccgaacaancngngcgacgggaaccggaaagaancccacctttntcgcgtcctatgaacagcgtaaacacagattcgtcgctcaaaagctaggttttgttgcaaattatttcccgagtttaccgccgaaaagtgctaagagttcgaattcatcgaggaggaggaggaagaggggcgagaactctgcttttatcgccaaaagatattgcaattttagcagcaaaaaaaggaaagaaaggtaaagggcagctcaccggatatcggcaaggcgatcacccgttcgaggcggcgcctgtgccgccgcagcgacggcggtcggcggaccccggcggcgccctccgcggtgtactccctcctccttcgacgtgggagaacaacgactttttccgagggcgggctggcacttgtagaacaccagttttctaggttcgggttcccgactaacct

SEQ ID NO: 46691 - DNA, 833 bp, Oryza sativa
  unsure (1)..(833): unsure at all n locations
cactgcgattggaatgcanatacngcactgnacccaaccaaaacccccgcgcatgcaaccccctctgctctgtcgtaaccaaaaatttccctctcccctgcgaactcccaccacccaaatttaacttcctcaaccttccgcccgtcgcgccagctggcccgttactgacagggtgggccccacgccccggcgcggtgggtcccacgcgtcaactaccgtgggtagggtgggctcgggtgcgcccccccccccacccagtcccgtgctccgcggtggcggtcaccgggtgcggggggtgggccgcgtatataggcgggccgccgcgccgcgcgctgctggctaggtgtaggagcttcagctttggcccacatcgcccccctctcgccctcttccgtagctttcgtctcaccgcccccaccgcctcgcctgggggaggggaggggaggggagcccttcgccggccctggcaggttccgtaagcatttttagcatgagtatgtggtgggccgcgaatttgtttgacgttggtctgcctttggggccctgttttaaattccttttggtgccgcttttgaagtccctcttctaggtttttgtagggaaggtgtttgtagcagctttccttcccggccccaaaattgttttgcctactttcggtaaaaattttagaggagctttgtcaccactatttatattttttattccccccccatctatccacaaatattttttgagggttcggccctccattccagctggtgtttctttctctagtaccgcacgaacccaggggtgatgagtggatccctctcttcatattatttcagtatagg

SEQ ID NO: 46692 - DNA, 1270 bp, Oryza sativa
  unsure (1)..(1270): unsure at all n locations
gcgcggattgaaatccagtcttgtatcccatccatacgcacacaataccttcatcgtatgccatatggaatctggactaaccatgtgcattgatctttagcctaagtatcccacataatatctgaccgtccggacgtctccttatctccaagttgactcccaatccgctatactatctcgaggcgtcaagatcacctacacatgaatcaaacaagaaaccatatctcgagcacaagctatctccaacttgactcattgttagcaaacaacagtattacgtacacatagtatccatctagaagtcataaacacaaattatccacaaatatccaatgaaataacccgaaactaaaaccgacacatagtcgaatggtcagaccgcgggcttggtggtctgaccacacgtatacctctggtgtgaccggcaaaccttgaccggtctaaacggtccaattatccagtagtccctgtttatcatctgcaaatccaatcatctctaaacccacttcgncaataatctcttaatacccaaaccaataatctcatatgccaattattcatcatagaataacattcaaacacactttgatttaacaaagtatataanaagttttttcacaaaaatacttttcgtttgcaaatatgatgtttcgcttattccgcgaataggcaaaacgaagaaagtgttatcatttgagtattttcaagtcctcgcaagataccttttagcataaaggaactgcaagtacgttaggatggaccttgtgctacgtactttcagctcttcaagtaacttttgggctatgaacatgaaaaggcttgtcgactagaacatgttgtaaacatttgttaattaacaacctcatttagttagtttgtttgcaatatgttatttctcgaagtattagagaagtatacctatcagcatatgttcgaatcacacgacagtgaaacttgactagagaggagtgtaaagttcacttgtagggctagtttgtttctttctctagtcccgtagctgaagccttgtggacatggtgagcaataccttcgtaagtgtagacaatactgaacatcacaaccagctcccacttagatctctctgagcctacgccaaccaaaatttcagataattaatgagcagccaaatggaatcttggtgagcagcgatctacccaaacggcaaagcctgatatcgacgtgccttatcatctatttctgcaaagaaagggtcacaatgtagttgcatcctacttgcaatgctaatctg

SEQ ID NO: 46693 - DNA, 511 bp, Oryza sativa
gtgttattgatattcttactcggtacccatttatgatgaatcattgatcttaaaatgctctattctaaggtgagtcatagcgtacatctgaaaaagagtgtggccatggtatgcaaatcaacgtgtgtttgattattattctatgataaacaattggcatatgagattattggtttagatatttggagattattggcgatgtggttttagagatgattggattttacaagtgatgaacagggactgctggttatttggaccggtcagaccgggcaggtgctgccggtcaatccggagctatgtgagcggtcagactggctagcccacggtctgaccggccgactctgtgtcggtttaggtttcgggttgatttgttcgatacccgtggataattcgtgtttatgacttcgagatgaatactatgcgtatgtaatactgttgtttgctaacaatgagacaagttagtgagaacttatgctcggatatggtttcttggttgatgcttgtgtag

SEQ ID NO: 46694 - DNA, 953 bp, Oryza sativa
  unsure (1)..(953): unsure at all n locations
tgacattgttttagtgctagaaaaggattttcttttatttttaaccttatttttaatttaaaaaaatgaaccctttcaaaacttatttctaaaatttgaaacttttcgtcacaccaatcgacatggcgtgtgaaaataatactgacactccacctgaccatctgagatggatgtgtatcaaggataggggtggatatcgagctgggtcggctcggctcgttatcctaacgagctaaagtgttggctcggctcggctcgtgtgtcagctcgagctagctcgtttagctcgtgagacagaagaaggaaaagagtagcggcatatgccatgggatggggatgaagacaagggctaccgctcacaaacacacagattgtgaaagaaaatgaatatgatgatacataacgagcttgcactgatcgatcactacaaagcaaatgtaattgcgtggccggattaaaccagtactgcaacataaatcaggggcattccagaactaaaaatgcaaatgaggaatcaataaagacaaaaaatgctataagacatcaaaagattacggtctttgctgtgagacatacaaagatcgttaatcttttcgtggacaccgaaaaaaagtgataactagctgttggacacttctgacattattttattattttcagtttaattgataacgaaataaatttgtttgtaccaattaacttaagaagtgaccttttattatctcctaactgattgcgatgttttcttttgttcagaacacttgcgaacctaataaacatttgccgaccatgcgcaccaggcttaaccagaaaacaaacaaattagccatacaaattttactgtacattcctctccagatcagtttctatttatctgtaaattggtcatggtgagttctagctagttattgtcttattgagggtcttctctgaccttatgtgnaagttacatg

SEQ ID NO: 46695 - DNA, 540 bp, Oryza sativa
attgattgctattcgagctcggtaccctaatatttagataacaaaatatgatcaatatggattttgaattttatatttaattataaataacacaacaattaacaaaaaatgagaataaaattgtaacttgagggttatgattatttagatgtctgaattatttttttgatatattgagtgttaattataaaataggataagttagctagaaaataggagaggaggggagattcggagggtggaaagagtatgtacagcttttttttacctcatgtatgtaaggtgttagtagtggggataccagatttattttctttgagatggagatctaatggttaaaattaacgggtccaccaatttaaaagaaaattgacggtgtgattatagaatgtcacgtgacgatgtatgagcgtttatatgagcgtctatatgaagtttaattgtcttttagtatatataagtccattgaacttcccacgaacgcttttaaaccggcacgtggcgctcgtataaatgcttgtaggtcactacatgtcatat

SEQ ID NO: 46696 - DNA, 629 bp, Oryza sativa
tgcaagtggatttagaattcgagctcggtaccccattcggtggtctatccgacctactatggtaggtctaaccaaagcctggccggtttgaccgcaggtcctctcgcgatctgaccgtcagcctaaaaacagcacgatagaggttcggtaaaaacacgctttctcttaaaccaaccgttggattgagttgcaaactttacagaataaactagacaaaccaaggaacaactccaccacagggatttgcaaattacaaaacggtttaagagaaaacaccatcgattagggctggacgaaaagctcgtgtctcattgactcactcagctcttatctagcttggctcatttggatttattaacaacccaagccagggttttagctcgtttgttataacgagccagatcaagctggcccgtgagctgttcgcgagccaaacgagccaagcacaacagctcaagtacctagttggccagcagcaatatgaagcgaccaagctggcccatcaagaaaaagcccatgaaggaaagaaaaatactaaccctagatggagagacacgtacatgacctgtctctcgcactttgaattcccgatcccctttctactctagcatcgctcgctctccacttct

SEQ ID NO: 46697 - DNA, 661 bp, Oryza sativa
aacgtggcaatccagccagcatatcaaattaaaagaactcgtggacccagctgtcatccctctcctctccctaagaccagatctgtctctctccctatagctcactcgagcggccgacagccgaggcaaagcttatgcagcccgcgctggacgcagagagcagagagaactcgggtggccagcggtccaggcggggtgagctcaagcggctgacggcatcacgggagggctctctgcgctgggccaagggagcacccacgaggacattggaggcggaggcctccaacaccttgctgacgatgaccggagggcttctgcacactgatgcgcttcacaataactatgtgcgccacattagacattgaccacctgatgtgggagacatcgttttagcgctagaaaaggactgtctgtgaatcctaacctcattcacaatttaaaaaaacgaaccctttcaaaacttctttgtaaaatgggaaacttttagtcacaccaatcgacaaggcgtgggaaaactattctgtccctccacctgaccatctgagatggatgtgtatcaaggatcggggccggtatcgcactgggtccgataaggtcggtaatctaaccagctaacagggttggtaaggcttgctcgcgaaggacctccaggtctcttgtt

SEQ ID NO: 46698 - DNA, 663 bp, Oryza sativa
atgatagcctttgtgccatagtcgatgtagtcaaagcgaaggaaacgtggtcgatgaacccgtgcgtagatctgtcgaggtcgattattttcagccatgcgttgtactcctgggaaagcggataagcagctcgcctgcattgttttcagccatggatctcacgaacaagtaattgatgtggctaggcttcgaaggcatcgggcatccatattgcccgttcacgaccatgagcaccaacatggttgggagctggcaaaactagttagtgagacccagccatggcgagaccaactgccatgcgtcctgatagatacatccatggtaatttcctgatgtgacatgcagcgcatgtctgcgaccggtggtatcgacggctcaggcacatgggcatgtgcagaaacatgagcagccaaccgggtgaccattgttcatcctaataaaacatgcaagagccctccagcatctctgtatttctctctcttctttttgttgcaaaagaattatggctcttaataatggaaatcggatgatccgaactaattaattcaattgtgccgtaatttcacccaaactctagatactctgattacaacaaatgtgcatatagtatatttcacattatttgatgagctctagtcatccatggtctcggatcattcatct

SEQ ID NO: 46699 - DNA, 649 bp, Oryza sativa
  unsure (1)..(649): unsure at all n locations
gaagtgaaagcgcttccggtggggaaaaagacgccgccgccgcaaaaagctcgcaattcaattgcgtggttcgtaaaaaagaaagagaccgcacganacgagtggcggggaatgtatgtgggacgttggattccaatctaatggttaaattttggtaagattttggagtagggaaatcttccgggtgatcgtaaaaatttgaaatgtacttagttcgtctcaaaatataagtatttttaaattttgaaacgattttcgaggtatactttaactaacaatatatataaaagtgagatgttttaaataaaaagagttgcatattatgatagtttgttcaatgataaatctagtagcatcaattttgggatggcataaggagattgagtctcactcttttttgaaatagaattacggaatctagtttgttcaatgataaatctagtaacatcaattttatcaattttatatgattgatttttttatgttttcactagtaatagtcaaagttaaaaaaaatgtttgatttagcactattctaaaaatccttatattatgggacggagatagtatcataatgtataagtcgcaagataaagatagacctataagttaaacatgtcagaatataataatatatttgctatcttta

SEQ ID NO: 46700 - DNA, 501 bp, Oryza sativa
gggcctttgtgacatctactcgtacccatgggtactctactgtcgaaaatgtttcctgggcttcagggcaagtaaaattaaaaagagaaggtaaattctacagaccaggaaagggtgctggtcaatgattcgataatggcaaattctaaattccttttccttgagtttcacatgtatcatctactgattctaaacgagcatgtactggcctgatatctgggacctcttcaataccttcagtgggctgaggggaaaagaactagttagatttcctccagatctccagaagatgataaaagtatgggcagaaattcacctgcagatattctaggaggcaccatagtaggtagttgatgatcataacaagacaaaacagtttgcctgcccaagctccacatctgaggtatctacaccattgtagaaaaatcagatggactgcatccctatatatttgatgccccagtgcataaaaattgtaaacaaaaataggttaatgtttca

SEQ ID NO: 46701 - DNA, 799 bp, Oryza sativa
gtctatggagccagggcccggccggcccgtatagggctccgggcttcccccgtgtttttccctccctttagaaccttacccatgggcttccatccttgccccgttttagattagcccctatttcttatccttccctggaagggtagcccgcgcctttcgcgcgcgcatgcatgtatcataggctatgtttcaacccaatgtaaggccgacgatataaaatggaggatattttcagaatataaatcggaaaagaaacccccacatatacacgggcatcttatttgttgttcaagaaaaagaatgctaaaataaatcatatcttagtatatacattaatacatatatcctgtaagggaatatagattcccctaaataaaaaaaacaaatatatttgccgtaaaatagatggtatagattactaaatgtgatagaatgtttattagatttaagtaaaaatccctttgtcctggtcatatataaactcgtcttttgtcaccactacttactatcattgtttttgaaagttaggtgcacttttaataaaagaaactgtatttgtaccactaaaataaatgatacattatttatacgctaaaaatatcatctacactgcataacccagtgtgcataacttattttcacatctatgtataaattgtctaaaaatatcatatctaccagataatacgataacaccgttaaaaatattcatgaatgattttctaacagatgaagtcgaccgtagcagccaactaaggctttcttacataatgccttgaaacacgggtttcgcatcgat

SEQ ID NO: 46702 - DNA, 790 bp, Oryza sativa
atttatttgtagcaagaaccccttccatatttggggtttaattaaaagaacccatggcccaaaaatttggtattagcgttggccaaacgtgcaagttaatataaaaggcctcacattttaagttgtcatctggtgtaaaatgtcatggtggtattaaccacctagttcgattgaagacgtatttacctaaaatatggcataatgaacaaattcaattcccctgagagcatagtgtataatatattaggtggggctgaaaccacaattgttctgctatttttaggctgaaaggtgactggaaatctagttaattgcaactgctgcaacataagctacatcagtcaacagattagcattgcaagtaggatgcaactacattgtgaccctttctttgcagaaatagatgataaggcacgtcgatatcaggctttgccgtttgggtagatcgctgctcaccaagattccatttggctgctcattaattatctgaaattttggttggcgtaggctcagagagatctaagtgggagctggttgtgatgttcagtattgtctacacttacgaaggtattgctcaccatgtccacaaggcttcagctacgggactagagaaagaaacaaactagccctacaagtgaactttacactcctctctagtcaagtttcactgtcgtgtgattcgaacatatgctgataggtatacttctctaatacttcgagaaataacatattgcaaacaaactaactaaatgaggttgttaattaacaaatgtttacaacatgttctagt

SEQ ID NO: 46703 - DNA, 593 bp, Oryza sativa
  unsure (1)..(593): unsure at all n locations
cgcgtcttggaatcgaatgataaccncctcggnaccctgcacaagaagttctaatcctctaggaaacattcccgtacaagaaactaactttacaaactccaatcgttccaaatttggacttcctccaaattcgactccgcatcccatacgcacacaatacctccatcgtatgccatatggaatctggactaaccatgtgcattgatctttagcctaagtatcccacataatatctgaccgtccggacgtctccttatctccaagttgactcccaatccgctatactatctcgaggcgtcaagatcacctacacatgaatcaaacaagaaaccatatctcgagcacaagctatctccaacttgactcattgttagcaaacaacagtattacgtacacatagtatccatctagaagtcataaacacaaattatccacaaatatccaatgaaataacccgaaactaaaaccgacacatagtcgaatggtcagaccgcgggctggttggtctgaccacacgtatacctctggtgtgaccggcaaaccttgaccggtctaaacggtccaattatccagtagtccctgtttatcatctg

SEQ ID NO: 46704 - DNA, 503 bp, Oryza sativa
  unsure (1)..(503): unsure at all n locations
gtaaagttctctgggcccttcttttccaaccttccgttacacgaaacctgtcccttttttcctttgaaaaaggggggttttttataatacacgtgggatttaaagggggagggggtctcccaaaaggggttgttgcaaaaaccccttttaacccccgcgggctttttgaggaaattttttgggtccaccccggagaaaatatattttcctcggcgccccttttaaaaaaataaaaagggggtggtgggggcccacccatttggggggggcgcctctctcctcaaaaaaaaaattttttttctctcctgcacaacccccccaaaagaaaaggagttgtcttctcacacaaacacgcgcgccgggtttttgtttgagaccaccccccaaaagaaaaaagaaaaataaatttttttttnttcgcgggcgcggaacacaaaaaaacggcgggggggttaaaaaaaaccacacctcctccatacaaaaaaaagttaaatcgtggtgcg

SEQ ID NO: 46705 - DNA, 1349 bp, Oryza sativa
ctgggtggatgacctagaggaaaggaccgctggtctcggtgagcagggggcaatttggtctcatcaagccatattccaacgaaaatggaattgaaaatgacaaaaaatggagaaaataacaaagtggctgtgatcacgcgctccatattggcattttagcgaaacgtgttttcgggatggcattccatcgaaaccatttttggaacgtgaccaaatgcccattttctcatttaaagtgtctctcaaaatacttatcactcatctatcaccttccattcaaatccctctccccccaataaataaataaataaataaatagtggatttactcctccctctttccccaaatatgtgcaactcctaaatggtagcttgcatcgatgtcgattttatgcgacaccaatccattccttgccaaaaatccaatcacccatgggatccaaggccgcctcttgttaaataccacgatgtagaacacttgatttttcgttgtttttgctcgccaaagttgttgtttggccgatgtcatggaaaacaactacatctatctcctctcctctcttttccacgtcaacgattttgttttgctggtaactgagagatagcaaatagaaacctttgtatgtgtccttgtaccctcctaacaatatactatcattagtattatagtttttttttaaaaaaaacttaatatatgctaaagtatttagaatgagtagtatagccggaagaaattttatgacagaaaacctaacttctgttagataataataacttgcccgtcagatttgcctccctatcactattgttcacacaatcacactgaagtaggagtaggacgtgactccggctcgggcgcatgatgggaggaggttaaaatcggtgctaacgtcattatccgatttacgtgtaaaactattttaaattgatttttctcttaaattacttatccaaatcatgatccgattacaccattaaatttgttgcaattaaatcttcaaaataagactacacatggatatattccgatgaaaaaaattagcttattattgaattatttttaaatattgcacgatattccaccaggtatatcggaattgtttcactaagtagatcgaaaatgtttcacttgcttaaatcgggtattgtttcaccttatataaaacaatgtttcagcaaatagctaaagaatgtttcagttcactgcaacatttgatcccatatatagtgaaacattataagtacgctaggtgaaacattttttggtgggacaaaaaatgcaacgaattctctatagaaggagtttccaaaatatgtgagttttttttttgtggcaatagaatattttag

SEQ ID NO: 46706 - DNA, 577 bp, Oryza sativa
catgtaccgtgattgaccccaacacacactacgctacgttttttactagtcggctcggctgctcgttggaacgttcgttgcggacgcacgcgctacgagccaacgagaggaatcgtggcagtaaagcgtcagcgtacgcatccgcgcgcgacgactttgaaggtagacaccgtgcgatcgatcgatcgatcgatacggcaggtggccctgtgcatcgcccgtagccgggcttgtacgtctccctacacatcatgtgcacagcttttaatttttttttgtgtgcgtcatggtgtggtgtgtgtcactgcgtggcgcacgaacgtacgtgtacatgtacgacaacgacccttgacccccgagcaaaaaagcgtgggagacacgcctcgtactcgacgttaaattaccattctactgctagtcatcgcaaattacaagtggtatatagtactacaaacgtatcgttcgtcgactagtattgctgtaaattttagccgggattaatacgtgtttgtgcttggcgtagcatggcggctgatgaatggtatggtgtcggttttagccggggtcgtcgagtcgt

SEQ ID NO: 46707 - DNA, 1106 bp, Oryza sativa
atctatctatcatcactaattcctacatgtgatgtattgctaaaagcatgtattttttttctttttattcttgttttgtgctactgctaacacaattgtccatgaaccacacctgtattttttttccgtcctccgccactgtccatgttcaaaacaatggttcaaaatattgactgaaaacgagcacttctgatttcatggcttcaaacatgcggacaatctcaataatgaactttgtctcaccctctcatgggttggatcataactctttaataaagacacattcacataagatgtttatttctccaacagttttgcatgtgtgatgaggactgatgggtgtatagatcttgtgttctacatcaagagtccccattgctacaatgttctttatagtgttatagtgtgatgatttccttttgatgaggaagaggatttagaatcacaactgattctctcaatctgagaagagacttctaaagggtgtcaccgttatggatatgcacaataggatcaagtattttccggattccatctatatcctctgtgatgttatttagtgttaaagaacaaaatttcttaccttcacccaagtgaagaagcatatcttgcttggcatcaaactaaggttttgtgcttgattggttgtttcttgaagcaaagcatcttttcttcaaacttttagaagtgagatctcttgcaaaatttggtctaattagatagaggatattataaaagctctagaaagttattttgaaatggagcctcaaactatgtttccctacatgagaaaaggtaaagaaatcggtacaataagaaaataaacaagtaaaataatattggggatcaaaatagtgtccatgacactttaaaaaaaaagcgtatacggcgcaaaatgatagacaagagaatctctactattctaaaaattgaagatatttttgccagtactttggtatgtcattcgtgtatgagtcgtttttaagttcattcgcttttgcaaataaaactccgtattcgagtcgggctttaagttcgttcgcttttggaaatgcaaaaggagtcgtataagaaatctttttaaaaaagactcgcatgctaacttg

SEQ ID NO: 46708 - DNA, 600 bp, Oryza sativa
aaatcagaaactgtgccttgtagaatatagaacataattttaataaagctctggtcttagagagataaatgaattgtgcaataccatcgtgttagagaaatatctgagttttagtactgacaggccatcgggctagagaattaccaagtgtgcagtactaagttttacaaggatacagctggtatctgcatttttagtaattaagtagtttagaacgatgcattttcttttttaaaaaaattgtagggtaaggctagctgagttcaatttatgtggaatgaagaacacgtttaatgctgctgctgttgactttgtttttgcattaatgatgataggtatacatagtatctactgcaatgggcaaaaaagtgtctttagcatttgtaagatgcaacaactgatactttcctgttctaactatttcaaaaagctgtgataagctacaaaactctacctggatagaaactttcttgaactgagacacttgttggaatactctacttatcttattaacagcatgtctctttgtttccacattgggctacccgttctcatttgatcgatcatgaggactttctatgtgcttagatgtgttattaa

SEQ ID NO: 46709 - DNA, 688 bp, Oryza sativa
tattaaaagaaggggccatataagaacccaatacgagattaatcgaaattcacaataaaaataaaataaaatcctaaattagaaaataaaaggagagtccaagtggaaatataatttaaaaataactgaaattcgtaattgaaaaataaggaatattgagataggagtccatataagaacccaatacgaattagttaatattcggaataaaaataaaaataaaatctgaaattagaaaaagaaaagaagagttcaagttggaatacaatttaaaatcaactgaaattcggaattaaaaataagcaatattgaaaatataaattaaaaataagcaatattgaaaatatatgaacccaatacgagattaattaaaattcataataaaaaataaaataatatccaaaattagaaaaataaaagagatttcaagtaggaatacaattttgaaacaactggaattcaaaaaataaaaaataaaaatatttaaagaacactatactgtattaattaaattttgaaaaaaaataaattctgaaattaaaaaagaaaaaagaattcaattaggaatacaatttataaataacaaaaattgatgataaaaaataaagactattggaaaaaaaagactatctaaaacacatgacgagataaattaattaacatgcctataaaagagtagagtggtagc

SEQ ID NO: 46710 - DNA, 780 bp, Oryza sativa
agccatctcttagctcgattcaagtctaacctatgacgagttaactggctacaagcttaaaaaacttgcaagctgcaagtcttttttctgcaccagtttttgacagaaagttaactggcacttagctcttggtaggattgcagactcaacaacagcaggagaatagcaaccttgcatatgctttcccatcttagttggctcatcagtcaggtcttaatagctgacaaaacccctcaaacaacacagccgaatctaacgtggcccgggcaaaatgtttaaagaatatactttggatcaacaggattctgaaactgttaactcggttcttcattcatcgtcacaaaggccaccaaaagcctgacaacaaaaaatggatgagatcaacagcatttatataaccaagataaagttacagttcaacaaacatataagacttcgacagacagaagtcctacctgaaccaggaaactgttgggttccattatcataaaatgagtatatattttggactggtaaatggcaaggatattgaccacttgcactcacaaggagaagcatgtacatactgaatgggcaacatctggaagaaattgatcacagtgcagggtaaaaacttgatgactgaaaccatgaaatgtcatatcctgtaaatgtattgtatctgaaactcatcatcttacattaggcttcgaaagaaacacggattgaactaaaattacaacaccaagtgtacaattacaagatgagaaaatacaccccatgaatgcactgttcaatagc

SEQ ID NO: 46711 - DNA, 591 bp, Oryza sativa
caacctaaaaagactcaaattactgataaaaatgagctgtgaactgaaaacataaacagacaaagagctttccaaatgcattctcacctcactaggtaccaatagctgtctagtgcaagatgataacttgacaaaacatgatggtttcaaaacacagttcagccataaacgagtcagcaggcaaatggtatctagtaaaatgtttttacaagctcactgctcaccacaggcacagcaaccatgctaagttgctaacaagtaacacagagctggtttgtcaaaaatccacaggaaataagaagatgccagaagcacttcgatacaacataaagtcactgcacttagcaacatttaaaaccttttgcggtttacctctgcaaggtattttgtaacattgctttgacttccattaacatagtggtcataggaagagtaatctctacatttgcaggtaaaagtcgagacagtaacattacgatttccttgatagtgtaagcatacacaaaaaaaaattactctagcaatgatcgacagccaaaagcccccaaatttcataggtcaaactttaatgcctaccaccagggcactttt

SEQ ID NO: 46712 - DNA, 983 bp, Oryza sativa
cgcgcccgctcgagagaacccggagagaagataagagaaaaaggaaaaaaaaaaaagagaaatgtgggacccacaccatttcctcacttacatgtaggccccacatattaatattaattatttttgctgactaggatgccacgtcagcgaaaccacccatgtatactgcctagggactttgagtgaatggttttttgtggttaatggatccaaaaaaatcttattgttaagttgagggacctccggtgaacttattccttttcgtcaactgttttcatgatttcgatctctcgcttgatttccacccgtctcctacctgctgccgtagattgtatcgcggagataacgttctgtttgtattgaacctttcctttttcaagcgagttattagaaacttcattaaaaacttttaactgtatccgcatgtccttcgcagattgcatctgaaacaaatccatatcagggtccttttttactctatacaggcacaccaaggtccttgtaacttcattttagcagtggtttttactatttcgcttgtctttgtaacattgcaatctgcaaaagcaacctcctgttaagccggatgatcgtcataatgagtattatgcagaggaggaataactgggaactaatttgggtcaagtgggcgtgtgtgcgtgtcttctgagttgtacgcgttcaacaagattaatttggagacaagatatgagaggtgattaaatccatttcactagtgtgcaatgagcaccctcttctctttataaattctgtaacggttgattttaacaataaaataaacttctacggttctacatctgctttcactgcaaacatctagtcatacaaaggaatattttgagccgcaatattaaaaaaatagggataaatataacaaaacacaaaattctgacatgaatataaatgtaaaataaatgattgcaaaatattaaaaaaacacatgaatgaatgtttaattgaac

SEQ ID NO: 46713 - DNA, 639 bp, Oryza sativa
aaaatcccttatattgtgggacggagggagtagtacctaagaccaaatacaaacatattactcataatacaaggttagtataaccgttcgcaactctctcgtcttgcagtatatatgctccctctagtcatatagtagtaatactttagactatgttcggttagtcccgagagaaagattaaaagggatttatttcacacctattatggtgtggaattactccccctcaaacccctccaatccgctttaaccccctccaaaccaaacaagggcttatgttttgaaaataaaataatcaaactttataacttttgtttctaaaatacgaagaccatacgtaaaattagttttgtataaattagttttaagaagtacttcaacatccataaaatcatatatctattggcatttttatttatacctatagtagaaaataaaggcttttgattttttatatttatactgtagtagaaaataaaaaggtacaggtgttctttttaaggccgtttcggtatcaaccggaggagtagcacacaatccaagccaaccgaaaaacgccccacgcagaaacccggccctataaggttattgcaggcttgcagttattacaattgacaagaacgatcactaaatcctggg

SEQ ID NO: 46714 - DNA, 682 bp, Oryza sativa
atgactttcaattctgtgatagatttgaagctatacaatatctttttatagattgtccttaattgattcatggggtgttttgctgacctcaatggaaagacaagtcacaagtgagattttcaaatcaagatttggttagggggcacccctacgaaggattcaagattgaactaccagaagtccctttttttttgccgtcatcactgttgtccttgctttcacttgttagtttttcagatatgtgataccgagatgtttcgcaaaggttcagttggatgtaaagtagcagcacaaaacttcagtgggttatgagatgtcggtatgactgagagactaatactattgttggtttttttgcttggagctgacctggacccttgcttgcaagcaaggccttgaacttattcatcgatggatgcattttaccttgtatacgcagcacggcgacagcggcggggtcagagcacggcaacgacggtggtgtgcaaggtttccagatctgtgtggaaggtatctgcactgcaacgacaggttatagcatttcattttgcaggttagcagctggtgaactgcaatctatcaagatttcacgcctgccttcagttttatctgttagctaatgacagctagtgcacctttgtgttttttctgctctgtgtattctgctggtttgtgaatagat

SEQ ID NO: 46715 - DNA, 1021 bp, Oryza sativa
atttggggtcgtcgtgcgccgtctccatccaccttgtgctaccgtgcttgccctcagccaccgtgcgcccccgtgttccccattagccgccatgcgccgccgtgctcgccctcagccgttgtgccccgggatgggaaggaggggagcgacagtgaaaggggaagcccatgcgccggctatttccagccggtgcgtcgttaccgccggccgcttcctcctccaccgtgcgccgtctgctgcttcgcctcctcgctcccgcgagctggaggtcggggaagacggggtgaagcggtacgggagagagggatggggggtagggcgatggcatttgcgggtaatttcatcgaaaatatatgggcaattctataacgcggttggagttggagttcaggagcgaccaaaatgccgctccaacccgccagttcaatttctcagagcgattccatgcgctccgctccagctttgaacatatttggaccgtttggttggactccagctccaggtaagttgaatctgggagctgagccctgccaaacaggccctaaatgcccttcgaaatgtagaagggttgatagttgattgatcgactagaagatcgataaaatatgaaagctttcacatgcctttctaataaaatatagaagtgtgttgcacatttcaaggttttcaatttacactgacatttttcgaaaatattgtttatgttttatgctaatataagtatcttttgttgatgttcttttatgtaaaccatctttcacgtgctatgcaatacacaattatttttcatatgcatctatctttggttcctacatatattgtataaaaaggctatgtaaaaactttcgcattttttggaacttatagtgggtttataaattgtcaacccttctatgatttgaaggatatttgaagtttttttttaagtattcacccccaatgcatattgtaaaaaaaactgacagagtcatggtatataatagagagaggcaaaatcgatgacaaatcattgaattagagt

SEQ ID NO: 46716 - DNA, 1416 bp, Oryza sativa
ggcgttcgccgccgaggccccggttcctgcgcccaccaagcgccgcttccgggggcgtcgcgccggccatcggcgcggcgctcggcgccaccgtggtctcgttcttcgcctactaccctgagtgagcccaacccgaggaggaaaaaaggaagaggaggagatggatgcatggccatggctactaaaccgatccaaacacgcgcgataatgtgggtgctttgatttgtgccaactttgatgcctcgtcttctttcttctctttttataatgggttgtatttttgatgcaccggtttgatttcggtgctttgatttctcatatttcgtccaccctatttgaagggaatggatattgtactattattcaccatttgtttggattaaattaagatattggaattactggctacgcattttcgtttgatttcaccatcattcggttacacacgttctgacgttcatcttctaggagacgcgcatcaatcatgactggcatgttaatttggcaatggcattgccgtattggcattcgtattattgcctgtatctgaataaaatcgagttcatttcgtacttcagtaattggattactgaaaggtatatataactgctaaatttcttttcagtttttccataacgcagtagattaattattgccataacactcagaaacaaacaattaagcaggaccaaatggaacagcctggaagggaatgattttcagaaggccagtgacatcaaattgcgctgtaatcatgccaatataaatcattctagttccttcgaacagaatgtaattttagtccgctttgcagttggcaaaagacttacaaattccgttaaaacatacataagggatatgtggtggcttaatatcacccgagacaactaaattccacaagtatgttcctcctctttttttttttttttgtcgaactgacagatcaaaataggccccagttcattagatcaagaaaatcacaaaaatcttactaagcattattgctagctctcctgaaacaatgcctaagtaaataaaactctgaacaaaagttgtaaagggggcacacgatctgcacaagtacagaactgagcggccaaaaataagcattggcaattcagattcaactactccagcagcggaaaggaaataaaacacaggatactctgttgccaaagacaaggagaaacatctcactacaacattgacatcagaccatcagtccactttgccattggcttatttgcacgcaccagaaagaatgaaactaatcggaaaaaaaaaaggttccgacaaagtctctgcgatgctgtatcccttagtggccaaaaaaaaaacttgctttcgagtcatgttacttagtgagagtgtagagcatgtgattcagaatgaccaccacaattgattcataagtca

SEQ ID NO: 46717 - DNA, 1393 bp, Oryza sativa
tgccaaggtcacccatcccccagcatgtagctggtaccttggccttgcaaggtcaagaacattataaccaattacataaggattttcccacccttgtgcaagaggaaaatgataatggtggcataggcttgatctcagcccaaggaggatacctaaactaaagatgatgtactacatggaatgctaacagtctgacataaccaaagatgaaacgagacctgaaagtttaggaactgggaagctgaaggtgatcaatgtgtatcctcctttcagccaaaatgccaatttatagtaatagaaaggcaccaataatggcaatggttatctacttgttcagaaagagctattttaactaggccaactgttaagagcttaccaattagcagataatattgccggtgaatctttgtcacatccaaaaggaaagtgacactttgtcacatccaaaaggaaagtgacaggctattccactgcaccctacagaattctatttatcagaggaaggctaccctagctgatagaggatgtctgacgcatattctgtatacagcattaccagtttgccacttagaccaaacctacaagttaagcacagtgcagcgtactgtatatatttattaataatgataaactccatgccttcatcagttttgctctacagaaatgatcagtatatatgatgccttcccatcaatagaactactactccagattatttctagtttatcatggaaatcttgtcagaaaattatcaaacttctcaggtatcaggatacctgtaaaaatctcatccaggactgtagtctgcgatatcttactttcccctagcaggatttgcaaggcctatatggccataccatttgttgaatatattgctacaaaagcatatttttatttaagggataagaatcaaacttttagattgtataaattatgcaaagctaaacctcattgtattcataaggcaagtctggacagtgggaaagttccaattatacagctcacggtttattaaaagcaacaaccttttaaaataaaaaccaaccttttaggtcatgtcaacattgctaaagactaccttcaagttagtgctgcagatagggagaacttattaaaaacttattgataattcaagttctacctacaacagtacttacaaggtctcataaagaaagtatctgcatacatttccatcactaatcaagacatcactaatcatcttgcaaagaaacaaaatcagctcagtgagggggtgattggattatatttaatcccaatactgtttgctatttggaaataggagagagattcagtatgcaagctacaaaaatagatatgacaatgtgaccaataagatgtaaaataggagaacctatctaatctttatagaaaa

SEQ ID NO: 46718 - DNA, 1191 bp, Oryza sativa
ccgggaaggacgttaatgacacttcctaacgaacactacatgcatctgattggttaggctatacggcatgtagaactgattaggagccgctgcatgcatcgatttaatacgctcacaactgattggccagccacccggcatgtaaaattgatggcgttacattcacggatacgaaacgctaatgtatgtttttgatgctgattaagtgctccacatgattgtcttggtattgatgcacaaatcatatatgaagatcgattaggaatggagcgagtatgacactaataagcagactgcgacaagcgaaactaagcaaagttacgtgcctgcctcctgacaagataggcgtaagcatagtgagagaatttttcaccacgcatacaactcaagcgcaatttcaattcaacaagcaagcatatttcatttgccaggccgactggccgagtatttgggctgtacgggcggcggccgagcaagtcagcctaggacgatatgccaggaggctaggacgaaaggaaatggctgaaagatgcggggagccaaggacatgaaaggactgaaagatgggggcgtgtgatgtgactcgtgtgctcacgtttttctttcacaagctcaaagaaagctgaaccaaatagaccaaaagaccaaaagacgaacaaatctgtgactctcgcacagtatagagacaaggaactaagtaatatcttactaggtgacctatctgcttacgtctatttttctcccacatctatacccatgcaattgagatcctctgtggtactgcatgtgcagtactgcttactgacatctgggcccgaggggctgtggggcccacatgtcagtgagcagtactgcatgtactgcacatgcagtactgcagaggacctgcatccataccaatgctactaaattggagtagcactttgcgggagcttgcaccagtgttcacaatctttattaattccaaacgatttttgtgaattttgaacatctcgagcatgcttagatatcgaatgggggttttgttttgactttttaaaattcatttggaaactgtgaaaatcaacgtatcgatacagctcgaaattcgctaaccaatcaagattataaatcatagcttccatattaacaaaaaagatcattgttgattggattgatcgagcttatattctacgaagtatgtcatattaa

SEQ ID NO: 46719 - DNA, 908 bp, Oryza sativa
cttggtttgctcgttcttgccatctctcatattgtgcttgagcttgtttttgcctgatctacttgcatgcttaattaatatagttggtgaccttatatcttgcttagatatcttatttgtcaccttttgattcatatacattttgtttattcgtgctacaagtccatagctagtgttttattccgttatccgctgaacctttcggttgagatcggaactttcaatcccataccaaaagttccgatttgaaccgaaagttctcatctatctaatatgctatgaagttgtggtaattttttaggaacgcctattcaacccctcccccaccccctctaggcgacatcaaggtcctttcaaatcatgatcattgatgatgcgtttagttggagggatatgatgggttggattataaagaactcgtttttcatagtgtttggcttggaacaagtggaatgatccgttaaaggaattccctctagatctggttagctccatccctcaaaagtggatcaatctaatccacttcctcttgacatgtgggccacatcctctgaaactaaaaaaaaaagatcattaacacataaatgaaaccatcccatcctaaaaaaaactaggatggacctaacacatcccacttgatccccaaaccgaacacatgctaacaaaatatgatttttgttacatggcactcaaaataaattggactctctattatttaatgctgatagtgttcagcagcaaatgtaactatcttgttccagccctttaggtatgggataccgtccctcatcatccctttttttgaagtgacaaaattagctactccctccgtttcgcaatgtaagtcattgtggaatttcccgtattcatatgtttagatttattactatcaatataaatgtgaaaaa

SEQ ID NO: 46720 - DNA, 1357 bp, Oryza sativa
ttttgtaatttattttgttattagactacgtctaatacttcaaatgtgtgtaacaaaacttttcacatctagagtttcaaggccaagtttaatacttcaaatgtgtatccgtatatccgatgtgacacgccaaaacttttcaccttgaagttctagggcgtaagagcaattcagtaaacgcagcaactcctgtgcaacacaaccatccgaaattcagaattgtgacgcttagagagctggacccaaccaacagtccaacacagatatacatgcagctgcagcaccaattctcgtaggtgttattttgcaacagaggccgatgcactgaggtctacaagaatttgcagcagaggctgctcgtaggctagtagctgatgccattgggggagtacaaaaatatcagcattcataaacttcactgtttttcatcagcatttctgcagaatatgtttcggttctcaggacttcaggagtattgaaacaggttgtgctgaaaactatatacattaaaactttcaaacaaaacaaacaccagcaattttcactggattctttttgtttataaacaacaaaataattaattcttcatagatttaatgacaaacaatcatggaactaccaaacaacactggaatacagaagaaaaacaatactggaaaacagtttagatctcatatcacagttcaaacaacacataatacagtcaaatatggtgataactgatgagcaacaacacagtaacaatgaagccaagaggaagaatggtgtcttgtgagagggcttatgcctgtaccagagtaaagaaaaatgctgaagaggaacaaatgaaagctagtaattctgaactagcagtggcccatcgcctcattattccatacaaaactatgtcgggaagatgttgaaataaacatttcaagcatgtctcaaatcaagcaaaatggaacaaaactctgaagaaagctggatccgtaggataagatgtagatacctatgagcacaagatggcagcaatcctaacacatgacatgggtttcaaactgtgaatccgaacttgtattgatctatatatttccaatgtgttccctctgaaaatgttataataactaataaactaaatgttaattccccagccaatcacttataaaactcaaacatccaggtaaagaagaaactttctcagaagccaataagatagaactaactcaggcagtacagcttatcaacctagatacagtaacttgctcaggacatcaacaaagaaggctgaaacaacagtacaattattgttatcaccaaacacgttagaggtacggttattagctcacctcatttcttaactcaatcagtctcaagtggt

SEQ ID NO: 46721 - DNA, 689 bp, Oryza sativa
  unsure (1)..(689): unsure at all n locations
ttgttatcnccaaacnngttaaaggnncggttattagctcacctcattttttaantcaatcagtctcaagtggtagagcaaaaatgagtcaatgcagctacttatccatcaatagattaaacaacagaaaatgtgaccaatgcacaagattataattttcctggaatcaacatcataatagaggaggaatagtcaaatagaggagccaattagacaacaacagtcacaaagtaccaatcaacctacgcttgcaagaattgtccaagaagaaagctaatccagtatctaccagttaacacattcccacagcacccagttggttttcttatcagcaaacaaaaatgatagaacatacgaacttcagtatcctatatgtgaatcaaattgtcccctcaagaattaacacattcgtaaatccatgaaaacatcagagatcagagttaacgaattcgtcaaatcagcacaataacaactagaaatgtcatagcatatctgaatatgcttaacaagaacaggcacaaattggggttaacatggttccacggtcaagaagaaattaagtatatgtccagaagctttattccattcaggattcagctcatcatttcataaaaaaaaatggaaaactgcaagggacctggccaagaggcgaggtcccgccgcgcgcacgcagcacagatcgagcgaat

SEQ ID NO: 46722 - DNA, 818 bp, Oryza sativa
aaaacacacgttcttgatgataagagcaagttcaatagtatagccaactactggctccaattcatctatagccaatctaatacatattcatacaatagttacatactacactatcaataactggtcccacctgtcatacacacattatgtattggagtccgtattacagctggctataaatctgtagcccgctacacttctctctcctcatttatcttcttaaaatatatttgtagctagcttatagcctgctattgtatctgctctaacagaggccagaatgttcgggcctgatccccacgaggccaatgtgtgtcaacatgctgtagctgaaagcctgaaatcaacaatgccttgcacgcgttgttgaccaacctggacgcgtgcgccgcttgtgcaacagtgcaagtcagtttcggactcaccgcgcgccatgcggttgttgactgttgtgaatgggggtagaaatcgcccgcgtagcagccgcgcgaagccacggcgagctagcgcgcgcggccgcggccgcggaacccgccgtgcgtgtgcgcttcgccggatggtagcgttcatgcgcgtgaaaccgctgaccttgggttccatcacccacgcgaccttggccggccgtacactggctgcgcacgcatcacttcccgtccgggattggaaaaagtacgcaccaaaggtccctcaacttgtcaacgagttataaaattgtgtcctaaccacaaaactagatatacgacatcccttaacttacaaaaccgtcaactttagatccttctatgggtttgatcccggttttatccgatatggtagct

SEQ ID NO: 46723 - DNA, 611 bp, Oryza sativa
atgtcgcgccaccgcaccgcccgtcgccagctgcccttttccacatcaccccaccgcctggcccgtatgaggagaaaactgggaaagagagagagagaaggaagggagagaagagaggaaagagatgatgatgacgtggtcaccctgacgtatggggcccacatgggtactatactaagtcagctgtcacgtcagacaaaactagagtcaaaactatcgagggttctagtttgcactggttttataagttgagggatgcgttgtatccgattttacggttggaggacgattttgtaactcgatgacaaattgagggaacttcggtgcacttttttcgtccgcgattcgcaatctcccatgggccaaaggtagtgggtcgtgatgggagcgttgggctataatccctacctggctgttctctcgtgtgggcttaccatcgcataaggccggcttgtttcctttggtttgcgttgtcaatggtagccggcccagttattgcccggttggccggttatcgacgacgacgaatagcgtaaaagtcaagccataattcgatagattttgatgaaatttctgtgaaatttgttgataaccaatcccgttatcgtgat

SEQ ID NO: 46724 - DNA, 676 bp, Oryza sativa
tgatcactttcagcattctccaacggaacaaggcattgtttagttccaaattttttcttcaaacttcaaaacttttccatcacatcaaaacttttctacccacataaacttttaacttttccatcacatcttccaatttcaactaaacttccaattttggcgtcaactaaacacacccaaagactgattaaaacaggtgtcatacccgaactgtgtttagttcacgctaaaattgaaagtttggttcaaattggaacaatgtgacggaaaagttggaagtttatgtgtgtaggaaagttttgatgtgattaaaacaggtgtcatacccgaactgtgtttagttcacgctaaaattgaaagttttgttcaaattggaacaatgtgacggaaaagttggaagtttatgtatgtaggaaagttttgatgtgatgaaaaagttggtagtttgaagaaaaactttggatctaaacacggcccaaatctgctagtagagcatagagatagattggtgaaaagagtactgtaaacaatgaacagggattcttgggaaaccagatctctccacaatattatgttatatacagctcatgaatggtccagagcagcagcagattacaaacgatgccagtacattttgacaggtccgggaaacaaagtgaagacattgaaatcaaag

SEQ ID NO: 46725 - DNA, 1720 bp, Oryza sativa
ttttaagtttcctcaagggttaaaaattagcacattctttgtttttttttcaaagaaaaagaaaaggaaaaggaaatagcacctgggctctactaggggctataatgaaagaaataacacagatatggagttttttttttaaaaaaaacattttattgtttgttttctttgggcttaccacatcttaaacgattggaaccaaggtctaacttatttggactttaaagggttgtgcaaaatagatgatacgtaatagaagacattgaatgctttacattggaagaggtttcgattgcgagactttaacaatatgagtgtccgttttacatattatcggtgtatttttcttttctcaaaattgaacaaaaatgcacataggtcgagttcctaaataggaggatttttttaaaaactttttacatatatagttatcattataagatgctatttcaaatccattctttttaatcttgtaataatagttaaattattgtttgtatgttccattacattgaactcaaaagaacacacctatctccctagaaagtaggagcaatggagcaccagctatatgaatacaaattaaagatccttttgtgaatacattatctaaaaatacaattaaagatcctccaacttttcctcgagaagaaactctctcgtgtaattttcttattcgagtcaaccagctttcgtgtgctcatgttctcaaaaagcaaccaagaaaaccaaaatttgtccggcacctgtttacccggagctcgagcggatcttgctgctcatgccgacaaatcttgttgcccttgccataatttttcgtggggtttttatcccctgccgaaagcgtcgtcgccacgggcctcttctttggcgtgttccgacgtgccactgttcacagccagaacaaaccaaacacctcttacctgtacaacacatacccccccccccccccccccaatcccgtgctcccgccgaacgtgaacccgtcacgcaaacacgcttgcgcgtaccttgggcacacgtactgcacacagggcgcatttatccgcaaagctatcgaaatattcaggtctccaggatgattcaatgcagaaaagagctcattctctaaaccgaagtactagtaatccagtattgaattaatcaggttgtgtttagattggcccaaagtttaaagtttggttgaaattggagacgatgtgactgaaaagttataaaaagttacgtgtgtatgaaaggtttgatgtgatgaaaagttagaagttttaaaaaaaactttgaaactaaacacatccgaagtatggcattttctggccgaacggttcgacaacgtgatgcatcgaatcgaagaccctgggaagcatcgacgagttcgtacggagccgagctgacaccggagctcctccactgtcctgcactgtcgttccagcttcctggttaatgccgttttccgaaagcgccagatcgccaggcttgcagcgcgccaacacacaataactcaacaaggacggctaaattccacgcacgttatttccatcggcatccaaagcgatagcacgacaaacacagcgcgccgcggggggaaagctggacgaatccttcgccagtgcgcacatcggttgcttgttatttggcgcggatccgatcgccggcgatgtgacggcgtacgggggaaaaaaaaaaggaaaacacggagttgagaccgatcacgcatgcccag

SEQ ID NO: 46726 - DNA, 570 bp, Oryza sativa
  unsure (1)..(570): unsure at all n locations
agcccgggggcaaaaagagaataagggggttttaattccctcagctcggctctgtccgctctcatcaccagaggcaaaatgctaagcaagggagtggactagtggcgccgacgtgagcgtcacgacctgcgcgcaacggcagtggtaaactgtagcgcgttagttaagccaatgccagtatgccaccaccaacttcttttcttttctttgcatatatgcttagcacagataatgtctgaatgatcattggggttggtccagtaattaatccatttttttaaaaagtggtattaactatcctgtctggctgtctgtctcaattcttcagtggcaaactggcaagcagcaagcgttnaaagtcaaaatggagatccacatctactaagccatggatgtaagaatggtctgggtttactacctgcttctgctttctgtgtgttactgatcgggtaggtgaagatctgagtgggtacctgcccagccagtccgtttttgtcccaggtgatgtcggcttgtcccgttgaatcgggcccgtccatcacggcccaatcatagatctgcgcgcagggc

SEQ ID NO: 46727 - DNA, 697 bp, Oryza sativa
gcccgagtcaattttcttttgtttcctaagcctcattgtaattaattgtttcgtcgttgtgcttttgcttcgtcagttaagcagttagtactagctaatttcagatttatacctctttgtatgatgaaagaaaatgctcttagcatatttcaattatcattcattcgttgctggtgatcgataaaaaacacaagaacaactttaaaaaggattttgcattaatcgagagaacaaaaaaatgatctacctagtcttttagttaaatcaaaattatagcggtgttcatttagatacaggaattctgctctcgaatatcataaaagtgtagagttgttattaggctacgttcattcacaagccaaagagaggagatcactcgtttttcatgcatacgttttttagactgctgaacggtgtatattttttcaaaaaaattctttatttttttaaaaaaaaatcatattaatacattttctaaatttaaaataactaatacttaattaattttgtgctaatgataaactcattttgcatgtcttctttaatcttcttcttttccattctgtcaaaagctttaagttgatgaccccggtggcctttaatcctgactccgcccctgtctgtgggggctaaaaattcccacattaatcggagaaaaagaaaaggagagtccaggtagaactacaattcgggtacc

SEQ ID NO: 46728 - DNA, 553 bp, Oryza sativa
taaaatgaataacagatcagagctttccaaatttgaataaataaagggtaacatggaagtatatgttgtgatagcactgttcaaaatgaaacattggagaaagcagatttgacccttattgcaactctgttaagacattttttttcccaaaacagaccagaagaacttggtgtaaattagcaataatgcatggtaatgatagaccgcatactacatttcacagacaatggcacttggaaggcaaaccaacagattccataaaatgaaatttaagtatggtagacattcacagcatgtaacaaaaaaaaatctcacggccctttgtgtatatataacatggaattcaatcaccttctacgtatgtggaatgctaaaataatgacgttaaaatttctgacaaatttaagatgtgattcagactaaagtagagaacagcaattgcctagctagctcccaaggctgttacatgaaaataaaagggatttcctaaaactatatctatcagtcccaaatcatgccagtgatcaaagtatcttgaaactaatggtcataa

SEQ ID NO: 46729 - DNA, 982 bp, Oryza sativa
ccgatgaaaacagtttattcggtaaactaaatatatatgctcatatttataactttaatttagtgataagtgtaatcttttaaaaatacttacaagaataaggtgtgtattcactattccgcgccttgagagcgcatgcatttataacatgtttatcaacaaaaacacaaaccgaatcttcagcagctagccgagctaattagtgaatacaatagtaccaccctattacatgataatagagataccctttcatgttcatggcatctgatatgttcatggtttgtatagtatatcccagcagctctaggaaaagtttctgttctccattgccaaccatcttctattgacttgtatattccagtttagacttgggcgatgcactttgtgttcagagattcccattcgtcaagtcctcactatcatggctgacgttctcattgggatatcgcagtattgaatctaatcttcttctcagaacagttcagaatcaaaatggttcatttacaggtccacgtggattcgttgacgtcactgccgaacagacgaaaagaaaatggttgtagcgtgctgtcatgcagtaacgtcgtctgggggcgaataggaatatacaattattaacctctctaatctgtaatcagtgagtagtgatatgaatatatggtttagggaaacggaaatcagtttgatgtcatgaaaatgaaacatgcagatagttgtaaatttgtccagtgaccacttcgtacaagctagaaaacatatccagaaacgatgtaaattgccgttcaagtttcgcatatcgatccattcactattgaccaataataatgctccgttgaacgaactaaaagtgcaccacagttgcatcaagcagaggttaagagaaatgctgctaattattgtggaggaccatgtattaattagtcttcggtattttgttgtattggagtaggtgtatgtctcgtataatcctaactttatgggt

SEQ ID NO: 46730 - DNA, 544 bp, Oryza sativa
ataaaatccaataaaattcctatgaaatgcctattcccatgcaaattttagaggacatttttatcatgaggtagaatctcatggaaaaaaaatccctttgagtcttttatctcttctcaaattctggtgtttttcttgcggcctaataaaacggttattcctacgttttcctgtattttacaatcatctgttttagagctcttttgaaacaaaggagcaccgaaggaaaaccagaagatgtgagtccctatgaattcattcactgtagcagcctttgatttgtaggaataggtcataggaaaactgaaggaaatattccttcattgctgattctatgggagaaacacatgaaactttccatccagtctgagctcatttttcacttgctttgcgtaggctcgaggcaatcaagctcctaatctcttttttcactgcaggagaacaagcaattaatggatataatttgtgttagttattagaaatggaaagtgggccaagttcttaagtaaaaatattcttgtgtttttttataccccattcaaac

SEQ ID NO: 46731 - DNA, 740 bp, Oryza sativa
agctaacaccaaaacgatcgaaaagtgaactaatagctagctaggaaatgataatatgtagtagtagcagtagtagactagtagtagtaatgtaggtaggaaatcagatgcctggcctgcccttgtatgccgcggaatggatacgttttaggccggtttaatccctcgaccgccgccgcattgccgtgtcaggtgtcaccaccaccaccagcagctgctgctcatcatctccgttctgcgagatggatcggagtaggaaggcggccatggcgaaggctaggagctcctcgatgaagcgtcggtttgcatggagaagaagaaaggaggagatgtgtggtggtgttagagagagagagagagagagagagatagagggagggagctgtgggcgatggtgtccaggcaccggcagcaaggcagctgcgtcgtcttaagaaagagcagaaatggcatggagccctccaaagcatctgatggctggccctgtatgcgtatttatttatgtaggggctaaaggcatcttttcgcaagacgtacactgcacactgctctcattttttgcaagacgtacgctgcacactgctcttatttgagagagagataagagatagagagagcagcaacagcagcagcaattttttctttaaaaaaaataatcgaaaacgcagcaaatacaaccactccctcagttctcagatgcataaggttcacaaaaccgtttgctgaccgaaaatcgctca

SEQ ID NO: 46732 - DNA, 761 bp, Oryza sativa
tttccatagagtccaagatcataaaaaacggactcctgagcgaaaagttatagtcgttttactctgtgcttttcggaagttccgaaaattatcggaagttccaaaaatggttgcaaaactgagtttagcttatgtaaattttcgtaagtttcgaaaattccagtcttttgcctccaacggctagtttttgaggggctcgggtatataaactcctccacccctcctatgagtggctgctgttcttgggcaacattagatacatccaaacccaaatagctatccccatttcccatcctttgtggtgcctttttgtgagggggatttgagaagggaagagagttggattgagagattgagaagttaagagctagtgagcttcactccatactttgagcactcgagttcatagcaagcaaatcttcgattgtgtttgttactcttggggactaaggtctcctagacggctaggcgtcgccggtgagcacccaaggttgtggtgtaccacggaaagtttgtgaaggcttcgctttcgcctccgcaagagaagaaaatcaagagtgaaaccaatgagtgcatttgtgcaacctcgtgaggaaagggttgaaatagacccggcccttgtggcccctcaacagagacgtaggatccgtggatccgaacttcaggaaacaaatcaacgtgtctcctctcttggtttgctcgttcttgccatctctcatattgtgcttgagcttgtttttgcctgatctacttgcatgctt

SEQ ID NO: 46733 - DNA, 641 bp, Oryza sativa
agcctgtagcaagacaggacaattttagataaagaaatattattcatcaaaagacatgcattttgtgttcggactcattttctaggataggcgggaaaatgaggtgtttcctttatccccaatcttattcatgaccttaggtcatgacacacatgacgcgcgaggttgcccctcccctctcctacgtggtcgtgccccaattcctgctttttttcccctgcactgcctcctaggtacactttttgtctgctcttcaattgctttcatatgtataaacaaggtgttattttatcttttttttttaaggataggtgttattttatcttattcgcgtaactattttttcctcagtttgaaggaggaacatactcgaactataatcgagggacgaacgacagactttcttttcatttgtttcttccgtctagccgcgttgaggaatgagccgagaaaacgaaaacagcccaactcaagcgtatatcagtctgtacacgcctacaccagagtccagtggtcctaaatcctaatcccggattcccttcccctcttcccctcgcttcttcgtcggtcgacctgcgcacgaaccaccggcaagggcgggtgattggcgcgatccgtgcgcttgccgtctttccggcgtt

SEQ ID NO: 46734 - DNA, 2109 bp, Oryza sativa
gcgtgccactgtggcactgtcactgtgcgagagcgatcactcccccagcctcgctgctgcctgcaagagcatttttctcaccggtactacgcgtcctacacatacatgcacaatatattctactagtacttgggctgtttgatagtttgatactacgggggatgggagtcctaccaaaaccaaaaaaacttagcgcacgatccgcacatgcagtcgtcgctgtctgattttcccataaattggggtcggattattagtacttgcgcagacagggcagggaccagcctcatttgcctcgctttttctgcaatctgcattgccattggcattgccttgcattgcggttgggctgttgcccagtcctcctcgagtcaagccagcccaccaccgcatgcagacggtgcagcagcattaggagatgaccacacgggcttactagacgagcacaacctacgagttgcagtttgccggctgacgcgtggggcccggcccatttgtttggcgtgccacgccacagtgctgcctcccttctgactagtactgtggtgactactgatggatgatgtggtgagtaggagagtaatatactgtacctaaggagtgctcctccgtaaaaagttctagttataaatttggatatgtggctgtgtgttcaaatttatagctacagttcatcttttttagggtagagtagtactccgtaagagtagaggtggcaatgggtcggatcagacaatagacggaacattaacacgtccggcctaagacttgatatcccttgtctaggggtgaaaacggtttgagtatttttttatatccagacacatttgttttaaagtggttcggaaaattttctatatataagacgcatttgtgtttagattagttctatatatgttgagtatatataagtacatgttgagattagagaccaaatgaaataggaatgcgtcaaaatcagcaatagacacatatatcaggtctgacatgggttactcactggcataatataaaacccatatgcgctcaaaagaattttggatatcggatcaaacatgtccacgggtaacaaaataaacctacgctcatcgggtgggatacccgtgggtatcggactagaattgccatccctacccagtaaattgctaccactagttccttaattttggatgcgcggacacatgctggcctaaaacaatgcaactatgcaaggctagagcttagagtttagcaccctgcccatgttctttagcttttcaaaagctccccattggtgctcgagtttgtgctctccttgttttttccccttcaaaacggattcacgaacgctcatggttcagagttcagactagcagtaggcacaggactgtacattggatgatgccttttgagtagttgaggctgaaagcggagatggtacccaatggcggccgataccagtgatcgcggtaagggttgtcgtcgtcgtcgtcgtcgcgggcgctccgctgctcgcacgcccgcctgtcgttttgctcgcgtgcgtgcgtgcgtgcttgcctcgatcgatcggtcggtcggtcggtttgtcgcctcggcacgcaggcgcagccgcgcgcagcgaccgcgtcgtgcgttcccttgtttgggatctcgccaaccacccgcatcacaacgcggctcgcatcacgcccgagacacgcacacacgggcgagagacgccgcgcttgccgggttggttgcctggtttgactccgtttttttttcttttttttggtttgatcggcagcacagcgcctcccggcctcaaaattactgtagtaccacgagatcgatctcgacccgtctcgtcgtcgtcggctaaaagtaaaaattctggatccatccatgccaaacaagtaaaaatctggatccatgcgaaacaagtagtcgaggttgaatcggatggatgtgctcagacagaggcattgccagattggctgcttgcctgctgcaaggtactcaacagtggcaggatggcagggagctacgctacgcatggtccaggtggtctggtcgcgaataggaatggtggaatgcgattatggctgtgtttagttcactgtgaagttggaagtttggttgaaaatt

SEQ ID NO: 46735 - DNA, 657 bp, Oryza sativa
agttctcatgagtcatgatccagccgaaccagggccgtgctgtcaaatttgtagaccctgtacaaggctctaagtgaggcctaaatcaagtaccaaatatagctaaaataatatatatactgcaaaacaaatgtgatatatcaagaatagtatattttttaactcttgttttgtataattagaaactgtcaaactgaaaacggagaatgtttgttgatgttgctggcttgctgcctagtgccttgcttgttggttgcttgctaagttgctattcgctagttgaatgaaaatgtgaaattggatgagccggctggcggcctggtgctcggaggagacgagacgtcgagactcgagacaaattgaataagtcacagatacgaaaacgaaagagaatacaaaacgttgtggggcctcggggctcgaagttgagaatacgaagcgccacgcacgcgaagtcgccacgcggagatacgcgcggactcgaacggggttctggcgctctagcctcatacaaatacatgtgccttctttggttgggctgattttttgaggccctagaaatttgcaggccctgtacggtcgcacggaccgcacacccctgtgcacggccctgagccaaacgttgagtgctccactccgttactacgatacgatgct

SEQ ID NO: 46736 - DNA, 606 bp, Oryza sativa
gtcaaccttttgggatatatactccatgctatcgtgctgtgaacaaggatcactcttaagcttaaaaaaatgtctgttggatgctggtattgattttttgcttgaatttgctcacatccttttctgctaccatcggcttcattggttcacatcatttgttgagaggatagtttgttgtgaaggtcgtaacggttcagctattgtaatgcgtccgccatccagtgatctgatttgctgagttctattcgtgcgtatgctatttttcttgacggtaagggttcagctatgctaatgcgtccgccatccagagatctgatttgctgagtttctatgcgtacgtgtgctatttttcttgacggtgagtgaaccgtcgagacgggccaccaagttccttgtcgcgcctataatgttagggcgcctcacttttaacggagaatatatgaaggaacttcatgaaaaactcatctaagcaaaagtaggaacatgttattgtaatttcattctcaaagcttagcttcttttgaaataaattatatagctccaagggcagttctcaatggtacaagctgttgtgcccggctaaaaaatacaagttgttgtcaaaaa

SEQ ID NO: 46737 - DNA, 592 bp, Oryza sativa
tggatatgaaagtggagtgtgtgagaggtgattcccgggcttcatatgagttgagatagaatcattcattgatggtggacctaaatcacaaggatgaaatgtatgaagatcaagctatgtgtatcactctttctctccatatacatattgatatgttcatatataatatttccacgtgattgacatatgcatgtgagactaatgttttgtttgagtcttttctcttgtttagtctctttatattgagaacatgaagatgatgaaggtatacctttattttaatgcctatatttgacaaatgccttctattcttatataggattagctcctaatgtttccttctttttatgcatactcttgattgacacaaacattttgtatgcatacatcttgggggagcaaatcctatactttagttatgcatgtaattgatccaagttattaaatttcatttaattgagatctttacatgtgagcatatgtttgagatatgacacttggggggttgattgatactcatcatttatttatatccttttatacatgcgatcggttgggcaacatgtggatgttgacaaccggatcattggga

SEQ ID NO: 46738 - DNA, 649 bp, Oryza sativa
tgcattggtataacaagaactattgattacgggccgtggcaatgaaggagcggccttgtggatccatgcatgtagtggttagctttcttgccttagtaaacaggcagtacgcttgatgacaacaatggcgattgtagatatagaacactaaaaatacaaggtatttgctagaggacaatttaaaaaacaagggttttctaatggatactttaacctcttgtttctttgccatgagacaccgcccttaatagtttgtcatttattgccattttggatagtcaaatgacacaaagtgcccttcgaaaagggctagctttacaatagcaatgtgaagtgggctatgtccggacaaagaagaaaacgagaaggagcatcacgggagcatcaagtgcagtgagaaagaatggacggtagtgagaaaaagtgccaactagcgaatggacgaaatgaagggaattttggttatttagcaaagtttctctcttcgaatcagtaagaaatgataaacataatactcgcgatatctaatgggaaataaccaataaactagattgtcatatgtttttttaagtgtactccaataaagaccatgtttcttttgtgtcccatatcattttttggcttttatattttactaacaaactaccct

SEQ ID NO: 46739 - DNA, 1088 bp, Oryza sativa
  unsure (1)..(1088): unsure at all n locations
cacgtncttgatttgcaattcgagctcggtacccctggtacatccgtgtgttacccttcgtttgcttgtgcaagtgttttttaattgatttgaagaagctgtggttctgtgttacattaaaagaaaccaatgaagcaggacaagccatgcattacaattagtagcaacatagccatgtgctatgatggatacccataaatatgctataatctctagagttaaaaatacagaaacatatttatcctcaactctgatattatacaaatggctatatgtgatcaaccaaaaatctaaatacaaaaatatgcaaggaatgtgtttttatgtaaaagataccacaaacaactcacacattccctcatatatctagccacaaaagatcttgatggtgggatggttgtagaacataccatcacccccaattcctctaaggagtaaacattttaagatgattgcctggagtcatacttgttcttttttttacttgcaacaatctttatgtaactctttgacccagagtgaatgtttagaatgtggattaatgaatacctagtactccctccgtcctagattataaacatttttagagttggacacggttattaagaaagttgatagaattaaatgagggagtgttgtgattggaggagacgtggaggtaggtgggaaaattgaatggtggaggtatctgaccgactgggcagagcttgacctgataggaagagaaacggctaccggaagtggattaaaaaggtgaggggagggggcctgacaggggttgggggggtttaccaaccgggcccctttttaatttttttttttccacgcaggcacggacatatgcaaagtgagaaataggttagaactcacactntttcnnnnnnccnnnnnnaancnnnnnaagtannngncnnnntgggtnnnnngnnnnnnnnnnnnnataaaatnnttaaatggcactcnccctctgtnggnngntatattttggnnngnntcatnnnnnnnnnnnncccannnnntccccnntgttcnnnnnnttnnnccannntncaccnanccaantnnntttcaggggcctggtcaatttt

SEQ ID NO: 46740 - DNA, 607 bp, Oryza sativa
ttctagcatatttcaatggatgtgattttagagtgtctagaaaataataattcattaaaacaaaagcttcccctccactataaatagatgaaacgcactatcaataacgataggcatgctagcaacaagcaaacagtgccaataccctgcataaagtcccttcagaccatgatctctccagatagaacaaccagcatggaacattccattatagtagttatacatcggagcccctggagtttgagaaatatttccttttggggcaggtaaaggccaagatttcttgggtggccttgggaaccttggcatttttccgcccttgggggtttttttttttcccaaatgacttcacatgcacatagataaagacccaagtgtatctcctgcaatgagcacaatgaagcggcataagaatttttctcgagttccatgcattccaatcagaaagcaaatttccagcagcgaaattccaatgagaatgcaaaattccatcagccagaaatgtttacattgcgtggaaaaaaagggcatacttctaaaaataaatattgatcacagttgataaaacctagtataaaaaaagttaggtaacgtcataaatatttac

SEQ ID NO: 46741 - DNA, 624 bp, Oryza sativa
  unsure (1)..(624): unsure at all n locations
atgtaaanggtagatcttactcttgctgcacgccngcaggtcgactctagaggatcccctggcggcgctggcggcaacggcttcttctttttcgcggcgcgcacgctcttcggtttccttcttctcgcgttccgcacgctgttccgcttcaatgcgctggcgttcagccagctctgcacgtgctttctcttcagcttcacggcgcgctgcggcttcaatctccgctttgtgcttcgcttcggcatctcggcgggcttgttctgctgcttcgcgcttaatgcgctcttcgtgctcacgccgagcctgttccgccaggcggcgctgctcttcgcggtcacggtcgaaatccttgttcatcagcagagccatttcgtggtctgttcgaacttggccgccaactcctgatcgaacttgatgttcatttcagcgcttcggcgtgcagcgcgttcatggcttcttcagccttaatgcgttcctgctcggcttcccattcngtgagtgggcggcgggttgcgtcgcgaagctcgtcacatgcatcaacgaaacgcttaatttcggcctcagcaggtcgcacagcctctttcaggcgcttcaggtactctcggcccggcttttcaattgccg

SEQ ID NO: 46742 - DNA, 600 bp, Oryza sativa
tcctcatcatcctgaacctgacagatctaaaagctgcatgtagtgtcgtttgatatgaaactttggggtttgcatattgccgacgccttacgttttcacgtgcattagacccacagtaatacgttgggaatgtcacagtttcaccctactcagcatggaggtgatagtgattttcaggtgtggcaacaacagatgatgtacaagcaattgcaagagtttcagagacagcagcaggtacaacagcttgatcatggagccaggatgcaaccctcttttggtgtcaagtttccaaaggcttccccttgtccaaaaaaaaaaaaacccccccaaaaaacctttttcaactgatcaactctcggcaatgacgaatgaaatgccaaacaatgaatctacagcttatgcatggtcacatcaactacatggtagtagtgacccagggttggcaagcaattctcaaatgttgaatcctagcagtaacacaaattgggagcaatatggtggtgctcctggtgtagccaattttgtaaacggttcaatgttttcaaacactccgattcagcccatgagaccgatgggattagctgcacaccaaatgaaccc

SEQ ID NO: 46743 - DNA, 732 bp, Oryza sativa
  unsure (1)..(732): unsure at all n locations
aaaatttgctatattttgggatggagggagtattcgtttcagttaccggcaattgaaaaccaattcaacaatttatctctgaaaaataaatgcgagtgcttttggagtttaatctctttttgtcaactacagaatgcagctgtgtgcatgaagcttatctgcatttatgtgttttctctctttttctttgcagaccaaatgggagttctgaccatctcctgaaaaatatttcttcgcatattgggttacgaaccaagattggtgctactgagttgctgatattttcatccaagttacttacccaagaatatcaaagtatgttccatgatcctttttatgtcccatttcattataaaccatgtcatgtatccccccataactgacaatgcttggacttgttacacttgtatgcttaaacaaactgatgctgtgatgcatgcatatctcaaagttactatttggtaatcttatttgtatgaatatttttttaatttgattttttttgtgatacctgtttttgattcgtcgcagtagtttctcttgcaaccagatgaaatcacatggagtttgcatgagcatagctgtacagtccctgttaaatgtnttaaaaagtggtttgcatgtacaaatttatcatctaaccttttctggataattaccaanttaacacggaaatgtgataagttttacttttggggtggtttccgggccctgacaaaatcctataataaa

SEQ ID NO: 46744 - DNA, 737 bp, Oryza sativa
  unsure (1)..(737): unsure at all n locations
gatttagnaccctgagtaacgccttgcagncgactctagaggatccnctggtgttctgctattctttcacagtgatatcatccatcattattgctgttgtaatttcaacaaaaaactacatggtccatgccatttatgttgcagcatgtttcagtgattgcttttagtatagtacaatacctgtagtacaaaagatcctttttatagcaagataatggtatgctaatattttcccccaactttagctaaaagatactgctgagcgtatcaaagcagttgatcgtgcggcttcaatgattgaggaaattttaaaacaaggcccaaacccagaaggcactatccagagcaacggacaggtcttcccttcatatctcagtctgtttaatatatgatatctaatggattaataggcaccaaaccaaatattataagtacacatgtcataatccatctctggtattcattaaatgtgttaatacatggtctggttagttcattcataattatgttgatgcaatcttgagaaggaaaataataatccacatatatgggtggtgcttgtattattgtttcctgattaatatggaaccagttacagtgtagttttttttttaaggggagcagattaataattactacttaacatatggcaattcttgttgagaaagctaacatctttcttttgatgttacaggccgttcatccttttagtgcctcaatatttttgggttttcatg

SEQ ID NO: 46745 - DNA, 745 bp, Oryza sativa
  unsure (1)..(745): unsure at all n locations
tgtggtaaaaaaaaagggtaggggggaaggagaaaatggggaaaatgaaggagagggtggttgaaaaagaaggagatttggatttagagagtgaaggagggcggacggggaggatgtgtgagtttttaataagaagtttttaagaaaggagggagaggattggaaggaagaagaagaggagaggttgaaaaaggaggagaagaaggaaaagaggacggggaaagaagcaaagaaaggagtattggagagattgaaggaggaagatgtagggaaattgaaagggagaagaaaagtgagggggctgaggaataaagtgatgaagaaggggttgagaagagtacttgattctggagttggtagtgtaaagaactttgtgaaggagttcgagagaattttttgaatttttggagtaacttttgaaagggaaagggagggtgaggggtttggggggttcaaggggttagagggatggaagaaagattggaagggtaagatagggatgccgagggtgtgggtgtaattttatgattgagttattgaatgaaggagagaaaaggatttgtttttgagttgatgggaaaagcgaaaggttggtaaaattgacacagtgggggatatggattgtgtttaggaaaatgcaaatggaatagtttgataaaaaattgtgcattttttaaggttgagttgggagggggtttntanagtnnnnnggngggntttntacgagtaacctcgcatgagagtg

SEQ ID NO: 46746 - DNA, 2122 bp, Oryza sativa
  unsure (1)..(2122): unsure at all n locations
tatgtctcctgatctgctctgctatcttgctttgctcaggagcaatgccagagcatgcttctatcggcctatagggagatggtaagggcgtaaggctgtgcttggtcgaaactctcattgactgttcaatccaaagattggataccgcaaagcatggccggttcatgtgatagttcttcttgtttcacctgttaacaggtccttgctacggccgagttggttagagcttctcactctatgcgttgtttttccaaagtagccgcgaatagtccgttgatacggtttactgagcgccaagatgatatgaatgattcgggggacggaggaggatcccctgtattcaaatggttctccgtattagaattcggtgggttattcattttgtttcaatgcaaaacctgatttaagttagcatgcccccttcttttactctctggtcgatatgacatccaaccaactaagcgcgtataatctctgaagaacatttcctcgaagtcatgttgctgcgtaccaggtacatgccgggcgtagattatatttagcaaactgattcttagtttgcatataatattcagtttaacagtatcccatggatcagtatctagttttttatgtttttcctggttttttttattggacgatcctctttcagatcctcccagtgaaaatacattgcttttaatcaaacaagataaactcctgaatttaaattcgtttatttgtggtttatcacagagaatcttgctcaagaacttgtcgatatgttcatttcagaactgcaattgaaggtatatcgagagttctttttctattgttctatggtgatgcttattgattccagaaacagcatgtgcatttacttttagctttttttagccagtacaaatattggttttattatacttgcctgcttccttgttactttgggaaccttcctgacaatggaaattgtttccatatcacagagattgcttgtcttggaactcctctcggtaaccttcaaggaaggtgtacaacatgacgcatcattagaatggtccaatgagctatttgatggggagttcaatgagtttcagagtattggccttctgtcaggagatagctacgcactgcccaaaaattggagtgctggtgtctcaaaggcatggcaacctgatcaaaccccatcccatgaggttttacaggtacaggttgatgttttgagatttttttttttttttgaaaccttatgttttgagaattttggcatttaagacagaagaaagctcaattgatcctgtcttgattcatatattttacatcttctgtctggttgtcttcatagtaaagacaaagttgtcttatgtatataaagagttaattaatagtccatcttttgattggatttttttgtgcaaaagttagcatattgggtttatatcttttaactgctccagagtttcttttgcaggtttatttgacttcttggcttgctaatgtgaacatcaagacaagcaggtaatcatattattgtattattttatcttatggatttcataaactaagaactatagttattgaatcttgaaaataaaacatatctttttttcctcaaccttttgttatcatgaagttttcgcttctggcttgatgtcataacttgtgtgatagtaacagtgactttgcactatttcagaattgatgaaatatttgagcttgtcggggaggagatgcagataaaattgtcttgaggattctgatgcgtatgacttataagtaagaaaagttgatctatcctcctgtttgtggtttcgtttccttagaagtcctaaatgctaaaaccttatgtaatctgctcgaaccccaagggagaaaaccattctctcataatttagattttacaaacagaaagtttaacactaaaacagaattacttatctacccaaggttcactgaggaatcacgtttgagggagagcactgatcattatctgaaaagtcttaagccatcatccgctatcgaattaaacaaggttttgaagttctaaagtatattacccttagcttcaagtctgttctggctcatcatatatgtacataatcaatttgggtaccgagctcgaatntcaaaatcaatggacatg

SEQ ID NO: 46747 - DNA, 1875 bp, Oryza sativa
  unsure (1)..(1875): unsure at all n locations
attgagtctggaaacccttccccatttgcgggtccacagagaggaacccctaacccaatccgcacgggccgtcaaagtagtcccccggggggcgtcccgggggagggagggggggacgcgcgcgcgcaacagatccgatccgcttctccgccctaaagttccgaagccgatcgaggtaggtctccgcccgaatcggctccccggaattcgcggggggtgtggtcttggggtgtgcctgcgtgggggggctgcggggatgggtgtgaatcgggtgggggtgggagggggtcgtggcgtgaccgggggcttggggattttttttttgggaggggggaaaagtttgggggttcgtttgtttcatgggggatctgtgtgagtggggaaattgggagctatgtggcgctcgatcttgggtttttgtggctgggtttgcttgattgggtgctaaattttaggtttccgaggggtaatttgtgtgggatggtcgagggtttggctggattcaagctttagctcacttcagctgagttcatctacttgcttaaaagtgtaggctcgtgctaagcagcgcgggagcgtagctttgggttgctcttggttgcatgctccgggattcgggcgtctcctggcggcggagaaacgtgggggatttggggtctgcttcagtagatgcgttctctttatttcgtgtggccacctttttatggttcctttgagcatcgaggtctgagttgatgatgcagagttcgagctaattcgttgttgtctcctctgcatctttggagatttacaggctgcatcccttttctaatggtatataagtgggccaaaatggcatctttgagcttagcaaatagatcgtatggtgtgtctgctggtatcgacattttcagctttattttctcctgcagatatgcttgctttggtgccctgcttaaggggaatggagtntgtctttgtgatttcaagctggctgcctaattatagtgatagtatttatgaatctgctgacatagttgtgatgatgtgttcaagttcaagtttctttgttttgaattcatggttctactctgttcgcttttcctgnctcatagcttccgaatacagcatgagtttagagatgccatttcggtcgtgctaactaatagtgtttcctgggagatacgcttaacttagctgagcttttgtgtttattttttcgtctccatgccagtttcggtcaagtatggcactctagcaagtgagcttaagtagtgtgttgtttcatgagctgttgtgtctcctgtgcattgatctgcagcactcgtagctttcttcacttgccaccaacaaactttgaactctatttacataattcaaaccggaaatgcaacaatgtcttctttgaagattgttggtgcacaaattgaatccctccttgctacatttatcgacaacgtttcttaactctaatacagatgtagatccacttttgttgttgattacttatccaggaatgtaaaatactaatcttggtaaattgtctcatcaccattcaaacatgactacatatttttaattcaagtagcatagttcctatcaggcggtgcattgtgatgatttcaattaagtattgcttaaggttctaatcttaaattaacacaagaataatgattctgtagtctaaaatactgcagacacaattctaattggatcaaccataccgctgaatgttaggtgcaatcctttacaaaagcttacaaatgatgcacgtctatgcagatccatccacaaaagatattttgatgagaagagtatgggggtagattgcacaatcacaaccaactccttgttttaaatgggagataatttacacctgcttaatggatacttact

SEQ ID NO: 46748 - DNA, 731 bp, Oryza sativa
tgacaatgtagagtataatggtacctactagtccaccaaaattcatgttcaaattcgatctacaaatcaagaaacaaaaaaaaacaaatttagatataaacagtacgctactattcatacgctgaatttgtcttttttatatctcgacgtttgagttgagtttggacttaagattttgtaaagttatatatatgtgttgtatgaatgttgtcaaatttttccagaatttttcataaccgtttagatggtttttgagtaaacgagggaacatcccctcgagggattagaatagtttccccgcatacattgcctccatacttgtgagaggcactattgcatcatatatgcagttctctatatatcaatataattgtctgttagcttatttctttatatctcgctttgctttggctgcctccacccaatcatttgatttcgcgtcttagtttgccagctcaaatcaatctccatggtgcatgtacacatgcacagatcatcagtgctgaactgctgatacaattagtaatgtactgtaccagtatagaagtttctttttcagatatatgcgaacctatcgatatataatatcggtgtcatgtccatgctcgtctcgatcgatcatacagatactacaccggaggccagctggctggcgctatctgaaccatttcatattcttgtgttcattctgaatatatattctgaatggactcgatgatgatctgaaccct

SEQ ID NO: 46749 - DNA, 956 bp, Oryza sativa
  unsure (1)..(956): unsure at all n locations
ctgtgncttgnatttgaattctagctcggtacccagatagttaatgaatgtggatagcccatcgaaacatccatttacatgagtttatgtgattatgtaatagttgcaatgcaagaaattcagataaaattagtaattcagatttcaaataattaacagctcccaggtacgacaggaaataacatggaggctcaatttgatgatatgaacaagatttacctgagacccagcagatatatgcaagtagagtggcttctcaccatcagtttgtccatttggtggatggtatcttcccctggttaggtcaaagcaagtaaatatcaaaagggaccatcgcagtcacaagtcacatctacgttttgcctggcttacctagtaatgatgacagtgcttgtacatctctgaatctgttaagtatccagcaaatcattattactgctatcacaaagtgatctacgcaaaaatggtgtttaaccctgtacaggaagcacataacaattgtctcgttaaggaattttacctcctcctgagtttgccgtttcgtaagcttatatcgcacagacggatcggcgtcatttataacaatttctcttgctattagctcatcaggcatttttgcctgaagaaacaagatgtacacagacaaaattttagaaccgtgtgctgaattgcctaatcaacacatattgatatacttacgaaaaatacatcattgtcacacctgactcaatttctggaccgctgccgcggcggtctggagcaccgaaggcgccagatgcaccggcaaagtatagggcacagcgactatattccccaacggaccggcggctcccgggatcgacacgccggagagggcaccgatgttcaccacgggcaaccccgccacagcagcagcagccgccgccgcggcgacgacatcctccgcgggctgatcccactttcctttttttctacag

SEQ ID NO: 46750 - DNA, 1061 bp, Oryza sativa
cgactaggagcgacgaggtacgtagtagcatgagaacggagcagattcagagtcataagagatgggagtagtagtaggagggggttttaaaagaaagcggtcataacggcttcccctcttcttccttggcttccggaaggtgacccccgttcctccctccttggatcccgctttgccccggttcaccattctctcccaaaatacgccggcgggcgcgcccaggtccgaaacccggtggggccggttcgacgcccgattgtctggcgccttcgggcccagggtaagtaagtcgccgtggttgtgcgcatcgcctcgcacgcggaatcgttgctctcgtttctcgcccctgctataacactcgcacagatgcaatgcaatgcaaacaccctcgaggaattgatcatgttcaactactactactactactactactactactactactactactactactactactactactactactactactactactaccaacacgcgacttgattgattgctttgtcctcttcgtgtcaatggcgaccatgggcaaagcatgtgattaaggccggtgtctgatggaatttactgccgtggagtcttctccattttcacactttgaaaattgttggtaactcacgagcgagagctgcctctctgtctgcagggctttcctgggagcgtcactccggattacgtcccgttccagatgtgggataccttgcaggtgaattttttttcttgtggcaatgaactgtgtgtcacaatgtctattaccttcgtttttaataactgctttgggctaagttcttagccaagttggtattatgctttgcttatttgcagggtctctcgacttacatccgtgcaatgctgtctactcaagtaagcttgacgctgcccaatcttcgctcatcttgcactcatgtcctgtcatattttgcactgttctagatggaatgccatattaatttttgaatggactccaggctcttttaggcgctattggagtaggtgagaaatctggcacggttataggtgccacttttcaggttaaatttcgattt

SEQ ID NO: 46751 - DNA, 740 bp, Oryza sativa
  unsure (1)..(740): unsure at all n locations
agattaatatggaattgatggggcttgttggaaagagaggcctcttttagaagatggacattggtataagttgtttttaaaatattgaattgaactatggaggtaaggtcactatgtccttcaaagtttacttttgttttggagggctaaacttgtaaaatccaaaccgaaggcattgtttaactaatttagtgaggtggttagtatatatggtttttaaaaatgtggtgttaagaagttgtagttgcctggaaaagaaggtttactggggttattcaatgatgaatcatggaaacttgaggaatgccataaaaaatttttggtgatatatataagttaactgaattggagaactcttgtgtttcattagtttaaatttgcaatttcactaagattggtaattgtgtttgtgatattttgtgaacctaaatatgaaattgtttaatatttatagtgcataagaaatggagagaagctatgactgagaaaatgcagggtaaagattaaagagaattactgtttttgatatttgttttactaaagttaaatgcattgatggntgtgcctttttgtagttgggttgttttattaaagttggtcaccaaatcgttgcaaattttgaatgaaaaaaggggagaaaatggagaaaatgaaattgcaatagtgaactttccacacttgtgggggatcctctanagtcnncnncnggnnnnnnggagngcctagtccttaatacaatt

SEQ ID NO: 46752 - DNA, 737 bp, Oryza sativa
  unsure (1)..(737): unsure at all n locations
ccttctccaaactcggttgnctanacncnnnannnnantctananatcccctttgtctctttacatacaaactgtactcataataaatttnttcaatcaacaacttttcacttactcatccaaaaatncgcagagaaaattttttttttaatgatcaataatttcattcaaaaattaaaaaatattattccaacctaattcaataatcaatattccaacccaaataattttctaccatatcccaatctattttattttataatttctacaaaataataattcattaaaacaaaaacttcccctccactataaataaataaaacccactatcaataaccataggcattctagcaacaaacaaacaattccaatacccttcataaaatcccttcataccattatctttccacataaaacaaccagcatgtaacattccattatagtagttatacatccgacccccttaaatttcataaatatttccttttgtgccacttaaaacccaaaatttcctttccccctttgacttacattctctttttcattacttcacattgcacatatataaaacacccaactctatcttcttcaattaacacaataaagccccataaaaatttttcctcaattccattctttccaatcataacccaaatttcccaccaccaaattccaatgataacccaaaattccatcaaccacaaatatttacatttcgtttaaaaaacatgcctact

SEQ ID NO: 46753 - DNA, 729 bp, Oryza sativa
  unsure (1)..(729): unsure at all n locations
acgttactgatcaggcctcnccncacncnccangncnactctanaggatcccctgacgttgtcttcatgaacatgtgcccctctcttcaatcccttcttcgcaaatgtatttttgaatgtggtctttggctaaaacggctgaaattttaacatcgctctgtaataacttctttgaagcttatcttttccgctccacttcaaactctgaccaatgtgtaacaaactttgtatccctcctttttaatgaaaattcacgtggggaatcccccccccccccccccccgtgacttattctaaaaaaataccctggtcaccaagccttcttttcccggccccaccatctcaccatggcctcgcctttcccaccagaaaccgccaaaaaattccttataaacttgtcgcccgcgccccccccagtgccgtgttgattttttacttggcagttgttttctccacccgaaaccatcaacctccaatgcgcccccaactactccttgtcccctcgcccctttcaatcaaattcttatatagcccaacttggccactgccccataccacctccccccattctttctttattttcctccaagcaactccttacttgaaccccttcatctgccgaagcgttcccatcatttccccggtattttcaccgacccacgccaaaacctcctttccaatgctagccaccatcttacccatccaccccctcccccttttcacaatttc

SEQ ID NO: 46754 - DNA, 742 bp, Oryza sativa
  unsure (1)..(742): unsure at all n locations
acttcttttgatntgcagatcccacacnccnccaagtcnactctagaagatccccaaatatgaaattttttgtgttgcctttttatacaacatggaggcccgcatataatttttatttttctgttccgaaattatcattggctaaaacaatatattttggggtggaattaaagaaaaaaatttcttacacaaaacataatctcataaaaataacttatatatcatatcaaaaatgatttatattaaaaattacaacccaaaaaagttttttatatatcctattactcataatttatattacaaaaaaaatataacctaaaaaaatttttaaactttttttacaaactttcatatcttgtaatgaggccaaatataaaatttcatatttttttcaaacttctaatgaaataaatcaatttttaacattttatgattattagggtattttatgttttcttgaaaaagatctccccccaaatgctctttttagactatattttaaactcccccctattttctataatgaaataatgttactggcatatttctgaaactggataaacccattttgcacacctatcttctctttttattaaaccttacatgaaaatatttgcttttcttcaaaaacctaccatttatccttcttctttaaaaattgcacatcttcctctataaaataaaaatcccaaccttcttttaatttttaacccaaataatttttccttattttaaaccccct

SEQ ID NO: 46755 - DNA, 729 bp, Oryza sativa
  unsure (1)..(729): unsure at all n locations
cacattcaaaagcnatacctancnncncnnnnnnnnnnntanaaaaccccagttgacaggtcntgnaatgcgctcctctctcttctataccaacctnaaggtatttttttttacaagccatgtttacatgtttgggtgtttaatttttttatggataccgactcacatttaaagtattaaatgtacattaataaaatttcctttgtaaactacgatactaatctcttaagcctaattaattcctcattaataaatgtttattgtaatatcacattttaaaataatggcctaattagccttaaaaaattcttctcacaatttacatacaaactgtgtaattggtttttttttcacatttaatgttccattcataaattctccattcatttgttcaaacattttatgttatggaaaagttttaaattgtagtaaacacaaccttttgctactggggtgcccttgtcacgcatgtttctttttccccaacgtcaaatcttcttaacaagaaacaatactcacaatttttgacttgattttttatacaaataatttaaacattcaaaaaccattaacccttaaactttcaaccattttcttcctttcaaaatataccaacagcaaaaattagaaagatttttaactaattacacccctttaatacagataaattgattggattggaacttattccacccttctcattaaccaaatccgactttcaattgaacg

SEQ ID NO: 46756 - DNA, 746 bp, Oryza sativa
  unsure (1)..(746): unsure at all n locations
aatattnggtactgtttagctttaannncnacnnnnannnnaanatccccttagtatcgttcattataactgccgttataaaaaaatataaattnaaaatttacattattttttttattttaactatacaaatacgagtgctttttttattcctatgattaagcactaattcatcttctcttttcctattttcctctaactattccttttttttttctatcaattaatacttttaccaaataaaatactttatttatctttcctaatattaagtactattaaattcattatcctatctttcttaaatattaggccttacaaagtcttatatccacacatttctaacccattttcacttccccttatcactaaaacatctatttattcttttcttaaataatttatcctaccacaaaattctaaacatattttcaatttcttttttataccaaaatttttctttaaaaatatattgttctcttccacctccccaacaattatttgattgtttacaaacctcattaacaattccaaattacacccctactttaacccctaatcttttaaccccaacatcacattccttttcatctactttaactaattcttccttaaattctccttcaattacatctcaatctttttccccctcttattctttcctttcaacacccaaaaaaccctaatatttcctaatcaaccaccaaaatttttaaccatttattttcccttattacccaatttac

SEQ ID NO: 46757 - DNA, 730 bp, Oryza sativa
  unsure (1)..(730): unsure at all n locations
catgatttgggagcggtgagcaacnnnnnnnnncnnnnnnntanannanccccttttttttgaagagaaagtattaatctctctcaaaantacattgttcaatggcccaaatcacattaataaaaattaaanaacactggctgggtatctttcaatttcatgcttatttntcttnnaaataaaaatcattaattttacccttcaaccaaaaaaaaaaaaaacacacattattattatacttttncccaaactttcactaatatttttttttaagctaaaaaactatcaattttatctttttccccaaaantttcattantattaacattttcaccaaaaaccctttaatcttaacatttttccaaaaaatcattaacatttaatattttaaaattaccattaatattaaaaaataattaatatttccattccattaaaattttcattattattaacctttcgcacaaaaatgcattcattttataattttttttaaaactttccaatattaaccttcaaccaaaattttattaattttacctcttccaaaaaaattaatnatantttttattccataattttttaaatattaatcttacacccaaaaatgcattaatattaacattactattaacctttnnaacaaaaattaataaattttacccttattcctcaaaaccaattaatattaacattttttattaactcctcatttaaactattctttttt

SEQ ID NO: 46758 - DNA, 938 bp, Oryza sativa
attctgtatgcacacatttcacacacagttaaacacaagcagaaaatgagagcccaggccataaattcacaagaaatacacatactttacactttagctgttctcacgttctatacttctaaaatagttgtccctgtgtgattcaaattttatctcaaaatagtaggattcaattttatttcaaaatagttatcacttcatattactccctccgtcccaaatataacaacttttagcactcagaatttgctccaaaatataataatttcttaactataattctcttcctaaccaatcacaactatccactatctacttttcccacctacctctttctgaaccaatcacaatatctttctatttaattttacctactttcttatattctgggacggagggagtaccctatcaattaccttccattcaaatatctcgttattataccctcaacaagggcggatccaggaacaaaaaaaattagggggggctcaattatgcagtttctttaacctctagccatttaaggacctttagtttatcatttatggtgaaaaaatcgaaggagtgctccgggaggtatccatgggtatagagttccccctgcacccacgttggatccgcccctccctcaactacctaaccatacaccattcaattcaaatttctctttattctatctccaatctccaactactctctcacacctaaacatacaccattcaatgacgggcactataatcttctctttaaatcataatctacactaaacaacctagaatagtaactgtatgggaacggaagagtaacagtgctcatatacctcgtagactgggcaagttctctcgtagccatggacatggccgtacattgcgatgtcgaccttgtacttctgccaaagcggctggaagctcttccttcccatgggcttctcggttgtg

SEQ ID NO: 46759 - DNA, 735 bp, Oryza sativa
  unsure (1)..(735): unsure at all n locations
atcttacgttaccgatgncatnncnnnncnnnnnnnnnactntanaagatcccctcaatcttttcttctccccataactgaactaaaataaaagctcacttatattttccttatccttatttcaatactctccggatcgaaaagtaattttctaaccttgctttctattccaaacttactttttaataatcttaaatagtaaaccaatttgtcctgtgtcccgataataattccttcgccacttttttcaaacttcggtcgtccaccacgccccaaaatctaataaaaaataaaattaacattataaacatagactttaactaactaaaaatgaatatatcacctcagaatcaatgcaagttcaaaaccgtaccttcatcacatcaaacatccccaaatcttcccatccaccagctttaggatcatataattttcttccctttttttgggaaatcaccccatttattaatgtttcctttactaaacttgaggaaattaattctaacactttacatattaacaatatattacaatttaccaatacagtcacaaaaataatcataatagatgcccataaaccttgtgtttcccatacacattttttttttacccaaaaaccaatacttacctttataaccactttattaaccccgtaatttcacttccccaaccaaatttttcctttcaaacaaagacctttaacacaaattttttaccaccctttcaaaacttttg

SEQ ID NO: 46760 - DNA, 742 bp, Oryza sativa
  unsure (1)..(742): unsure at all n locations
cacatcttgtcnaaaactagttngtcaannnnccnnnnnnannnnanaananccccattggttgtatttttttatactacgttaatttttcaacccctaaatttaattatctttttacattcttcttcttctaaagaggatgtacttcttttactatctttttactaaccctttctcttcaatctttttatccccacaaaaagacttcctaaaagacttcatttttaccattcctttaatttcaaattttctattttcttaataagtttatgtacaatttgctcaaattttttccttccttttcactttgaaaaatatgttcaaccattaaactttttcaccttaaaaaaatctcactcaatgacatttacaaataatcctaaaaaaacataaactttttatcctaattaaacaataatattaattcaatacctttttctttatttctttttaaacaccttttattaaattttccttattctctttaattattttaactttaaaaaaatttaaattaatctctataactcttcattgttaacttatatccatttattattcttaccaatcataatgctttcaatttattgatttgtgctttttatgcaacaaattttcttaatttcatcctttatttggttttcatttggtcctatttacctttatatcaaaacaattttaattgaacaattcttttttttttttttttttcaaaactcacaacacaaatctcaatattttt

SEQ ID NO: 46761 - DNA, 563 bp, Oryza sativa
ctattgagcgatttgagtagggtatccgaggaaacgttttgtgaaattttgtacgtaatcgatcgacaattcacataggaatatatgcatatcctctacaagtccacatcaaatcagtcatagtacatagtaagtctttaacacaaataggtactgcaactaccatagtaagagagttataagcaacattcacctcagatagagtttagatccttaccagaaacagtctcttcaaagcatcggtttttgtcatgatgtgatgtgaaaacatgaacatcatgaccatggaccgcaagctgacaagccgcatcgactatcaatctctcagcaccacctacacaaaaacatatgttttctttgaacaattgagatctagtacaatgctagaaatgctgccacacttagtccattggtcaatgtcctataacctgctgcaatactgctacaacattttttttctcgaaaatgttcttaaaaatctcacctgcatataataaacaagccgcaagtcctacattcaaatgaaaccgtgcaacggcttccccaaaaaataagccaattcg

SEQ ID NO: 46762 - DNA, 1204 bp, Oryza sativa
ttgcatgtcttgtcctttacttgtttaaagaagatactgttacatgttctgcgctaatcatcgtcggcacatccaggtatcaaaatgtaacaatgtaaattttggtcaaattgaaggacaaaagactgttggagttgtggaggtaggcaacatcttgagcttgcaaaactttggaatatgaccttttcatattatgtaacttatatgtaatatctagcaagttcgtttcatgatggtaaactcctgtagtccttgtgattctcagccatcaaaattaggccaacacagaactttcactctccccatgtccttcagtacttgagtgttgacttgcacacctcattcttaatggctttattgaaatgaatttcaccttaggtaatggatattgaggagatggcctgggctccaagatatggtttgaaagggattattgatgcttctattagatcaagggtttcatgcaatggtagttcatacgacagagtaatgcctctggagttcaaaactggtaaaggaactagtggtcaggtaagcatatgctcctggatagtggatccacttgaagatatattatatctttttctggcatgagatatttttgtcaccggggttctggaaactatttatgcaataaattagtgaagtattgcaacaaccaggcttcttgaaagattgtgctgattccataatccatattaattcttacaagtagtcatgctctcaattttttaatcaaaacctgacgagttcattgaggtttatattgcacaggccagaactgttgttttctgtctgttttccataatgtaattactggttgcttacttgaattagattccctgctctattttatccaaaactttaagctttagttacaattgactagaaacctgtcaaccacctagtcatgtccattctgtggcaacaaccaatcaataataatgtcctacaacaactaatcgtaccttaaaaaaacccaatcatagttcattacaaaataataattaatcaataatccggagcctcagttccattctactttcacaaggtcaacatccttcagtagttttgataattaatacatgtcacatgtagcggcatccaaatatatattttgataccttttttgaaatgtgattgtgactattagtgttatctttactttatgtccatttctgaaaagaatattgtgttatttttg

SEQ ID NO: 46763 - DNA, 1168 bp, Oryza sativa
attttccccagccaagtttggtttttttttaaccacccaaaaaatgtggcccccccctctctttttttttaatttaaggggccaaaccaacgtgtttattaattgaataaaaaggggcgaaagacttcccttagtccgaaggcttgtttccaaagtttccccgatgaccggggaaataaaaactggacaaaataattcctttgtagaaccaccaaatctttcttcaagagtcatcacatgaatggatgccacacggttttctgcacataaccacaggttcaaaaccttattcttttataaaatgggtttttaaacagtctggtgggcccatttgttcaatccatataatacagtggaaaaccaacttaattttttttcccaacgggcgaagaggccattccgcaatataggggccgggagtttattgaatattctggggaacacatgaccagtgccacataatcttttttttaaccttggaccagttgttccgtcttaaagtaagtgtttctaaggtactttaaccttttctcacgcccggggaattgaattggccttctctggtccccatcccacgcaaattcaggtcaaagaagaaggaaattttccagcccatccattcaaatattggaacaagccattcttccccatcttatttgtccttggatgttccaaatggccatcatatagattcatttggaaaaagcaaaagatccatatatctttttttgcgcaagaagttgcagcttgagacagctgatcagccaggagaacatgttgaaagtgtagattttagcctcaaatgcggtgattctgtggtaaaccttgtacactttctgtattcaatattcagcaacattactatgttagctatttcaagttcccagcaacattgatatttttattgcatatatttggcacaccatattgcaaatttgtaatgtatggctccatctcattttgtttggagtgtagggttctttccgtttgaactgttatgtgcttaatgttggtaaggaagtagaactataggttcatagaatatgctcagtgcatataaggaggttaaatggcaaatatcataccagttgaaaacttctgcagctactgctaaccgatcaatcagcaacagccagctaacactttggagtattgtagcgttatatta

SEQ ID NO: 46764 - DNA, 564 bp, Oryza sativa
tttcagaactttaaccaaattttgttctaaacatataatacttatgaccagagggagagttttagtttgtgcttgtgtcgatgattggattttgacagtgaaattttagtggtgcttgtttgaaagcataccaattttggatttttagaacttaattaattttacaattctcaaggacatgaactaatattgtggccagcatcagaacattctttttttttccaggttcatgtagaaatcacatttagtttatatgaaaatgctacaaaatccacatggaatgaaaaattttgtgttctatagaaggcatgaaattaaataatagggagtataggcaatgattttctcatgtctagtactccatccatcccaaaatataagaggcctataattttaggaaaatccatagtttgcaattttgactaataattaaactgacaatatactacgtgcttagtactaaggagtattatgtatgtggcatcgttatattcgtcatattatgccaattttgttgtgctaattttgtggttgttgataatatattatgaaataaactaaggg

SEQ ID NO: 46765 - DNA, 562 bp, Oryza sativa
aaaattttttaaatctgaattgaatgttttcaagcttgacttgaaaattttcaaatataaatttaaactttcaaatatagagttgaaagttttcgaatcaaagttgaaaagattcaaatctaagttaaaagtgtttaagagaattaagcactcccgtgacgattttttttccggaaaaaaaaagagagaaacacgaacgggagtttggcttttcttcgtacgtgatgccgaaaacaagtgggcccaccgcttctctacgcgcgcgcgacttaggtaaagggcacgtacgcgctaattagccatccccgaaataatatgctatggaaatctgcattctgcgagcactcgaactcgagtactcgacggctcgatgccatcaaattgatatgggctactgggccgtaagcgattcgcacgcgttatcagatactgggctgtatgaggcccaatccacccgcacatcaactcagctggaatcgtgacgacacgactagcgagagcgagttagcgagcagagatccacggcccgcaacggcggcggcggcggcggcggccgaagccc

SEQ ID NO: 46766 - DNA, 570 bp, Oryza sativa
ttctatgtccctaagcgtgaaaaaaatatcaaaaaaataaaaaaaaattaaaaaaaaattttttggggggggggggcgccagccactctggcgcgctccccctagccacctcagcattgccccgccacgtcggcagggggacggcgccagagaggctgcagttggacgacggcgccagccactctggcgccccaaaaaggaccatttttgggataagtttttccaggggtctatctgcgaaataagttttttaaaaggaccaaaatgtaaatcatatccatcctgtacccacactcgatgagaccgcgcggctgcctggtgcgcgcgagatccctgagcgacacgaacacgtgccgccccacgccttcctccacctcgtccccctccgagtagtagtagcaatactcgggccccggcacgcacggttgctctagaggcaaacccagcagcaaatccttggccatcttggtcgccgacgcggaacgccccggcaagaagggcattatcgcggtgtggaagcccctccgtgtgcttcacccacgggaggcttcacttccggcacaaaaacct

SEQ ID NO: 46767 - DNA, 817 bp, Oryza sativa
tttttttttactttatagaagtcccggcaaccgccttactcatttgcttcacagcctgcctgacgtccctccctttaatcgtcatttaggattctatttggtgttttattaacaatttttgtatggcgtattaataccgttttgtgttcttttaatgcttttattttttattttcaatttcagttgttttaaaattgtattcctactttaactctctttttatttttctattttagatattattttattttttattctaaattttaattaatctcgtattgggttcttatatggatttttctttcaatattgtttatttttaattccaaatttcagctaattttaaattgtattcctacttgaactcttcttttattttcttttgctaatttcggatttatttatttttttctgatgtttaattaatctcgtattgggttcttatatggactcttcttttaatattccttatttttaattccgaatttcagctattcttaaattgtattcctacttggactctcatttccttttctaattttggattttattttatttttatttcgaattttgattaatctcgtattgggtccttatatggaaatttctttcaatattgcttatttttaattccgaatttcagctatttttaaattgtatttctacctggactctctttttcttttctaattttgaattttattttatttttatttttatttttgattaatatcgtattgggttcttatatggaaacttctttcaatattgcttatttttaattcccaatttcagcattttttaaattgtactccta

SEQ ID NO: 46768 - DNA, 1195 bp, Oryza sativa
  unsure (1)..(1195): unsure at all n locations
attccccttttaaatggcccccgggcctttttttttttttctttttcccataaagggaatttaacccccacgaaaggggggcctttttgaaattgttaaaaaaaaaaatccctcccaaggacacattcccctgggcctttaactccgaggtgggcacccttggccacaccatttttaatgctaacgcatgttaaaaaaggccggacactattccgattttagtatccacgcatcccaagtttggttgtcacataaaaaaaatcaagccttggtcctacttccaacactgttgaagctcatgatgcatccattggtggtttatgcattggagctttgaatttattgtaagtccaaaatcagattgcttttgctctactactaaagaagnnccatatattccccattaagtgatatcgaaatctatgatcatccactactcctggctgatgtgaaagcatgcttcgacttggatctacgggtgctcttggttaatgacaatgccaaagaagtgttgacaagccgataattttctttgtccaaggactggcatttgttggaaacctcattgagtcaaatttctctcctgagcaattaaccaatattattctaatttcttatggggtcaagaatatcggggatagaatttctgccgaacttgaaaattggaacaatggatttaccagtttgaagggttccccagaattggaaagagagaggtttatttgggcaagcataaattatattaatgaagtcattgtgatggaaaattttaatgcccacttctggggagtctctgatatgagatttgagttccttgatgttgctgctgatgtggacatgaactcaaatttgccaagtatgtgtttttgcttccgaacatcttcgatttataccaatttacctcatttttttttgttttcattacttttgtttgatggtggagctgactttgcaaggccgactcttaaggaaaagtttttacttaacttcaaattggagctggaatataattctttctttgcttttgagtacgccttcttgagacttatgggcaatatcttgttacttagtagcattcattgtctagtgttgttacatgctgaatcatgtactgttattgtctctgtattttcagccatgtgtcttattttcgtatgtgcttggaagaaagaatgtcgcgtccatttcaagacga

SEQ ID NO: 46769 - DNA, 539 bp, Oryza sativa
tgatgaaattaatcgttttttgtggctttctggtttgctattcgatatgtaattgtattctagaagcattcctcggtcgagtctataaagaaatggcattcatcactgctgggcatgtcaagatgtactgcttcagcacgcaatttggatatgtgtggaactggtccaggtggctgtgacggtgtggaggacacccaaagcccatttcggactcctccatcactgtcctataggtgcagtgaggtacatacagttatacgatgaattgttgtgtgaatgctagctaatgtagttccaaatcgtgttgatggagtaatggttttgtgcatgaagcagcagcttaatgggggtgtggtttctgatggaggacctgagcagttgggggcaggggagcacaaaaaggtgaactaagataacactaaatgtcctgggtgccattggtttcatgatattattacatgtaagaactaagttgccaaagaattgatcgacaaaactatgccatttctttttaccaggcactacttgatcttttagat

SEQ ID NO: 46770 - DNA, 1732 bp, Oryza sativa
ttaaagtgtgatagtatgtatgcacctttgttctcaggtagcttggcaaaatggcaggtcagacggatcaagctgctcccaggtattgtgttctatatatcattttcttcttgtgataatgttgtattgaaatgctccatcaaggagcgcctttataattcctacgtgtaggttaatcttatgcagtattattgattctattgtgtcccaaaaaatactatctattcaacttgctggttctaccgtatctttgtggggacatagtgaaatggttgtgatctgctccggaaggtaggaattccttccaaagtatttataaatgactaggaataattatttgaaaaacttctatttcagtagaaagcacacgataaagcaagattccattcacatgagcatgacaaaaattagcatgaatcttacctgattgatttgcagtttctttgtacaccatgttgaagccgttggcttcagctactgtttcgactagagattgtccttagctgctgaacagtaacattagtgtaaatcagcttacaacttagcacgggggactgccttgctagtagtttccattaggttatatacttagatgtcgtacttggattagtacagtcattaagtgcttaagtgcgtgtaaagtatgcgccctctaatgctcgattacttggctaacttttctggctcgacgcgtgtaaagacagtatcgtatgattcggatccaaccttgaggctcagatcaatgacagatcggcaccggtgtaccaatctgaatctgtgttgtggtggatgatcaaacgatcgagtataaatattccgttatctaatgtgatagctctgctttcattcgctacatgcaaccttttcttcataacaagtttttgtaaacttataaagctataacatatgtctacataaactagttcatggttaaaaaaatctacgctacagtggtatttacaactctgtttacatggtcactcacttcaggtcgacatgaaaaagatcgatttatcaagccggttaaaataattgcctaccatagtacttaaataactcaaactatcaaagttcaaagataatggtgtcttagttcgctcgcacgataggtaggccccaagttgatttgtgagaattgatagacatgtgtgcgcacctagagtagtggaatggcatggaagaatccggacacatacttgtttggtgccggaacaagttttagtttaggcaatttgtaaaaggttagtaaaaaaaaagttcatcgatccagtctacgaacgtggttgcatacaagtgtgataagcactggtggagaaaggggctttactcccggttttcaaaccgggactaccaatccgggactaaagatcactatctttagttccgggtgaaaaaaccgggagtaaaaatacatctgttaccaaccgggactaaagatagagctagcctagctagctagatccggttgctctattatttttttttcttcattatgtttttaatatattgattttactatatccccatcccaaaatcccaaataaattatccccaatcctcaaattcccaaatcggccatattcaaatagatcacaaaatcttaaaacaaaattacatcacaacttctacaaaattcatcataaatacatcacatattcacggacatcatacacaaatcaaatacacagatccgaatcacaaattcttaaaaaaaaaaagaaaaaaaaccccg

SEQ ID NO: 46771 - DNA, 2047 bp, Oryza sativa
caagactgcccgtgccaccaccgccatctgggagcccgccggccgccgatgggatgatggggagggaaggagaggagttagaggagaagttagagaggaggaagaggaaggggtgatgggggagggaaggaaaggagttagagcacagaaggagtaggaagagcaagagatgggatgaagagataaggtcagtgcaggaagaggtgaagagataaggctgcccgtctcctcctcctcgatctctcagatggcagatgcctcgtactctccgccacaatcttttgttccggttggtattaccaaccgtgactaaaaatagatctttagtctcggttagtaacaccaaccggaactaaagatagtaggcatcttttttcccggttagtgttaccaatcgggactaaaaatagatctttagtcccgattggtgttagattaaaaagcagctctaaacttttgaactgggactaaagataatatttaatcccggtttttattgcaaccgggactattgtggattttggctaaccgagcaaagatcgtttctccaccagtgaaagttactctcaaaactaattcaataacatgtggtgagcaatgtttgttatcataaagtgataaaccattgccgtgacaatgaccacactcgtgacggtaagcagggaaattctgtatggtggcttcccaaaataaatcaaacaattattccctctatactaaaacataaggatttctagaacagtgtttgtattgtttgtgatatttaaacacacattgtattgtttgcactcacaaatacactgtaaagtataaatttactagcttaaaaggtaataggattagtttcgtatggaacgcaccgtttgaaaaaagtgctaaagaaaccgaggtaaactctataccttaatgagagaagaacagtgcctaccatttgtaatttttatccatagttcttcgtatattttatattatgagacgttttgaattttttttaaaattaatcttctctgagttttattaaatttgtaaaaaaaaagcaacatctataatactaattggcttcattaaattcaatgttggatactttgtctgtttcatacgtaagtcattctaacatttcccacattcatatatatgtatatatatctagatttattaacatatatataaatatggaaaatgctaaaaagtcttacattatgaaatggagggagtatattttaataatatatttgttttatctttaaaatgttacttttttatataaatttagttaaaacgtcttaaaaaagagagggtagcaaactatacctggttaccatgcgggagtcatacggcctcatcttttcgtttatgcttatacttattagctaaattttgaattttcaacattaaatttggagttgaatttagggttttttcagcctttgcttttagatcactaagaatacgtatataaagtctttattcacatattattttccgtttgtaaatatgcagtttcgtttattccgcgaataagcgaaacgatggggccagtatactcgtatcattcgttgttaagggaactagctgttgttgcaccgtaacgccgtagcggccggctgctgcagaaaaccaagccccaactttttctgaatggcaaccacatctagcattactaccgagcgaagctgaatcaacaacaacaaaaaaacacacacacacacacagacaccactaccacatatacgcgcgtatcgtccttgtagaaatcagaatcggccgacatgatcgcgactttttcctgcgctgtatggtgtgtgagtgtgagccacattggctaataaaaaaaacgagatttgaaatgagaaatgtccctccaacattttttaaaaagaaattacgatttgaaggaagatgtttccctccaagtattttttaagagaaagttgtgaatgtgttaagaattgaacatgaaatcttgaagttaaaactacaccccttgcaactgcattattaccaatgtgagatacattgctaataagaaactgttatactgctaaaa

SEQ ID NO: 46772 - DNA, 1537 bp, Oryza sativa
caagccccaactttttctgaatggcaaccacatctagcattactaccgagcgaagctgaatcaacaacaacaaaaaaacacacacgcgcacacagacaccactaccacatatacgcgcgtatcgtccttgtagaaatcagaatcggccgacatgatcgcgactttttcctgcgctgtatggtgtgtgagtgtgagccacattggctaataaaaaaaacgagatttgaaatgagaaatgtccctccaacattttttaaaaagaaattacgatttgaaggaagatgtttccctccaagtattttttaagagaaagttgtgaatgtgttaagaattgaacatgaaatcttgaagttaaaactacaccccttgcaactgcattattaacaatgtgagctacattgctaataagaaactgttatactgctaaaacactgttgtggcaataagctaagccaaccacacacaatgaaccataccacagttaccacagttaagttaacgtgacaaaggccatgttcggaactataaattctcacttttactcgcatgtttcgctatgcacatgtttttcgaaccgtaaacgatatgttttataataaaataaaagttattttaaaaaatcatattaatattttctctaaaagaaaaactaaaactttattaattatattatgagttaatggactacctcgtttttcgtgcgagcataagcttctttcgcaaacacagccacgaagttatacaaattttgacaatttgaccctttgcaaaaattaattatacaaatgaaccgtggccaaaacttattttaaaaatgacccttttgttcagtgcgaaatcccatggcgctgaaattagacacctcagcgccaaatagcacggcgctgaatacacattggcgcgccgactcagactcccatccacggtggcacgacattcaattccagttgacgtggcgctgaggtgtctaagttcagcgccataggatttggcgatgaacaaaagggttattttttaaataagttttggccatggttcatttgtataattagtttttgtaagagcaagtttaatagtatagccaactactaattccaaattatctatagccaatgtaatagccaattcatacaatacttgcttactatgtatactattaatacctgatccacctgtcatacacaccgtacgttcttggagtccgggctatggttacagatctgtagtccgtactcttctttctctcctttatctttttaaaaatcaccttccctctcttccttatcctttaaaaaaaggtatggttgcttataagcgggttttgcactcctttaagggcaaatggccaaaatgtggccaaagttagcctgaacaaacccttgtttactgggaccgccagtttttttaaagagaaaaatttcatattggcatgggtggccagcggtaaataaaaaggggaatcccaatttgcccctctggggtatacggggaaaccaaattttgtgcggcccggtgtctttacgcgcgaacctggggt

SEQ ID NO: 46773 - DNA, 2800 bp, Oryza sativa
aatgtgacatattctaaaacaatgaatctggacagatgtatatccaattcgtagtatgtgtcacatccagtactatattgattttttatgggacggggggagtactcaattctaaaacaagttaatcattgatatatcctaataatataaatctggataaaagaaaatatcattatacatacatgatatgatttcattccaaaataatttaacttatatatagatcacattatattttaggttaagttattttagtacgaaggaagtagatctagaattggtggctaaaacacatcagctccatgcatggccagttggccacagaaaacatggtaataagtgcagggtgtgcagtacacgaaatgaaaccggagcaaatagcaaaatcgatcgtccacacctctttaatcactttagctgctttaatttggttatagtggatgaatatgcatgcatgcgggcgtgtgcagcagcagcagtagtaggtgcttgattgacagtttgagaatgagatccacactctaattaactctgaagctgacagcggaccccatgcttcctgctttccctgacagccgtcttctgcaattatcggagtcgaggtactccctccgtcaaaaaaatagacaaaatctgattttcgtgtccaacgtttgaccgttcgtcttatttaaaaaaattataaaaaaaattaaaaagataagtcacgtataaaatattaatcatgttttatcatctaacaacaatgaaaatactaattataaacaaatttcatatgagacggacagtcaaacgttggcacagaaacccacggtttgtctttttttttggacgaagggattagctacctatatagtcatgctgatgcgtgtcatcgatcagagtttagtggccacataaggtgtgcactctgggaagccaaagagaagagagcagtacatgcatcgccatctcttatactccttccttccgtcccataatataagagattttgagtttttatttgtactctttgatcactcgtcttattcaaaaaaaaattagaattattattttttttgactttctttattatccaaagtattttaagcacaacttttcgttttttatatttgcacaaattttttgaataagacgagtggtcaaacattgcaagcaaaaactcaaaatcccttatattatatgacggagggaatactaatttctaaccctgatttgggtgttactttccacttggcaattcagccaactggcgtacattatactgtgtcttgtcatctgtcactctcctatctcaaaccagaaatcactttgccgtgcatgcaaaggcagagcaactccatgtgtagattcagtaaatcggtagtaacattagtcatcatgtatgatttagcttttcgaacatattgatctgatgtgcatgtcatgtaaatacagtcatcaagacaaatacgacgtcctcgtcttttaataaaggaaataaacctcatgtaagagagtcaagttagtcatcttcttcatttaaaccatcaaagaaacatcagagcaacttccgcacatttcttagataatgaaaaacaaataaacttcgctctctcgctcatacaagtacagccacccttgtattagccatgtcttggcagctactcaatcgactacaatctgcaggttgctagtacacaagaagaaggccaagaattacaaaattaagacaaatggatgggtcaagacaaaattaagacggccaagtacgtcatgtaaaagcgtcaagtcaatagtcctttttttccctaacatattgtcaaaacaccaaaggaattgaagttccacacgaacactagcccatccatgtagattccttggcagccacgctcaacaaatttatactatgcaaagaaagggagggaaaaaaattaattaagacaaatggatgtgtcaaaagttagctgaattcgtgcggcgcaagagagcagatgaccaaacaatgctagtcaactcaagtcatgcagctcccttgttataattaattaatcatcgtattcgtatatatattgatatactgaactaatctgtcgttgttgttgtgtggttgtcatgcatatactgtcatgcagcccaacgtttagtgcgatccgacgcaggcaagcacgttggctactttacaccataaaaaggcagttttttttaaagaggacaataaaaggcagttaagcactgagccagtcattacacacaacgctaatcttcgtcctttctcttgtcctgatctgcaaggaagagtatatacagttctgtgctagctaccactcatcagcctaagtgatcgagagatgtggatcgatttgatccaacattagtgctgtgtttaggccttaggtgcagaatcataatgacggattgcgaaagttagcaccgagtaagcagcagagtcgtttttagctggtggtggctggcgccgccgccgcgcgcgccggtacggtcttcttctccggcaccggtgcggtgatgggttggtgccttggcggaatccaactctgcactgcagtctgctctgcactctggtcgacgcgtgtagaggacaggacggaaggcccaacaagtgagcaggtaggtctcgacaatgtgtttgggcctttagaagtcatgggcccaagcgatcaagttgcgggaagggaaagaagtccatttccagtccctctatagttcaaaatgacaaaactgcaactttaatgagaaaactatcagtttgctgcaacattagcggcatgtttcagtttgctgcaataatagcgtgaaaaat

SEQ ID NO: 46774 - DNA, 1454 bp, Oryza sativa
  unsure (1)..(1454): unsure at all n locations
aggccgccccngtttgacatcgattgannatcctagctcggtaccccggcgcgaggcagcaacctccgcggcgccgcaggcccaggacctgcaggccctctctccgcctcaccaagtcactgcctccgtctccgatgcatatcacatccgtacgtacagaaattttcaggttcgcaacatttttttagcataccatgaattcatgatacgaatgcaatactatctcatctttaggattgtgagggtattatgccattatactctcacgcaggaactctcctccgtttctgtctatttgattcctctatggccgcattcagttgattgactgataccgccatccgccgctgctcgggtgctctgatcatgtgtactgcactactcctgtctgtctcatatggcaaatgtacattgatgttagcactggccactaatcggtaagatctagattcgtttcaattaatatgttgcttttctagctttgtaatttatatgagtttagccattagtatattaattttctcaatcatcaatttgttcttttatcacaccttctagaaagtttaaatggtttgccattttatacattgagtaaatgatttagatgagattgacattcataccatctttagtaactatgcatttcaaacaaattttaagctgatatatatgaagttttcaatatggatattgattttggaatgaagtatttatatatttggtacatatatattgactattatttagatgtttatatcaggggcccctgtttttaattttgtcccgggccaccaaaacctcaggacgggccctgccctctattaagggaattcgtttcattttttgttccactaaaaatgtttcatcgagtgtacttataatgtttcactatgtatggatcaaatgttgcagtgaactgaaacattatttcgctatttgctgaaacattgtttttatataaggtgaaacaacgtctgatttaaacgattgaaacatttccgatttacttagtgaaacaattccgatatatctggtggaacatcgtgcaacatttaaaaataattcaataataagcttaaaaaaattcgttggaatatatccatgtgtggttctgttttgaagatttaattgcaacgaatttaatggtgcaatcggatcatgatttagataaataatttaagagaaaaaatagtttaaagtgtttttgtacacatgtgtggcgctaacgtttttcccccacccacgatcgggcgcccgatttgtagggggatccttttattgttggagttggagggtggttatacttggtttgaaggttacgaattagactttttccttgccggaagcaaagtgcgggccaacactcagaagaattcgaaatgtgagaggcccaaaaactatggatatgggccttgagaagaattcgacatgtcagatatttgggcctttagcca

SEQ ID NO: 46775 - DNA, 1172 bp, Oryza sativa
gatgttgagcctgccaacggaagtcaaatggttcaaaaaagggcttcaagtgatttaaaagttaccctagaattattttccatcacaatgtttttatccccttcaaaagtaaagtgttccttttaacatgagaaagttttaaggaatttccatcaccctcttgagaccaaccttcaaaaattttaagttaaaataatagtttccaaaggatttggttttggaataaggattaaaaattggaccatataattgcctatatttagatgttatatcaggggcctggtttttattttgtccgggccaccaaacctcaggaacggccttgccttctattaaggaattcgtttcattttttgttccactaaaaatgtttcatcgagtggacttatatggtttcactatgtatggatcaaatgttgcagtgacctgaaccattatttcgctatttgctgaaacattgtttttatataaggtgaaacaacgtctgatttaaacgattgaaacatttccgatttacttagtgaaacaattccgatatatctggtggaacatcgtgcaacatttaaaaataattcaataataagcttaaaaaaattcgttggaatatatccatgtgtggttctgttttgaagatttaattgcaacgaatttaatggtgcaatcggatcatgatttagataaataatttaagagaaaaaatagtttaaagtgtttttgtacacatgtgtggcgctaacgtttttcccccacccacgatcgggcgcccgatttgtagggggatccttttattgttggagttggagggtggttatacttggtttgaaggttacgaattagactttttccttgccggaagcaaagtgcgggccaacactgagaagaattcgaaatgtgagaggcccaaaaactatggatatgggccttgagaagaattcgacatgtcagatatttgggcctttagccaagatgggctttagctttccaatttcggctcggagcttgggattgaagatgaacagagatgggattaggtaagcatgaaaaaaaaatatttattaatgtactgaagatacaagttggatgattcattctgatatatcaatatatcatgcattacagtggtgagatatcagaaccgacaacacaagtttgatgcttcacttttctgcact

SEQ ID NO: 46776 - DNA, 564 bp, Oryza sativa
  unsure (1)..(564): unsure at all n locations
tttcttgtacaccacttgatcagaggaacgcaaaaaatggtcatgagatttgcacaagttccatgagggaacgaaagaaactttgccgtcgtacatgggcttttagaaccgtgtaaggggggcccaatattttatgggccaaatctcacttctggaccaatgctttctcctttcaggcctagttttcaccgggccgtcacgggcccacgtcgcagtctaccccgccgaaatctttaccgcgcgggaactccaatttccaaccccgcccaattcccctccctttcggccattccccttccccttctcggctcctctcctcttctcctcgcctttccaccaccttcccttcccaacccgatcccccattccgccggcgttcggcggcttcgtcgtatcgaaccggctagcgaccggaaagaagaaaaccctagtcctcaacacaaccatggctccacggaagcggacggggcggncngcnggggcaactttcaagaagccgccggcctcgcaggcgtcgcaaccggccagntccgcattctccactttttgagcgccagtcccagg

SEQ ID NO: 46777 - DNA, 774 bp, Oryza sativa
cttcttatgtgtgaaagatgcatcatggcctgaaatcttctcgcgtgtaaaatcagtacagcagttacctgaaaactgttttgcaaatgcagtggatcactatcttgttcttcttttgaggccctggtgtagcagtaggacgactgcattatgactctatgagtcgatgagcagtttagatcgaagcagatatgtacagtagctgctgtgaggcaaatttttcatgatatgtgacggttcctcttactttgaagtcttactttgaagtcaagatgaatctgtgaagtgagttgaccgtgaacccacttaaacaaaattacttaaacaaaattagtgtacccacttaaacaaaattagtgggcaacctatgaattaatccacgggttacttactaaccaacttgacgacgggaaccggccgtgggttgcctatttatttaatttaatctataaagcttcgcgggtgatccacttgtatacctacatcttttatcaggatcctggtgcaagaaataatacggatttgctgttgtgtgcgtacgcgccaacgggtcaactcagcgcgcgtttcggacgttcgcaggctcattagtaaagcacgtgcaggtgccaactcatacaattagtgtgtgattaacgccatatctaacgtgattaacatgagtacgtagcgctatgatctcatacttttttttttcttttttccagtaattagctctattattaacatgaacattttcaaatttaagttgaaagtttcgaattttaagataag

SEQ ID NO: 46778 - DNA, 1000 bp, Oryza sativa
  unsure (1)..(1000): unsure at all n locations
ggcgtcggagaaaagccacncgaagagcttcgcaagagcgcgaacgtcccggcgagctccgtggcganccgcagaagcaccaganccgcgcgtggtcgcccatcacgaactcctccatgatcaggcctggccacgggaccgccgcgtgaagagaaagaagccgcagcaaatcaaaaaagttggagaggagaaggtaaaaccctcaccatgtggaccagaagggagtactcgtcgatcttggccaggttcttccgtctccgccatctcccccgtcaccctgaagagatctggagccgcgagaacgaaagagctgatcagtagtatcaagtatgcagcgaagaggagaaggaggcgatgaggcggttactactactgcgaggaggaggaggaggagccagttaagcggaagttgccatgggcaaagtgggctttgtgggcgggcgtttgcgtctctcctgggcttcctttgtgtcgcggccgtctctcccgtctcgcgcagtggactgtgggaagaaaatggtcttggcacgggggttgcgttttcagttccattgactgtcaagtctgtcacagtttcagagtgtgtcagagatattttgttgcttccttgcggcaaaaaggaaaagggaaaaaggatttgtgtatgaatcacacagatttgatttgcttggaggctgaacgctgaaagcatgtctcgaatcacgcgattatggcaagcgagtactgcttttgatccacgctcatctcatttttatttgtgtagcagagaataaagttggggggaaataactttggtgtttatcattaaatgagatgagcggtagttgaagataaaacgaaaaagaaaattatcatctgattgatacccttattattatggttgtgcttattagtccatcacccagttacagatagggtgccgttaaatatttaaatgtagtgctgcggatctttagagtcgacctgcgcgcatacnagattatgtcaatatcaatgccat

SEQ ID NO: 46779 - DNA, 577 bp, Oryza sativa
acccagccgtataaaaaataaactcaaacggacaaaatatgtgacatgtagaattttccaaaactctatcgaaacggacaaaatatgtcatctattaaaataggcgtaactttctcatacggacttgaaatcaggaaaataatatatgcacggacatctacagaaaaagttacatccaattctccctagctttgccgggttcggtgatattaaatcccccaaattccgcttgcaagattgtgttttcgaggagagaagtttttcggtggagctttggaaaattccacatgccacatatttcgtccgtttgagtttattttttacatggttggttcctgtgagttcctaagggtgaaaaaaatatcaaaaaataaaataaaaataaaaaagttgcacatctctctcctctgcactagttcggagagaagagaggagaggaaaaattctacatgtcacatattacgtctatttgagttcaatttttctatggttggttcttgtgtgtccctaagcgtgaaaaaatatcaaacaaataaaacaaaaataaagggtaccgagctacggtaatcaatgcaaa

SEQ ID NO: 46780 - DNA, 1105 bp, Oryza sativa
  unsure (1)..(1105): unsure at all n locations
tggggctcnnattgatttcaatgcggtgctccttaccccaaagagaaggggagagatactcgagaaatgagtactccaccttatatctctttttttaggatgattggtggcccacatatcagcattactcagaaaataaaaatgcaacaaattcaactgggaattgtgtcgatgtcaaaatttggagtgattctctaattggttcgcttaaggaaaggagtcgattgatggattgaagttaatcgagagatcaaatttatgtaggaatcgtaaatattacgacatgacaaattaattttatctattaattagacaagatttagaaactttcctttttatctttggtaagtttcatctagtgtccgatgacttgtatatttccttttacttttacttttaggaaacttgtgtcgtgtttcgatcacgacttatatcaatctataagggtataaatatatacacttaggatctatagaaaatatttctatatatcaatacaattatttttggcacaccatcatcttttgttccagcgagttcttagttttgagttgggatgtatcggttttgatctccggcgaggatgttccgtcaacttcgcttgtattggcgtggttaagtccgatattctattcaggttgacgcaaaacgttgcctatttgatatattagttctatctttaactgtattgctgtttagagtcgtatcggcttagatatgacttttttaattagattcgatattctgactaagttgatatttctctaatcgtattgttgttttagataaacatattgtattttttataatattgtataataatgagataatttattgaaccttatttataaaatcttacgtccgtcattaccgcgaaaactagaggcatgacaagaaaatgttttcaatactgtaatagcctcctgaaaagaagtactccactacactactaaagaacagttaactaaatctcgagggagatcaaatcaaactagtcaggatgtgttcatcgccatacccaagactctttgctggtgttctttttttctgaaaataaatatgaagatgaagattaagtttttttaaagtaaaacgagatggtatt

SEQ ID NO: 46781 - DNA, 856 bp, Oryza sativa
  unsure (1)..(856): unsure at all n locations
atgagacnntnnnnattganatccgatctcggtaccctattatatgaaacttaataaactgcgtcaaagctgtggtcttcttttctgttgttgcacatcgcaagtttaagcctgaaatatgttatttttccatgttgcccatttctcaataatggaagctttattaaaactcagtcaaatacaacaagatgatacattctaattgagcccactcccgacctctgcaagaaatgcacacagccacaaaacatgacctatctagacccccattgccttcttcatgctcttaatttctgtaacatactgttcacctgtctggctatctgggatttttcaaggtgtacacctacggtcattttgatggaaggtgaaggggaattacctcaactgaacagaggatgctggttatacagaactactaacatcgtaagaacattctatgattctgatgcagacatacagtacagttttaatctaatcaaggaggacgccatatgtgggacaccgcagcgaagtgtaaggagtcctagaacatctaccttaggagttaagagaatctatgagattgtatgtataaacatcaggtttctgcaaatactcttatctaaattcctaatgcctgtattgcaaatactataatcgtagaaaaatagttaatgtagacccaaatatgcactatatgatgcatatcacttcaatttcccatcgaacgagcccctattctacggtggtgtggggattaaagaggattagaggggattgagagagaataattccacatcacaataggtgtggaataaatcccctccaatccctatctcgtanggattaactgaaccaggccttaccggggaga

SEQ ID NO: 46782 - DNA, 2360 bp, Oryza sativa
  unsure (1)..(2360): unsure at all n locations
tgaggcncnncnnattgaaaatcgatctcggtacccttgttctaaaggacttgataggaattttgccgtaagtattcaaatcctgtaaaattcattcactttacttttttttccaaaagagcctaaaggttttgattcctaagaaaaatttcaccatgtaaccgtttagatcaaaggaaattaaaacaaatgaaagtttccctcaagttaaaaaaaaagaaataaaaagtttcctgttgtaaagaatcctgcatcctgatctgcaacatgtctatatttcttcttttttttttcagttctccgggtaaattgctcatgctatgcttagcacaaatcctatttctttcccaaacacaaaacattcctttttttgtccattcttctagaggcgctccgatcaaatcatccggattattttggggttgtttggttcggtctcaaactttgccaaaaattgacacacctcatgttagacacatttgaccaagttaactcatcgtttggtttatggtcacacttatggtaatattctctttcatttctcatggtcccacgtgtcatcaactaaaaaatgtgtgccacactctttttttctagctaaagtgtggcttacattttgttggccataactaagataaagtgtggcacacaagtatggtaaatgattgttgtatagcatgcaaacagcccctttattttgcaatatagtttgtttattttttttggtttgttaatattagctctttttctagagacatgtggggaccgatgtatatattgacatttgacacgtttctctagaggtgcatgatgtgttgtttgttcggttttttttttggaagccattggtttcatcggagaaacatgggtggaaggcgtgcgggtggtgcgaggagggcatagaaggaggatgatttcggttttacaatagtaggaatatagatagttcgatttttctggggcggttaatattggtatttttaagacgtgttgggatgcataccgtcattttaatgaaacgcagtatatattgatctatttttctcaagatgcaagatgtgctgtatgttttgcttttttggaagtcgctggctttttgggagaaaccttggggtgataagcgttcccagtggtgggaggaggaattgcaagacaacaacttctttttatgttactaaagatattttccagttgtactcctttttttctactaagattttagtcttatattttgttttagtgtaccgcgatatatatttacactgtttactgtgcatgatgtgtcgcgtgtttttttttaaagccgccgctttttcctaagaaacttgggtgttaggtgtggggcggtaggaggaggaatcgcaagatgataggtccgcttttatagtagcagacttgttttctagtcatactcctatattttttctcttttctactaattttttattcctatatgttgtttttcagcattcccagggtcctactgtacataaaacccctgcagcacaaggaagcctaggagagagagcagagagtagaggatgacattcccctcacaacatgagggaatgccaacatgagggaatgccatctcgaacccctgaagttgtagctggtcgagctagtagaggatgtcatcatgtcaatgtcctccctatgtcgggcaagatcatgctgccattgacagcagcgtccagtggcagtgtggcactaccatgcgatgcgccggtctttactgagaagtaggctgcctctcgtatagaaaaatgtcgaaagtttcaagcacatcgccattactgcaaggccaagtaaatggtaaaaaaaagtctttagtacaattccaagggaattttcaaagaaattgccaggaactttgngaatgtaggatttttgaaacataaaagccttgaaaagatataattagaaatatcttgccaagccaattcctaaagattagacacactcaaagtttcaaaatatagtttggatggtccataggattaggaagattaaataatgtggcaccagaatggaacaccccgggaggaaacttaattggattccccataacttntaacatcaaaccttggtattaatgactggtagaattttaccgtagntttaaacccgtaaaaatctttcctttttttttttttcccaaaaggctcttgggttttatcctaaaaaaattccttttttaccctttatcaagggaataaaacaaaagaaattccctcttccaaaacgattgtgggggttcttttcacccggggaaaaaaggtgcctctttgagagacaccccccccacacacgggatctttttggcgttttttaccccggggaagggtgtctgcgctcaa

SEQ ID NO: 46783 - DNA, 577 bp, Oryza sativa
aatcgggtggcgtggtgcaaaaagcgagggatcaggagagggatgcgagaaatggaccaaatgggagcttgacttgaagcctgcctgcctatatactaagcggaaggcaatagctcgaatcctagtcggattcgggaagtcaacagcggaaaatgacaggtcgaatcctagtcggattcgcatggaaaaaaagctcgtacggaaacgcgaaaagctcgcatattttgccattgtggtaatgtggtcatttggattagaggtaaacaaactgaagcaaaagtacaaattagttcatcactaaacaagaaaaagaaatgactaagacatcagcatctcgtgactttgcagcaattatgcattcaatttgtaggtttgacacacaatcatccaaatcacatataaatatctatttttaatattacaccgttaactttttaaaatacgtttgatcattcttcttattaaattttttttataattattatttattttagtgtgacttgatttatcattatatattctataaacatgacttactttttatatgtttatacaaaaaattttaaataagacaaat

SEQ ID NO: 46784 - DNA, 1219 bp, Oryza sativa
  unsure (1)..(1219): unsure at all n locations
atacttattaattatttttgttaaaactacttgctaattaattggagcagaaacagattctctgtgatgaaatagatcttcatagctcagatatgatgaactgaagacagtactcgtttgtcagacagtgatttagttggaactgcacttgtactcgttttctgttccattttagtttcaggagttggcagacggtgcatgacaaagaaagatgtcgtaatgatgccaaactatcacctaaaccacattaagagaaaccataattttgactcccaagtaatctggcacacatgatctttcatttctgaaaaatacattatacatgggagggaagtcagcattaacaagctaaaagcccttgtataggtaaaatataattgggtacagaagatggtgtatagatacaagattacaagaggcaatccaccttgttttttttaccattaattaatcatccgccgtcagtaatatgatgttgagaggtgtgaaacttctaactaaatgacattacaggcaaatttcttatctctataatataatttcatccaaagaaaatatgagaatgcggctggatggatggatgacccaatcacggtcaaatgaaacgctcaaccgctcgcaactaattaatacagacagaggaaaaagaacatgcaagtgaacaaacagaagaagaaatnngaccggacagattaacaattcaagatccaccgtcattctctggncagctctncccaaatctcatttaacaactncaaagatgcatttgccgttttgaaaaattaaaacttcttctgtctncncanaaaaagggagaagaagaagaagaagaggaanaccgaaggggatangcnnngccagtgtgttctctttcattacgttcttgacaagtgcattacaaccaggtcttaagttaattcctgtgaaaatgcaaccttataatcgnccaatagattggctcagtgcacgcccaatgaatgtgtcttgccccaggaaacaaagggattaaaaaggttttagtcttggcaaaatctgaataattgatcaataaaataagctttagtagaaaacaagcttggtaatcaatcacggccaatcttaacctaggttatnatttggtgcgctgcacaggccctttaagtgaagccttggaggacggtacttatttgccgtggaatttggatggggtttaccaccaaacgagcgtgaaattatcaag

SEQ ID NO: 46785 - DNA, 1736 bp, Oryza sativa
  unsure (1)..(1736): unsure at all n locations
tgggctatgtactatctgctgccgcggtcgacttaagatcccttttaccccggtaggcctggttcagttaatccctacgagatagggattggaggggatttattccacacctattgtgatgtggaaggattgtctctcaatcccctctaatcctctttaatccccacaccaccgtagaataagggctcgttcgatgggaaattgaagtgatatgcatcatatagtgcatatttgggtctacattaactatttttctacgattataatgtaactatgaaagtgcatatgcacacattactgatcgatcagtcacctttctttatgcggttacaagaaaaacgtgcacgctcaaaaaaccaaccatgcacaccatttatccacatctgtgattataagtgcaccaatacattggttgtgtacattggctttggatctaatggtcgggttttaatccattttctgaaaaaatcattggtatgtgctgaacagtcagatagacctgataaattaaataatccgtaaattttttaagtgcttactcgcatgtggtataattatagacatcatgcatcctcaacttcaccattgcatcttaggaaaggaagtatataatgggaatcaatgcgcttagttcagaattgcacctccattactaatggacgtggactagtggagtattatatcggaagaagtatcaaatcaggtgtattgccctctgctgaactcaagggcaaacttataagttataattctcctttaactcaaagagacacagctttgtggtcagagtattggaaatggtttgaaaagtttttttttcgcgaacgcaaaaaaaattgtacgtcaatatattaaaggaatagagttttttttacacaacgcaaaaaaatgttttaaaagtggcacgtgtaatcatctgccacgggtgcagaacgactttaagcatgcagacaagagcaaaaaaaagcatgcagacaataccaaagacagcatgaacgaaaccagcttcaattgaacacccaaacatactatagtttccacaatatattctccatcaatccatcatcatttcaccggtattttttatccgtcatcgatcgatcggtcgattgcatcaacacgcacaaaaggcaacacagcagctcgagaatccgggcacgtaagctaattattaacacaacataaagggctccacacgtgttgccaaagttgccacgaaatgatgctcagtttttttttaaaaaaaataaccatgtccgttggtgcgatgcgtacggctgaaaaggtttgcagcagaataaatataccgatcgaccaaatacaatctaagcacatgatattcacccaacacgaacagattaaaaattgacagcacataatttctcagcaactgcccgtcagctcagataacctttagtttactgccggatcagatagccgtgaggacagtgtcagaatccattacgaggcaccatttgatttagattagaaaaacagacttaccaaatactacgttcgtcctaaaaaaaataagggaaaattgtaacatgccattataattttgtaaaatttgagatatgccatcttgacccacatgtcattgactcatgtgggtcctatatgtgattgagatacggatggcatatctcaaactttaanaattataatggcatagtcctaattacggggatctcttagagtcgaggtgcgggcaaggagattgtcaatcaaggaca

SEQ ID NO: 46786 - DNA, 1200 bp, Oryza sativa
  unsure (1)..(1200): unsure at all n locations
atgccattatttttgaagcaacatcctgccaaaaagaagaggtgatgcatgcatgctcatcagcttggacttcaggtagaaacatagaagaggagaataggctaaaaggtgtccaatccgtagtagattggcgctaaaaaaacaaccaagtggcaagtgtatgatgatcaaagccaggaaggacactcattggccaagacagaatcaagtcaacaaataatgacataaatatatgcaatctcctgaattgtaaaattactaattcagaaacaaatgaaaggtttatacggagtattctgtaaatggcattgacaactcaaataaactcaaaaagggaacaagtttaaagatgctgaagaatacattatatgttagtttggtatttattataggaagcttatgctacacatctctcttcttagctctcacttatgtatttggttgtattacttgagatcccaccagcagacagatgtaatatgtaaggcacaaagacttattacaatttacaaaccacaagcaagaaatcaaaaacttaagttctccaaaagtaactttgtcacaacaagacaacataagcagacaaataatgaatttcagctcgtactagatagcagagaggggagcattttcaggtacctcattaggcttcactgttattatgtggggagtaaaagatgtccngggaagatcctgaaatcagcacataaaagaacatatatatcagatctggcatataattattgatccacacanagtggtcaagttcagttgaggtaaaagagacccaaaaaaaaactacgaaatctgacaaatgcattatattatcattctgaccgtgcacatggtaaagactatggacaggacaaactacctcctaatgtaaaccgagttgacactgcctgtcttgcaggggcagnggtagaagtttgtattnaaaacatgcaaaaaggacatcggcaaaattttggcatttgcagatatgcccctaaattgctcttnattgaaagaacctttttaaagaaccaatcccccatgatggtcattttcaagactaaactcaatttggaaaaatcccacttcccgttaacacggccctgcaaccccggaggggttaaggggctgggcttcttaaatttaaaaattgcgggcctttggcctatttattcttcaaaatgtggggtcttaaaaatattcccc

SEQ ID NO: 46787 - DNA, 2069 bp, Oryza sativa
  unsure (1)..(2069): unsure at all n locations
cttctccggcgagctggggccgtcaccgctccaccgcctctcctccggctcctcgctcccccactgccggtcatggaagctcgccgacggcggccgcttccggtgatcctatcctttattaatttttttcccgcgctccgacattatttatcccttttgggaggcttttcttttttcctttttacctttacgtgtaaactggaaaagaagaattcatcctggccaaccacgagctggcaagctgtcccactgacatgtaggcaccgacgtttgtcaaaggttactgtttgtcagttgaacatgttgcaagccactgtaaaaaaaaaagcttcttgcattatctatgtacaggattactcctagcttttaaattattttcaagatattatttctttcttgtgtttgagattcccaagccaatagatttagttgtgtgtctggcatggagggaatgaagccatgtgagcggaattgaatgtgagcgttatgaattgaagatctgaactctgagaactaagtactcctacttactccctccgtcccaaaaaaaaaaaacaaaccttgggttttcatatccaattttgactgttcgtcttatatgaaatttttttataattcgtatttttattgttgttagatgataaaatatgattaatattttatgcgtgacttatctttttaatttttttcataatttttttaaataagacggacggtcaaatgttgggtacggaaaccagagtttgtctttttttggacgaagggagtacttcagtagtgctgaactgctaatgtcaacttggagtaactctgtactcatgcatccatgaagtcatgaacctccnacgatctgatgtctgatgagtgggcactgtggatggatcgtggctgatggttgtagaatcgtaatcaactttatgataaggtcataaggataatttatccattttaccatctagtcagagaccttgtccccttttttctctttttctgaaggcagaggttgacatgatcaagaaattcaagatctcttcctgttgtttcttcattgcttttgccggtacactgcgcaccaagcgattgtttccattttcgtccgggaaactataattgtggtatggctcttccagtcgagcactgtttcaaccacacgacgacagttgccggattcagtacacagtccgttggcaacatttactagttcgttgacgttatcgcgttgcatgtaatgtacaggatgaggtactcgaacaggtatgaagttttggtcaacaaatccagcaaatcttcagactggtcctccaacagacgtaggttggctctcccgttctcccagctgcaggttttcgtaacttctgaaactgcatatcctccactgccaccttgatctgaaattctgaatctacatcggtgacagttcttttgatctcgtttgatggctgttgccatcacctctcagtctcaggctctcaccggcgcgccactaaggtcaaccggcttcatcattctcatcgatgcatttaaaaagtcaaactcgatacattaacggctgcagatttggcgaataaacttgctgatgaaaagctcgcaatcatggggcatgcttagctagaaaccaccatcgacatgggcagttgagttgggaggtgattgcctcgacagagattggccggggtttgttgcgtgcgagctcgctttctcatcatctcggatggactcccatcatggcaggtgctctcgctctggtcgagaaaggtcgctacctttccggttaatcagaggttagctccgctagtgcggtggtggtggccgtggccgtcgtcgttgtcgtcctgccaaaagcttgcgatttcaccgaatcgcggtgagctgtgatgcgcgcgcgcgggcgtgttatgggtggatgcaccaacctctgcttgccttgtgaacgagcttactctctgcctgccggttgctgcatctgttgaaaaaaaagaaacatcatgatattagttttgaaaaagcgtttttttttgttcaattttcccaactattcccagagctttttttacacttccgggggggtg

SEQ ID NO: 46788 - DNA, 1775 bp, Oryza sativa
  unsure (1)..(1775): unsure at all n locations
tgtgttttttatggattaaaaatgttgtcacgaatcttacctccacatgcatataaactctcaatatttttcaaaagaacttctttggcttgctgctctaagaattgcgttgaaccgtggccgtcgtcgttgtcgtcctgccaaaagcttgcgatttcaccgaatcgcggtgagctgtgatgcgcgcgcgcgggcgtgtgatgggtggatgcacgaacctctgctcgccttgtgatcgatcgtgcgctctgcctgccggttgctgcatctcttgagaaaaaagaagcagcatgatatcactatggaaaaggcgtattttttgttcgattttcgcagtaatcccagagcttttctacactccgctgggtattactatatgtttattaaggacaggagtatatgaaaagtggattttgattttttttagataatggaataaataaatatcccggcctttactcaaaagagctacagccaattattatatagaagccaattatatgaaaagtggattttgatgaggaacataaagctttaatgctgactgtctgacggccgttggtttgctagtacacattgcttcgctgtatgaactccgaagccacatgccattgtcaaccgggtcaagtacgcgtattattggctttgggggagtgaacactaggttagtccagtacccgagttcttgttacagtattgatgaggccaacagaaaactcctactcgttgacggtatcgaatgaactaatgcccatccgagggagacgattgccagtgcagtactgatttgtttcggttagctgcaataactcttttcagtgaaagcttgacaagaaactgcataagttctgaatccttatattagattatgacaacaatttgcaagcagggacaagtgacaacagtggcttggttgctgcttcaattcagcacagcaagcaacaggatcaaccttcccaatcttgttctttttccgcgtcagaactcaaaagtctcagaataagcaacgaccagccgaagattttctaaaccacgccattttcagcacagcaagtggtattgggccaattaattaggcattctgaatccatctgcagtccatataagattatgcatgtgaccaaggagttgcgtgtcagcttcagttgaggcctttgtggatcaaaatcatcttgctctatagtctagaccaaacatttttcccttttcttcttggtaatttggaaccatgacattataattttgtaacgtttgagatatgtcatcggtatctcaatgacacgtagaacccacatgagtcaatggcatgtgggtcaggatggtatagctcaaatttttcaaaattataatggcatggttcaaattttcccttttcttttatgcctgtcacacacgtacaacagaggcctggctgagtggtaggtcgaattataccgttgaggtccttaatttctgactatacatttctcagttgaggccattaatttctgaccatacattcctgtcggattactttagttttgttgcatgaatttgacaaaacttcaacttacacgggaaaacttggagcgatcaataattggaaaattcctcgcgaaaaaagagagagaagagaaggtgtagcaatgatacgcttctttgctaggtcaaactgagcaaacaaatacttcatccgtcccgaaatataagaatctaaaaccgatgggacatagtattagaaaatatcctatccgattttaaattattatattttggtttatatcctatnccagttt

SEQ ID NO: 46789 - DNA, 1444 bp, Oryza sativa
cggggggcgtcattccctataggtgacctgtagaaaggacacggtgggctttttttataccacatggaaagaggaatttccacaccttatatgtgggaccccggttttccactcccggtttaaaaccccggccattattgtataccctccttaagggatatttaggccggaaactccggtggttcgggattccttttaaggtatcgagggggaatgggtatagcctaaaccggccctcagccagttctttaacaagggggcccattgtctcctagggatttagcattttttgttttgcaattaagggccaataatgtgcccaagttaataaactctttttacccgtcaaaaattcttttggataatgccaatcaaataaaagtggccgacagaaggtgtaatctggtttgtaagcttttaaggccccaaaactgtctgggtaacttggaatactggttttaccatatcatttcctggtatgtataggctgtttcatatgggtaatagtaaagcttagctattagactatttcataccataattttataatatttggtgggtaatctttagagttttctattcggatgcctgtcaagtgtgttcattcgtgaaccttttagagtgttaaccactcggattccttttattatggctaaaaagcagtcggctaagaatgcctctttaggcgccgtgtatgcttttgtcatatgatgcacgattgtgctattattttgttctcaactatatgtttagtttgttaactaatcacatagttgggggctacacctaattaggtgcatctattcgatgcaccatattctttatcttttcgccctttacagtcttcgtcttcgctactcggcaggccttggcatgaaaagtttgaagcactcggattattatctttgagaaggctatgatggttgactgcaaaggtctcgggggctactgtggagattatggatatcccatatctacacggcgatgatatttggactgaatataggataccgaatatagatagaatatcttatttgtatctcgggtttgtttctcaacttgtacatcaaggaaataccttgagacttagtcggttacgactgtattttatctgtatctgcatattccgttagggatatagattatcttttgtaacacggactccttcccatatataaggggggtccgggtgcctctaggggcatgtgttgattttctccaaatcatacaatcaataagatactcggcggattcatccccggacaggagtagggtattacttcttgaataagaaggcctgaacctgtataaatcctttgtctccaaacccattcacttctccagcttgatagccacccccttttattattgccgaaatctagtttcgacaagtagaattaaaacaaccatatttaacagttcgatcaatatatatcttttcttt

SEQ ID NO: 46790 - DNA, 1203 bp, Oryza sativa
  unsure (1)..(1203): unsure at all n locations
aattcagaaacaaatgaaaggtttatacggggtattctgtaaatggcattgacaactcaaataaactcaaaaaaggaacaagtttgaagatgcttaaaaatacattatatgttaatttggtatttattataggaagcttatgctacacatcttttttcttaactctcacttatgtatttgggtgtattacttgagatcccaccagcagacagatgttatatgttaggcacaaagacttattacaatttacaaaccacaagcaagaaatcaaaaacttaagttctccaaaagtaactttgtcacaacaagacaacataagccgacaaataatgaatttcagctcgtactagatagcagagaggggagcattttcaggtacctcattaggcttcacttgtattatgtggggaagtaaagatggtccggaagatcctgaaaatcagcccattaaaagacatatatatcagatcttgcatataattattgatccacacaaaagtggtcaagttcaagtgaggtttaaaagagacccaaaaaaaaacctacgaaatctgacacattggcattatcatttatcattcttgaccgtgccacattggttaaggactatggaacacgacanactactacttatatgttaaaccgagttgacactgcccttgtcttgcaggggcaagtgttagaagttattgtatttaaaacatgcaaaaagacaatcaccaaattttgccatttgtaggatttgcacataaatgggttttatttgaagtcctttttaaaagaagcccttccccatggagggtcattttcaaggctcaacccaaattggaaaattccaccttttctgttagacggggccccggggccacccgaaaagggtaaagagggttgtctttttttttatttaaaaaaatgtgcggggctttttgcgctatttttttttctttaagggagaaggggcccttaaaaaaatttttccacaccccccttttattgcgccccgccgccccctggattttttttttttttcaaaataactcttttcccgccaaaagtgtggatatattttcaaaactcccgcgccacaaaaatgccttttataaatttatagcctctttttttgaggttgatattaaccgcgcgggaaaatgtggcgtgttcccacaaaaatttttggtttttttttccaaccggggggcccct

SEQ ID NO: 46791 - DNA, 2329 bp, Oryza sativa
ttgaactgtatatcatgaagtaattatgatttctctacacagatctgtcggactgtcaaccatacaacactgtctaggtgaagtggatttcctgtggatggtagcgaagtgaaagcccatgggttctcgaaattcaccggttccatggcaacggtggcagtaatctaacccgctaccaccacatatacggcacctggaaaatggaagtcatgccggagaagcatgtttctcagtaccagcagcataagtatggcagacagcttttgagtatgaggctatgagctcctcaccattgtggccattcgcccttcgggagcatgacaagatcggcatgattggttctccctgtaaatcccaggttccatggtcatgagagaactggtttgtaggatcatgatactagcaagagaagagaacatggagtacaagagatacctcgaccaaaacagttgcggcaatctattttgcctgtgcctctgcagatggtgcatggaggatcaggcctttttggtctctccctcctaatatttgactgcatcatacttgcagtgaagatatcaggattggtgtataaacatgtcaaaagttaacaaatgacaattcttaatgtacaatatggtctgagatggtcttgttccatctgtctggcaagttgaaggactcctaactcagtgacaaacagagagggtatcagttggcacagaaaggaaaatagcatgccctttcttaaccccattccccttttcccctgccatgtttccctcgcaatgaatctatgataaatctcatgtactatcacaatttttttcagataatggataacccgaccgctacatcaaaaaacacataaatctgcaaggccaaccttggtatgtttggagttaagaaatcactacaggctagagcaaacacacagtaagcattgctggctgtaaaaacgttggaacaagatctaagtcatgaagtgaatggcaagtaaattttgcttataaagtgttcagtggattgcatatttgcatggtgctaagcttcaggtattcaataaaaaagaagtggaatcaattgctacaaagttctgatacacatgacgaccttaacattctgtaagatggtttgaaatatattcaggtggggaacgcccccctccggcgacttggtcagaaaaaaacaattccgtaaatgtaatgccgaaacaatttctaccaaccatggcctaatttcctcatttttggtactcaattgccgattcctcatgattcttcccatcgcgctagcttctgctgcaggcagcacaatcttacccgctaccctaacccatccccacacctcctctccatgtcccgctgccgaggaaaaacctaccggtcgattcaactacgcttcctgtctacgaagtgttcgacgaatcgcaggcacgagaacaaaaggggagaggtgcagggaaggattgagctcacctcgctgcggacgatccatgaaggtctcgatatgagcacgctaggaggggcctcgtgaaatccggggagcgagctcgaaggagcctgccccgccggcgacgccacgccgttggggccggccgccggcgtcgaagccatcagcggctacaggttgcggtaggggcggtcgggcggatactggaaaggcacggtcgcacagagagaccgacctgttttcatcagttcaggctgcgttatccgcccacgattgggcctctttgggttctccttaactgggctaggctgggctgggctctattctaacgaaacaatgaataagttcactttaggtccctcagtttgctatcgagttcagagtccctagatcacaaaactggataaaacgcatccccaacttacaaaaccgtacaaacgaggtccctcggcagtatagcatctgattttaactgacgtggcatctacgtggcttatttgactaggtcttcgtcccacgtggcatttgatgtgccgtttacgtggcaattcgatccaaaaaaaataaagcctatagggcccacatgtcagttacacaccaattatttaaacatggtgagggccatgtaggccacatgtcagcctcattactccatttatctcactatcctctctctcctctgcatggggtcggagaggagcggccggcgcaaccctagccacagccgccgccgccaccgcgacggaggaagatggggcaaccacggggtcttccatggcgaaactggggaggtcacagcctcacggcatcagatcgaggggagctagggttttgggaggctaagaggaggagaaatgagctagagaggaaagaagccgctctaggttttctagttggg

SEQ ID NO: 46792 - DNA, 1014 bp, Oryza sativa
aagtcgaagcatgctttgacatcagcaggagagagtgctggatcatatatttcaatgtcaccaattgggaatatattatctgcctttagaagaagagcgaaggcaagctgatattgagacttcacatcaaattcaaagctcccaaggccataaataaccaattggatgcattcatgagctcccaacatgcttgaaatgtgagaagaaacgctctcatctttcttcacatgatcaataaactttgtgtacagtgcagaactcctaacatcagaaatagtttcatgcatttctttaactatgcttttagcttcctgtaagtgcttgtcctcaatgtatgcatcactaggatttaaatgccacctggtcgattaattcatttagaaaaggaattaatttgtgaagtcaacaatagcgaacgacaaaatacatcccacaaaattattagcgcacgtgaaaaatcataaaacagatggcctagaaacatagtcgatgattgataaaacaacaaacaggtgctgcaggctgcagcaatctgccaatactataatcactgaagtaaaagaagaacatgcattgtagcaatactataattaatgcaaatctcacttaaacggtaaaatagcccattttacataagaaaccctttttttagggtacacgcaagaaagctgcctaaaatggtgtaatcatctttgcttgagttatccttcattaaatatttctttaaaccaaagcatcattttgtttacttaaaattcacagaattcagcaagcaaataatcatgggaaactggtccaaattaattgttttgtcagtatgcagtcttacccttctaactgagcatcacaattcatttggacattgacataactccagacctttgtagcacaattatctgcatcaaacaaagcagcaacaagtcatcagacaacatagtccatgtaggcaccacgttaagcttttacaaaaagggaaatgggctgcaaaagaacctggtatcaagtgttcaatat

SEQ ID NO: 46793 - DNA, 1299 bp, Oryza sativa
  unsure (1)..(1299): unsure at all n locations
aggtgctttgatgattcttaatcttgcatgtcctgcggccgactctagaggtattcactatagttggaggttgtgttgctggaatgctgatggcaacaacgcccgtgcaggctccccattcatctatttgctgctatcactttgatttcagctggtttgtgccctaaactagcattttctttggccttctgttacattctgttttccaggttgtagtggggagtttcattgctgaaggtcaaaaaggcaaggaagaacatctgaaacgtgagccaacatctgccccgactccgaaccacgcatctggctttggcgcagccacagctgccagtcctccgtctgatggatcatcaagcgaccactccgatgacccacggagtcccatgggacctaatggcagcacattcaataattcaggtcatcccatgcattcttcgtatgctcctgatagctggtcgctatctgggaatcaaggccgttacgatcccgacctgaagatgatgaccgactagataatcctgtgtttttaagctctgttagctgttgacccagtagagtgtagggatcagggattcagagtttactgcaccgacaccaccggcagaggtggccaataatcacgcgcgctagtagtaatcagtatcacaatgcctgaacaaaagagatcaggaacaaataagtagccccagcgcatggctttgcctgtcagggagctaatttttatttttcttaatcgggggcttaaattagcatgctttgtcagctggtaacctactggtacggtttttttatgaatgttcggcacctttttcttttatcgctagcattccgcgtgtacccattcttaattaagattgaatgacatgttattggatattgccaggttatttttggtggggttcacccgggaaaaaccacttcacttcctgaagccttttgggggtaaggatcccaaaggacaagaattttgaacgcctttataccagggtcccaccaactgggtagaattaattttttggaaaatggcnnnnnnnnnnnnnnnnnnnnnnnncgtgaattaacctttaggggcaagtcggaaaataaatttttgtgggtttgggacccctttgaataaattgtatttgggttaaaaacaaagggtttggcgttaaaatgggctacagagttacaaaggtggggaaccagggttattttttttttgggcaagagcactataacccctttgttttttgtggagggtcgcncccggaagcctttgaaaaagaacaccgggtgtttgtttttgctccgctgtct

SEQ ID NO: 46794 - DNA, 2042 bp, Oryza sativa
tcttgctctctttacgtccacgttcatttcatgcatagaagcgtccttgtgtacaatgccgcaactagggtccttcatataggggatatgcatgccctcaacaggtcctccacgtggacctagttagtgtataaatcattggtagtgcgtcacattgtcttgatgcgcagtgcaggtctgtatgcccgattcaataatatagatggtggtacagcttttcagtccggacatcaagcgccggtcacaccatccctcacccatgatagttcgcgctttggacactacggtcaaaccggcccactcttagggctccgagtattctatggagttttgagctgtctctccttctctaatcgtagctacctattttgggtagtttgacatgccctcgggccgatctgataacatatgtgaatctgcaagcatacaacatgtttttggccgaagaacaataattcagccagggaccatagttcatcgtaagggtcgcgactacccttaaatatttattggtggcccgcatccccttaccgccagcgaagatacaataccttcactggtgtgagcttaagagagccgcaagagaagatatcctatcttcgctggcggccttcttaagtagaccgctagcgaagatgtgtttccgctagcggcccttgaccccccaccctcaagattttctgcgctggcggtttttctacgtggccgccatgaaaaatattttccaaacgccatgaaaaatcaattttctagtagtgagtacaacactgcccatggtatgggagtgagctgcaccaggaatatgcatgcttggtttggttggtcagttaggatcatgcacaaaagaatggtacccacttccattatctaggaacaacaaggaatattcccatagcttctgtatttttggaaacgccaactcagtagaagctagaatgttgacatgtgggttcaagagtatttttgacatttcatgcggtttctctctcctattcaaccgaaaattattattttaatgagcgtggtgttcaccagcaaatatcacatatttgagagggtattctatcaaaagtcacttggcgcgatatcctacagcaaaaaccatgaaattgcgatgttctgtagtaaaatttgccatcatataaatacatatacgcggcctccgagagatcaaatgagaatccttaccgaaaaagttaaacatatgtgaacaatttcactcctatttttctcttagactcatccagatacgttaccggatccacttgttttttttcgtagtggaaatgaattggccacctggacgtgcatgatcaacgctgtgaatggtggttcgctcaaaacgagtggtgttggccggcacaccaaggccacacatttcccgaactctccttcgccaccaacagggatgctagaccagcggatctctgagcagcaacacatcaccattcgacacggcacgggcttactgctgttttcatggagctaatcgaggtacggtggtgctttgacgaggtgtgttggaaggtcttagatccaatgcttcattcttctgctgcttgttgtcaactgtttcacttttcctcttttgcaataggtgaccgctcgctgctcataactactttgttctagtatatcacaattcacaagtgaagcattgaagctacaatataatagtatattcggattagttttattgtagaacttcatgtcttttcctattatgtattttttattttatctcttatatatacccttgtaagtcgtatgggaagtggtgacgtcctcattgttactcctctatgtttgtaatcacactactacaaaacatcaaatatgtgccgccactataggtgccggtagtgctcataaaaccggcacctataggcattttcccatctccgcgggttgaaatcgtaaaaaaccggcaccattaagtaattataggtgtcggttctaataaaaaccagcacctattatattttgtatcgtttttttaaacacacgccccttttaatatttaaagggtgccggtttcctaa

SEQ ID NO: 46795 - DNA, 989 bp, Oryza sativa
  unsure (1)..(989): unsure at all n locations
ccacgaatgaggtcgcgggatccggcatcggcggcgggcagggtggcaagatccggcgtcggcgtccgttcccgcggcgtcggcgtccgttcccgcggcatcggcttctcccgtggggacggtgagcttctcccgtggagttgtgaaaaaatttagtgaaaaaggaattgatggctgtgattgatgttggtgaatagtttttgtgatcggtgaattgatgaatagtttttgtgattgatgaatgtttctgtgattcgagatttgtgattgatgaatgtttggttcacggggtgatttgtgatttgtgaatgagatttgtgattcgggttgattcacgggatagatgcgctcaatgcatcggctcgattcgagcctttttttttttttgctcggagtggtctcaaaggtgctagttttaaaaacgggattggtgccagctctctcaaaggtgctagtttttaaaaccctcttgggtgtccgttttcccaaccggcacttttcaactgttctgtggtagtgtcaacttctcaatagtgatcattgccggtcggtcagcgtccgtggtttttacccgcaaaggtttttcacacaaaattcgtgtctccgttatgcatctattttcttaacatctctcctaccataacctagaaacattacacattaattgtcttgaagaagccatgcatgttgcctgttctatatgcttgcaagatataataaatgaaaatttatgtgctatcgaaactgcacagttgtactggttgtcttctcgttcttggtgaaatgaaaatatgctcggttgtgacagccatcctaaaaacataacanagacgttcggaaagtctggctcgtgccgcatggaacggactcgctgtctgcatgcgttgagctcaaatcacgcatagccgaaaaaagactaccatgggcttttgaccaaaaaaatggattggaaagcatgttgaagaacaaatgcatggacaagatatatg

SEQ ID NO: 46796 - DNA, 714 bp, Oryza sativa
  unsure (1)..(714): unsure at all n locations
gatgtnccngtttgaatcatgacatcgctccccacccctgactgtcgagttccttatgacagcccgtcatgaccatccaaccggggctaaatatggaggaataccctccccaggaaattaacttaggattatatataggcgcggaggaatacccgtactgagctgtcaccatcagcggcccacctctcatccgcaatatataaccccaaataatgatatcccgtaatttaaacaccatctatactgattgattgattggttagtggatggttgaattgcatatccaaaagtgataataacgagaatgacatcggcgaaattgatggtgtagtggtggttcagtcagagcaaagtagcagtatagtagttgcgttgggattattgcatggaaagttactgggctgtggatggggtacacaggtctcttactgtcctcttgtgtttttccatgaaatcaatcgaactggtgcaatgcaatttggagttgatgtgacatttgctcaatttggataatcggccgtattatatactcgtccgtttattcaggacatcagaatcatgggctcatggcagcgggtacctgtactatgcaagtaacgagatggattctaatatgaataaaaagagcaatggcatggtgattatgttttttttttctagcagtacaaaattggtgtgcatgttgtgctctttacgtaagctctgataatagcc

SEQ ID NO: 46797 - DNA, 954 bp, Oryza sativa
agaatatgcctgggatgcatttgggattgctaatattgagctggctctcgcaaatcttttgtttcattttgattggactctccctgagggcactctccatagtgatttggatatgacgaaaacgatggggatcactgctaggaggaaggaagacctttatgtgcacgctattccatttgtacaactcccctaatcctagttgtttcgtgtcattagcttgttggttctcctcgcactactgtacttcgactcttggagaagaagaataaaaacacacatgccattttaatcctacagttttctttgtgtgtttagtggatttttttataggtcgtgcaccctctatcttataatataagagattatgccttttttttccaatgattaagaaagtatcaaaatgacaaatgaaagtacaaaagctaataattgatgaaataacactactacagaaaatggttttagtgccggttttcccaactgtcacaagggaggcggcactgatttgaaaatcaaaaaggtgttggttccttagaaccggcaccttttaggttcgatgaataaaaaaaaagccggctcgagctgacgcatctagccgagttgtccctccttctacatccgcaagaactcctcccacatccacaataactcctcccacatccacaagaacagaacaaattttgatccacaacattcatcccacaacattagaagatggatccatcccacaacattcatatcacaacacaaatttatgcaataaaaaaaaatcacaccgccgccgaagaagtgagagggggagggtagggagaggaggggtttgcttggcttggtggcttgccttgttgaagaagatccggccaccatttgaatcgttgtacgccttttgtttgtcgcttcgagccgttgaccatttcccgttgtaacgtttcttcgaagcctgtcggcccttcc

SEQ ID NO: 46798 - DNA, 1626 bp, Oryza sativa
taaaagggatttttttccaaaaagaaaaaatgcattatttttaagtgttaccaatgtttcgtaaacaaactaagtctactttcctttttacaagatcaagaagattaaagaaaattgcttatagggatgcattaaatattatatattatagatctagcaacaaacaatttagaaaaactagtgagcaatgctgagaatgaaaatttatagagatatcgtattgttttttaagagtgacaggtgttatccagtcaatattttactcttatgtttttcatatacttgtctatgatgcatgcccatgcatcaccgttgcgtgggattttttcgaagttgttatttaaatgttcagggaagaagagttaaaagctatatatatatatatgtatatatatatatatatatatgtatatatatatatgtatatatatatatgtatatatatatgtatatatgtatatatgtatatatgtatatatatatatgtatatatatatatatgtatatatatgtatatatatgtatatatatatatacatatatatatccatatatatacatatacatatacatataccggatactaaaaaaaagaacatacttcttaaccgactgagttagtatatatactgaatacttgataaaaaacagtacatacacctaattaacagatcgagtatacactggattcttgaaaacacagtacatactccttaaaacggtacataatactgaaaatataagtacatactacttatatactacttgaaaaaaagagagagcagtatataccaccgatctaggaaaaaatggtatataggagtgatctatatacgaccaattctaaatgttggtaaatactgttctaaatggtgataaatactggtactactaaggatagttagataggtacattattaaattcggaaccaaatgcatggcctcgttcaattgtgaaccaaatccggtgtggagttgtgtatcaacaaaaaataaagttgtttactagtagctaaaagaacagtatatactgaaaaatattagtacgtttttccgctaaacagaacagaccattactgaaaaaatagtttatactactagtttttgaaaagagtatatacttcgatcgactaactactaaggaaatagtatatctcaaattttgaatctggccattaattcctcacggtccggtgtgcatgcatgcaaaaatttgaaaagaaaaacaatagaatagcagctcgcatatgcagaattttaaaaataaaatgaatattactattttttaattcttaaccagactatccattatcaactaatggatatccaacaagaaggagggagtacgtacacccgggtgtacagatttgctatatatatataaaggagagtcaagggacgacatagaagaggacgtaggcaccatgtggaggaccgtccatcagagatcgatctctctcggcttctccttcgccgccactgcctagggcatccccgcgccgacgctgccgccgtatctcgccgtcgtctcgcgctcgtcatcgtcaccgccgcctccgcctcctccgccgccgccgcatctctggggtgagagccgccgcgcgccgcctccctctcgatctctct

SEQ ID NO: 46799 - DNA, 648 bp, Oryza sativa
actcattatgctatattgtcgaagtcatctagctacgtgataccactgaaagaagatggggattgtagctaaaaagacagccaacagttgacaaccggaagtaaactccttgataatctcactcccgggcaggaccttccccatacctgaacctggcctgcttctcatcgttgaaactcgaaggcctcagctgccgcagttaatgtcagcatggcggcttttctgacctgcaacggaaattccaacacgcaacttcgaccgttcgacgtcgcggatcagttggtcaaataaggacgaaacacaccatatttcgtgctatcaatcatgataatttgaacagcaaaatagaaccaagttcacgcaactaacaggaacttttttcaaagtgtttgcagattatgacaggttaagaaacatctcctgttcagggtttaatctttcggttgggttatttgtatcggtggtggcttgaataccgaaattttggatatttggatctgaacttatatgaaattttaaataaatttgatcaaaattgaacaaaattatacaaattcacgaaaaaccaaaaaaaataaaatttcgatagaacttggatttccaaaaatttcggttcgcaattttaaaccctgcttctggtaccccacg

SEQ ID NO: 46800 - DNA, 761 bp, Oryza sativa
  unsure (1)..(761): unsure at all n locations
aagaggttatttgtatattctattgttcatgccgcagtctagtcttattatccccgatgcatcatgcatggtactcatttatttttctagcacgttggtgtagtactccttccatcctataagacattatcacactaaaatttgtcctaaaatataatgtatttatgatcccaagacaatactttattccccacatatctacttttgtactaggttattactcacccactcacatttgtactaatttacactactccaaaacatcaaataggtgtcgccactataagtgccggtagtgttaaaaccggcacctataggcccttttccacctccatgaattgaaatcgcaaaaaaccagtacctttaagtaattacatgtgcttctaaataaaaaccgacacctattatatttagtgtccctttttttaaaaaaggcacatataatatattataggtgtcggttaattaaaaaaacgacaccctataaatcgagccgaaccggcgggccctaccaccatgaggcgacctgaggagatgtggtctcactctctcgctctttcttcggcttttctctgtctcgctctcttctctcgtctctctccttcccttctctcccgccgncggcggcttgcccgcggangcaacannggngaccgngcccttcccttcggcagatccnacnngaagggaagcngtggcngaaagaagggaagcntcaacggccggttgggtccgcggtaagtggggcttatcgggtccgc

SEQ ID NO: 46801 - DNA, 4628 bp, Oryza sativa
aaatttctcacctcttttgacccaaaaatttaaaatattgccttcagtgtcctatagccaattacataatttttgtagtgtccatcagccgtgtcacgtttttgcggtgtctcccaaccaattacacgtttttttgagtatcctgtagcaaattttgcctttaggtagacaaaagatgttttgttttgaataaaaaagaaacaatttaactagattattttttagagagaatccatcgtgggccgctgactttgtccatgttctataatatgccactgagtttgttaagttctacagtatgtcattgtattttgcttaaattctataatataccgtcaccgtccatttagattccgttagtactgtacaatttgtcctaatgattgaaatatccctaggaaaagaattccaaaatttggccgaaaattcccaaatatcatattataaaccaggcagagaagttgcccatctcaaactttgtaagttttacaatctatatgataaaattgtacaatgctaacagaagttaactagacgacgatggtatgttatagaagttaagcaaaatgtgataccatgttagaacttgacaaacccaacgacatatcatagagcacggacaaaatcaatgacacacaatggattatctttattttttatggttgttcggttaactgcttatctactatgatacggcatttttagaaaaaagaaggttaaatcttatactataagtccatatcttacacattaaattgcatacacttataatataattttcaaattataaaatgccctattctcattttataggagaaatatgcttatctactatgatacggcatttttagaaaaaagaaggttaaatcttatactataagtccatatcttacacattaaattgcatacacttataatataattttcaaattataaaatgccctattctcattttataggagaaatatggaagaatgatttattatctatttaattaactttacattcccgacctcaacggcaatcataacaatagtgtgcatcacgatagaagaggagaaaaagacatgtcatataaaggcaaagcggaggaacaatggtggctcatggagaaagagcggtgatggcagtacgtagagtggcagcggttgctggtggtatgaggaatttatcgtcgacacaatcgtcatttaaatattgataatatgtgggtcaccagttatataaataaatagtactagctagttttaaaatagtaaaaatattgagatactagtccaatgcccgtgcgttgcaacaggtcttaaataacgtgaaaacgtaataaacttatgcattattgttctataaatgtatttgtgaatacaataatagttactctaaaaaacattcaaatgatatcaatcaactataacactatgaattggacaatctaaattgcaaaacatatacaatgaatttaaaaattgataatagactacatttagtgagcgaattatagaaaatatgcaattagaatatagtcagattgtatggcaaacagaattttgcagttttatggtttggagctaaaacttgggcttgtgcgggcctgcgttttgagataaattaagctagtaatgtgtgatatcatgcataaatcgctctgaactttaatagtctgaaacttgcacatgtattgattctgaaatctgaacatgggcgtgcaattttttgtcaacctatctgcacagatagctaccatccactttgaaggaagatctgacgatgatataccatagtgcatctatcactgcatattagttgtataacagaacacaggtgaacacacaactgcatggatcaacatcctcccgttcaccgagatgatctccaagctttatcaagtcccataactgaagatgtccaaatctggcactgcaggttatactatactatacctgtgtatcacgttcaaactatgatatatcagattataacatcagatacaattgtttgaggaaagcaaaacaaaatagcaaatccaggattcaagggaatcctgatacagtagagcgcaatgatgctatttcatctggctaacaccagcatccatgacttttaacccattaacagaggcagaccagctcaaatttacagcatatcccagagtctgattacatattttggatacataaactcctgcttatatcccattcctccaagctgattttagtgcatgtgtttaaaaccatgaaaataagtatcaagtcaaataataaccatgaatataattttcaaacaatcacgaaaggatcttgagtataatacatctatgtaagtgttgttcttgctagctggccctttcaccatgacagcaaagaatcgatggcaacatagattttttttttataaagcaacaactaagagtttttttaccacaagcagtggaggcagccattcattaagttttagaagaagcacaagtacacgcccttgtttacctaagtattggggggaacaatatcaaattcatcacaaagaagaaaacaaagtgcttgcagcacccccttcactaataacgatcgacatagcaatgtatggccatgtacctcagtaataaggtagaaattttattcaaccagcttctcgttgaagttcctcacctccatccttgatcaccgagaaatcagatgcctgcaaaaagcaataaatggtcagcatggtcaacatttcttatcaaggcaaaacactataatgaacatatagtgggcagactattgtactcatgttgacctacgcctccacaccatgccgcctcatatcaaaaaatgttttcatttgtacgacaattgcgcactacatttttaggaacatcaataagatattaatattaccttcattcaattcatatccacacaaaaaataaagaatctctgcatgtccattttaacaaaatgattagctgctagctcatcttgttcttgaaaatattttatcctattctgtctgagagaggcaatagagaactgaggatatacaaaatgatatgaacatattaatttagattgcagcactaaaacacactatatctagtgttgtggctgtcaataaccacctaatatgtgccttatggaattggaagcaatgaaccaatgagatcaaatcagtggtggaacaaaattagtttatcctaaacagttataggaacaaaactatatataaattattacttctagaagcaaccaagtatactttttgaaacagagtcttgccattttgccatagaaagtgtgctttagtagcccttcaaaaatatttttttcacttgtccagtatgcatactgtcagctgaaaagagttcattactaaccttgaataatattgaaagcactattcagaaaaggttaatcttttaagtgaggatggattatagttggactaaccatcttcctttgtcattttgatacagtatagtttaattgttgttgatctaccgtgtcaaatatagtgcatgcgacatcatgtaaagaatacagccttaccctctgagttgttattcaggtcatttctcatatatttattctattaggactttcaactttacgtgatgcatcaacatatattaattgttattatgaagataaaacatggcagcatatgcattcagcagaacttacctagaactatattatattggagagatagatggcatgagggatgagtctagtcgccaacctagtcacgtccagccgggatcgatttgcagccgccggggagagagtggagaggcgatacggtgtgcgatggtggtggaggtggtcgaaggggagagagcggagcggagatgcagaggaaggcgtctactttgaagctgctcaattaatttatccctagacaattcagaggaaccaaaataatcatttgtaaactgaaatgagattaaaatgcagatggaaacacacagacatatccaaggagtggatgctatagcagaaaaagacagattttataacgatggcatcaaatgtagacaaatatccacatatgaaatgcattctccatcagttcaaattacctcaatactgtatagaactattgatagagccgcaagaaagcatgcattttttttccgtaagagacagatgaactattcagatatatagggaggatttagcactattagacagtgaaaccaaacaatgtccatcagctttaagttaggttggacaccataccaggtggaggtgtaggggaggggggaagcgggtggctcccgtcgatccggcggtggcacaggtggagcggctgcgcagccgatggaggaggtcggttggaggctccctatgacggcgcaggtggagcggctggcggctcccgtcgatccggcggtggcataggttgagcggcagcgcagccgatggaggaggtcggagtgcgtaaaatttcaggtcaacgcattctccctcatctgccaagcaaaagcataaaaacttgatgtataatataagaagtaaaactgaaacaaagatagaaagcaatatgaaccatgagtatgtctagataacagagaaacctactcagatttgctatttaaatttggttgagataaatgcatattacaaataattaagggaggcagagctgag

SEQ ID NO: 46802 - DNA, 3064 bp, Oryza sativa
  unsure (1)..(3064): unsure at all n locations
gcggcttgatgacanncagctcggnacccgncangaaactctatgccatatgccagccaaaccaagagtgcacattcctggtgccacccatacccaacctgtagggtgtactataagggacatggccggttcattgtaaaaaaataatctactatcaatcaatcgaatcgtgttttcatattgcttttagtttttctcttagtttgtccatctttactggtttgcgctgtaaaccgtccgtcgccgttgcgagagtgcgacatctctttgtaggtttgtcctgaaaatcttccgttttgcccacgagacgggtagttatctagaaatcggctccgctagacggtttagttatcaaaacccatctaggtttagccctttgctagatcgaggtggttgacgactctaggatcaccgcaaggcttaagctgctgtgatcgtgcttgtcaacttgtcaaaaaagttgccaacagcccgattctgaattgcgtccaaaaaagccacattgcaattgtggaaaaaaatgatagtcatattctgataagtcagcatctattctagaatgcaaacacataaatatagtagcacatgtaagaaaatacataaaatcactagttttgaccttgaggcttaggtagctgcattcttccatctctcatgttttggaaccgctttttatggcattaggatcaagtttcttgaataaatctcgctcaatgtagcacaagcacaacatcaagttattaagctagttgttggatagtctgttgacgccgagaacaccctttcgacagatgccattgcaataggtagaagcaataatactaacagataagacggtagacaaatggaaatacaacgtgtctttcagtttgaaccatcttttcagctagactagtaagatctaggcaatcagtgaaatcttcaatttttcgcacattaagaataaaagtttcaggttgatgcacagtcacaaattgagaaatatatcttgattatatatctctgtaagtcaaacaatcttatccatgtcgaacttggaaaataaatcaatcttatccgctagcagccgccgcagcacgagatgagctggctatcacaggctgagcgccgccacctcgccggcgcgctcgtcgtccccgtagccgcgccagcattcaccgttgagccgccggccgccattttctgccagcccaccggccgccaacaagcgccaatcgcagggcagaatcgatcaagcagtcactcctagccccagtgtcaaatggggaacgattaattcttagggagaaaaataggtgggctgcactctatgggccaggcccagtactcatcttggaggcccatgtcaagctctaaagcccccccattccaggccatagcaacacaacatcttcgactgttatcttcgtctacctcgcgatgctgctcgagacgctgaatctcggctgccgctcggggctagaatggaccctgggaaagtggggggtggagggtgttcgtgtcaccagctagctatggcgcacgccactgcatgccatagtggtagatccctctctggtcgggagaggctctccctcctgattgagagtggcacggagagatcgtgtatggggaaaggatcggtgaagcgatttctgttcatgtttctgttggtagtaaaggtaggtcgtctttttattattgaaagttgattttaagatatctcttggagataaaaaaaatatttaaacattacaattaaatcaggaatttcaaaaatagaattttaagagatggatttggggcatttgttgagcttgctcttatataatcccgtttctctcaacctatttagttctggccctagcgccgaagtcacaaaactactgactatactccctacgtttcaaaataagttctatttactggtatagattaaggtttccgagaaaaagactttcatgatgtcattacataaggaatggtgttagaagtaggagggtggttgagagtaagatggaaataaaatattggaagtgatttataggacaaatagtacttaaatctcacattgtaatagaagtgcttaaattctagtacaaatatcacattcattttcatatgtatgatcctctaaaaggctctagtggtggtcaaagtaaatttgcagtccactattgcttttaatttaatatttcttgatattataggatagtccaatatttgattcaaacaaattgaatattaaataagaaaataataatgatactaatatacggtagcgctattccactctctacagcgcggaatattagttcgagcgccgcacaatgccctctccttccagttttccccttttttaccaccccaccttttctgtgaatcccaccttctctcggttcgtttttttcgttttttaccactcaaccttccgtgtttttttttctcttttccatctcattcgtgcttcatcaatagccccagtaaaatattaaccatctagatttttctgtttttcgttccttctatgtagtttttctgttttcgcgttttagtaaaatatttaccgtctaatttttcattccgagttttccgtttttatctccgcacgcttcaaaagtaacgaatttactccgtggaatttttcatttactcccagcctcccacatctgctcatccaaaagtaacaaatttactcgcatgaatgcctccacatcgtatgacgccataactggatggtcataaaagaattactaccagcttacaacgctagtaattgttttaccaatattataaatattgtttagatttcgtggtctgtgagtaaaacaattactaccttcctctcgatatagcccatgatctcataggcaccgtgtaataatatgtttactgatgtgttcaatacacacagtacaagagtaaaaattgagatttcgtggtctacaagtaaaacaattaccaccttcctctcgtagtcaccgtgatctcgtagtcaccgtgtagtaatatgtttactgatgtgatgtgttcaatggggatcctctagagtcgacctcaggcagcagaatagatcatagctcct

SEQ ID NO: 46803 - DNA, 11008 bp, Oryza sativa
gagtgttgattactactcgcatctcgcagcctgcagtctggtctatagatccccccgggactaaagatatcgatatctttagtcccggttgaagccacgaaccgggacgaaagatattttcccgctatttcaaaatttgtattggtcccggctactgttaataaccgggactaaagatgtttacacaaaaccgagttatggcctttttaaattgtcttacaagtcgaaataaataccaataaatccaatataattagcacatggccgatttatatggtttcaaagtccaaataaatacgaaaaatcgtctgtaatttacgtatggccgaattaaatgttttcaaaattttaataaatagaaataaacatatataattaacataatacctaagtaaatggtctcaaagtataaataaataaaaataatcatttataattaacataaggccaatttaattctactcaaagtgtaaataaatagaaattatcatttatgattaagatatggcctacttaattgttttcaaagtgtaaataaataccaataatcatttataaataataacatattgccgaattaattgtattcaaagtgtaaataaatggaagtaaccatttataaatatcatatgacctatttaaatggttgaaaaatagtaatacattacaaattaagtagttgagaataatatattgatccaaattgttcgaccttcaatacaatacaaataatttacatcttccatcaaacaacctatgtcactgtcttcctcacgtactttctcctcactattgttcctttgctatgatcgttgcgtgagtacggcgtgtcctccttactacaaatgggaaattcatgagaaaacacaagggactgcacttattacatgagaccacatatcactcgatatacagataggaaagccacacaagtccaaatccatgagcatagacacaaccattatgctcaaccatagtgccaaaacacacacagaggcagaatatatacaaatgcacaccacacatatatagcagacagaaacacacaattaagtagtagcaaaccaaacctcatgagcacccaaatgcaaaccgataatgggagggacacgatggtgattcccttcagctcgacgtccggtgccgacgcttgtccttggggatgaataggcagcatggcgcaccgtgtacttctttcacctggttagggtgtataatgaattttatctttatgcgactctatcggctgcgagaagtcatcacatcgaggaggaagaacaactagttgctcctgctatcccagtaagttttcctttgtttcaacaattacatcggctataatttacccaactcttactccttctgaaatcttttctgcaggttctagccgatctcttctcttttgatatcagagattaccttgatgaagcagaagaagatatttcaagcaaagccttagctcccctatccaatgatgtgagaaaaacactggaagatatctctcatcggctagaagcatcactagataacttggtgaccaactgcggctcgatccgggcgaggttcacagacatccaagctctactctattgttgtataggaggagaagaaggagggggctgtagaatagacaagtgttatatagagccggttgagtttgattaagtaaaagaattaaagatatcttactggtggagccgacttggcaatcgttgctactggctttttcttcacagcagtcttctttttctgcaaccgcaaagtctatgggcaattagccgaagagggaagtacttttagtagaagtcaaaagaggtgcttactcttgtaaaatgaacgggggtagaaggagttggaggcgtttgcttgggtgaagccgatggagttctttctgtgtcacttatctcggctaaagcctggtcaacatcttcaccaatttcctcttcatctaaggcttgttcaatagatggatccaaggcgggcagatcatcagccggcttatcagtcggcttggttttcttgaatttggcttttttctttggagctaagaccaaggtactcacagctgatgatctggttttccttttcttgcctgcattggctggttccctggttaagccgtgaaggagagttgaagtcttggggccatggtagccgatgacagggggagataatccacctccattcaggattaaacctgaagcatattaaatattcttgccactgttactttgatgaggaggggaggactctgttgtctgcaaaacaggagcaaaagattattcaagtaatgaatcggctaactgattatgcagtctagtaatgacaaagtttacctgaggtatgatgtcagggaatagatttgtcatatacatcgtagccgattgatgaaatagatgcagcttctattcaccccaccatctgtcaaagtttttgcttctaaatcctgccaactcaatattttcaatgctacccagagaaggtcctggtaggttaagtagccgatccatcattaaagtggacgtgatttgtcctcggcactgaattttgtcggcaaagaataagccgattgggagttggcccaatccaagttgcctggccgagctcattgggtgatagaactcataggagacttggatatttctcccttgatgaatgccgacaggaaggatgcatgggctgattgcagctgtaagaacttctctggatttttggaatttctcatgattaatatcttcaaatctaaaatccgatggaagttcaagatctactgagtcttcataaggaaaccagattcgtgcatctttcttaaaaccttcgtagaagctgcagaaccagtccttgagcagcttggctgatagttttgctccagcatcagttggtgtggatgcatatgctccatatgacatacatctgcgatgggtgcgctcttctccgtcatcttctacaatcggctctggcaatgggaactcagcttctgttacatagggccgattgacaaccttcatgactatcagatttaaccaagtttgcagcagccaccatggtccacctgctccgactattgagccgacggctattttagccgatgcattgttcaacatttgatacagatagccgagaagaattttgcccaaagggaattctttctttgattctagggcttcggctacaaattgccagttggttgtagggccacaactggatccacagaagaggaatttttccagccacatgagcaagaaagctacatgctctcgaggggtaacatatccttggcccatatatgccgccacatagccagactagccacctatgtttttggtcttaaagtcaaattggttcttggtgttcatgctcatggggttagccgatgaagtcacatctaatccagtaatcatggtgatgtcgattaaagtcggagtcatcggtccttggttgaataagaaagcattgatggtatttgaccagaagtaggtggcggcagtcatcagatgttcatccttagcagaattggctgtggtgagagcaagcgcttggccgattctaatctcatcccagtgaactttcttactagccgatacacgttggtaccaagtgatccagctcttatcaggtgtaggtttttcaagagatggccaagatttgaaggtattcttctagtgacccaggttagggttggctagcctaaaggggatccggttggtttcaccaatgatgaaatgagtggggtcgagattgccgatcgggccaagaaaatagtggtttttgtgcgaaaggctgggaatcgcgacttggttggagagatgctacaaatccaagacaaccgagagaaagagagcggtataatataggagaaaatcgatctgctgctaagaaaggggatctagccgatggggacttacctcagcgtactcagctgatggcgcatcagatggattggtggaagacgacatcactgcaggcggaggtatcgccggagacaaagtcgcccgggagtcgcttttgcgtcggaggaatcgccggagagagaggataaagtttcgcttgagcggtgaaaacggaagtcacggtgtgagatttctcgagggtgacggttagtatttaaagcacggcaataatggtcggaaaacgacaaagtgcgaaagttgctcggagtcgatttatagcaaatccgaaacattatcaaatattccggacttggggggcatgtgttaccaacaaaatttggtaacatcggcattgggaaagaagatcagatcgaagcaaagtcggaggcagagatcgagttcgataccagagcagaaatcggctggagtccagatcggctacgataagatcggctgagtctgagtcgggctaggtaagccgatgtagccgatcccgacaatacaacttgatgtgtgatgtcgggttggatcgtggtgctccaaggtgattgccgcacatggatagagtcctgaggaggcaattgtatctattaattaggatgttttatgtaatttccttagagatacgtttgggcaaaagtctgccgcaaagacttatggtatcttagagtttgttagagatagtagtcgtgtccgttatggacgtatattttaattcttgggtataaatagacccgagtcctatgtaacttttaacacacatgttcaatacaatttcggcgcatcgccacccttttgctttagttttgtttcgacgagttcttgctttcgggttgagctgcatcggtttcgatcttcaacaagaggtaaaacttgttatgacgacttgtattctcgggattagtgcttccatctttatgacactctaatcttgtttatgtaattcgtcgagttataatatatcttacataatctctggcaatatcgctatctaacctacaatcggctaacacctatcgaagagggcagccgattaggttagattttgacgttgattcagattatgtaagatatctaccactctatgagacttccagcggcttgattgtctagatattgttcttcttttcatacttaatgctacatcagttgagtttgatatgttaagtcgtgcttagaatatcaatctctagcctgctttctagttgccgattagggtagcatcggagtttcagccgatcttatctgatttaactatatttgctgtgtatgcttcattgacatgttaaatctgcccttcatgtcaagatattgctgtatctaagtatattaggcctttgtttgatatattatacttgttttaatatcctgatacagagtagtatcggagtattagccgagacatgttagatctatctgatcggctatgctataaacatatatagtcctgttattgatatatattttgatctaagtgatttatactgtctcgacatggcgaccgatctatcccaatcacttgatttaagtatatatcgatataaggagtatatattgttaatatctacagccgatcgagtagatttaattccttcttacttattcatgactgccgatcgatacacatatgacatcggctcaaagataaatgatatgtcttcggcacctagccgatcggctatcatttatatatttaaccgcggtttctttgcttctatttatttcttgttgattacaggatcaaatcaactggcacgctcatacattcgaaggcgagctttggacctacattggagttaagcagatctcccaggccacgtgttttctgttaacagctgtgcaaaatgaaaaaggtagcgtgtgttgaggttctggataaaaatgtttgcgactttaacctcttcttttattgtgttggtaaggaccaaagataattcaaaaaaaatcttttctacaaactccttaatcagaaatatctgattattaattaggtgaatcgtgttatcttatccatagatttatttttcaaacatgtctttaaagttgggggcctaataaatcccaacaaaatagcagtttaatatgtatatatattgccaatcccgttgcgtgcaaacttatgtcacacgtacgtacattgtcttcagcaacttgttgctgtaggtacatgcatatttcttgagattatacggaccccttcaaataaacgtgatgtgttatttttaggtcttgcatcaatcgataaatatttgatcttgaactcagttgctcattaattgttttttaactcttacacacccatttgtattcatgatagatactttgtgatgaaggcgaagcaatgagtggcaaggagacatcgcgatgagatggcgctattggtgatgagtggctttatggcgtagaggagcaacaacagccgccatctttgccacgacccgccgctatgtgcctgcgtagggaattgcgatagggtgcagccgctattgggatcgggagtgggagatttgggaatctgggtttactatttacatggtttgtttactcaactcaatgggctagttaggcctatattattgtaatgtgctatttttagggaggtaacttctaccccaaggccccgcctggtctcccatagggtgaaattctccccaattcctaaccccatagtggggggtcaccggtcccaacggagaaattaccacccctaaacatgtggatgtagttgtcctctatatataagagtatgttttctggtagaggtggatactacttgtaatttcatgcataccatatattaataaatttagagcaaacgtacattagattgtctctaatatacaatctccaataactctaatattctcacatttttattggagttttttattggagtttgtgtatgggttactccttatatgagaggtggctctttctgtttctgtctcttcattcttgtctcctccaccttaccatttagtcttatatgtcatcttgagttttgtgtttagatgaccatagcacttgctctaatatctaatatttaagcaaaatattggatcaattgtgcatgtactaattattgagcattcccgggaattccatgttaattaaaaacgttgccgccggctagtaggatcaataagcacgaccatagatcgcattacgaatctttcttaaggatctctttgaatcgcaggaatggaaaaacagagaaataggaaaaatatatgattctgacatgaataaatgtgtaaaacagaggattgaaaaatacaaaaaaaaacataggaatgaccgtttgaatagaccatatgaaaaacgcaggaatcggatgacagagatagattcaaaggaatttttcaatgaggttagagctcttgctaacattctccaaaatctctataggattatccattccgtaggaattttaaagaataggatatgattcaatcctttgcttcaaaggcttccacaagaatttttttcgtattattaaaatcctccaaagttcctacgcttttcctggaaatcaatggcgccctaaatcaaataggctattgaaaataccgcagattctttagtttctactacaatttcgttttagatgtcattcaatttaataattattaaatccaaaattaataaatatgaaattgtataaatcttactcttaattttgttcctaaatttaaaaattaataattattgtgttataattgacacaacaatatttatttagaatttaaatattatgatactaatcggtagcgctattccgtgctctacagaatattagttcgagcgtcgcacaacaccctctcctttcgggttttccattttttaccaccccacctttccttcgcattccaccttttctcggttctttttttttgtcttttaccactccaccttccatgattcttttttctcttttccatctcatccgtgcttcatcaatgggcccggtaaaatattaaccatccagatttttttgtttttggttccttctctctagtttttcatttttcgcatttcagtaaaatatttaccctgtagtttttcttttccgagttttccatttttctagtacctcagcacgtttcaaaataatgaatttactccgtggaactcctagcctcccacatctgctcattcaaaagtaacaaatttacttgcatgaatgcctccacattgtataacgccatacctagatggtcgtaaagaattactactagattacaacgctagtaattcttttaacaatattataaataatgtttagatttcatggtctgtgagtaaaacaattactatcttcctctcgatatagccctcctctcgatatagcccatgatcttatagccaccgtgtagtaatatgtttactgatgtgttcaatacacagtatacaagtaaaaactgagatttcgtggtctgcgagtaaaacaattaccaccttcctctcgatatagccatgatctcgtagccaccgtggagtaatatgtttactgatgtgttcaatatacggtataagagcaaaaactgatactaagagtattgttgatctgtatcacaaaatagtcgtatgaatgaaaaatttacaggctcaatcacacacaagcgataaaattactcacaggtgaatcaaacttgaaaagaacaaaaatgattcagccaaaaatccatcagtggctttgttggatcttgctataaggattaaaaagcacggtctgtatcttgtgactagtagtggagggcaaccgggttttttaggtgcacatagaatgtttttgttgttaaccagcccaataatgtttacaagttttctcacttgaagttcatcgctacttgaataataagttatgtatataatatgttgtgagattacctatttaggttaaatgaaagagtatgaagggaaacttctaatcagtagtaactaatttgtgtttaatagaatctctggctggcttaaaccacctttgtttgggggtctggctaaacagtatggtcaaaccgactttaatcacatttgtagttcttctcactgtctttaacatcccgcaggccgcatggacttagcaaacgtccacaaagggtatatacttcacggcgcgatcagagctcttctgtccacatttcttgatagtctgtgacgatgtggaatggaagctacccgtttaagaaatcctggtgcctccctctcctagcacaatgaactgctttaatttttgcctcatgacctacctctcggattatttttgcccattccctcatacctctatctcagatatatttggcgagttttgtacgtatcatggtttctcagatttcaaccgtacgttggcaatttgactttttatttcgttatctctcgttttttctttgagctacccctagagttcctggaactagcaactatctaggcttaatttggttgtagcctccatggagactacagaagaagatgcttgatatttatcaccaggacaacacggtaaggatatgagcgcgttgaacaatgaatagcgatctgaccgagccatccaccaactgtccttcagaagtagcttgcgtaggtaaagttgttgttactatgtactcctatagtaatgttagtacaaaattagaacatatttggatctagcatacataattcccactataattagaatgtaaaagaatcaagggggtttgaggtctggagttaatctccctccaaccacttttattatgggattgagcgaacaaaccattactaggatataggagagagatattggacgaaagatatatggacgatcaatttttacatttaagacaaagattttgattgccatggtatagaatttataatcctatctgtgtaattttagctaagaaaatatcgatactctgctgtatgtgaactaatggtaggaagagcgatgaaaaggatcagtcagatcagacaatgacagcgattatgacacgacaaatacggatgaaatcaaacatcctttttgctgagaccggaacttccaatcccataccggaagttccgatttgaatcgaaagttctcttcattctaatattctatgaagttgtgataaattttaggaacgcctattcacctcccccctaggcaacatcaaggttctttcaacgacttctctgtgtccggtatatattctatttttcccataccgaaccaaccactcttgcccccacctcattttttcccttttttttggatctgaatcgatccaccatccctcccacagatcggcgacacaccatggaggaggacgacgacaccgtggtggttgatggcggtggctggtggcggttaaggcgaagacacttcttcgggcctcgctgccagacgctgggaatcaccttaaccagcaaggaggtgttcacctgagccaatagcaacaaccagcgactgctccacgtcggcgatattgatagaacaagcaagtaaggaaatgacactctgatttgcatatgtatactctccttcaacttcatacataaagccccatttttttttttgcaaatcaaattaacatgtaatctccaatattacctgatctcaattgatgggctgcgcaggtcctacatttgcacattgtgctccatgtggctagccgcagaggatagtgtggagtccgccggtgatggaggttgattgctatttttcttttgctcgtcatctctattgacaagaacaagaatgtttttttgcatttttttcgtccttgctagatgatggatggctgctaccacgcaacgtcgagctcatctctataccacatcgctacatccttccatgattccattgtcgactactgctcgcgccatgatcataagcactatataaataatcggaatcttgttaagagaatttttctttaattactcttaattacacaagtagacgtgtaattacattactcttaattacacaagtagacgtgtaattacgtcatgtacacaacttgtaatatactaccatacagtgaagagatttttaagccaattaaaatattcactataagtagaaaattttacatgcaaatattataaatgcagttttgctataaatctgtcgtcaaattttttacttagaa

SEQ ID NO: 46804 - DNA, 970 bp, Oryza sativa
  unsure (1)..(970): unsure at all n locations
cgtcttttattgtgttggtaaggaccaaagataattcaaaaaaaatcttttctacaaactccttaatcagaaatatctgattattaattaggtgaatcgtgttatcttatccatagatttatttttcaaacatgtctttaaagttgggggcctaataaatcccaacaaaatagcagtttaatatgtatatatattgccaatcccgttgcgtgcaaacttatgtcacacgtacgtacattgtcttcagcaacttgttgctgtaggtacatgcatatttcttgagattatacggaccccttcaaataaacgtgatgtgttatttttaggtcttgcatcaatcgataaatatttgatcttgaactcagttgctcattaattgttttttaactcttacacacccatttgtattgaacatgtgtgttaaaagttacataggactcgggtctatttatacccaagaattaaaatatacgtccataacggacacgactactatctctaacaaactctaagataccataagtctttgcggcagacttttgcccaaacgtatctctaaggaaattacataaaacatcctaattaatagatacaattgcctcccccaaaaggggggggaaaaccccttttccctttaaaaattcccccccaaattgggtggccggcgcaatcaccttgaagccaccacgatccaacccgacatcacacatcaagttgtattgtcgggatcggctacatcggcttacctagcccgactcagactcagccgatcttatcgtagccgatctggactccagccgattcctgctntgttatagaacccgatctatgcccccgacttccttnagatctgatcttctttcccaatgccaatgttaccaaattttgttgttaacacatgccccccaggggctggtntagagtcgaaatgcaggcggacagtacgacgactatcaatnnnnnnncccac

SEQ ID NO: 46805 - DNA, 1287 bp, Oryza sativa
  unsure (1)..(1287): unsure at all n locations
ccgttgaannntctaaatggaaattcgtcatggtcgcangcctgcaggtctactctagaggatcccctggatatatacatatatatatatatatgtctatatatatatatatatgattgctctattctacaccctcctatgggcccgcccggcgaggcccaccaagtgaccccgcccccctatttgtgtagagctctcttccatctcccctctactggcgccccttacttcgtttgatttctctctcgatctttctcccatctacaatggatagaaaattttaaaactaatttagagtgacaaaacccaggcttgaacccatgactcatgggtcaaagaaacgctggattaactaattcaccttatgacatctagcgattagaggttgaaggttcagtcttaaatatctatattcaaactttgcgagagcaaatcacttatattggcgcggaacaaataatctggtagaatgtttcaatcgtaacattattgcaaaagtgcattatcatgtaacggtactgtggaaatataaatatatagatcgcaactgcaaaaatatataggctgtcactgcaacttggacagaaaaaccccgggaaaattattggccacagaccttgtatggacagtaaccggacttctacagactatcggatgttgtgactacaagaaagaaaacatgtcccttttataatggccatcttgttaccggacatttccttacgagacaagtgcaccaaagaggcggggcgtatagggaaaggagcaacacagatcaatccatcggtccagacttaaccacaaatgggacggttggaaatcctaatctttaaaccaatctacctcttgcatcaaataatatatttttggaaccggtttaaccataatgcttaaaaaaagagccttataaaacttgatccatcgtcgtaaaattcgccaacggtataaaatgggactgggaagaagcacccctttaccttacgaagggccccttcctctgtataaatacggtgaaacaaggccacaaaaaagtgaacttgggggaattgagagggcgagcttcaccggggcgggaggttaaccgcccttggacataaatggaggagaatccgggccctagtaggtggcgaaaaggatcatacctttaaggggctccccacggtaaacaaaccacaaaacggggaaagctaccaaaggttttaaacaaaggaaacggagagaagaaaccctttgctcgtatttacccaatcgtaccgccaacaggggcctgctttcttctgtcggact

SEQ ID NO: 46806 - DNA, 1291 bp, Oryza sativa
  unsure (1)..(1291): unsure at all n locations
atgtgncnatgtanaatgcatagcgccatgctgcangcccgcacgtcgacattatatgattctctacacacatcgcatagttgtatatcacaagcagacattgttatacgggttgactatacattataatacaagggtagcccaaatgggacccaaatagaccgaacatggtcatgtacattacaagataccaacgtagtccacaggcatcgactgatgaacctaggtcctgactccacagtctttgatatctcttcatcagcatagttcccatatggtcgacatccaacttctaaaagatttagtttagcaagggtgagtattaaccgtactcatcaagccaccactatacataatgcatttaatgtacacaggggttcaaggatggttatgtatatttgcataaagctagatttcacctatgacctatcagttttaactgaaaacagcgctaagttgaagttgtcattaatccgtgagggttcattcaccttccccaaacctcgcttggtcgggtttaccctcgcatctagtttttcacactttcaacattacaatgacctttccacccattcggcaaggtctcacctcattcctaatataagcaagattaaaatctatgacgcttgtcaagaataatacaagtcccggcgctcattaacctggagcacgactatttcaaatagatggttactcaagcttgaatggatgtaccctttttaatccaacattcgtgacttgcccacacatgaccttatcccacacatgagacccgcttttcggcattttgtattttggaccccgctccaggactttaaattctcaatgtattcttaataaaacacaccctctggaaccacccatgaggggagccttgcccttaccggatcataaaaagtacattacatatccgcttatttagcgcttttagatttctgggggcaaaacaacacaccttttattagattctcttttcctaataagatccacctgtcaggggtgccgccccaggagattttttattcaccggttttaccccggcgaagaggaggggccctgatcatttcttgctaatgtttgtatggctcttaacaaagaggccaaagacaccttttttcagaccaacctttttcttatatggcctctttagaaaatattttttaaatatttcgttttttaaagatttttctgtgngtgttctttgtttccaccactctcataaattcttctgagggggcctcacatatctctttaaacacttggtgtttgttttccataataaaaatataaa

SEQ ID NO: 46807 - DNA, 549 bp, Oryza sativa
ggagggagttttttctttaaggatttgggcgggagttaaaaaccggataatggggcacatccaaggacaaacagcctttggtggccgtttaattataaaaaggccctggaacccgccaaaaaacctttgggctgctcttacagagttgtgtggttcccggaatccctctttacaacaagtgtgcgcgcggttcctggagagcccattgtataaaagatgtttaccgccttactcacaatgcgccaaggacaaaagagccctccgaaaaaccttatttgttataagttatattgttttgttatacacggggttttatatacaacgcgggcgcttcttttggaaatattggcggcccccccccccctcttggctatttttctaaaagagtgcatatatgatgtgtaacactgtgagaacaacaaacgcgtgcttatgtgctgtatatatttcatataaagagagagcagagtggagggcctccactcctccgggcggcttctcatctcttctgtggcgcgacttctgcctctcattaatatcatcaacacg

SEQ ID NO: 46808 - DNA, 2405 bp, Oryza sativa
aattccatgttaattaaaaaccttgccgccggttagttggatcaataagcacaaacatagatcgcattatgaatctttcttaagggcccctttgaatcgcatgaatggaaaaatagaggaataggaaaaacacgtgattctaacatgaatgcatgtgtaaaacagaggattgaaaaatacagaaaaaaacatagggatgactatttgattagcccatatgaaaaacgtagaaatcggatgagagagatagactcaaaggaatttttcaatgaggttggacctcttgctaactttctccaaaatctctatgggattatccattccataggaattttaaagcatatgatatgattcaatcatttacttcgaaggctcccataggaattatttttataggattaaaatcctacaaagtttctacacttttcctagaaatcaaaggggccctaaatcaaataggctattgaaaataccacagattctttagtttctactacagtttagttttagatgtcctaaaatttaataattcttaaatccaaaattaataaatatgaaattgtataaatcttactcttaatttagttcctatatttaaaaattaataattacagtgttgtagttgacacagcgatatatgtttacaatctaaatattatgatactaataataattactaataatagtaatagcctgtgcaagacacaggttaacgactagttcaatctaatattctcttttgtcacataacatgtagggtaaattggaaccatgccattataattttacaaagtttgagataggcctaaattaataattactgtgttgtagttgacacaacgatatatgtttagaatctaaatattatgatactaataatagtaatagcctgtgcaacacacaggttgactagttcaatctaattttttcttttgtcacataacatgtattctatgaacaggattttggaggcctggagccaaatttctctacacgtatacatgtgctagcttacatcctatcgatcgactttatgtctgcaactaactcgacgaaatatatggttggcggaccgctcacatggcattgcttgttgtcaaaatgcacccttgtttggttgctttggcgataaatatgagttttgcagaactttcttgttcatcgatgcttgatgaacctgatatgaaccaaaattgaaaccatcttgttgcacgaattcgaattctaggagagacagcaacagaaaataaaagtcagatattagtttgtcgcaggaactctaagaggtcatgaggtaggagagggaggcaccgggaattgccgccctactttcttttcggctcgatcattgaaccccatcagtaaacgatggcagacatgcaagggtggcgcattcaagaattgaggtactggagaggggcataaactaatgcaggcagaattccaagatgatacttcctccgtttcattttataagtcgttttgatttttcaatcaaacttcttttaagtttgataaagtttttaaaaaatatgaatatgcaacggagggggtaatggacaaggctccagtagtagagggttatgtaggtatcagccatatggcaccatttccatccaagctgatgtccttggtacccccgtacacatgggagtggattctaatccctcgaggggatgtcccctcgtgcaaatttttcttttatattcgatgtgaatagtcatgaaaaattttgaaaaaaaataacaatgtagagtatcgtaatatcttctaggccacaaaaatcaaagttcaaattcgatctacacatcgagaaacaaaaaagacaaattcagatataaacaaaatacactactattcatacgccgaatttgtctttttttatatctcgatttgtgtgagttgagtttggactcaagatagatagatctattttataagtgttgccaaaattttctagaatttttcataaccatttaaatggttttaagcaaacaaggggacatctcttcgagggataaaaatattttccccactttcatcctggtctgtatcaacgatctgggcataggaattgctaatggtatttcttgttccctcattctattaatttttttcagttcatcccggcatcatgtatatccattctatttcttttgtttcttttcgatattttttttaaaaaaaatccaagcatgtaaatttcttctattgtctcaaaacaaaataacaacctatgatgccattataccctactatctaagatcatgaaatattttctacctattgatgaaatatttttcaacaagtaatgaatatctgaaataatttttgttaaaatagttttttaataagtaatgcccatctaaacatttcctgcctagtgaggaaatatttctcaacaa

SEQ ID NO: 46809 - DNA, 547 bp, Oryza sativa
  unsure (1)..(547): unsure at all n locations
tgtcggcaattcttccttttgcatacatacatattatctgtcccatgcatttgtttcttcaacttgctttccaattcatttttttggtcaaaagcccatggtagttctttttcggctatgcgtgatttgagctcaacgcatgcagacagcgagtccgttccatgcggcacgagccagactttccgaacgtctctgttatgtttttaggatggctgtcacaaccgaacatattttcatttcaccaagaacgagaagacaaccagtacaactgtgcagtttcgatagccacataaattttcattttaattttatttaattttccctttttttgggcccccaaaaggggggccccccaatttttaaatttttgaacaggcaacatgcatggcttcttcaagacaattaatggnggaanngnnnnnannnattnnnnnnnnnnnnctnnnnnnnnnnaaatgaagnnnngnnatggnatctggatctgngggcncnctggcgggtaataaccnnnnncncttnccnnccggcnntggtcgctgttgtgaaa

SEQ ID NO: 46810 - DNA, 1165 bp, Oryza sativa
cgtatggattaatgttttaagagagtggcttattgtaaggaggatgggggttgggggtacaataaaaaagtagttgtgagatggggcaaaccgtaggcattattatgagttattgccaaatagagtcaaattagtaaaagggtaggtcaaaagcaggttagatttttttaaaagggcaaaagttgggcttgtgaattaatttccatggggtataacttatttttggaagggggaacatcgcttggcgtaatagctggcggcgccggtgtgtaagaaacgtctcatagcgtgaagtaggacgtggtcgggaagggacaagaggtggaggagcatgagccctaccaggtccgccgagagcccgccacggtgatgatggttgctgcacaaccgccatcctcctcgttgtcgttggaagcaacggcggcggcatggagcgcgagcaggagttgaccgtgcgcaaggtggttgcggcgctccgtgtcaggggcaatctcgctatttcaaaaaatttctcacctcttttgtgtcctatagccaattacacaaattttgtagtgtacatcagccgtgtcacgtttttgtggtgtctcacagccaattatacattttttgagtgtcctgtagcaaattttgccttacctaaatatgttcggagaacttcgaaaaaagtaagaaaaagaggaggttagtcactaccccaaacacatgagggtggttgctcgcatccatggtatggtacatactcacattaatcgataatatattaatattattaaaattgttctttatagtaaatgatgtgaaactaaaaattttaaccttatattcttctattgttccatcttcttattttctcattcttatttattttttgataataatattgctacagccagcactattacttgcacatgaatactactccctccatccctaaatataagggattttggttggatgtgacacattctaatataatgaatctagatatagagcctgtccaaattcgctgtgctaggatgtatcacatccaacgaaaatcccttatatttagggacggagggagtagcgggtagctcacgtgtgtgtgctccgtaatatatattatctatatttttacacgaggaaacaataactattatctttgttaatcagccccaaatgt

SEQ ID NO: 46811 - DNA, 1194 bp, Oryza sativa
  unsure (1)..(1194): unsure at all n locations
ctgacatccattcactcggacacccagcgctatgcccagaaccggttgttgccggtcagaccgctcggggtcgccggtcagaccggcggcatgcggccggtcggaccgcccctggtcactcgcacgtttgatttttggaggaggaagcattgaaacggtgccgcccctagcgccttgattcctggtcaccgcccttcccccttcctgtcgcgcgcacctggctcaggaaacataagcgacttctcaaatcctcctatctgttgggcgttgtagagctgtagttttggaccagagacttggaggggacttcctcggtttgggttgggggaggtgcctatgtgttggagatatgggagtaacaagttatttagaattttgggccggttcttgggcaacccatcccgacccattgggctctgcccctgcatgcatgcatggcggtgccgtatgcgcgcttttcttaccgggatcatccggatgcccttggataggccgatcatgtgcattgatccatacataatattcaatcgtgtacatgtttgtgttccataagcggatgcatcaaccggcgataccgggagccgagaggacaacacccggcttggtagcggatacacagtaaatcatattttggaatgctattttgattagatgcaccactagaaaaacttattttttcttgggggccaaaacctattttttcatggggttggaaccgtcctcttgcccgaaagggtctgcaaaatagcgactttctccattccgttgacactttcttttatattttacgactattttattttccttaaattaaagcaataaacctcccacaaaataatttttcaaaaccgcacaccggaaaattcgcctgtcctctttatttgcggaaatgtcattctctcgcccttcactttttctgtgtttaccacgaatttaggccatacatcacactgccgggttgctcctgaatgttttatacttgtattctcttcttatatgggtcttatatcacactattccgatcaggacactaaataattctacgtctgccctcccctttataaccctccgtttcgttttgtgctattctccttcctccaaccgtctctcttatcttngctctactcatcctcctccaagctcgctattccatctcgtttactctctattccggatcaatctgcctctccccct

SEQ ID NO: 46812 - DNA, 4361 bp, Oryza sativa
  unsure (1)..(4361): unsure at all n locations
attgaattgatatcctactcgnacccatttcgctgccattcttgcgtttgggccatgtgtccttcgaggttgtgctagatttctcccgcctgcaactccagtgcgtccattctcctagtgagctctcccaaatatgtatactctccttcaacttcatacataaagccccatttttttttttgcaaatcaaattaacatgtaatctccaatattacctgatctcaattgatgggctgcgcaggtcctacatttgcacattgtgctccatgtggctagccgcagaggatagtgtggagtccgccggtgatggaggttgattgctatttttcttttgctcgtcatctctattgacaagaacaagaatgtttttttgcatttttttcgtccttgctagatgatggatggctgctaccacgcaacgtcgagctcatctctataccacatcgctacatccttccatgattccattgtcgactactgctcgcgccatgatcataagcactatataaataatcggaatcttgttaagagaatttttctttaattactcttaattacacaagtagacgtgtaattacattactcttaattacacaagtagacgtgtaattacgtcatgtacacaacttgtaatatactaccatacagtgaagagatttttaagccaattaaaatattcactataagtagaaaattttacatgcaaatattataaatgcagttttgctataaatctgtcgtcaaattttttacttagaatttgacatttttcaacctaccgattagcacctgattagggcaaggcactgatcgtttttagctttgccactgtatagaacgaaagtgattgaacgataatactactttaacacgggtgagagatctcccatgatgtatatttcgcaacagtgttttaaaagttgcaagttatagtataatttgtagttatatgtaagttgcaatgtaattactatataattgtactatgttcctttaaaatataaagttacagtcctatataactaaaattatatttataaattcagttgatatgacatgtaagtatattgtaactttgataaaaatgttatgtaaataaatatgtattcgttattttctttaaaatataaaattatagtcctatataactaaaattatatttgtaaattcaattgatatgacatgtaagtgcactgtaactttgataaaaataatgtgtaagtaaatatgtatttgtcattttcttttgtagtctgttggatgtaaatctaaaggtataaaaaatctgggtgatttttttttgttaaaaatcactcgacaaatggataggcagttccttataaatgatgagtggcatacgtaggggtggcaacagggaggggcgggcccaggttgggacatgaatgtccccccctgctacctagggatgggaacggggcgggttgggctacaacggccctgcccccgaacctctgcacctggccctggccccgagtggagatgcggggccaaattagctgagggccccgcaacccaaccgggtccccgtattgggtagccactccatccgatcagcacgaaaaaaaaaactttccatgatcgcaaatactttcacacatacatatttccatgatccatcattccatccatgaactaaatgcatggatgaccaaaaatactttcacacatcaactcattcaactacagcaattcaccaagataataaaatcatagtctcacaacaattcaaccaccatactaaagtcaccgtctcgcccgtgccgctctgctcgttgtccctgcgagtcgcccgctcgctttatctgcgcgccgcaactgcgactgtgcgccgtcgctgcgcctttgcaccgcccactcgccgtgctgcacgtcacccatgcgcatccccgccgcgttgagaccagaggcagagggctgtgcgaccagaggggagaggggacagggaaacatgaggggagaggacgacggcgagaagtggagagcggtgagagagagacgagatccgaagcggcgagagagagcggcatgggggctcggtcactcgggggaggataaggtagggtaggtttttctgctttattatatacctcagattcccactatgtttagatgggcttcttgggcctataatgggctatattttgaggggtaatatacccctgggccccatgggccacggggcacccgcgggttgaatgtctcccccggcccctcacccgcccaaatgcggggccctggccccgactctccgcggggcagaaatggcacccgtcttcgtccccgtaggggcgggtccccgtaggggaaattgctatccctactactacctgctacccgctacccgcattctgccccggctcctattaacggttgttaagtaccaatttcgaccgccaactagcacaatgaataaaaagaaaattagcatttcttacacgtataacaataataaatgtagttgtattagacttggagaattaacatggatgcatagattatacatcaaagtgttggagaaatgaagctgacatgcaaagaaatacactttcggcgaatcacgtgcgagtacacggattgaggggcccacaagttagctcaaaccgattcaaagtggggccaaccacccggccgggaaccgactaagtgccccacctggcggtgaagagaggcggtgccaagggttcggctgaactgacattgcggtgcctcatctccacccattggctcctaataacagttgtggatgcttaatcaccattgaaccttcataagctgcctatttaaaagctcacttcctcactttcagcgcacacctcaaggagaaattctctctatttcatattgtattctctatattttagtagaaataaagcatatgagttttggcgctatagttttctctgagagtcgggtatgtctttagtactatactcttcttgtaagactatagttgaattaaatgaattatcttacttatttgattatgctcatagtctatgtatttctttattgaatatatgttctatgagtagtatatactttgtgatgaaggcgatgcaatgagtggcaaggagacatcgcgatgacgagcgatgagatggcgctaagtggtgatgagtggctttacggcgcagaggagcaacaatagccgccgtctttgccatgaacggccgctgtgcgcctgggatagggtgtgggagattagggaatctgggtttactatatacatgatctgcttacttaactcaatgggctagttgggcctatattattgtaatgtactatttttagggaggtaactaccaccccaaggccccgacgggtctcccacatggtgaaattctcccccattcctaaccccatattgacggttccccggtcccaatggagaaattaccacccctaggcatccgaatgtagttgtccttaataagagtatgttttctggtagaggtggatactacttgtaatttcatgcataccatatactaataaatttagagctaacatgtattagattgtctctaacacacaatctccaataactctaacactctcacatttttattggagtttgtgtatgggttaccccttgcatgaggggtggctctttctgtctctccattcttctctcctccaccttaccatttagtcatatttgtcatcttgaggtttgtgtttagatgcccatagcacttgctctaatatctaatatttaagcaacatattggatcaattgtgcatgtactaattattgagcattcccgggaattccatgttaattaaaaaccttgccgccggttagttggatcaataagcacaaacatagatcgcattatgaatctttcttaagggcccctttgaatcgcatgaatggaaaaatagaggaataggaaaaacacgtgattctaacatgaatgcatgtgtaaaacagaggattgaaaaatacagaaaaaaacatagggatgactatttgattagcccatatgaaaaacgtagaaatcggatgagagagatagactcaagggaatttttcaatgaggttggacctcttgctaactttctccaaaatctctatggggattatccattccataggaattttaaagcatatgatatgattcaatcatttacttcgaaggcccccataggaattattttttataagattaaaattctacaaagtttccccccttttcatagaaaccacccggggccttaaatccaaatgggctattgaaaaaaccccagattctttagtttctactccagttagtgttcgggtgtcgtaaaattanagattcttnagggcnagcgaacgcattcaaaanncggcccca

SEQ ID NO: 46813 - DNA, 1231 bp, Oryza sativa
  unsure (1)..(1231): unsure at all n locations
caggagttgctactatgttatatatctagaatgtacaagtgcaaagtttgagtactctctctcgtattaaacaaggagacatgggggcttacccacacacccaatctcatgtcgtaacacatgcttctcttcaccttgggtgggtgagagacaacatagatcatagagtacaattatctcatccattgcctaactcttattccggaagttttcaaatgattttgcaaataaaaccaagttcctcaagtgattctctaaatcactcaatgtgtatgaatattgttcctcaccaagattatgcctttttgtctcctacactaaagctgaatatgtgcggtttgttagggattaagaacaaggcatacttgcaatcacatttattactaagtcaaaaaatctagataagcagatagcaaatcatacttaagatcaagatcgtgcatcgtgtttggaatatatggtggaaatgaaatgaacataattactccttttgtatacctcttcctcattttttaaagcttttgagagagtctttttggctaaatatantttttctcaagaatatttttgagagagntcatgcccccatatgagagagaatatttctctctctctcttctctagccaatctcctctnttattttcttttggaaaagaggtataaatatcatggagtcctaattagtggatgacatatatggtatatgatggattggaatanatgctacctttcaatgtaaaaacttaacaccatgggcacatatgtgggggcatgaacttgaacactaaggttaaaaagcctctacattaatcattaaggttgacaaaaattaatgggcttcccagcaaccacaaggataaagggttaaccatgcgcaaacattttggcattggtgggattctaatcaaagaggaacctttaaaattatattttgaaaccaaaatattgggagtaaagcaaacttggggaagggttataaacctatttacttatttttttttcaaacaccccacattaaaaaggcggggggcactattcttttaggggccgcaaaaaattgggttgcctctcttacacgggggaaacctcctctttggctatcaatcgaaaattagagacagagatttttttttatttcatccgcgcatagatggggtcacaaccaacaaaagacacctttttgggtttttttttgagaatattatttggtaacatattagcgcggcgggg

SEQ ID NO: 46814 - DNA, 1185 bp, Oryza sativa
  unsure (1)..(1185): unsure at all n locations
ctgtgcctatctacttgatctattcatctcggagttgtgaatggcataagtatatatatggagatgcttgcgtantggggtgtacgttggcatctgttgaagtgtatcgatcggcctaccatatcaaagtgttaattcaacacccaaaagtacatgaagcatcaatttatatagatggcaaaaaaagttactggtagggcttgatacacagtactaaaaggcaagtattccttccgatcacaaatacttacatttcttaggagaataaccgatcgaaattagaatatttgactataaagtaattttaaaatacatagtttgaaaacataaaaatggtatgtgcaaatttataacgagaggtacttttataatctcataaatttattggaaaagaaatttgaggtcagagtcataccttaattaaagagacccagaaaaaagacgacttcatgcttggttctcacgagcagggagcagaaatagatcttatctgcatatatgattgtatgaattttcgcttattgttaacacagccaattaggcaaactcgcagtccattcaagataaagcattgtaacatgtctatattggtaccatataacatcttctcttatctataaaggataaaaaatcctactgtagttacccatggtactcatctaccgctttcacagctggtgtgtatgtaggatcgaatcataagaacttaaccaaccagagggggggtgatgattggtataccaaaaaccggaaacttttagcggaantaaagttacccttctaatcgacggaagtcgtctgaacgagattgatctgcgtcttgacggtgttgatctcggctgacggcgaattcctgcccgcctgtgcacccgccgtttacggccggttctgcggtngaccgcgcatggcggcgttttaaccgcggagttgccggttaaccttnaaaccgggaaacaaaatgggaaccttaaaggggtgcgaccttttggttctttgggtacaagggccacagcttcttcaaaatttgctaactcgaacctaataaaataacttttgtttttagaggcccggagaccaccttccctttttttcagagtngcggcttgagcccaccaacttttctgggctaacctgaaaactcttccgaagaattttaacaagggcaattgcctctccaagctcccc

SEQ ID NO: 46815 - DNA, 1810 bp, Oryza sativa
  unsure (1)..(1810): unsure at all n locations
tagtgtgaagttgtaccacatatccgtttacatccccctctcctggcctgtttttgctcttctagcgagggtccctttgaaatacaaggaaaaacaaaggaaccatttaggaatcactaggaatgagcaaaggacaaatgtgggatattcttctttccctgcgattatagaggaaaatgggtaggaaatttaacgtccactccaacatcatggtgaaggcaaatcatctagttgttacagacttgttcgttgatttattgtagacatctgacacaatttacaccaataatataatctagaggaatttacatgttttttctacaaccaaataaatgcatagttctacaaaattcccatgttttttcaatagtttatttcacatatctgttcctatcttattcctttgtttttcctaattttatataaaagtcttgtgtttcaaatgagccaaattatgtaattttgtacatattaatagtttctctctacatataaactttccgaaacatgtatagtgatgcgccgaacgcatatagcactatagaaaaaggcttttcccaggcggccaaatcatattttcgcaggcggacaagccatccgcctacacctcaacgcctgcgaaaatagttgatttttgcaggcgggcaacacatccgactgcgaaaatagcttcgagtgctaaaagaaaaatgggcagccaccgccggacggcggtagcttcccgttcccaatccattcccgaatcaccgaatcaattgtggcaaagaaagcaaataaagacattcaaaaaaatcacggccgccgcctagccgtcgtccgtcgccgccgctgcatgtccgcgccacgccgtcgtccgccgctgcatgtccgccgccgccgcacggctgtggcccgccgtcgtccgcgccgccgccgctgctgcctcaacccccctcgccgctgtggccgcgccgcctcgtccctcctcgccaccaccgctcgccgccgtgctcctcccgcccccctgcggccagatctgggagggaggggccgggagccgcctgatatcgttatctacagcccattttggacagatctaagagggagggcgcgatatccgtactccctggtcttaaccctaactgggtttaaatagcattgggaaaaagcgggaaaagatctttattcccggttggagagaacccccgggagcaaaagccaggttcccggccggatgtctttctcctccccccttaaagcattatttggaatttaatattcgccggggcgggccgcttttccttgtcttaccttcccttataactatttggtccgcgccgcggctttttggctatttcctttcctcttcctttaggcagggaatctctccatctgacactctcagacgtaattttatatgtggtacctgtgccatgtcctttgtattcggtactcgtctttttttctgttctcttcgtacaatgctttgtgttgctccaacctcccccctctgccttacatatgctttatcttcccactttcctcaaataaatttctttcgttacctttantctctctccctggccttcatattcatcccgtgcgtttctctcctaatcttgttattttctatctctgctttgctttaatatcataagccttttattccctccttactattataacctgttcgtccgcagatcctaacctcgttacttctctattacctctcctctaattgctcttttatttatctgttactatctcctaatctgcctctatcctttctttagtatctttcttcatttttctctctttctcacatagtccg

SEQ ID NO: 46816 - DNA, 2175 bp, Oryza sativa
  unsure (1)..(2175): unsure at all n locations
gaggggnnnatganatcatgctcggcactcctagattttcgcatgcggacatcaaatttcaccctgacttatatttttgtaggccgttatttggctctaagcgtcatgtccgcctgcgaaaataagacccctatgttgggaaaaatgctttttctagtagtgtaggccaaacataacgcattttggtgcatatgtctagctgcataaatattcgcccactagaagtactccacatgtcacaattgttaaaactacggtgttctccatgacgggcgttttgatagtgggtgccatatggcaggccatgcactgtgccatgacatgtcattacttgccgtaacgtggtaaaatctttaatctgaaagctcagaattccatttacagttaagattttcctttggtatatcagatgagtactcttaacagaagacattttgattaaaaggagaaggaaaggaagtttctataactctaaagaaacaattcaacatctctttttttattgtcatgctgcacatttggtttggaatgctcttttcatggttctagctagaatacaagtgcccacttatgttgctaatcttctaggtggttggtcgacggacttagtacctaagcttagagatcaactcttcgtgggagttgcggctatctgttgggcactttggcttgctagtaatgatgtagttatcaatggctcaagtataaactttttcttgcaggttattttttgggggacgcactggagtcgccagtggtccttgcttcttaaagaaggtgacaaggaagctgtgaagatggggtgccaaaaatcgaaagttatcgttatggaattctactcaaagtctcgacggaattgtagaggaagattgaattgttagctgaaatttttttgttgtgagacttgttctggatgtttttgtcatctatttgccttctatggtggcgtttgcttttgaacttgtttgtcagcctaagtgtgtggtgatgtaatactgcggctgcgtacatccttcgggatgtataaggcaggttttatttaatccattatcttaaaaaaaaaagtcgttacttcccttggcccagtcactgtcccagcagcacaagatttgcagataaaatcatcgattgtcttgaaaaccactgagaaattagggctaattattctggacggttgcgtcaacatttatctgggcttccagtgtgcctgctatcaaagcttgtttgacttgaaggatgaagtgaagctgatcaactgggaaatttgagtcagctaatgtttcgtgtactacataagacttgacgcaaccgagctaactggataaacgtggataaatcatatgtgttggcaacttttttatgataagttgacaacaacgatcgcagcacctaatgctttgaggtgatcctagagtcgccaatcaccttaacctagcaaaaactagaccaagatgggttttgataactaaactagctagcggagccgattactagataactacccgtctcgtgggtaaaacggaaggttttcaggataaacctataaagaggtgtcgcactctcacagcggcgccggacgatttacggtgcaaatcgacaaagatggacaaactaagagaaaactaaaaacaatatgaaaaacgattcgattgattgattgtagattggttagttacagttgaaccggccatgtcccttatataggggttggtcttgacctctacagtcccctccttcatgtctaactcgagatagaatccaaagaaaacccgaaacatatcttcccaagcaaggaaacctcgagacccgacgaaacacactcggacttagacctgctggtcagaccggccacacaccgccggtctgaccggccctcaaccggcggtctgaccggtcaacacatggcggtcagaccggcccactcaaaggaaaccggtagatttttaaattttggcaattcttcctattttaatcttagatgtcaaatttaggtgtaaacaatatgtacctgcaaaatactcttgtttgaaacagcatggtttaagatatattgccgcgattaatttgcccattgtagttatcaccacgagtcttaattttcgttaccacactactagaacaaaattagattgtttggaaagaaaaatcctctgtcttgaagtgcccgtcaaagat

SEQ ID NO: 46817 - DNA, 1834 bp, Oryza sativa
  unsure (1)..(1834): unsure at all n locations
ggggcccctttgattgcgttcgttgcaccgcccagtttagtgatcaatggtctagaacatgaaagctatttttccctgatgccactcattccgataaaaggcgcgctggcctggtggtcggctggatgatgatgaacctcgatctgcacttaacgtgcttctgccttgtaacaaattaaatgcagaataatgtgtcgcgctgtcccaattgtggcttggccggtagaaatttctgtgtgaactaatgcttacagataataagtgatgtgtcgcgaacatgaatatatacaccaagagcgacggcaattagaaagcgctattccctttatatatgacttgtgggtgtgctaagtgtatgtaaccatacaatttatcatgtacacatatttatgtcaatgttagaacctttatacaataattcagacaggtgcacaactctactttctcttactcaacccaatggacatattctccattggctcagcatgtccgcggacatgacctgaagggagaagctctagcgaccgttttagaacatctcaccaaatatgttttcctgacgtgttctttccaactagttattgactgtactgtgcatcgatcagagctccacaatgaaaataagaaatcggttcacataagataaataactaagatattaaatggaaattaacttctggcaaaagaaaataattattttccaggcagggtagcaatgaattaaacaacaaaagtttcgcatgcctgctggtccaaaacatatgacatctaacttattctgttgctagctactttcttgcaatagaggattatgttcttttatgcaaacgattgttcccaaatcccaattatagttaaagaaacagattggtaaataacgtttgcactttttcctcggattcacctaaatatttatggtgttattaacggagtagccaaccaccttaatctaaaaaaactctaaattgatatggggtttaaatattaactgaaggtgaaacaacgattcaatagattgtagagattatggtcggggggttagaatcgaaccagccataacccttataaaaggtttggtcttgtcatcataggaccttcgtcatgttctattaggatcaagaaacctcacgcccgagcaagaaaactcgagaaatgataaactggacagagtcagactctgctggtttgagtggtcacatgccgctggtcagaccggacccacaccgtcggtctggtttgccctatgattatggtcaggcctcatatggcgaagatggtctttttcaaatctggccatatttttctatttatcttattaggtgctaaatatgggtgttaacagatactaggtactacttttctatggacacatacatcacagctagattgctgcgccaatacaagatacattcgcaccagatgaagatgttgtcacttcctcttgtccaaaacgctccctggctaagctagggagcaattcagtgtctatgccaatgaaggtgtttttcgtgatgccactcattccccaaaatataaataggtgaactgaagaatgtttagcgctccaattacacactgcacgatggcccacttttcctaatagtagtcagttggggaagaccaagatttgcctacggaatatgtgtagacaaatctatgtagaaattaaaggcatggggattatgtggcggcaattcttcattttgcataaataaatattatctgtcccatgcatttgtttattcaacttgctttccaattcatttttttggtggggatcctctaaagtcgncctgcnggcntnttngaatgggaatctacatatcaaacgctg

SEQ ID NO: 46818 - DNA, 3119 bp, Oryza sativa
  unsure (1)..(3119): unsure at all n locations
cggcgtggttgtttttgacatgcagctcggcacccttacaatcttcccttgggattaaagaaatacgataccttgtaatactcccgagtgaaatgctacaatgctacatccgtgcgcttgcggattctttctataaaccatatatatactaggacaatttctagcgcatttactgggaatttatatttctagtaatgtcggtaagaaataccaacaacgtcctcgtcgcattcgatggaggccgacatctcggtggagatcgggatcatcggcaccttggtggacaatggccccagcgaggatgaggggcgacgggtggacgatggccccgaggacacggtactctacgcaaagcggccaaactcgtcgtgctcctgacgccgggagtggtggttggggtgaccacccatcgtcgcacctccacctattgttgcgatctgtacatgattcctattgctgcgatctgcagatgatgggggcgaagaatatgttgcgccggttgatgggagaagttggggagaaggcgaggggtgtgaagtggggagaagacgagtggaaagggggcaggcatctaaaatactaatttttaacgattagggccactgacttgtggggctgccaaggacaacagagtgatcctctgtcatgttggacccattgtagtcaacacgaagtcaaggtgggttgaatccaatgtgccactgaaatgcggctcctacatgtcggcgttagtttctttccgagttatagattattttttgctgatcttcttattaattattttgtattttgatttataacaaaaactttaaacatgtatagattttgcatatgttgtctagatcaggtggttctttttttctaaattcttacgaaacttttttctaactcatgcattcatttgcatcacatggattcattttcttgctcaacaatagatgtcgattccagtaaaaaaacaatagatgtcgattctcacatcacgtggattcatattgcatcatgttacacgagtttacaaatccgtttttctatgtttaattagagtttaaccattaataaaaaaatattctaggattatgatgcaataatgaattaatattgcataggaaaatcggatttattgcgtcatcaaggattggtcccccatagacttggttcaccgagagagtccatagctgtccatgggaatggtcgactgagatagatcttgactgggaattgaccgagatcatacggccaagattgaatccagatggatgccacacgggcaaaacacgcaagcggcaatgcaagcgaagggctgaggtggcagctgaagaggcagacaatgtggcgctgatgtcacctcacttgcaatgaccgacgtcgaaccggaaggacgctggcgttccacgccacgacggcagaaacgaaggacaccggaaggacaagcgtgactcaaggaactcacaaggggtgcagcaaggatggatgacgacggccaacttttggtggtgaggttggtcggcgatggtggtgacgctctggcaattgacgatggcaacgaagaggtggcgatgatgacctctggtggcaacggaaacggcggtggggctcaactagagttcaacaaacgatggtggcggcgctacgaacgacgagagcctagggcaaagagtggaaacaagagaggagattaggggattctatttaaaggcgggggaggaagagagcaacactaggacaagagaatttgttgtcggatttttcggggggaaagaaaaggaggaaaagggaaagatttccccttaacaattttgcaaaatctttacgggttcgaggggatttcgtggttgaagacactgttgtgggaggaaatgtataatttttcttccttctttgagcccgtgggaggacgaaacttatattttggccggaaagaaaaagaggttggccggcgggcgtggtgagagagagaagggtatgggctgaaacaaattgaagatttattttcatttatataagtaccaaaaaaaatctttgtattattaaaattagtaatatgagctctcaaaaatccgagaaaattcgagagtgtaattaatcatggagaatttaataaaaattaaatcaaaccatgttttaataaggaaattttatttctcacattttacttcatttgtaattaaagaacatttaatataaattctaaaaatgaaaatcagggtgtgacctttttctaccataaggttgtagggttatttttctagaagatttcccctataatgatatctatggtttcataatatctcaaaccaagggtttgggtaaatggtgttagtttatacctgtttttatatacacaaattaatcgaccaggttttaaacacaaatagatttaaaatatccatctattactaagaacgtacaagatttcgacttaaattgtttattaaaactacaggatgttacatgggccgagtggactaggctcatgtggcatgatgtaatttgataaaggtggcaggtacctgcattataagatgaaccgttttcactagtttgttgtgtaaaataagccgaaaattaatttagggggttaagcgctgtggcaaaatagttcggtgggagtaaaagggatttttttccaaaaagaaaaaatgcattatttttaagtgttaccaatgtttcgtaaacaaactaagtctactttcctttttacaagatcaagaagattaaagaaaattgcttatagggatgcattaaatattatatattatagatctagcaacaaacaatttagaaaaactagtgagcaatgctgagaatgaaaatttatagagatatcgtattgttttttaagagtgacaggtgttatccagtcaatattttactcttatgtttttcatatacttgtctatgatgcatgcccatnngcatcaccgttgnncgtgggnaatttnttttnttnttttcccggnaaanaaaggggttttttttggggttttttttaaaattttttaaatgttcagggaagaagagttaaaagctatatnatatatatatgnatatatatatatatatatannnnnatannntannnnnttgccttgtagntgnatatnnnnnnncattat

SEQ ID NO: 46819 - DNA, 583 bp, Oryza sativa
tatattattctgcttcatatatactcaatgcgtggctctaaaatacgcgaaagagaacatactctgtcgatagctcgattagttatatcaaccacgtctgactctgaaatacgcgcacgacgaaaagaaaaaatagtatatataataatgttttaattttttttaaaaaaattgcatcttcactggcgggccacgtgtcagaactaggacagtccatatcttcgctgtcgggccacgtgtccatccacagaagccttacttcatttttcctagcgtgccacgtggcctaaaatactgagccgccagcaaagaattatcttcgctggcggccgacctaaggctaacgcaaatggagatacttctttgctggcggccgcattatgtccgtcgccagcaaagacatgtcttcgctggcggccgtcctaaggctaccgccagcgaagacatctctttggtggcgggcgttcctttctcggccgccagcgaagatgcattttggctggcggtaaataaccgctagcgaaaatcgacattttcactggcctttgctttctggcgggtgcgatttccgccagcggaaatc

SEQ ID NO: 46820 - DNA, 818 bp, Oryza sativa
  unsure (1)..(818): unsure at all n locations
tgtggcacgtggttacacgtgaggaagatgtgtcttgtgggtaaagatgtacacctctaatcagagtataatctattcgaatagccgcgccctcggttatgggcaagccgagtaatgtacccaagttagtgttttaattcttaaaacctgcttaacaactaaaatgtggaatggttggcctgggttggcttgggacgagctgggacccagggtcgggttgccggttcggtctgaatcatcgtaggccttgggttaaggcaggttcatgtgggttcacggccttgataaataatattgcatagttctagaatcgtgtttacaaaatagctttgagcaactaagcatctttaaatgctgtttactgcaaccctaaccctttatattataacccccttgtactcccttgcatttattatgcacttgtgggtgtgtcttgttgagtacggtggttgtactcagtcttgctcaatttttcccaacccagaagaggagcccctggatgatgaaggctttggtgtctagctcgtgcctgccgtcaagcgcctgtggtcgtcgccctagtcttccgctgtttctcggttgtctttgtgtgtgctgggccttcgtcggccatgtaataaattatctatttacgctttcgcttggtgaactctgaattggatcaacttttggtgtaccctgccttctgtgacaaagaattatgcacgcacttanggaacgcccgtgggttattttcgcgtcgtgaaaagtggtattaaaagcccctttgacctaggatgagctggagattcccaagccttaacaatatttttcaaaaa

SEQ ID NO: 46821 - DNA, 968 bp, Oryza sativa
  unsure (1)..(968): unsure at all n locations
gcgtgattaggacatcttcttgcagcacgccngcaagacgactatagaggatccccagactaaaataatcatgtatgctaagtgtttcctgtgcatatgctaaggctaattaagactactgtngccaattgctaggaggggcaccaattccgtagtcaataatgtcatactcagcctaattagcaataaataatcttacattaaaactcaaataatattagaacactacacaatcttatatgatcagggtaattacaggtctaataatcttaattaattggattacaaatataacaatcatttatattattacgtcacttgcctgctccaattccttctagggctagctcttccactcaggcttgacggacgactccgacaacacgtcttttctgcaagatacaaaaaaatgtattaggataaatgcgaagtaacatatatatatatatatatatatatatatatattgcatttcacgttaacgttcgtcctcgttcgttcgctcgttcacgttccctagctcgttcacgttcgttcgctcgttctcattcacgttcgttcgcttgttctcattcacgtttgttccctcattctcgcttgtcttcgttcgatcgttctcgttctcgttctcgctctcgttcgttcgatcgttctcgttctcgttcacgttctcgcggcaacgtacgttgacgtgttcgttctcgctctcgttcgttcgatcgttctcgttctcgttcacgttgtcgcggcaacgtacgttgacgtgttcgttctcgctctcgttcgttcgatcgttctcgttctcgttcgttaacggcggtgtggcggcatcggggcggcggttggcgcggcagcgtgccgacggcggcggcggcgtggcgttccggggccatggcggtggcggcgtggcgtggcgtgacggcggcggcgtggcgtggcggcggcggcgttgcgcgcgcggcggcgaa

SEQ ID NO: 46822 - DNA, 942 bp, Oryza sativa
gtctaattttttaaaagaaacattgtagcttccattttttagaaggagcaaagaaatctttaaataaaggaatggttgggcccaacagatgtaaatataaacaccataaataaaaatttatttggggaacaaaataaacattaatagaaatttaaatttgataatcctaaacaaaactctccgtattaattagattaaacaagggaaaagaatatagatttttagaataaaatgaagtaataaaaaattaaaagattcgaaatctaaagtatatattaacaaattaaaaatagtaaccttagacgatttaaataaaaaaactaacagaaatataaatgctcaatataaagaggagcgaaaatataaacataaataaaactatatttttgaaaaaaaataaaaagaaaggatacttttaaataaaacaccagaaggaataaagggagatatttagaaagaagattaaagttaagtaaatgaaagagtattttaaaaatgataatttaataaaaaagataccaacattaaattgatataatatatattaaaaggaaaattaaaagatatagtacccttttatattaacaagtttattacagcagaaattggaaaaaaaaacccatccaatggtttttgacccccacccgggactaaagatctaggggtatatatattcccgatgcgcgccctcgtcttatccaccaacacttagaagttttttctccgatcgatctctttctcggcttctctttcaccgccactgcttacggcatccccgcaccgacgccgccgtcgtatctcgccgtcgtctcgcgtacgtcgtcgtcgccacctctgccgccgccgcatctctggggtgagagccgccgccgcctccctctctctctcagacctcaatctctctctctctccccaaaccgccgtcggccgcctcgttgccga

SEQ ID NO: 46823 - DNA, 876 bp, Oryza sativa
  unsure (1)..(876): unsure at all n locations
aatgcttggtactgatgttgttgttttatcnctcttctctcaattgtaagantatatttttgtctttttttcttctatttntttnnnnnnnnnnnnggcgtgttgttgatcgactccctcacganagcgcgaanncnagctcggnacccgaccacaccacggggcaccatctgatggaagtcgatcgagccgtgtcgacgccttcttctgcgcgccaggtgcatgatggtagtgtcatcctccgagctggcatcccggaaggtggcgtaatcgcgggctccttcgcgacaagggtggtagcggtagggcgagtgctgtagctcgtccgggtagcgctggtgaagagtgcccatggcgaagagagcggcgctctggcaagcggcggagaaagaatctccacccgcggtgactgccaacgaagtcctctcgggtgagccagtgaggatcactacagtaacctcccaagcagcgtggggctctgcatcgtcaccctcctgctccgggagcgttctgccctggtagtccactccatgcgaataccccaagacaacgcacatgccccgcagctccaagacgaaaccagtcaggtccagaccacgacggctgacgctgccggccatctacaaacaaaaacaaaaagaaaagcaacatttaaaagtcagattttggcgataaatgaagcagcaggacagagagagactagagagttttcacaaatagcaaaggatttttatttttgataatattgctaaggcttgggatctacggctcgtcctagggtcaagggggctctgataccaacttgtcacgaccggaattaacccaacgggcgttcctttcgtgcgtgtattattccttgtcccaggaggcaaggta

SEQ ID NO: 46824 - DNA, 560 bp, Oryza sativa
cgggtgggtaatcggtctcactatcgggcgaattcgagctcggtacccttttctatcccgcagtctaaaactataggtacctaaatctgcacagaacctatctagatttgaagtataagtggtgtctaatcgcagaattaggtacctatagttttagactgcgggatagaaaatatggtcgacaaatatatattattcacaaatggcctaatgttatgttccgtgcttaatatagggattcgaggtcgttaacttcacaacgccggtgtcgagtgtcaaggttttatctctcgtcatgaaaaatctcagcttggacagggttatcatgttaatgatttgctttccatgcttggagaaattgtacatcaaaggaaaaattcttttattttcaagtattgtgttacaatacttcttttgtcagtttaaataattagaaggtatttaatttgaagaacttaaattattccccatttcttatttcaggggttcaagtgtggggaaactaattattgacgccgcaagtatctgaaaactatcaaaagccataacatatctctaaa

SEQ ID NO: 46825 - DNA, 1064 bp, Oryza sativa
  unsure (1)..(1064): unsure at all n locations
ctacgaatccgaaactatttatagctatctttagtccgggtgaaataaccggggtgtaactttaaccggtactataaatacagtagagtcatcaccaatttgttttctttttttttcatttgttttttgtttgcatattaatttcgcgtcaaaatcacaaatcaaataaacattcacattcacagatcaacgctaaattcacaaatcaaataaacattcacagatctttgatatcacaaattcacatactcaacaataaaattaatcgtccacaaattcacaaaaaataatcataaacaacaccatgcatttacacaacaaaaaatcaacacaacacagatccgccgccgacccctccgagccgtagtcggccaccccttcgnccgtncgnccacccgncacctgccgttatcttccactccacctgccgccacccttcacggccttcatggcgtgctgccatgcaccaccgccggccaccacctgccaccaagagagaagcccgtgaagagaagaagaaatcgagaggagaggggagatgagtctggcgaagggataagacgtgcgcggtggacgagaagatagtgtctcgagagtgaaggtgtgcggctatattttttttcaaatgtggtcctagttggtataaacaaccgggactaaatatatatctttaaaccggactaaagatagtggggccggatgactttttaaactgggactaaaaatgatctttagtcctggttataaagatcaaaaagttcccttgggttttttaactgggactaaaaagaatctttaatcccggttcctatttgaaccggggctattgttccactagtgattacgtgtctataaaatgcatgctatagcggtatagcccaagtctcagagctatgtattcttacacgcgtacaacctcatgttgaaatggtggttgaattaccgactaatttcttcctgtatatgttgatagttgcgtcgattagttttaaattacgactgaaaatttaaagagatacacatccataattgaagaattgaagataaaaattacggtacggtca

SEQ ID NO: 46826 - DNA, 659 bp, Oryza sativa
  unsure (1)..(659): unsure at all n locations
tccgaccggccgccgccgctcgtcgtcagctcccgccgcctcccgctcagctccgccgcggcgccgccacggccgcccgtccctcctccgcctgctccctctcccggcgccgctccgtcctcctccgcctgttctctccgccgcgtccgccgcctcatccgcgaccagcccccgccgctcgaccgctcctcgcctcgtctccgcgcccacctccacctcgtccgcgaccggccgccgccgctcgtcgttagctcccgccgcctcccactcggctccgccacggccactcatccctcccccgcctgctctctccgccacgtccgccgcctcatccgcgaccggccgccgccgctcgaccggntcctggcctatntnccggccccggctcggcttgtncgcgaccggcttcgggaccggccgcggcggtcgtggtaagttccggcggcttccggtcgggttcggtggggggtggcctttctttcgttggggcgacctggttcttcggccccaattttaccggccgtgaaacaatggccattccatnccaacctcatccctttttcccaaccaaaaactataaccattctttaccacaaaccaaaccccacaactgggaccattccattcaaaaaaaggggaataggcctaccccatcccac

SEQ ID NO: 46827 - DNA, 1815 bp, Oryza sativa
  unsure (1)..(1815): unsure at all n locations
gacttttatggcggatggtacaccgaccgttcttttggcctctgtgttcgaatcctgcgctgtgatgtcaccgttatcatacatacatgcatattctcaactttagcaaaggttgcgttcttgcagctttaaaagaaaatgctttaattaatactttctccatattttaatgtatgacgccattaactttttaaccaatgtttgactactcgttttattccaaatttgtatgcaaatataaaaatacttatgtcgtgcttaaagaacatttgatgataaatcaagtcataataaaataaattataattacataaattttttaaataagacgaaagttcaaacgtttgtcaaaaagtcaacagcgtcatacattaaaatacgaagggagtatataaattgaatggcttaaaccgaaacagcatccatgatatgcaaaacttcacatattaaaatctgtagtacaactaattaaagtacttacataacatcccgattgggtattaaattttctggcgttttggcgtgggcatctaattccaattccgagctaacaaaagaagatcgaacaaaatgtgacagaccactcataaactctagtggatggaacccgcgtattgctgcggagttttgtgcagacaaaagcaaaaaagaatatatagggagacggcactaaataagaaagaaattcatcaaaactaaaacatatactaatagctagggagatcgattcgttcgagtataagtcgatgcccgcattttctcattaattagattaaactttttgggttaaattggttgatgtatctaactcaatatatggtttagtcaaaagatctcgagttcaatttccggctgacatgtaattaaataaaaatttgcagcccatcactattctatactagttgataccccgcgcgttgctgcgggcataaaagagcatttttttctatgtgcaatatcagtgcaaaaatcctaaataaacttgcttacaatttgctgagaatgtcttatgataatatgatccacggacgctatgcctgcctgagtactacagagatgggctgagagaaaaagacgtgggaggctaggagcccatcagcccagctgctttacattgatcttgggcctcctgtctatctacggataagcagacggattgatcggacggctgaaaaacactgatgacgtggatgaatgtaacgccccgattttcgttcgggattaaaaatcattaaataatgcattttctagaaattaaataaaagttaaatcaatttaatcaagtgaaattatggaggaaattaaaattttcctttaaaaatcattggccgagaatattttgtaatattctttgtgccctaaaatactctccagatttttcccgtgaattttcggagctcaagaaataattttaaagttacaaagttcattaactcaatttagaataaaaagaaaacaaataaaaatctccttcttctctttgggctgctttcggcccaatccccctccctccttctttcctctccggcccagccgcctccctcctcccctcttctctctcgggtcggcccagcctagctctcctctctttaagtccacataacacccttcctcggccctctctctctctccgaccaacatgtgggacccgaggccccacatgtcaggaccgtccccaaccttcggccggcctccatggccgccgaaaccaccccacgacgccgcttcctccgcgcgcctccacgctcccgcgcgcgtgcagacgtggtccaccccacggggtaccgagatcgaatcncaatnnanangggcgcc

SEQ ID NO: 46828 - DNA, 769 bp, Oryza sativa
ccgtttgattagcactccgcaccctgatatgttttattttcaaagaaaaagaacacttattttagataaaagtaactttggttttagatagaagtaacttcagttctaaatagaagtaattttggtttcaaaaatagatgtaactttgtttctaaatagaattaactttgttttaatataaaagtaacttaatttggttttacatagaagtaactttagttttaaatagatgaaactttgttttagcataaaagtaactttggtgtttagatagaaataactatgttttcagatataaataattttgattttatatagaagtaactttgtttccagatataagtaacttcggtacagatagaagaaacttaatttggttttagatacaagcaactttgtttttacatgcatggtctaagatagaagtaacttaggtattcctaataaaagtaacttcagtactatttattttctgatttaacgatgtttaaagttgtttatacaaattttggaactaattaatggcaagccggacacaaattttggcaatatgattatggatgtaatataacctatttagtagtaacatatacataatacagatataactatatgtatattggtcctttctgccattctccttttatgtaggattaaaaaataaatacatggaagtatcggcggaagatagatatatatatagtttatgaactgaaatgatcgaagtgtcaagatgtttttcggcttaaaagcatgtttgtgttttttt

SEQ ID NO: 46829 - DNA, 753 bp, Oryza sativa
cgaggctttggttgacgttcgactgcaagtagctcatcaaatcggcggcgttacaaatgtaccccccttacaggaatctggtcccaagattttgggatggcttgaaagaaagctggtgctggcgggctgtctgactgatctgctgacacatgctgactctttctgattcaactgactgattgctgcatgaaccaaacctcgcttagcttgctgatgctgtgcttgccatacactgaatagaccgacttccattagtgtgaccttgaccaaaattgctagtgctgatagaatatcttttatttggactgaaccactaacattgtataccttagtgacctgtgagctcaccaagcatactacaaacttgcaaagctttcatgaaaacttggatgttgacttgcatgaatgacagattctgactttattttaacctacttctgacgggaaccacaggtatgctaagaggctggttgaatggtctttcagaaggactagaactggtcttggcactggttgcctaagctggacaggtgagttggcctcacggggttaccctggaattcaatcacataacctgagaccggtgttattattgtgacgccctataattggcttctttaagatatacccaaatggctgcactgggctggaccttccaatagaacgacgacgaggtgagcccacactcatctcttgagactaccccccatacagagagtagtgtacttttggccgactgggacaaatgtactt

SEQ ID NO: 46830 - DNA, 812 bp, Oryza sativa
  unsure (1)..(812): unsure at all n locations
ttccagatcatcaagggtgtcagactttcatnactatttgaatttgaagtgttgagattgatancccttttgctccaagctttaagaccccttctaagatttttgagcttagcattcaaagataatagctggtgctttcctctcactggtattgaccacagcatcacaaggttttgatctcgaatcttttgaaagatttattgtaccagaggttagttgtactttgtcctactctttttgtcaacttttttttcatttttattggttgtatgttgagatttttcatcgcaaaaaatacttgacatggaggaagaaaaacattttttatttgttatttggagctcaaaatggcaaaatttgcaagaaatattgtgcatgatcgatgttccatatatatatctagttttcgataggtttatttttagcagatttatatattagttaactgcaaaagaatgagctagctaggaagagaagaagagaaagaagggtagtttggtaattcgtctgagggatgtatgttttatatatgcagatttttggctagctttaattatcttgttcaaaatatttgaactaactaaagttgtattattttttccgcaattaattaattaatgcatagatggcagacagggcacggatgaataaagagagatatcgtgcgtcatacattgaatgagtcgacatattcatgaaagcagctaagaagaatgctgcatctaagaagaccaaagatattagatgtccatgcgtgcactgcaaaaatcatgatgaactacttgcagtagaacgaatgcaaatcaagctct

SEQ ID NO: 46831 - DNA, 722 bp, Oryza sativa
agaggtttgaattgcgttctactgcaataggtcatcacaataagtggccggtaagtacatatatatggatgccaaacaggactacttaattttcataaatgcttgagtgtttccatgtaataacctattataccttataattatttcgatgttgaaagtgtcacaagcaaccggtgggaacaggactatgtggatattaatgttgtgagttcctaagggttaatgggaaatattgcgcgaattacgacaaggtgagtaatacacacttgttaaattagtggctaacttgcattattgtgaatagttaatttccttaattctgacatgatctgatgtagcttccaaaatttcccaagtatgaaagagagctcaatgatacatgcattcagaacattgaggcggacatgtgctactctatgcaccgggagtgcgcacatcatcttgggctgttttttgacaacgaatgaatgttagccctgccggagaacaaatacctggttaactggaccaggcgtataatataggtagaggtttgtaattcattcaaaatacttcgtaatggtatggccgcagtcaaaattaattttgtgacgtacatatatatgggagcttccgcatattgaatatatgcagagcatcccggctcacatatacctcatgcgttgctctgagatacgcgcaagagaacatactctatcgatagctggattaagtatatcaac

SEQ ID NO: 46832 - DNA, 737 bp, Oryza sativa
  unsure (1)..(737): unsure at all n locations
acacttccatggaactataattgtgctaaacacaccacagaagaggctcacctggctgtgagaacacatgatggaagaatttgaccagaacagaaaggttggggacagcgtccctgaagaaacaatgactgatctgaggtctctaaacgagttggagttcattaggcaaggagcctaactggacagtaggagcattccaggcagtgggaacagtatgtgcaaatgccctgtggccaaagctatgctagacaatgagatggactggagggagacataggtggccatgtgatgtaagatgggctatgacggtgggcagtggctgcactgggtaagacactatatcattttctctttgtctgcaggttcctcaaaggattttaagtcatatgattaggtttgtattttgaaaaaattactctggctgcctacaaaataaagatttacaatttatttatagatttataatttataagaaaaagattccacagtcctactagaagaggaatggcaaatatatgccatacttgtcacaattccctattgtcatgcccagagcagacagcactaatcaattacagcagaggttctcaaagtgtgggcctcagaccagcagcatcagcatcacatgagaatttcttaggaatgcaaatcatcagacttcacaccagaccccttgaatgggaaactctaggggtaaaagcctgatganctncgaagcgcgtntcacctgcacatct

SEQ ID NO: 46833 - DNA, 795 bp, Oryza sativa
  unsure (1)..(795): unsure at all n locations
cgtgggnnttgannttgnttaatgccttcacattggtacagtcgttcattagaacttttaacacttntacatcattcatgtgcttattatatattatccacttaatttactgtggacaacaatatattttgaaggctttgtcattaattttgtgactttaaatcattttaatgcattatttactattttagaaacccatatgtaatgaaatgtaatatgcagtgcttttatctttagtcccggttcttaatcttaaccgggttcaaaaagaatttggaaatagtgggaaaagatctttagtcccgggtgnggntcagaaccgttcctnacgttgcnggtccagcaatttacaccaggtacataaaggtggtcctcacaaggctgtgttgtttcttcaggtccatatgtcacaaaggaatcgaccctgtagagttaggtcctttccgggctttggctgtacagacagtgtgcgagcttgagatgtgtttacctccatcatttttctaattgatgccacaacttaaaggttatatccggcctcaccaaaaagcccttgtgtccctgtccctgcattacgacgtgtccttttgggcgattcttgtacattctaaaaggcttcgtaccgaagcgggccctccccccgggaagccctcctgaaggattgataaacaatttcggcggggcgtgggggctttgttatcctttctcaaagaagggcaatgggatggccttcccttccctccccaccgaaagttattttttttgtaacggaaccaaagggaagaaaaaattctc

SEQ ID NO: 46834 - DNA, 718 bp, Oryza sativa
ccgcgtttgaatgcgctaccagttgatcaccgggtcttcactgtcagcttccacaggggtttgagatgacgtcaacaacccccaatcccagggcctggccagctctgcttcccaacacccccaccatccagttctaggtgggctcctccagggagctgggtgtgttgatgatgacaacaggtggtgtggtttggttgtatctgaatgttgggagaagacattcagtgtggctccatggatgggttaggttggattagagctgagtaagagacaatccctcagatcatgggaaagaaaaagagatgaagacgctaaaggaataggagaaagacggaaggaatgccataaaggacagaaaaggaagagaaagaatgggaggtcaggagttgctggagatcacgatatggttagatctcactttcccaggccccactcctccaaggacccaaggagtttttactttgggggccccccagggcattgggggaatttgtggatggaatcaaaggagagagctggagccttggtcctcttgggagtgtctcaagcctctttagtcaccatggagataggttgcctctggcctcagagactcactcagggtctgaggccccttagcaccatttagccttccttcactcaggcacaaccagagacagggcagacccaggagagccagaatgagaaattggaagagagagaatgcaagctagcctct

SEQ ID NO: 46835 - DNA, 733 bp, Oryza sativa
  unsure (1)..(733): unsure at all n locations
gggggnnatgaccctcctgctcattgggacagncgnncatcacataattccctatgcattttgtattctgtgatagtttgataacctaggaactacattacatctgcggccaatctatcaattcttccatttgaactaaatttgaaaccctaaacctaattaagttccttaattatcaaagaatgacataatacaaaatgcatggagaatnnttgtgggggccacaggtccctctgtntgggcgcctggtcatagctggttcccagctaataaaaaacaattccttacatcatggcaaacaaaaagatataaacactcttaaagaatacgagaaagacggacggaatgccagaatggacagaaaatgaagagaaaaaatgggaggtcaggacttgctggagatcacaatctggttagatctcacttccccaggcccaactccttcacggccccacgagtttttaatttcgggggccccagggaatgggggaaatacgtggtcggactacacgaagacaacttgaggcttggtccttttggcaggtgctaaagcctttctaaggaccatggataggtggtgcctgttgccttaaagacttccctatgctttgaggcccttaacccttgtttgaaccttttcctaattgggccaaaccaaaaaactggtcttcccgtgaattcaaaatttgaaagttggacacagaaatattccacctacccacccactggggcg

SEQ ID NO: 46836 - DNA, 783 bp, Oryza sativa
  unsure (1)..(783): unsure at all n locations
cgatgtgcaatgcgcctacnagatggtacagtagttcatcaatcacccccagctcattcagtgccatgtactgatgtacagactcacagcggaagacatttccaaagggtttaacctgctcatcgggagcacgcagtccacattctttttgcagatgcagaagcattgcttaacttcatacaatgaacaatctaagttctaagacctaccatcagtaactcctagctcaactagaacattggcagcaagagtcatcgttttctcttgccatgagtctttgacttgttctcaaggtcatttcctggtggcgccttaagagacttggatgcaactgctgagctccacagcgctctctcaacatcagaagtagtgaaaacttcttctcctgagctcaattcctaccagagaaacaaaaaatatgaaataaatgtcaatcaagcaccgcatgtgttcatcttcagacttcagctaacagtccaaatgttcaacaatctataattttgatatggaatttgcagtttactcggtgttattctagcaatgcggacgttacatgcttgcattttgcaaatataaaagcataacgttcaagtactaatcagcttatcagtatattaccctattgttgcagctgctgtctggaataaaaaggcaagcagctgaaaaattggcatacgatttttgtaatgcatactctgtaaattatgagcctggcatccttgagcctattgggacgttatgatttagagaagcatcagccaacaagaaaaaaggtgtatcttt

SEQ ID NO: 46837 - DNA, 650 bp, Oryza sativa
caacatgcacatattgtgggcgggctattttgaggctgcttgcctgtaacaagacgccattcgagaacatcttgggcgcgggttcttgtgcactggcctgagtgtagcatggagacatgccagagctgcttattcagactttcttgagcgagccacaaagcgttctacggagacctatctcgagaactcattcagacattacgtgatgctcggactgactctctccttggagctgtcacgagaactcgattatgaattattgggaactgggacaagatgtcggcttttgttgggctcatggaaaggatcatggtgagactggaacggtaacgcgcttgcccaatttcatgatgctagggaagcaaatacctggagactgtctgacaacaagacatgcatactcgcagtatgctagacagccaatatgcgtgtggaactttgatctagcagtgattcattagtgaattactcacacagcatgtaccatttaggcctctcagagtgcatagttgacactggcaatatcgtcacagataagtgcttgtaaggtatcatagctcatctttgggcctgtctacatgacgtggctaaatgacgtggtgaataataaccttctttgtgttatttgcgatgccggaggaaataactag

SEQ ID NO: 46838 - DNA, 760 bp, Oryza sativa
  unsure (1)..(760): unsure at all n locations
cgtgtgcntttggactacttgttgtgcacgttcgtgcagaacctcatcattgtgttatattcgcatgatgagcttaacgagttacaatggaatcactttatcacgagacatgatacttgtgatacgcgtgccttccatagcttttgggacgtgggaaccaaacattcgttaatcttaatactatattcatccttacaattgtgtgttctatgctcaatactattgactgtggaacacgcctaacttagcctccattgatgctatgctatgcctgtacggactacgacttactactgtttacaatcatgattgatggttcttgcccctaacttttaattagatctacaagattataagggtgaacaatatgatacaaaacctttaagtttgtgtagtactatattatttgaattatttttttcccgcgataacgcgcagattacgagctggtaaattatatttcttgaggagtgcttcagatatccaaattccaaagtatgacatctggtatacgtcatgtttgaacgcaaggggaaaaactaataggggtggtttgatgcaacaactgcattggagctcagatggtcaaattcttaggctaccacccacccatccaaatgcaagtttggtgctttcaggagaattagaaactgccatgaacatgcagcccatgtgaataacaatggggatattttacccagtaaacagttcaccggaacaaactcttgttggcctaaaaacccatccactctatgtgcat

SEQ ID NO: 46839 - DNA, 750 bp, Oryza sativa
  unsure (1)..(750): unsure at all n locations
cgtggcccatgaccccgtgttctacaagttgtgcagnagttcatcatgagggaataatattaatactggacactcacttctgcaggggtgtattgcttgtgcctatacaccggttggccacttgccaaccacctatttttccatgcaacgggagcaggttgtgtacaaaactaagcatacgacgactaattgcatcccaagagaaaatccaagatcgggttgtgtgccaaggctcaacttaagtacgtgcatcgcagctagcttgacatgctttagtcacagtatgggttgactgactcaacacaaaatgacattacactcaaacattttacagctctccaatggtgatcaagcaccaaccttacaaattatacactatcatgaagggccaccttggtctatattgctcacaagacatctccatatagtacaattctgcagatctcgagtaagtgtagaccgctaatttaccagcaggttgattcttttgatactgtaggggtagattaatttttgagaggatgcacgcgaaacatactttacaccaaattaataccaccgatcatcttaacacgaatagcactagaatatatttacaggaatgacaaatgagctgggatgcatatgacaagacttgagaagagaaaacatacgagaagtcctgcgagcgagatgggtggtacccaacagatgctgacgggcttattgctacttcatccgaggagacattcagatgctaccacgactaat

SEQ ID NO: 46840 - DNA, 726 bp, Oryza sativa
  unsure (1)..(726): unsure at all n locations
ccgcaataaaataaatgataattacataattttattgaataaacaaaaaggtcaaacgtttattaaaaagtcaccaatattatacattaaagtacggagggagtaataattttgaccaaaatctattgaaatttgaagaaaaccatcgtaccaccgaggatcaggatctgacgctcaattgataaggtgaacttaaccctgcgctgcatacgtgcaagaggacacgggatgagctagccttgtgaaagaccgtgcgatgtcgagccttgtaccaggaggctactcgtagccacctactcctacctgggtttccgcggcgccgtcgtggcttagacgcaatccaccctgatccggtgacgagaccactccccatgcaccgcgccggccggccggcgccaccgtcgcggacgtacgtacgttacgccttgggggctgggcgtgtggtttgaacgcacccgcgacccccctggccggccaggcttacgcctacccgcgccaaaaaatcccccggatccgctcgccttccatcattcgaacgaaaaggcgtggccgcacgtacatgatcgcgcttgtaggcagcaccctcccctcacgagctgatactcaggcgcattaatgccctcaagctcataacatttagaacaggtaaccggatcaaaagcggcgctagaatggaccaaaaagtagtgtgatgnnctnctgcagcaagagtatcaaacacagtcg

SEQ ID NO: 46841 - DNA, 724 bp, Oryza sativa
cccgtgtggtgtcgccatcttatgcagtagttcatcattaggatgagataagcaatatgccaattattctgggtgattacaccactatgtgactacagatatcacttgaaagaaaattggtaacatgatgacatatgtgaaacattctaaataagaatgaacagatatcacacctgaaaataaacttacactaataaatttaaaacatgccttatcatttgtcgtgtaagatatcaaacttagtatgaaatgtaattctcaacacgagacctaaatgtgtccattgtactaacacaatcagatgtctacgatctcattacagaacgagtgagtacatataccatactaattcttaacatgagaaatacgagcgtatatatagcactatgtatagagctataaatgcttctactacttgtcacgaggaaatcaccatcagaggatccatagcatgtctagtgccttgacaacgctaataacttgaacaaacccggttagcacaaatcctacatgatatcgagggcattaagtggaaatactttatgttaaactgtgaaatcaactagatattgagaggatttaccacatgacattgaataaagttggaattcttatcatgaaaccgcttgtagtattgacaaatgcgttggagaatgcacatgatatgaaaaacgttaagaggatagaacatcaactgagatggccaatacaaatgcataaaacg

SEQ ID NO: 46842 - DNA, 760 bp, Oryza sativa
  unsure (1)..(760): unsure at all n locations
acggcccatgacnacttgatggtccagtagttcatcacggcaaaaagggctgctagtttgcaaattcctactgttgctgttcaatcatatgtttaaccgactgatttttctgttatagccgccggcaaaaatgatggtgaggcagagatcttaaaagaatagctgtggatgtagtacacagtactgcagacggtgagattcatgccggggggggagggtttctaacacctttattgcgaacacacccgtatcgttgcatagaaaagtaagctcaagagctacttgtttgaacttcaaaaattgggctgttgctgataacctcccagtggaatctatggaccttctctttccgtgtagatagatctacttgtatagctaaaccgaaaccaccattttgtcctatagatcaaccaggacaagcgttgtgtttgtgcaagagatgaactgatagatgtaaccggtagttgacaatagcaacaagagcaactaacaccaacatttggtgggttcgatcgttctcctccctacacattgaacggcaggtacgtagcatagtgacactgtgtgatatgccgatagcttcatatcacttatctagagcttataattggtgttagattcagttttagaaaatgaaaattggagaaagagacgtctctaaaaaaaattatagaaaaaaatgtgaatgtatggggaacgggtatgtaccctggaagtagaatcacacatctcttatcaatgcactatggaggatattgta

SEQ ID NO: 46843 - DNA, 760 bp, Oryza sativa
  unsure (1)..(760): unsure at all n locations
ccgccattgtattaagactctgcagtagttcatcagataaaggatcagatgatatcattctctgacatgatacatgactgagacaacgatgtgtcattttacaacaacacagcgagcacctcttcagttccatctcacataagaattgatgctcatctatctatcacaatcttatccgtgaccctcattctttatggaatgttatataaacacgacagatcaagtcaactgttaaaaagagatagctgtaggcaatatgcaacgatgatgacacgtcacgcgagaatacatcatgcaacggtgatgaggcatgctcgaagaagacctttgagaccttggcaaacttggggagcggcatatgtactttcgtcgaactaaaattgacatttttcgctggctaagttctttagttgaggtttctcaattcacatctttcgttttcttcacacaagtttccaaaatgctaaacaatactttttttaaaagttataccctaaagttactttcaacagtcatattaatctatttctgatagaaaaagatagtacttaattaattacgctaataaattatttccgtttacgtgtgcgagggataaaaaaggcaatcacagccaaaaatgggaaactaggcactttggcgcgtgtaaattgtcgcctattactacgtgtgtgaaaattggaaatggaagaggagatgcaagaggacccatgttggtgtangggtactactaattaattttctgaaaacgactggagtc

SEQ ID NO: 46844 - DNA, 748 bp, Oryza sativa
  unsure (1)..(748): unsure at all n locations
cgcacgggaataagcacagcacttctgcaagcagnacattcatcacttatggcacgcagaggtcagggaaaaggcttacggggtggcacatgtactgtgatggggacagcacatggtgaaaaacgtgacagatgcaaacttcagaatatgagacggatagagatgtgccactagaaagcatgagggaagggactgaggatgctgagcactccactgtttggccccaagccatgggatgcatatgttttggcctagcaaacacgtagccaacatggtaaaaaatgtgggcacaccagcaccagatcgaattaagccaccaccctaaagttacttgcgagaacatgaaaaagagttaagtgcacaggcgcgtcttatactggcggaggcgctgaaaatactttcactgaacttaagaatgtaaaaccgactaccagagctcgagctagtgagcgaaacatggtcgaataaaaaaaaccatatacaaacatgtgagattgcgataaaaagcaattgtaactatatagcagctcatccctcatgcggagagagagataatggggagaggggtgtttataataaggatgagtatgcattcatgataatcttaacaacactaaacaaccttgactaaccttgccaacagttcttgtgtgcacaatccagaggaaggcactaaatcactacatgccaatcgatagaagagacaaatacttggatgagcccctacaatatgtccacaggcaaaaag

SEQ ID NO: 46845 - DNA, 747 bp, Oryza sativa
gccgtgaatgagaccactgttcggcagtagttcatcaaacgatcttatttactacattgtgctggtgatgtatactgcaaagtttacatatatatgatcctttacggtatattatacagaagctttagatcatggcaactgatgcaaacgtgacatgctgcgcacgcgccacattgatataataaccgcgcaattggacaagaataggacgtgcaacggacacgtacatggaccgatgactacccacgccgatcggattggaactcgcccgtctttataacacccatgcatcctactatgcatacggcaagggcaacgcaaggctaccgattcatcatgcccaaatcaagcttttacgaacgcaaaaaaaaaaaatcaatacacgggaaattcaatacagtagtactccactacacactactagtgctagtgtgctactactactattttccgtgtattgatattcaccggtaaagtcgcaagggaagagagaggcaagaggggcccggagtgccggacccggagaaagcatgaccagaaagcgacggagggggcaaaactgccatcctgtgctactgtaaaaatactcgtagtactcctcctacttctactagtcagatactaccttttgagtttttcttatattgtttgaccactcgtcttatttaaaaaatttgtgcaaatataaaaaagaaaaattttgcttaaaatactttaaataataaagcacgtcaaaaaaataaatat

SEQ ID NO: 46846 - DNA, 723 bp, Oryza sativa
  unsure (1)..(723): unsure at all n locations
agatganntccgtaaaccnatgcgnctnncnnatnannnggnccccatccccgtggtgatcgaagcttatgggagaggtcaaagccatagccagtatccaacaagggagagaaacggtggggtggcagcggagatgggtctagaataggtccctagctacaggacacgcaggtcaccgcggaagacggggagtggagcaccatgcctgccccaccatccccgatggtgatgagttttgcaccattagattccccgtgaatggcaggtaccatccatccccattccttaggccttgttcggttaatccccttgagggagggattggaggggatttattgcccccggcctatggcttgggaacggtttcgcaaaatgccgtctcattgtttcccgtgttgttgggcagggacctaaactaaattatttcttttcacggagaaatcgactgaaaactcaccgtctgcctaagaacgtgccaggtcctaattaaaccaaaacccacgcgtccggttccactttgattccagccatgcgcttaaggacaaacgttgacaccgtcggctacaatttggtcttgatcagtacccgtttgatcattttggccaagtctcacctatagagaacggtcccctcgtttttttgctactatgctcgttggtgcatccgtttgcttcacattgcgacagagtaaaccgtgtactattgccttcgtccactgcgtcg

SEQ ID NO: 46847 - DNA, 730 bp, Oryza sativa
cgggctttgactgcatttctgcagtagttcatcacagcctttatctatgcttagtgtacgccttttgcgggcgacttgctcgatttacaccgcggtaactgcatatatcatatcagaatgattgattgttgaacatgtgggctgtatgctttcttgcgtatatgaacacatgcggcggttgaatgacattcatttgatgtgttcagtttacatggacgaatctctctcacgagaataatgtttgacttcttatgatgttccaagatcattttgatgctcatcagttgcattcaagtcttttaaggcgccaccaggaaatgaccttgcgaacaagtcgaagacttatggcacgagaaaacgatgactgttgctgccaatgttctagttgagctaggagttactgatggtaggtcttagaacttagattgttcattgtatgaagttaagcaatgcttctgcatctgcaaaaagaatgtggactgcgtgctcccgatgagcaggttaaaccctttggaaatgtcttccgctgtgagtgtgtacatcagtacatggcactgcatgagctgggggtgatgggtgtgtttttctccacaaaatgggatggataccaaatggtggcatgcgtgtgttgctctttgctagattaatcgatctgaaccctttttctgggctgccattcgattaaacaggacttgctttgcaagcgaaatcggtttgtgcgcttcgtatt

SEQ ID NO: 46848 - DNA, 714 bp, Oryza sativa
  unsure (1)..(714): unsure at all n locations
atgcccnnnnattgtgcagtagttcatcaatctaacctcttattcattggcatattgaatcaaccatatgaatggaatcctctctcatcaaaggactctacaaaacaatccttaaaaatttcactgctaatactccatttctaaggggccatacatttccatttgggcaccattttttaacaacggttgactttcaagtctttgcgctattatacacaatatattttatataataaagctaacaggttttacatatttcactttgaaccactctgtaatgagccgattacctttgtaagtaacctgtgagccaaaagattatcaggcccacatggtagtaagaaaggcaatccctaacgactaagactaagtataatagtgggctataacaacgctcaatgctgaggtggttgggcaaacagatgagagagatgacaactcggctgtaactttggggagattatgggtaccccatacacacacagcatgggtatcctactaggtctagcggataacttatatctctgaaatatgtcacaaattatgacttgggtattacagtttcctgtctcatatggaacggcctaatatgcctgtctgataagattgtgcagtaaatttaggaaaccgatgccgcgctgcttaaaagttctatactgccatcactggcggcatctatataaagtcggcangacgacttctcgaggcatgaaa

SEQ ID NO: 46849 - DNA, 613 bp, Oryza sativa
ttacttggaaaaagttcgtgttttggggggtaagtttccagcatatattaactttcttgtgtatgtattgccaaaattaatgtactctgattaggatccccataacctattgtatgtacaatattatggtttccattcattttgtttgttttgcaaggctgtatccctaaaggaagggctggaatgaacatgtgtatcattaaagatttcaatcaacaggtagcttgccaatcccagtagatttgcgcagaccgggatattttattccattatctaaaaaaataaaaataaagtaaagatgggctgagatgctcaatgaagataacggaacgcaatacatgttgtattgtatttatattgcattcacataaaaataaagtaaaataattaatacataagaacatccaagatatagaatagggtacatatttccagagctgcctaaccctagccgggtacaggatgggcagagcaccgagcaaccgcgcattgcatcacatgctgcagggaaaatcgacaaaagtttgaccgtgtgcctgtgtacaatacggcgtcgacattggcactgccatagtcaccgatgtggcaaatgggtcgagcgtcaagcgacaag

SEQ ID NO: 46850 - DNA, 523 bp, Oryza sativa
aagattaagttggcgcacgtaaaacgagaaagtcattaacatatgattaattaagttttaattattacaaacttgataaatagatatatttgatatttcaaagcaacttctatatagaaagatttcgcacggaacgtaccgtatagtagttttaaaaagcgtgctaatagaaattaaaccgagataaaatctaaatcttaatcagaaaacaacaggtgtgttcccgtcatacagtgaatcgagtaatccattaaccaactaattcttcaaactaagcatgcattttgatcattggggaccattggatgtacttggtgttcatggtgacgatgatatattggttagtgtcctttcctatgttgccatatactccctccctccgtttcgaaatatttgacaccgttgacttttaccacatgtttgaccgttcgtcttattcaaaaacttttatgaaatatgtaaaattatatgtctacataaaaatatatttaataatgaatcaaatgataggaaaaaaattaat

SEQ ID NO: 46851 - DNA, 667 bp, Oryza sativa
ggcgacatcgacgacgatggcgagggcatccgcgcctacctcctccgcctcccccaccggcgatctagcgccgccctgagcccgtgccgtcaccggccgagcgcgctgccgcctgtgcgagtgtttgactttggatgatcaggtcgccgtcgttacttatgtgccactcatactagttgattgcagtaaaacttgctgaaaaggtggtgtgttttttttaataatagaatataacattcggcctttgctcaaaagagctacagccaattattataaactagcactctaaaaacgagtgtaattcaaataaattgaaaacaccaaaaaaaaaaacttgatatcataggtagtagcagaaagacttgatattttgataattcgtggattaaaacgatcattgaattcatctgcaatataatgtattcaagcaaaagagaagtgtaagaatttgtaaccatgcaaaatgaaatgggattttttcgcaggcacaacgatccttttgctctgctactactgatatgctttgacattaacatccaacaatctagtggagaaacaaagatgaatttgcattgtttggctgacacagaacgggtgccgatggagccacggaggagcggtcgatgcagcatcgccggaggtggcagtggcagtggcggtacgtact

SEQ ID NO: 46852 - DNA, 2300 bp, Oryza sativa
ctggatgcaatctctgtgaacaaggaattaacagtgcacagaatttagtgcaacttcctgcccaatggaaaaataaaaaaccggtgcatgttagttgaaccacaaaggccatctattgctccaatagtgcgctactggatttcaacagcacagaagtgaggatagctagcgtgtgaccttggacatgatggctcaattcatggtgatggacactagagtgaaacctacaaggcagagtcctccatatcttaaaatctctcttgtaccgtctgaccatcatacttctacacctacaccattaactacgttgtaatcatgaactgcttcttgtgggtgagcattcatggcttttgcaccctaactctaattctcataaagaagaagcagggggagtgaggggcgctgatgcataataaaaactgaagtctaaccatccaagccccatgcagtaaataggccaaggcattaggaaggaataaataaggcttgttgggccttctactcctcaccagtgccaaccacgacaataaatagaggcgcctctctctttggttgttggaggcatgaatccatttaagttttggtgttctatctttcgctattaattcgaccggacgtcctgttgatttgatgtcgtctattcttctttgacaggctgatcatgagttaatggagcaccatcaagtgttttgacagttttctggagcaggatcttttgcaaacgatgtgtgtaaattggttgtgaccagcaaaaacttgtgcttctccatggtatgcttgtcatgcactcatcatctggcaattaaacttcattgtacttctcaataaatatataagttcaccaatgtagtgtttgtatctgctaaatcttttgttcacctttcttgttggaagctattctatagtttattagtgctagtttgtaattaatagactgcgtaaagcaaaattatttttcaggaagtcattgcatacctgtaagaactgttggttgctcgttgtgaagattagagggatgaattagtacaacagccagacctatgtgcctacctacatttataatttgaagaccataccgatataggtatctttttggttcggagtttgatgattcttttgataactcttatgtggataagaattaagacattatacaaccatatcattgtcgatacagcattctaaattattcctctatacctcggttataaaatatttaagggttgttcagattgtagccaaaataacctttaccaatgccaaaattttggcaatttgacaatattgataaaatttcggcaggatttcttatatatttactaaagtttggcaagaaactaaatagatgcacatatttagcaactctagcaaaatatagtatggtttgaaatagcatcaatctgaacaagcccttactctactgtcatgggatacgtggtttcacaatcctcttagtgaattaaaagtgtagctattgaaatatgttcactccgcgcccctgcttcaatgttgcaaaaaaaaaaagttgtaacatgccatttagtaggggaatatatgattcaacatcattatgtttttgttctgtgtgtgtgatttgctcagactatgttgcataactgattcacctaaataagcataaatgatgatggtatgcgaaataaataattttagtttgaccttaacaaaataagcatgatatgcagaataaataattttaggttgaccttcaaaataattgtgataaggatatctacttcacatatctttcattgaatgcccctccatatttttatttcagacaataaattgaggatgaacccatgaggtatgtgcgcttagtcaaggatgcatgctggttattcttgacttgccagtcggttttcatcagttattgtcatattaatcatgcgcctgaagtggccattagatacgagctctgcagcacataataaaccactgcaggtaggggtggacaaaaaaaactcgaaactcgtggctcggatcggctcgtagcaagctcggctcggatcgactcgaactcgtagtcttaatgagttgagtcgagctagccttttagctcgtgagcttgacgagctagctcgcgagctgctcgtttagctcgttagtataaaatatcaccaaatcttcatgaacttaatgtttattgactagtgcttagtcttttatttacataaaactattcatatttagtatgtactatattagttagtgtttattattatgttaatacataataaaatggtaaatttgaaattattaatatgatattaataagatat

SEQ ID NO: 46853 - DNA, 710 bp, Oryza sativa
aatagtttctccactttgcttatgacaaataagaggacatactgtttactgcttactgaatggcatacatgagatctttgtagggtttctgttgtttgcaatgatgatgtcaagtagatcaagaggggatccttgagaccggcagcaagaaggaagctggggactcgcgggttgatgggagattctactaaatataattcaattgatctggttccataagctgagcgagacgaagcccacatgttagtgacgacaaacatgatagacccacctgtcagtggcagtgtggcaccacgatgggcttcaacagcgacaggtgaagtatatatctaattatctactccctacgtccataaaaaactaatctagtactggatgtgatatatcccactatgaatctggtactaggatatgtcacattcagtcctaattcgtttttttgacagaggaagtactaccagctacatcgaaatcagcttccgatgtcgttatctattttccgaagagtgtttttgcttgcagaccagacgatgatgataaaacatgctcgcatgtgtgcgtaaattaatatggtccatgccggacggcccctgcgtgtgtgatgcggtgcggtgtgttgcacaaattgaaggagctcgcctatgttgttgggtggcgattggcgttggcccccccattccgaggcagtgaatggatggacggacaggcag

SEQ ID NO: 46854 - DNA, 597 bp, Oryza sativa
tctcatttgatgccactgtggagcgttttctccttcctacatcccactccgattaatctctacaaataatactatggttatactcctccttccaaaaatattagatttattgatattttagttttttttcaaatgagttagttatatctgtagtttttatgtacttaaaacttaaataaagagataaattaaatgtttaattagaacctaagaagttatctgattgtttacatgcatattcatcttagatgagttaattttttattggtcttatcgaaataatatgtataactcttttggatggacggagtatatacttacagtatgcatttttcatatgatatactactataaaaacaatagtgatattggtggttctgtcactggttcactctcaccaacttttacatactccctccatttcatattataagattttctagcattgtccacatttatatagatgctaatgaatctatgtatatagattcattagcatctatatgtatgtgggcaatgctagaaagtcatataatatgaaacggatgaagtatttacaattagtgaatatattttttatcaagtgatacatatatt

SEQ ID NO: 46855 - DNA, 672 bp, Oryza sativa
caataattgaattaattattcatacaattaatcattattattaaattcattgtacatatttttcatgttttaattacattataaacaaatatttaatatgtttttcttattttaatattaaattagcttagttttataatttcatacaaaattatatgtaattattcaaacaagtatttataatcttctttattccctacacacactttctctctcatcatcttccatcacattttctagagggaaaaatatgtaaaaaaaatagctccaaatgtagatggtaagcaaaacaaagagtaggatgaagttgctaaccatttgaagacctcaaatttatatattaccaccaaaaaaatttgcttaaaattttgacagcacctccctccctcaaagcttaattttgaagcaatggctcgggcgggaggaggaagaaggggtatataaagctatgcaactttagtcccggttggtgttaccaaccaggcataaagatctcaaatcactttagtcccggtttgtattaccaaccaggactaaagatatgatctttagtcccggttgactaaagatcccaagccccccgacagaggtctgacatgccctgtcaggaggcgaaccgggactaaagatgatctttagtttccgttggtaccgggactaaaaatccttcgt

SEQ ID NO: 46856 - DNA, 4191 bp, Oryza sativa
cccagatcgatcaatatctgtttttgctcaaattaagtaccattcaaaactgttcagaatgcagaggttggtctgtctgtctgtctgtctcttgtgaaaagaatatgaatcagcagtggtggaggtgagctcagattggaagtggccaaatactatgcatgaattcggcaactggtaaattttcttgttctttcccctcctttccctattcatctccttcgtttttgacacgcgctctttccaaacttctaaatagtgttttttataaaagaaatttctaaacgaaagttgctttaaaaatcatattaatttatttttcaaaaaatagttaatacataatgaatttatgtgctaatgagtcactttgttttgcgtgcgtgagggattatttcctaacaccaacaaaagaacacagtctaagtgttgttgcttagggcaagttttatagtagagatgattaccacatttaatttcgtgcatgacatacaccattaaattaagatgtgtaataagttacatctactatacaattttcaatatctctaacactcacatcctgtttatttactgtgcaattgcacaactgttgaccaaccattttcaagcttgttaaccagtaagcactgctgcttatactgtgcaatttggacaatcatatccatagcgtttcgtcgggacaatagagcagagctctctccatactgattggacgtttcagacatgatgaactcttcttgttctcacattttaccaggagttccttaattacacccatggacttcaagaccattaatttatataatatgcgccatactattacacatgcatgcccaatcatcgcagtgcatgctactgcttccgatttggttccaagattcgtcatgcttcctgtcggtgaagtacaggaggaacttattatcttccactgctcatgcacatcatttgcgtagaccaacatatcaatagggttacgtgtgcacaaatgcagcctccagtggattataatccaaaaaatggagtaatatttttgatttttaagaataattttagatagattgttttcttgccttagcaatagaagtgatgaagataaacccgtaaacttgggctctgtttggataatgggttaaaaggggtgggattgggatagggatgagtggagggttgagatgaaacgagatacgtagaatgaacagttagaattaaaaattacccttccagaaggtgagataaggtttctccatcccattatccaaacatggccttaattctaaaataactttctaagatttcaaaattaggattatagctgagggctgatgccaaggtcctgtttgactaagatgataactgatggctgaaattgagtttatgataattctttgaggaaagttgaaaacatgttttaaaaaaaatttctaaggaacattaatggggaataacatgctagtttggtttgaaactaaattttgtccttataaaatattgctacctaaataaacaatattgatagtgtcaaacacttggcaaatttttcgtactaccatatttggtagagtagaactctctactacaaaattgaaaccaaaccattatttatataatactattataatgctaaaattttagtagggtaaaagttggcttcaataaaaaaaaaagggcccagcatccataggcggtgagaagaaaaaggaccgaatataataaatagtgcagcagtagcattacagatgaaccattaacatatatgcaaactagcaaaatactcatgcttatttgaatatatgttattcacttgattaaaaaatattattcactaatttgtaaaatacttcatccgtttcatattatatgactttctagcattgcccacatacatatagatgctaatgaatctatatacatagattcattagcatctatataaatgtggacaatgctagaaaatcttataatatgaaatggagggagtatgtaaaagttggtgagagtgaaccagtgacagaaacaacaatatcactattgtttttatagtagtatatcatatgaaaaatgcatactgtaagtatatactccgtccatccaaaagagttatacatattatttcgataagaccaataaaaaattaactcatctaagatgaatatgcatgtaaacaatcagataacttcttaggttctaattaaacatttaatttatctctttatttaagttttaagtacataaaaactacagatataactaactcatttgaaaaaaaactaaaatatcaataaatctaatatttttggaaggaggagtataaccatagtattatttgtagagattaatcggagtgggatgtaggaaggagaaaacgctccacagtggcatcaaatgagagtcataaatgtgggttaaaggtaattaacgtacttatgttggtcggcttcatggtaattaagtcggtaaaataaccttaattatgttttgtcagctctttggtcgctgttaataccagtactagttttgttgtaacagaagatcttgatttgtaaggggagacggatcaaagtttagtaattgctgggcctatgggccccagctgtacttctattttgcacttgacaaagacacatcggttgggaaactctgttgatagccattaatagatctctccctctcatgccacggacaaacaacacaaacaaactactccctccgtcccgtaatataagagattttgacattttatttgtactatttgaccattcgtcttattcaaaaaattttagatttattatttattttatttgtgacttactttattatttaaagtactttaagcacaactttttattttttatatttacacaaattttttgaacaagacgagtgatcaaatagtacaagaaaaatatcaaaatcccttatattagggacggagggagtataaaacatgaggacaatctcaatggtagtttcataggagtttcattctcaataaatgagacaacattgaagtaaattattgataaatgagataacattgaagtaaattatttcatttatcaattcaaaactttttaaataacatggcactcttggtaaccataaaatgaaactccccacgagaaatggcctgataaacacaagtattttttagataatggaatataatatcccggcttttactcaaataagcacaagtaggacagaactctcattaagatgtccagtgtgaaactaaatggtaagaaaatagatccaaatgaataaaaggaaaatgaggtatactagaacttaagaaaagggtgatccaaactaaaatttacaatattatttactacatgcatataaaactataggaaaaaaaacttactaggatactttttctaattttgcttgagttcctctaattcatagaaaatcaaagggaagacaactactatggcagatacattttttcccaatgtggcttatccgtatgacggggcgtacgaatctcaaaacaattaaccaacaacatatataaataattactgcgatagctagtgcagcattagacacttgtttttcctgttgtgtagaaaattactcaataaaatcaagaacaacctgatgttggcatttggtagcaaccatcttcagatatcgatcgtgactttagaaagataagatagcgaaagtacaatgggaattaattaatgtttccaaatgttgatcgtcgatcgcaatcatgaattcattcatatctgccgatcgaactaacgacagatcgacctgcacaacatttgagtgtcttaaaggtgacaggccaagtcagcattcaacagttcgtcacacgctgttcttattcggtcttctaggagcaatttctttcactgattagaatcaactgtacgtagtaattaattgtgaaacattttcattgtgccattcagatcgaaattttcagatatctccctttaattattaggcgctacatgctcatcactaaataatcaacttcaggtaattctacatgcatggtttcgagttatttcatgttcgcaccaaattataattaattcatgtactaacttcaaaggtctagaagtctatagtagtatagtagatatacatgcattttttttaaagttaattaatggatacaacccaatctctatatccacagggcaaaagatacacagagttataagactcgtg

SEQ ID NO: 46857 - DNA, 7828 bp, Oryza sativa
tagtctgccctatcgttaccgcaccatctctgccattgaggatctcatccaccaaacaaccaccatccaaactcactgttgtgccgcctgccaaagtcgaatcccgctgcggatgctgtgagggggagctagctcgcatgtcccttgtgctcatcgacgtcactagcaccaaactcttcacatgctgacatctactagtccattatctccttgatccatgtcaccatcgctagttgtacgcgatggtgctcctagctcatcaccaaatcacattgtggccgtgccttcctcccaccgactttcgcctcatccgccattgatgccctagtccaagtcatcgtggcaatcactggcgctcctagcgcaccattaaagctaaggcacagccgaactggatagccaccaccgacatctcccacctctgttgtcaccaccatcaccgtcatcatcgtccttagtcttgtcgccgtcattgtgcttgtcgtcgctcctagcgtgccgtcaagccaaccaaccaccagcacgaccaccatcaccggccaacaccaccctggcccttgtcgccatctcagcatttgatagtgctcctagcatgccgccaagctgatcaatccaaatgaggccaccatcaccaccatccgctgcctctaccatctccacagcaccgcagttaccgtccctttcctctggcgcctcctcaacgctctctggcgcacctagtgcgtcgtcaagcagtcctgctaccatctcccccattgaccacagccactactaccactgcccctgtcgccccaccagatccacccacactagcctctagatccagtcaagccactattgctggagccaagatccgtgcaagccaccgccgtgtcgcctcctccaaggaacggagcgaaggaggaagccccaaccgccctcctggcggacacacgcactctgacaccccgctccagtggcagcgaggttggaaaatgggtggcgccagctaggttgaagaaggagaggagccaaccctttctctcctctagcatcttcatgcatactacatgcacgtgaagctctgatcaatttggtttgcattaatgcatatatagggggtgtttagatccacgggtgtaaagttttggcgtgtcacataaagtattatatagggtgtcgcatggggtgttcgagcactaataaaaaaactaattacagaatccatcagtaaactgcgagacgaatttattaagcctaattaatccgtcattagcaaatgtttactgtagcacaacattgtcaaattatggagtaattaggcttaaaagatttgtctcgcaaattagtcccaatctgtgcaattagttattttttagcctatatttaatatttaatataggtgttcaaacgttcgatgtgacaggtgaaaaattttaaggtagaatgtaaacagggccataataactcttgaggtggatcaggcatgtatatacgtatatgtcagggctagcattctgtgattctgtctactattatctgtagttctgtacaagtggggcaataccatacgtcactctgcttcctgatccaatacagaacaagctggctagatagacagtgagagcaaacagaagctattcagaacaaagccagtgagcaacatatagtcaacctagccagtgtggcttttatggcactgttcagcaatcccttctatgtatgagtttcagtgttcccaacttgatgagctgagcttagagcaagtttaatagtatagccaactactggctcaaatcatctataatcaattcaattaatatccaattcatacaatagttacctataacatatatgacacaattaatacctagtcccacttgtcatacacacatacatcttgaagcccgtgctacagctgactataaatctgtagcccactgctcttctctctactcttttatcttctcgaaatgtgtttatagcctgctattgtacatgctcttattatgcccaacactgcccaatcaaattgaacaaaacttaaggaaaatgtatttgtagcaactccacaaaattacaccacttttatatcattatcacaaaatcacattacattttaacttaagaggtttaagagagtttacactacttgcataactttcacaaaatcacgctgagccacttgccaacctgacaagcctatatatacatgttactctctctgttttatattaatattataagacagtttaactattttcgtagtcaaactttttatcttttctaaagtttatagaaaacaatagcaatatatagaacatcaaattagtttaattaaatagaactgaatatattttgaatgtattttgatattatgtttgttttgtgttagaagttagtgttgctatatgttttaaattatataaactagattaaatataaagaagtttgacttagaagaaaaaaaatcaaaatattttataatataaaatggagggagcagactcatgggaccaacaagctagtaggcatgaccattggatatgatatgaaaacagtaaaaattgtggtttttcataaagcattaagaaaagaagagtagtgttctgaaattattattcaaaactgtagttttgggatagtttttgtaaaatttactcaactgtttatagaaaactgtttatagaagtgtttgctcggcgcacatatatacaaaccataactagctattgtttaaaatattcctagctagtctatctctctctcttttttttttctttttgcacattaactatagccttgcgcacaccctatgaagacacaccagtagaccaaaagcttcataccgaaattgtgaatcctggctgaatggacaacactctcatcatctacttcttttcttgtcagccgtaacaaaaaaaaattgaaacttaatttcaaagttaattttggcttttctattttagtagagatactactaggagcgcagcacgctcgtattccgagcgccaaacatgtatcagtctaggtccacctcacctcacgtcccgtcatcccgctcccaccgttatcggaataagtgatttacttcgatgaaaacaacttccccctgcttctgatcccatcccatgtctgatcatcccgctcccaccattatcggagtaaatgatttattatgataaaaacaacttccctgcttccggtatatattctatttttcccgtaccaaatcaaccactctcgccccacttaatttttcctctttttttatctgaatcgatccaccatcccagcgcacagattggtgatacaccatggaggaggacaatggcaccatggcggttgacagcggtggctggcggcggttgaggcaaaggcgcggcttcaattctcgttgccggacgccggggaacgtcttaaccaacaaggaggtgttcacctgggccaagagaaacaactgacggctgctccatgtcggcgacattgacaaaacaagcaagtaagaaaatgacacttcaatttgcatatgcatactctccttcaccttcacgcatgaagccccaattttctttttttttttgcaaatcaaattaacgtgcaatctccaatattacctgatcttaattgataggctgcatagatccttcatttgcacatcgtgctccatatggctgtccacagaggatatggtggagttcgctggtgatggaggttgtttgctatttttgttttgctcgtcgtctctatgacatgaacaagaattgttttgcattcttttcgtacttgcttgatgatggatggctgctactgcgcaacgtcgagcttatctctgtaccacgctgctacatccttccatgattccattgtcgactaccgttcgccacccagttgccctctccactaccagtcacaagacacagaccaacctctccatccttatagcaagatccagcaaagtcaccaggataccagctccacgatgaagttttggctggatcattttttttctagtttgattagtaattttatcactcgtgtgtgattgagcatgtaattttttcattcgtacgaccattttgtgatatagattaccaatactcttagtatcagtttttgctcttatactatgcattgaatacaacagtaaacatattctacgagatcatgggctatatcaagagaaatgtggtaattgttttactcgtagaccacacagtctaaataatatttatatcactagtaaaagaattactagtgttataagctagtaataattcttttatggccatataggaatagtgtcgtacgatgtgggggcatttatgcaagtaaatttgttacttttaaagggaacatttatgtgattaaatttgttatttttgaaaaagcatatgtgggaagttaggagtaaatggaaaactttatatagtaaattcattatttatgaaacgtgggagacactagaaaaacagaaaaatcggaaagaaaaactaaacggtaaatattttactaaaacgagaaaacagaaaaaatggatagaaggaacgaaaaccggaaaaaactcgatggttaatattttaccatgccctttcatggagcacgaatgagatggaaaaaagaaaaaagaaacacggaaagtgtggggttgtaaaaaacgaaaagatgggtaaccgagcaaggtgggatgcggaggaaaggcgaggtggtaaaaaaaggaaaaaccgaaaggagggattattgtgcggcgctcgatctaaaattccgcgtatattagtaccaccgtttgattgctatgtttttctagggtttattatttgtagcgcaaccaattaaatcatagtcctctgggaactgcatgccaaagtcaccactcaccagtggactagggttggacgatagatcggtggcaatgcgtgggagtattgtccgctagctttgctcaaaacacaagtaaacgaaaatgtcaaatttcaaattaaacgtcgcgaccattcttttgttgtttttatatagtttgtacgtacactaaactttccatagtgtatttctatactcggaaactttcaagttaccctatttaatttcgccatctcaattaatcacatctcagagctaaggaatttaattaagcagagctgcacacacgtacagacctgatgaattgagagagatggattggatcgatcactgaattgaatgaaacaaggcaggacccatggatggatagaactcatcaaggccacacctgcactgagctgcggcagagcaagaaatttaagatcggcgagcagtcggtgcattcaacggatttccttccttccttcctacttggctctctctgatcgatctgatgcatacgatataatgcagcaaatgcatacatatatttcatcgatcgatctgctgctgcctgcctgcattgaactctcacaatatttcaggcatttatagatccatcctagctacccatccatcgcccgaataaatatacgcagcctggccaaacttaatgttatctgaaccatcatcttattaattatatgatgaatgcctacgccgacgacccccgtgcagtacggtatttggattcagatcgtacgtagtactacactctagatatttcttcagtttctttctttttatttttcatatattattagatccgaagattatttattagagctatatgttataagaaaattcagctgatgagatttcattaatgaattggtttcttgtcctcccctcccagccgttccaaaatataaacatttctggctatatgtacctggaaaatagtgaattggtgaggcatatgcatggtgttattagatctccggtatacatcttctcaggataaaaaaccctagctatgccctggttgcatcgacctaatcatcgtttatacgtttttaaggcattgagatatgaagaactgatatatgatgtttagccaaaaaatgtcaatgcaactttaattcattgatcggatctatagagacgacggtataacattaaagctagagtttcaatacatctttgctacacatgtacaaagcttgtatgaatggtcgatctctagtggtcttgattggggctattcatgattctttgtttttatataagaggatagttttaccattaattgagacgtcacacgctcttttggatttatattgttcacgggcacttagcttatgatgtgtaatatggccgtatgcatttctggttgggagaggccaagagtttatttctttatctgatctaaagaaatagctagaggagtaccgttacttgcctcgagttttcataattttcctcaacaattgtgattaactttgtctttatccagactataccactgagtttgttaattgtttctaggcaatatatatacactacgccggactaggtcatctctgacgggcccaaaccctcacctttgacgggtttggtcttggtcagtgattagtggtcactgatgacaaaatcacatgtgacgggtgaaacacccgtcacagataacccatctctgaccggtatataagtcatctctgacgggttaaaacttgtcacccgtcagagatgagtcatcagtgagtcacgacactgatgactcatctctgacgggttgtaacttacgacccgtcactgatgacaaagcaagaaatacattttttgaattttaaccccaccaaaaaccctcaaaaaaatattttgaattttaatagccgtcctatacatggttacacgttcatcagtgacgtgtcgtaactacctgaccgtcactgatgactcatctctgatgggttgtaacttacgacccgtcactaatgacaaagcaagaaatacaatttttgaattttaaacacaataaaaaaacttcaaaaaaatattttaaatttttatagccatcctatacatgtacacgtcactacctataaattcacaatttttcacgcaatataacttgcatgctacacgtgagattcaaactcaagacctcaacctccatatagagctctcttaccaactcatctactcagcacatattgactactcacctaatgttgttattttttctatgcttgtctgaatcatttaacatatatttaacaccctaaatgacttcaaatgaaaatattatcaactaaatagttatagatctcatcgtgttttataacttttacgtagaaaatatcttcatccgatgttgtttgaagaattcaaaatttcatttttcaaaatatctcactttataacatgtattttgaacatgtaaactttgtgaaatgaaaatattttcaattataatgttgtagatctggttgagttctatgactttgatacggggcatgtatccatccatgtcatttgaaaaaaactcaaaattaatcttcctatgcacataattaatcttcctgggcacactaactagcaaatgtcacgaaaaattctagaagaaaataaacatgtaatcctaatagtattatacatatatgcaaagtctcatattaaaattcatatattttagtcataataaaaaattacgaaatctgaccaatccgtaacaaaaatgaaaaatctaaccaatataatgaatttgattaagagactttgcagatgtgtaatactattagaagtatatgtccattttttaaataattttcatgatatttgttagttggtgtgaacagagtgtgcacgacaaatttgtgtgtgtaggatatgttgcgttgtttctaatatgtccacgatgttggagacagaatgatcactactggaaaactgatctttggagggtcatgtaaaatccacattagtcctggttcgagtaggaaccggg

SEQ ID NO: 46858 - DNA, 1564 bp, Oryza sativa
gtcttacaaggaaatcattatacccaaaagtcaacttctaaaggagtaatctatttaaagaaaaatatgaatcacttctatctgaacagaactacgaatcactgtaccacaaagtaaacaaaatttctgtagtactatggttgagtttatacaagtctcttggagcatcgcaacctgatgcttgttttgaaacaccatgatgagtattgtcaagataatgtagcctgggagattacgttgcggtgttcctgaaaaaaagctaatctcagggaaattagaaaatgtcatggactggatcacatatataaaatgttcgtattcactactatgctgatctggtcgatcctctaatcctgtcttcttcaaaattgttaatgatgaacttatttcataggaatgaagtttcaatttagttgcaactttaagatgcatggactatgggaaacattgctaaaatttaattgaaaaaaattcagaacagtgctatgactacagtagagttttaatagaaacaggacataaaaagtcgattggaaaatttatagaattccagcgtatacattagagattcaattcaaacatgaatttatagaaacagtactacatgcatgctcaagtttccatatggtttgggcaatcaatttctagtagtaatacctcctaatcaaagatcttcaaaatcatgatctccttgacattccatctgaaaccagtgaacctatcaaataaatttaacaaaagttaattagcatttctatgtattataacactatattctgcttttcttttagaagaaaaaaaatgttgcataccggatccatcaattgaagttgtggttgtgtgggatggtcctaaggcatcattatcatccatagcaggaggtggaataccagcaagtttggacacgacactgcgcaaccaatcaagttgcttttgttgagattcaagctgattttgttgtactgcaagctggttttgttgaactgccacagtttgttttgtataagccaattcttcttccatttgttgataggtgtttgctgaagttgatgaagctcttctattaggtttcggaccatgacatctccctctaatatatccatatgccttcccaagcaccttctcacaaatttgttgctctgtcagctggattgcaccttcttgctcattttcatgctgcatctgtaacattgtttcctttatacaaaaaaaaaatcaaaagtttttgttagcacaagaagacacttaactatagtgaaaatgactcgttagaatgatacttacatagttctgtctagcatctcttgacgcccatcctttgtcactacaatagcattccttgtacaatgagatttgatcacaactctgccaagacataatatttacttaaacagatgcttacgaaaaataaatcataaggaaaatagatgaaatttagcttactaattcatgctgaagtgccacaaatggtttggttccctttttatgaacatttgccagtttcatccgattagctttccctataactgattttttctgcatatggcaagaatagccaaaggaa

SEQ ID NO: 46859 - DNA, 623 bp, Oryza sativa
  unsure (1)..(623): unsure at all n locations
tttcctccctttcactcgcagatctngcagtcttctgaaacttcggcaaacaactgacgatgtcctctttttcactgacctgaccatctagtactagttgaaaattcttagaaggaagaacggagtaaaccttttgcaaaaagcattgggggaaggagaaaagaggaactttcgcaaataatttttatttataaaatatgtccttaggttttatccacttggcttttcctacagtcgagatggctctgataccagcttgtcgcgaccgggaaaattgccttttcccgaacgctagtgtattaatccccgtcccaggaaaagccggggtacaccatacaaacatgatataaaagacacatctttattatatcgataatatttacattattacaaaggcacttaaggcctgacaatcaaaaataaacagcagcggactagcgggcctacggctccatcttcacaggcgctcaactggggtataagccaggactccacctaagacctctcctccaaagcttctcttactgaagggggaaaagattgagcaagaatgagtacaaccacagtactcagcaagccannnnnnnnnnnnnnnnnnnnnnnnnagaggccaaaatgccagc

SEQ ID NO: 46860 - DNA, 650 bp, Oryza sativa
  unsure (1)..(650): unsure at all n locations
tgcggactgncnattgagnactgagcctcattagcatggnacacgtagttcatcaggcggaggcggcggcgaggacgatgagctcgagacgacggcgagatacggcggcgtcggcgcggggatttgccctaggcagtggcggcgaatgagagaggccgagagagatcgatcggccgaaaacgtctaagtgttagtgaagaagacgagggcgcaccgggaatatatatacccccggatctttactcccggttggggggaatttctcgtagttagtgtattttccttgtgtatctacttcttttttcttcctgtcctggtttttaatattatgggttaagtttatttcattgtagctaggttttactcacctttgttttttttggttttagtgtaaatgccttgcttaagtttaagcgacctttttgttattacttctctctcaccttttttctcttattttttctctttatcgggtttttatttcttatctctattgcttttctgtatgtttccatttttcatgtgttttctaccatattttggtattatctttttattttagtgcaatgttgcctcttacattgggattttcatcctgtatgttttaattttacttacgatttgctcttttgcttgggttctatgatgtc

SEQ ID NO: 46861 - DNA, 767 bp, Oryza sativa
  unsure (1)..(767): unsure at all n locations
cggagatactgttcgcagtagttcatcaggctcgtcgaaggggaaatcgaaaggcggcggaggtggagacgacgaagacggcggcggcggcggcggcaaagcggacctgcgcgccgtgtcgaagagcatcaagatgatgtgcgcgcagacggacttcgcggactcttgcgccacgagcatcggcaaggcggcgaacgccagcgtgtcgtcgcccaaggacattatccgcaccgccgtggacgtgatcggcggcgctgatntttttnnttttttttcttnntttttggtntttttnttntnnttcccncttgtncttntnccttttttttccnctcccnctattcttctctttctttcccccccccctttttcttttgtttttcctctccctttcatcttttcnctgtgtgctcctcttcctttctctcttcgtcctttttttactgggttttcncccggccgttgaattccattagccggtatcccgccgacactagccaggcagtcgtttcaattattacagtcccaacacaacaaccgggcggatagattgatatgcgttccaatgatccccaaggggggccttttatggatctggaatcctggggcattgttcatatatcgacaagggaaaaaatggcccaaagggagggggagatgtttaaaatagcccctattgtgtgagaggcgcctccatgccctgcatgtctgatgatgcacactgatactttgaaacaaagcaacttgttacgctagtgttattgctt

SEQ ID NO: 46862 - DNA, 716 bp, Oryza sativa
  unsure (1)..(716): unsure at all n locations
gtgcttacnaatggtcctatgagtatggtacagnagntcatcaacaaagctattcatatgatgcgtacattatgaaacttaacaacttgagagaaatttatgaagtatattcctaggaattgactgaaatattattctaaacaatttcctttaccagtacggatgaagaatttaaagagagtcttcatttaataagacatatttctgaacgcgtgtctcatataatcagcggtaatcattccgaggtgaacacgtcgtcaaaaaaacgggaccattaccaaccgacggttatatattacacacattggtgcagggcttgagctaacttttgccatactttttccgaacacatgaacttgcctgccgtgcgggcatatctatctatcaatctcatgcgtgttggcctaatcatggtcgatgagacgatctattcacaatactcgtcagaggtcgatccatccatccatccatgcatcgatctgactctctgaataattggtgtgtattgtacaccgctgcctgttattagccagtctatgtctaacgagctagcaacaaaagtgtttcgactccacaccgtacctaccggtaaaaagcaaagtccgttgcagtgctagatagatagaccttagcttatcagcaactgctctgtactaatcattgtcttgcattaaagcaagctgtttctatatgtcatctttctaaatatatgtagg

SEQ ID NO: 46863 - DNA, 747 bp, Oryza sativa
tgcccccatgcatgaaccgctggtacagtacagtcatcaacatacatttatccatacattcctagcaaaagcaccttgcaggtcaacatacagtaaaaattttctcactagaacggaaaagcgtaaaaaataatccgaagatttggtataatttgaaattaacagttaaagcccgtttttaggaaggtttgtgtcgcagcgaataaaaggcttatgcatatttcatctttcatctttttaatcgctcgctcacaagaagtatatttcaagaattgctcgctccaataaaagtcttacgcatatttcaactttttaatttcaaatgagattatcatatttgtaatgtatatataataaattaaaatgcatttatatttggaaaaagcacaccgaaggtccctacactcataatactatatcaccaagtcatcacactgtcctacaaatagtatatgggtccatgctctctgtggaaagtggcgaattcagcacatgaaaacatattcacaggggaacattaacttgtgagcaaattgcaatgtactggtacattgcatacatatcggaactatctactggcgaaaacatgggaatgcacatatagctctccccataccattacaaattatgaaattgatacccatgatcacaatctagaatgtaaaatctaaagttacggaagaatacgccctaccatagaaaggccttgcattatattttttctcgaatccaagccatttgcatttt

SEQ ID NO: 46864 - DNA, 1142 bp, Oryza sativa
  unsure (1)..(1142): unsure at all n locations
ggaaaagagtatttaaggaaatgagaggtgtggtttggaaaggaggagagaagagaaataataggggaatttttggggggtagaagaggtagtgttgaggtgttgtaagagggaaagaaaaaaataaatggaaagagagaggaggattgatttgaaagaaagtttaaatagagtggaaggtgttctgtttattttagaaagagtatagtaaagagagagtgtgtgagagagtgtatatggggggggnagggagatagagaggggggagtgaggtagagaaaaagtggttatgngagagatggatatttagtatatatatatatatatatatatatatatatatatatatatatatatatatatatatatatatatatatatatatatatatatatatatatatatatatatatatatatatatatatatatatatatatatatatatatatatatatatatatatatatatatatatatatatatatatatatatatatatatatatatatatatatacataaatacatatatattatgcatgtacatatgtattgaaacatatataaatataatataatatatatatatgcatatattatatatgcatatatgtactgaaacatatatatgcatggtttatatatattatatatataaaccatgcagcaacagggtcatgcaaaacaaaaggtcatctcgatgcaaaaaaacaaaccaaccgggactaaagatcgatctttagtcccggttatttcacccgggactaaagatagcgatctttagtcccggttttcaaaccgggactaaaggggggttacgaaccgggactacaaagggtttctccaccagtgctccttaatgagatcgaatgttgggtctaattaaagatgtaagcgcgggacatgaattattgtgtacatctgttttttttcactagtggatgtaaaataaactatacattgtaattgtacgggctcttatacgaattagcagacaaccttgctgctatatggggctcctctactcacgtatgcaaaactgtacgcgtcatgtatatcaactctatatcgtccctaaccgatggaaattattaaagcaataattgatgaactactgtaccatactatgaggagcatcact

SEQ ID NO: 46865 - DNA, 1000 bp, Oryza sativa
  unsure (1)..(1000): unsure at all n locations
cctgttnnagttagattcnnnnnnnnnnnnnnnnnnnnnnnaaatcatgtatatgctagttatatgtgatacttacaatttttaaaagttttaaatcacgcaggtggcaatttcatatgttaattagagtttttaacatttaatttactatcattcatatgctaattataattgactagagaatttttaaaagtttcaaatcatgcatgtggcatttacatatgttaattagagtttttcacaatttaatttactatcattcatatgctaattatatatgactattcgaatttttaaaatttttaaatcatgcatgtggcatttacatgtgttaattagagtttttcacaatttaatttaatataattcctatgctaagtatatatgatgattacaatttttattaattttaaatcatgtcgtatgtatatacatatgttaattagagtttttaccaatttaataatatcattcatatgctaagtatatatgattattagaatttttattaattttaaatcatatatttgcttattacgttttatccacttaatttattacagacaacaataatttttcgaagtaattgtcattaatctttatactttaaataattgtaatgcattatcttctattttagaaaaacatatgtaatggaaaataatattcagtgcgcttatcagtagtcccggttcttaaccctaaccaagtttaaaaagaatttagaaatagcgggaaaatatctttagtcccggtcgatgagaacaaacggnagataagatatagtgacctccggttgttcctaacaaacaagagtagggatcctattctatgttgctatattctgggaacggcggaaggtacatatatcttcttactagactttatttatttcattggaaaaacacttacgggagtactattttgacttaattttattatttccaacaatacgaaccatcactcaactgtgatttttctttgagattgcgtccggcct

SEQ ID NO: 46866 - DNA, 776 bp, Oryza sativa
  unsure (1)..(776): unsure at all n locations
cttaatataaatggtagatttagtatagcaagttaacatatatgaaccaaaataactaaatcaggtaagatcggctgaaaccctgatactatctctattgaaaatcataaaacaagtgtaacataccaggaatttcacctagggaaaattttttgtggaaaatttaaaactttctgaattctaaagttttcggtgaacatagaagcatactagagcatataactcccttaaataaaataaacacatagtctagttgggaaaaatcaaaccaaagaccaaaataaaagtttacaaatcttgtggtaataaatttcaaaataaaatattttgctttgaccttaaactgaaaacctaatcttcttggttttgaattgctaacctaactaaaaataattaagtcatatataaaacaaatggaaaggtaggtttcaaaataagcacatctgaattgagataaaatgaacttgcttggttgtgcatattattgttttaagattgtttttggatcttcttggtgcatctcataatagattgcatatgcatgtcatgtctaaagaaaattcttaaaaatagatgaatcaacaattaatcccacaaaaattctcataaatactacacaacaccctaatctcccagtaattttagtttgaatttatcacatcaactagtaccacaaataaattcttcaactcagcaataaatctgaaaccagcataccaattagcctactttgcataattgatgggctnctgtaccatctagtaggtcaatgcaca

SEQ ID NO: 46867 - DNA, 679 bp, Oryza sativa
ccctacttcaaaattctgtgagatagacctaaattaagtgaggtaaagaaaaagaaagaaatatgactgaaaaacacaaaaggacctatctaccccccaaggcacttcgtccacccaccatgtgttgactcgcgctaccctgcatttttctaattttgttttcatttctccttttcttttcctgataatatgttcagcaatagcattaagtggtaattgtagatccatcaactcttgttctttataacgtgacaaggaatttaaaaagttaaagagaaaatgagtttcatttagatgaaaccatgcctatattgtttcccatacaatttatctctttcatgtattgtctataaaacaagaaaaataaaaccacattttgaaacataaaaacgataccacccattggaaatggccttatgcgattgtccttgctcaggattttgatcgaacaatcaaaggttattatttggaaacacattacattatttgcatttaaaatataaatatatcacattcctggaagaagtaagaaaataaggtgacaactttaagatggatatgtagtggtttttataatacgaagtagatcaagtggtaaaaaaagaatgtacttttatagaaaaaaaccattcaaacaatccaagaacaacgatttccttttagattcggctaaaatgga

SEQ ID NO: 46868 - DNA, 632 bp, Oryza sativa
atcatgtgaagatcctctaatccaaatatatgttcggaagcaggggttaaaaacctctcctatatgcaagaaaaaagaggaatggtttattagtatatgattaattaaatgttagctaaaagactttaaaatatattaatatgtctgtagagcaacttttatgtttttttttgcaccgtttagtagtctgggaagcgtatacccgaaaaaagaggaagtagaagataagaatatgtagattcaaactcacgctaaagtaaattttataaaactctgatattgtgactcgagttacacaaaatcacagttgttttagcatgtggcataggtattatgattttagagtttcacaaaactatactgcttaccaattataatgtgatccactgcatacgaaagttctaaaatcaaatctcaaatttacaaaatctttgatctccaagcatacatgctttagctatccaagtaataaatcatttcttattttttggtaaggtagtaagccaaattggtcaatggcatggttttgcaaagctatgtaaccgtcaatgatgtgccatatgttaaagtcgtggtgattttgtgtaacttaaataatataatatcggtgggtttatatatggagcattacc

SEQ ID NO: 46869 - DNA, 757 bp, Oryza sativa
ttaatgctattgctgaacatattatcaggaaaagaaaaggagaaatgaaaacaaaattagaaaaatgcagggtagcgcgagtcaacacatggtgggtggacgaagtgccttggggggtagataggtccttttgtgtttttcagtcatatttctttctttttcttacctcacttaatttaggtctatctcacagaattttgaagtaggggtaaatcggagcttcaattttaaaaagaaaggacaaagacacataattagaaaattaggtgtaaaagtataattgcagttgaaaatatattaccccagaggaaaaggagaggaaaaaaagagagggaagcttcgcaggaatgcttctcccgccaccatctttcttccaaggctcccttgcacaaaaccgagaaaatcaaaagaggcttctggtgtggtgactgtgaacaagcggctggtcgctttcaccttcatctagcgaacgctcgtccagttctcttcctgccgaaataagttcactgtgaattatatcgatgtgctaacgtgtgacggtgtgagaacaacgattgggggtcttttgggtttcgatcgattgtgctgcaagccatcaccattattttatttttgacttagccatcgcaatggaacaaacgggggtagtactaattactaatccagattcccgttttgatttggataagttaatggaaactaaatgttggtaatatgaattaatttttcacctatcacgtcagtacctgaacatagg

SEQ ID NO: 46870 - DNA, 589 bp, Oryza sativa
cggtggggcgttgcaaaagcgcatggctgctgcctgtggcgtgtgggatccccatatgccgcgcgggacaagccatgtggggagataaattttgtactggagttggtgatccgagaaagcgtttgtgttcattaagaaaaagaaaaagggggggtggggggggggagaaaaaagaagagagttttgtgttagtgccgcgccggatagacggatgggatcatgggatctcctgtactgtgcgtgtcctctagtttgtggtagcgatcgagctgctgatgacggcagatggcccagtagtgcttgcaaagttgcaatataattttgttggctcgacctgctttgcttccctgatcagatcttcggcgtgtttggcatgcacatatttggacagttatcatgcaagaaaatgatagtgtattgtactactccatatcgggtcagcacgaagccaaaatagggtcgagctagcgtcagggtgggcagcaggggcctctggtattggagttagcatgcgacgcattgtgggatcggcatgtgctttgtagtcttgcgtacataaatgtttttggatgcatgcatatggtataca

SEQ ID NO: 46871 - DNA, 856 bp, Oryza sativa
tcaaaaaagaattattccttttcaggttataagttattttgactttggtcaaaataaaactcaagtttgtagaaaaaatagtaacatttttaaaccaagacaaatttattatgaaaatatatttaattattgatttgatgaaactaatttagtattaaaatattattatattttttatagaaacttagttaaacttgatcaaagttaaaacgacttataacctaaaataaatggagtaaactttagaaatgaatctgaatacacgtgttcatgtttaactctagagtttgactttttttttacggggagaattctcctttgcaatagcacaagcacggcaccggccgttcagcagaggagcaggtgcactaccatgcccctttccctgtgtgtacagtacaagtatacaggaagcaacccatcgataaaatggaaagcgaggttcagaaaacccctcgcctccaaaaataaaccaaacgaatcccgaccccttctccgcctcttcttcctcctcccctcccctcccctcccctccttccctttcctttctctcctctccaatcgccatacttcccgcttcccgctttgaccgcctccccttcccccatatcatctccccttcctctcctccacttcccgcccgcgcgattcacccaagagagatgtcaatgtggcgcttctcccgctccctcctccgcgccgccgccaccaccaccaccgccaccgcggcgtgtgcctccgcgtccacggcggggaagcatgccgcgtcgcggagtgggtgacgccgcgtgagctccagaggtgctggtacgcgttgctcccggcggcggcggcggccgggcccgggaaggacggg

SEQ ID NO: 46872 - DNA, 1096 bp, Oryza sativa
ttgtatttctacttggactctcattttcttttttttttctttttctccgattaatgtgggaattattagcccccacagcgaacgtggtgcctcctttcaaagctgttttaataatataatagatagatagattaatacctgaagatgttgtccctaaaattcaaaaagcaaaaagatagagaagaagatatggtacatttatggattcctaagtaaccctgcagatgaggtacctctaccttttcgatcaaaggcttcgttcgagaagacagattggctaatctttttcgccgcatgcaaaacgagaataatcattagcatgactaattaagtgttaactattataaacttaaaaatatttttttcaaaaagagaacttctatatatacaattttgcacagaatatattgtttggcaatttgggaagcatatgctaatgaaatacaagaaagatgtcgtttgtcgttttgatttgctgaaaagaactcatcctaagaaggtgcacaatatactttaaaattaacattcgaggcccaaccccaaaagggcaaaacctgcacctgaatacaacaaggttggaagtacaccctccgtagagagagagatatagctccaaacatttggatgtacaccctccgtaaaaaaaagagatttagagggagagatatccctccaaatattttttaaaaagaaaatgtgtgttttggggggagagatatccctccaaatattttttaaaaagaaaatgtgtgttttggagattgaacacatgattatagagttgaaaccacacatcttttaccatttcactatcaattgtatctcatcattgtttggatacacaggaagagggataaaagcagcatttgctagcataacaactttgagaatgttccctcgcgagtaacggtgaaatcacgttctacactatgggttgttttgtttttaagtcctatcaaatttttggttggattgtattgtttcaactctattgaattggcataatttggcctcaatccaaatagttagtaaatactattcaaaactatcaaataactggtagggcaagaattgaccacaatccaaacgacgtact

SEQ ID NO: 46873 - DNA, 595 bp, Oryza sativa
tgcatgttgctttctgtgttgcatggaggttgtccaaatactactgttaaagtgtcaatatcgttaggaagataagaggttagtagctggtgaaattaatgcgggtggccacagctctggaagtctggatgatggtgcttatacttgtcaattggtgataactgattcatgatgtgtggctgcctggtattgataggccgtaggttcaatgcaagaatgtgacattcaaccgtgctgagctgagcaagacagtgttgattgttgaatagttttcgcttaagcgaaatatctcattttcgtgtaattactgctctcctgttggaatttctctagttagtgcagtcagtataactcgtgtgctctggcaaaggttctctagttattttggagtagtctgcactgtttctcgtcatttgtcgtgttctgttctgtttctctgcactgtacttcatagaaggaaaagaaggaaacattggccgggcacattcagttctgttaggaataaggatttttttttgcacgaaaaggaataagtatttgtttttctcaatgtgcctaataccaatatcatgaaaacttatgctgcaatttattt

SEQ ID NO: 46874 - DNA, 3119 bp, Oryza sativa
aaatagttattcttgccaaaatttgacaatattactaaccttactaaaattttattattgctttggtaaggtttgaaatggcatcaaagttaatacgccctaagccaaactaattgtcaaatggacctcttggcctcattcctcattttagcaatatacctggagagacgtgttagaggcatcagcatataaaaaataataataatgtatgacatgatgtgaaaaaaaatcattagtcaactatttcaccgaactctagaaagaacctttgcataattcaacatattataattattggcgtggtacagccgtacagactacaagattcacagaaaaaaaagggccattccaatgagtaactgaaaaaaaacgtgtctaactccgtgaagaaaagctgttccaatggattttttttctctagaacatatagtagtataatccaaccaatctactcgaaaaaaaggctacatttgtagcacaattatgtttctgcacaacttattagtttgctatgtcaatagaaaaatagtagaagccaagaacacagatctttccaggggaaaaaacaaatgaacataagcaagctgagaacgatgttaataacaacgtagggtggttttttacaactcgtgtatctctacaacagttatttttttctttaactaacatactgcgatatccaagtgcatatataatttatatatgacaaggacaataatatatttagtcgattatgtcatgtaaaatagcaagcctaatcaacccgtttttaaagttgtttataatgtggttggagacaacgtacaaccgatacatatacttcattttctcgaaaaccagccaactaactgaataatcatccctacatctgccatctactacattgtatcataagggcacccacaatggttatctataagctctctacaagagatccatgtcagcatattttcctacttggaagagattaaatgaagagagagagcaaagctatctactaacatggagatagtctatagagaaaaacgaggcaatggattagagagctatagatacccatgtagacataccattgaagtggtttactattaatctagtctattgttgaggtgtacatgttttatagatagcatcttactttaccattgcgggtgctctaggagcaaggtcaatagtagtgctcgctaccggcggcaaaaataccatgtcagcatgttgcagttaatattcaaaactagctcgtacagtagtgagctgcactccatctctacacagcttccaatgacagttttcctatttttttaatcacagtttccctgctcagtcgattttggccccacgtaaaacattattttattgtcacctgtgctactcgcgcataaaaacttgtgctggcgccaggccgtagattagtcgccggctttattctctttgcttgtttctcttcctttcacctagagattaaatgacgtggcatattttagagtctgctgagtcatcctattgtacttgctctaaccagtccctttccacataatgtcaagctacttgcattgacattgaaatttcctaatcaatcgtgaacacgcataaggatatatgacgtcccaacggagctaagagatcccactcagcccgagttttattcgtagtactccctccaggggcgtgcctaggttatactacccggtgtcacagtacaccggatagattattcaaatcctatataaattacactatattaattaatatgttagtcaataattagataattagtatgtattggacccctggtaacttttcttctgggttcgccactgagtctccctccatttaattttgatagttatattttatcttggcacacacaccaatgataagtaattctacttatcatccatttaaacatattactccctccatatacttttgatagtcatatttcatcttgacacacagaccaaggataagtgattctacttatcatccatttaaatatgctactagtcattcctcgtaaacaagcgattcattaatatttacatttctcgatgctcatgcaaccaatcttgtgtggaagaatgaagagccatgcattaaatccaagaaagtcattaagataataagttgttggattgaaatatgcctatcaaaaataaaattttcagatttggaagtatgactatcaaaagtagatggagggagtattagtcattcctcgtaaacaagcgattcataaatatttacatttctcgatgcccaggtagccaatcttgtgtagagaaatggagagtcacgtattaaatccgagaaagtcattaagaggataggttgttggattgaaatatgcctatcaaaaataaattttttaaatttgaaaatataactgtcaaaagtagatagagagagtaactcatatacggtcggtgcatttatctccggcttaattagtagatcaaagtatacgggactttgtcattgtcattcaaagagaaaattaagcaaggcacagacgcgacatcgtgcgtcataatcttggttagtcacacgctaggacgactgcgcagcaacacatcataacgctaaacgctccccggaattacgcaagtacgcattgattagtcaggcacgccgggagcccgggacagagttggggcaacacacgaaccgacgcacccaaccaacccgccctccgttccacgcacgcgcgcgccacacgccacacgccacgggagaaacgaacggccggtgcgatgcgacgcacggtcgcaccacacgcgcttcccttccactgctcgctccgatggcgtgtggctgcgcgcctgcgcccccggggccactccggcgtttcgcgtgggcaactgggcaaccgcaccgttcgacgggccgaggggcgacgaggactcggaggcgggagcgctggtgcgctgcgcgcctgcgcgtgcggaggcgggagcgctgccgaggcgacggaccggcgttgggtgagagatcgcaggcacctgtcccacgggccaggggtgcatgtgtagcggaggtgtgtcatgtgtgtggtttggctggttgcttcgcgcgagctttttatttatttatttatttatttattgtatatttttggg

SEQ ID NO: 46875 - DNA, 746 bp, Oryza sativa
tagaccataactcctttagtaaaaccctttgatcagcatgttaaacataatgcactctaccactatatgaaattacttaatctaattcaaaatataaccacatgaaatgacatatataagtaaacaatacatagagatgcaatttttttatttttatttcatttttttgatatttttttcacacttaggagaacataggaaccaaccgtataaaaaataaactcaaacggacaaaatatgtgacatgcagaattttccaaaactctaccgaaacggacaaaatatgtcatctattaaaataggcgtaactttctcatacggactcggaatcaggcaaataatatatgcacggacatctacagaaaaagttacatccgattctcccccgctttgccgggttcggcgatattaaaaccgacaaattccgcttgcaagattgtgttttcgaggagagaagtttttcggtggagctttggaaaattccacgtgccacatatttcgttcatttgagtttattttttacatagttggttcctgtgagttcctaagtgtgaagaaaatatcaaaaaaataaaataaaaataaaaaagttgcacatctctctcctctgcactagttcggagagaggagaggagaggaaaaattctacatgtcacatattacgtccatttgagttcaatttttctatggttcttgtgtgtccctaagcgtgaaaaaaatatcaaacaaataaaacaaaaataaaa

SEQ ID NO: 46876 - DNA, 1160 bp, Oryza sativa
tggaggaggagtttattttgttgtcttatcgatcagatagcatactgccagttactcaatttcaaagggaacaagttttttaattcgattatcaagttcagaacaaaacaaaccagtcagatattattggagtccgtcttgcacagagtatcaccaggaaacaaacatggtcaaaaaaatttgaaatctaatggtttcggaagagacacgatttgttcgtgttttacataattcacaaggaccgtatatgctcttggtttgctcggaatctgacgaagccgcattatgaaacaaagtaaattcgggtaagcctcaatcccacatccatgtgtgatcaatatttcgaactaaaatcccggcccattaacatagatgggccaagatggcccaaataaagtcagaaaatcatgaaacccatatgctcgaatatttttagggcccggtgaagtttttccggaccacttgcaagcccaccactatcggctcatccatcagctatcgcctatgggactagcttagcaaaatcgatcgcataccgggctaacgtgtgtttgtgaatggctcggagctgttaagctatcgattatcatgtcatacaagcatatataatgtttactgaccaacatcacagccttgctcggcgtaacattattcattgctgtttagctatagtaattaggaagcaagtttggccaagctcagtgcatgttcactttgattgccattttcaaccttaccaaattttgataatgttgtcaaaaaagtggctatatttagtttgctaccaaattttagtaactatataagaaatcctgccaaatttttggcaagtttgtcaaaattttggcaactataccaaaattttggtaaaatttggggcctgctcactttgctgccaaaaaaaccttactaaattttggcaatggcaactataccaaaactttggcatgatttcttatatagttatcaaaatttggcggcaaactaaatgtagccacttttttttttgacaactttaccaaaatttggtaaggttgaaaatggcaccaaagtgaacatgcctttggtaaggttttttttcatcaaagtgaacaagccctcagcgttacatcagcggattagacattgcccgctgaattaattaagttatagtaacattt

SEQ ID NO: 46877 - DNA, 640 bp, Oryza sativa
agcgcgagtcaacacatggtgggtggaccaagtgccttggggggtaaataggtccttttggggttttcaagtcatatttctttcttttttttacctcacttaatttaggtctatctcacagaattttaagtaggggtaaatccgagcttcaatttttaaaagaaaggacaaagacacataattagaaaattaggtgtaaaagtataattgcagttgaaaatataattaccccagaggaaaaggagaggaaaaaaaagagagggaagcttcgcaggaatgcttctcccgccaccatcctttcttccaaggctcccttgcacaaaaccgagaaaatcaaaagaggcttctggtgtggtgactgtgaacaagcggctggtcgctttcaccttcatctagcgaacgctcgtcaagttctcttcctgccgaattaagttcactgtgaattatatcgatgtgctaacgtgtgacggtgtgagaacaacgattgggggtctcttgggtctcgatcgatcgtgctgcagccatcacaataattttatttctgactaagccatcgcaatgggaacaaacgggggtagtactaattactaatccagattcccgttttgattgggatagttgatgggaactaaatggtccg

SEQ ID NO: 46878 - DNA, 639 bp, Oryza sativa
agaaatcctgccaaatttttggcaagtttgtcaaaattttggcaactataccaaaattttggtaaaatttggggctgctcactttgctgccaaaaaaaccttactaaattttggcaatggcaactataccaaaactttggcatgatttcttatatagttatcaaaatttggcggcaaactaaatgtagccacttttttttttgacaactttaccaaaatttggtaaggttgaaaatggcaccaaagtgaacatgcctttggtaaggtttttttttcatcaaagtgaacaagccctcagcgttacatcagcggattagacattgcccgctgaattaattaagttatagtaacattttgaaaataacataataatagcaaaatatggagtgtataccatatgcatgcatccaaaaacatttatgtacgcaagactacaaagcacatgccgatcccacaatgcgtcgcatgctaactccaataccagaggcccctgctgcccaccctgacgctagctcgaccctattttggcttcgtgctgacccgatatggagtagtacaatacactatcattttcttgcatgataactgtccaaatatgtgcatgccaaacacgccgaagatctgatcagggaagcaaag

SEQ ID NO: 46879 - DNA, 680 bp, Oryza sativa
ctggagaaacccggcgaaaaatcccgtcgccgctgggaatatctcgatggaataccaaacccagcgacggaattggactgggaccggactggacggtcacgatggagtctcgtcgctcccacgtgaccgccgccgccgccatcgcggccgtccaataccagcagcggccgtagtaataaaaaaaacaaaattggtggatcccgtcccccgtttggaactttggatccaccaaatcagacggagccacctatccgcgccgtcagatctctccatttctctccacgtggcgtcgagaggaccgtccgatggtaacgcgaccatcctaaacaaggtattcgcgtggaccctacacgtcgccgtcgcgctgcttattaatatcgcgccgcccacttcgtcatcctcctcgcgtactccgctctcgaaaaagaaaagaaaggctttcgtctcggtgggcaaaagcgcgagggcaaagcgaaggtaagggcctctctgatcttcctcatcgatggatgcgtcgttggttttgagcgcggtagcttgtttgtggttcggttgttcgccgatcgatcggtagatccgcctgtgcgaatctgatctgaggctcgaaatctgataaaattggcgagatttacagcgttgcttagtgttaattatgctcgattaggccacgagttggttcg

SEQ ID NO: 46880 - DNA, 1148 bp, Oryza sativa
caattgcaatctgagtttactattattttgtgcagaaaaagattttcttgtacgtgttgggttatctcatttgctgaactgtgcgatagcatttcatgtgctaacttatggattaccaaatcctggtctagcaccaaataaagattactcattggttcccccaaaacatgggttaagaatcgacctatggagggtgggccctaggggcctcaaatcacgggttaaggcctgatctgtagggggcgactccttgtgtaggggggaccgtctattgtgacctttctcggcccctgttgatcagcgtataacgttgctgcaccgagaccaagaaaccaaatcaactctgcatgcacatcatttatagctaattctccctaattagcatgcagctcaacggatttattctgcatgcatctcaacgcatgagacttcaaaagactctgcatgtacatgcatagcatgcgaggcatttactacaacctgagaaaacgctagtacctagtttatacgctgatcaatttggaatatttgaaatttggttaggcgctgatcaaaagggaatggagggagtataatacattagggaggtctttccctttggggccgagttctttctcatctttttattattattattatattagaaccatagaaaatactgttatatattaagaaggtttgtgaaaatattgttgaagtatttggagatgggtacctgagatctccaaagaataatgacacagctagattacttgccattgcagagcaagggggttttctcggaatgctttggtgcattgattgtatcacatattaataattggaggatagggggagatagaataaatgaatcattgatacaatcaatgctccctagcattcctggaaaacctctctactctccaattggaagtaatctatctatgccattatcatttggagatctcaagtactcatctccgaatacttcaacaatagttttcattcacaaacattttaagcttatgacagtattttctccaatttcaatattgattatccatagcatctcttggtactacataagttcgcattcaaaagctgctgtacacttgtgcaaaagatataacccaagacctccaacaatatatctttttttgcataagata

SEQ ID NO: 46881 - DNA, 1136 bp, Oryza sativa
aacagactggaccagcacagagcggccagccagagtggcgagtcgtcccttccagggtggaagacgatgggaaactttatccacaagcggttgcagggttgccttcggcaacttgtgaacggacagcggaatgctgaaataggagcagggaaaaaccgaatcttgtgtggaagaatgaagagtcgtgcattaaatcctcataaacaagcgattcattgatatttacatttctcgatgcgcatgtagccaatcttgtgtggaagaatggagagtcacgtattaaatccgagaaagtcattaatatgatacgtggttggattgaaatatgtctatcaaaagtaaattttttagatttggaaatatgcctatcaaaaatagatggaagggagtattaatgattaaatggtctagataaatattttgttaaatactttgagtgtccaattattttcatgttttttttgaaattatttaagcattggaagtgtttttgaaaattcaaagatcatttcagtgattaacattgacgacgggtgaggagacgcgatggcgcatgtcgaaaagagctacgtccacgtacgctagctctctggagaatcgagggtccagagtcggactgcttgcacgtatccatgccccagccgcaagcaatataatcggacaaatactactacgtctctatctctatttctactattaagatgtttttactggtggtttagtaagtcatccgtatccgaatctaattgccatatgctatcttcgattcaaaaactactgacgtgatccgtgggaagcagtgccatgtccacgtccgattcccacgtacatcgccatcgaatccaaatatgctcccgttgcctttttttttttcttaagcatgtccaaagcaccccctccgattcggttttaccattgccacgagcccacgatcaagcgagatggacttggctctgtactccgtagagattggagagatgtgcgcctggttagattggaaggaaataccgatggtgatggcctgcatgtgcatggctgcatagttgcttttttgcctaatctataactaatataaatattcgtattttttcgtttgtcacatctaattttcgtccgtgttttcgtccatacacaat

SEQ ID NO: 46882 - DNA, 591 bp, Oryza sativa
ctctgaaagctgcagctgcaagatggttgtgtgatttagctatatatgtcatttttggttctaatgattaactaatcaactgatctgagatgattgtgagatgattaggtccctagatatatatagcctttttttttcggattaattcaacaaggactaccgatgacaccttgagttaattaacgacgcttgtggcgtgcagccgtgcatatgcatgtgcgtgcccgtgcagccgcagcgtggcttgcggtttaatccaacgatttgtgtaagcgcagacacgtattatggcccaaactatatattattctcttatctgtgtactttttcgtcgatctttgcttgaacttttgcttgattatattcgattagaggactatctcttaatttgcttgacttcagattgtgaaatggacggcttaattatttgcagagattattcatgttccggtacttccttgtttaagaaagggatggcgtctgttcctttaatagtacgggtgattctgcatctggccagcaattgtaatcgtgtccaaccgcgtgcaatggataattcgccggaaaagtattttttattgtcgggatgac

SEQ ID NO: 46883 - DNA, 644 bp, Oryza sativa
agcgctcaggtacttgatatatttatctatcctcctatttaaaattcttaacgattaggcacttgagccacctccagcgctgacaaaattgctctcacagtgatctagtggtaccttcatttccacttgcctagtgccaaaagttgctattgcctcagcgacacctggttggcactgcaaagcgaagctacgagatttcagccatgatcaccctgatgtccaacgacaggtgttgagatggaaaccagtgcagaatcgggcctgttctggcatataactgttgtagtgatttatccctgcaaactggcaaatccgcaaatgtcgtgtaaaaatcccgttcttgtcaagcttgtcaaatcatcatatgtatgaaccagggatcacgaaacatcagttaactgcacaacgacgttggcaagctaaggctgtttcgcatttggcaatgattggacggtttgttgcaagcgattcagcacctgaaatagttatacgggacaaacatgatactagtatatatcattagcagctcgcatataatgattgactgagggagaagattgatcagatgttttgtattaccagcggctgcttacatctcaacagcagttatacacttgatgtttcatgttttgtcatcaatagat

SEQ ID NO: 46884 - DNA, 1163 bp, Oryza sativa
caaatataataatatttataatattaaattagtttcatcaaatcaataattgaatatattttcataatattttttcttgggttgaaaatgttactactttttctataaacttgatcaaatttatcaaagtcaaaatgttaacctgaaacggagggaatagtataaaaggacatgtttactgaccctgtgtcaagcactcttgttacagaatttcggtaaagagaataatatagtgtgccttcctccaaattttattttacggattttatgtccaaagttagcaattccgttacatatagtctgtaacgctccgcttttcgtgaggcgttaaaaactaattcggcaaaatcctaattgcgaaaattttcgttctttgtgtgcgagtctaagttgtgccaatatctcaattcaaatcccgttgttccctctcatcgaaatcgaaatcctccacctcaaatttccaatcccgattcaagtcaccgagatcaaatcccgaaattcaattcctctctttgaattctcgccaaatacttgtaccgactcgaaagatatccaaattccattcccaatccaaattctctccaactcaaattctaagcaaaagtctaatttgcatccctcgggttcgtgggccgaatcccctccctaggcccatctctcccctctgcccttctctctcacgtgcgctgcacgtggtcactcagcagagctgagggaggaagagagctcccgcctctctgccttttctccccctctccgttcactctctctctccccggcgccgattcccgccgacgccgctcaaatccgcaccgccttcgctcgttcctgcgcgctcgcgcgtggctgaccgcccggttgccgccgcgtcagccctgacgccgcctgtccccgcgcctgcgccgcgcagccgcccggccccgctcgcctttagccgtcatcgccgctgtcatcgctcggccccgatgcccccatgccgcatccttccaaaaccaagagacagagctcgtgctcctctccctcgttctctctccctccttcctccttcctcccaaagtggcaagggagccaagctcttttcccttcccttttcgcctttttccccgaccacacccgctgtcaccacctgccgctccttgaccgcaagcgccgcgccagccgag

SEQ ID NO: 46885 - DNA, 629 bp, Oryza sativa
cctgagcttggtactgggaatggtacacacatattacttgtttcagaggcagaagctggatatgtgtccataaggaatttgcttgaactgacaaggaatgctaggcagtggcataattccatggttgagtatttgtcatggtttgtggatgcatggatggttgccaaacatgcaagtaattttggttggtatcttagttgggcttcccaaattaaaaatatggtgaagaatttgttgcgacaggcaaatagggccagcaattttgacacttctatacttgagatgaacacacatgttcagaaacattcagcttatactcaagtgcatagcagagctgaggtagttactgttaaacctgaaacaaaggagctattgaacgctgaactctagtcctttgctatgcttgtcagcaacaagattgaggacaatgattttgtattgctgcttctgaaacatctcactttcttaagattgatagctaagattgcattgatcatgccatgggatctagctgaaagcgaagacaaatttataaagcttttgggacagtacaagtgtgcaatataaatcaagagtggagctttgcaagttcaaaagtttatttgatatcgacttgcggacaagtcgaa

SEQ ID NO: 46886 - DNA, 585 bp, Oryza sativa
aaaaataatcaagtgattcttaaacactccaatttttttatttgatgtactaaaatagtatcatccttccagttttatcgaattcaatcatttatcaagagtgcacaaaaagactatgtaacattacatgaacgagtaaatgtgccacaaaagggcatcaaaccaaacaaaaaggaaaggggaaaggagaaaaacatagaaaattaattataaaaatcgttttttagcgcatatgcttacccaacatattttttggatgaatgtttttgtaacaaaagattttcgatgaaaattttaatatcaaagcattactgatgaaagtcttcaaaggctatcgaaaagacttttgatagaagtcaatagggcaccctttccaattttatcaaatttaaccatttatcaagagcacacaaaaggactaagtacgagactactaaatgtgccacaaaagggcaacaaaccaaacaaaagggaaagggaaaaggagaaaaaaaagaaaattaatcataaaaattccttttgttttttggatgaatgttttcgtaacaaaaattttcgaatgaaaattttcatatgaaagttttc

SEQ ID NO: 46887 - DNA, 1290 bp, Oryza sativa
tcggtgacttgaatcgggattggaaatttgaggtggaggatttcgatttcgatgagagggaacaacgggatttgaattgagatattggcacaacttagactcgcacacaaagaacgaaaattttcgcaattaggattttgccgaattagtttttaacgcctcacgaaaagcggagcgttacagactatatgtaacggaattgctaactttggacataaaatccgtaaaataaaatttggaggaaggcacactatattattctctttaccgaaattctgtaacaagagtgcttgacacagggtcagtaaacatgtccttttatactattccctccgtttcaggttaacattttgactttgataaatttgatcaagtttatagaaaaagtagtaacattttcaacccaagaaaaaatattatgaaaatatattcaattattgatttgatgaaactaatttaatattataaatattattatatttgtctataaattttattaaatttgaaacagtttgactttgaccagtcaaagtcttataaactgaaatggatagagtactactctaatcggtgtctaagcaaaagagtggcacctacgggcacggccatggctgtgcaatattgtgatgtccaagatcgtttgattaaccaggaatattcgtcttaatttagctactcttcatatctgccttaatgatgagtcaactctaaaaattagtttccatccaattaaccactacacgccgttggtcgagcgcgattgatgttgctggccaggtgcagtatcacctgtaagtttcaaggaacagatgacatcgtttcttagacaagggagtaccccgaacattgaatactttctgcaaattaataattgagccgtccatttcaccattagaagtaaagcaaaccaagagaggtatcttctgaaattaaatcaattttatgccaagcagatcagtagtttggacaatacgtgtcttttttctaagataatggacaatacgtgtctgcgtgttcgtaacttcatttacaaatcttccgattaacccataagccatgctgcggctgcacgggcacatgcacgcatggcgatccttgtagaattaatccgaacaggctatatatatctagaccaatcatcccacgaatcatctcacaatcatcagaaccaaattcacagctaaatcgcacgcacaccacagtctacagcatctctgctttgcagctgcagcttaatttcagagctagcgagctacaactttcagcaaacgcctactgaccacgacgaca

SEQ ID NO: 46888 - DNA, 1014 bp, Oryza sativa
cccccccccccccccccgagggggttaggccacgtgggtgatcgtgtctgcctcaagtctctaagtcatgatactcccggtcccatgtcaccgacactattatattattaaaagaatagaaaaaggagcctccacgtttgctctcatggcctagaaattctcacattaataggagaaaaagaaaaagcagagtccatatagaaatacaatttaaggaatattagaagaggagactagagtccacatagaaatacaattaggaaataactgaaattcagaattaaaaaataaggaatattagaagaggagactagagtccatatagaaatacaattagaaaataactgaaatttagaattaaaaataaggaatattaaaagtagagtatagagtccatatagaaatacaattaggaaataactgaaattcggaattaaaaataagcaatattagaagtagagtatagagtccatatagaaatacaattagctaggaaaataatggaaatttggaattaaaaataaggaatattagaagtagagtgaaatacaattaagaaaaaaatagaaatttggaattaaaaaataagcaatatttgaagtagagtatagagtccctataggaatttaaaactaactaaaatttggaataaacataataaaattaaaagtagagtttagagtccgtataaaaatacaatttacaaataactaaaattcgaaatttagaaaaacatgggaagaagagtttaaagtcaatataggaatacaatttagagataactgaaattcgaaattaaaaattaaagaatattgaaagatgagtttagagtccacatagaaatacaattagaaataattaaaatttagaaataaaaataaatagaataatattgaaacaagagtatagagtctatatagaaatacaatttacagaaaattcgggactaaaaaatatattaaaagacgagactagggggatcctctagagtcttgatattaaaaataattaata

SEQ ID NO: 46889 - DNA, 1035 bp, Oryza sativa
cagagtcttttgaaggctcatgcattgagatgcatgcagaataaatccgttgagctgcatgctattagggagaattagctataaatgatgtgcatgcagagttgatttggtttcttggtctcggtgcagcaacgttatacgctgatcaacaggggccgagaaaggtcacaatagacggtcccccctacacaaggagtcgccccctacagatcaggccttaacccgtgatttgaggcccctagggcccaccctccataggtcgattcttaacccatgttttgggggaaccaatgagtaatctttatttggtgctagaccaggatttggtaatccataagttagcacatgaaatgctatcgtacagttcagcaaatgagataacccaacacgtacaagaaaatctttttctgcacaaaataatagtaaactcagattgcaattgtgcctatgtgctacgtaagaattactagttcgctatcgtcatcatcagatggctatgtcgatgaatctaagagagatcaatgacttatttcaagcatagaaaaatatatgtatgtatatgtaagcatctttgatctggaaaggaagtataaaatgtccatattaattttcaattcagactttggaccagacttgggtgaactttgaacaggtccttagggcttgttttcatttcaagttgattgggcttccaatcaacaacagtaatatttaccaaaaaaattacacacaagagaaataaaaacttaaggatgtaagcagtacacatgcacatcaactagaaggaaccttgcaggggatggtacggatgtagtctatgagcaattgagcagatctaccacggagtggcctatgcctttgtgaaacaaactacaatggagaaaaaaatgaatcaatgtcccgtggcaataaggtgtctaagatcttcaaacttcagaatatttttttctcccaaaagacgtacctgtaatacatatgctaaatatcgtgaaaaaaaagatcatcaacgttatgtgggtcaagtttttccaggtc

SEQ ID NO: 46890 - DNA, 653 bp, Oryza sativa
aacaaaacaaaatattcattatttttcttcttgaacatgccggagagctatgtatcatttcatataagaaaagtggcaaataaacccatacaacacacgcctacacaacccacagttcaaaatactaacatatgtgccctcttaagtataacaaacaactaaatctaatgccttaagtgccggtaaagagaagggaaagccccttaactcctaacactttgtgcaagtaaatggtctacacaaatttcatacaaagttgttagtaggtgaggtacattttttttcagatatccatacagcatgcatgtaagttttggaaatcgatgagacataaaaaaaattggccatatcaaccacaaatactaagtttgcagaaaatcaaattgttcagatagcattatccttgacaagtagtgaaccatggcagagggagacgcacacctcatttcacgggcagcttcttgaatatgccccagctttggtcgcccattcggccattcacatgtagcaatctcacaaacaacacctacaacaaaattgtggcacctcaaaatgtctattttgtggatcaagtcgcattaaaaaaaacagttcaaaagaaaaggtcccattcaaatgcaactcaaggagcagacctaacggaagccaatcat

SEQ ID NO: 46891 - DNA, 558 bp, Oryza sativa
gaattttcctattattaattttaataatacaaagaacattttagtaattatttaaacaattactccttccatctatttttgatagttatatttcatcttggcacaatgatcaaggataagtaattctacttatcatccatttaaacatgccactagttattcctctttttttttcgaacacgcaaaaggattacacgttaatatattagaggaatagagtttttgttacacaacgcaatcggccaaaccggcctatgccagagaaggaagaaaacaaagccaaaaacaaggaagaaaaagaaaaattcgtacgacgggtaacgctactccaaacaacgagagggggcagagccacgctacactcccaacaagtccccaaaggaagcaacgcccgctaatgaccacgcagccgaccctccgaaaggactctagaactactgagaccgaagagagcgcagagtcaaacattctagagttacgttccttccacagctgccaagagaccaggaggaccaggggggtcgaagctggcacggaggtgatcaggtaaacaagccc

SEQ ID NO: 46892 - DNA, 1026 bp, Oryza sativa
gaagaaaaagaaaagttcattttaggacttttttttccagaagcatttacgattatagttattgaatgtgtttatttctgagcaaacctaaaagaaaggattttctttctttttccaattaaataattgttaaataatatttgtattattaaaattagcaattaagctttgaaaattccaaagagcgtaactaattctagagaatttaataaaattaaatttaactatgtcattttatttctcaacttgctttacttgtaaatttatttaattatacacttacctaattaacaataccaaatatttcagcgaatttgtagtttaattaattgcatatttttttatctgtacgcttcccgttgcaacgcacgggcacttttgctagtccctcataaagtataatttatactactaggatactacagggaaacggttttaacagctcgtggatgtccactagtttattgcatatcatttaaatagttatgaaaaaaattaaaaaaatatgaataagatagatcaatatgtaatatgtaatatgtaatatgtaatgtatcaatccacaaacatgcaagctaaaattcaacttctacatattgtaacaaaaataacaaacaaaactcaaattaatatatgtatgttgacagttaaatttgttgttttttttacaacttgtagaagttgaatttgaactttgatgtttgtggagtgatatattacatattgatttatcttatcaattgttttaaaaaattttcgtaaccatctagttgatatgcaataaataaacaggtggacgtccaatcaagttattagaatccatcccgtttacgtttagtttcttgtattttggtacgatgagagtatgaccaattacatactaggacgattggtacgtaggcacgcgcgtgtacgtctttgatcgagatcgagttgctgttcccgggagatcgatcgatcgatacacatcatgacgttaatctcagaccttccaccggagctggttccctgcatcgccggccacct

SEQ ID NO: 46893 - DNA, 1185 bp, Oryza sativa
attgtgcctatgtgctacgtaagaattactagttcgctatcgtcatcatcagatggctatgtcgatgaatctaagagagatcaatgacttatttcaagcatagaaaaatatatgtatgtatatgtaagcatctttgatctggaaaggaagtataaaatgtccatattaattttcaattcagactttggaccagacttgggtgaactttgaacaggtccttagggcttgttttcatttcaagttgattgggcttccaatcaacaacagtaatatttaccaaaaaaattacacacaagagaaataaaaacttaaggatgtaagcagtacacatgcacatcaactagaaggaaccttgcaggggatggtacggatgtagtctatgagcaattgagcagatctaccacggagtggcctatgcctttgtgaaacaaactacaatggagaaaaaaatgaatcaatgtcccgtggcaataaggtgtctaagatcttcaaacttcagaatatttttttctcccaaaagacgtacctgtaatacatatgctaaatatcgtgaaagaaaaagatcatcaacgttatgtgggtcaagtttttccaggtcaatgacagcatatccatgctgcagaatgataaatgaattttacgggggaaaagagttagtatataaattttagtaatggcatgatataggagacatcgaattacagaaaaagggtatacctccattattgttaaagacttctttaaaaccatactgcaggcattatctataaatgctcgtgtcaaccggcacgcatagatcagtttgtgaagctctgactgaaaggtacctgtagataagcaaaatttgtcagctgaatgtgcattcgttcatcgctcatcataaggtgatagcgtttgcaaatttacaactgcagacaagctggccagagctgatgtagcttcacacataccaattggagctaggacttgccacaaataacttcggccacgaattggcaacatgtgaaacagtgaaaatgttgtcatttgctacaaattctgtgacctacttccacaagtgaatttaactaaatacaatctcttgagctagatacccatgaattctgggccactgatagtctgacacactttttatttactattaaataaatagaccttgtgtacagaccacacctagacagaaac

SEQ ID NO: 46894 - DNA, 660 bp, Oryza sativa
aagttatctccatcatattttagattaggcgcaaacaactgagatacaaaggctgtaccagcaagccccaaaacaccactgttgcgagatagtctcagaacaaagagttcggcttgcatttataagcctaaattcactcagagaaaacatataatctgcatctgcagtaactataatggcataaaatcataacatagaatggtagaaagatgtcagtatacattagattcagtaatctttaattcaataccacattggatactacgacaattagaaggtaaccatgtctaaattcaaggatcagtgcaaggtccactaaatccgatatcagatattcatgtgacaatgtatgttagcctagagagtaaatgcacaaacaaagatacagtaatacatgaaggcacaatagtatcatatctaataatagttccctatatgcaagttgtcaagtccacaaaaacttaaaatataagagaaaaaaattagcaccgcttatttgacgatgataacaggtgtcatttggctcaatgcttttacataacaaggattttatgtgttaactcacaattccataagtggggcaacactcattcaaaaccaagggaaaaaggaaaaatacatctctcaatttaacagacctggtcatcagagtggtgtgcg

SEQ ID NO: 46895 - DNA, 536 bp, Oryza sativa
atgtgcagtcgtatgcaggtcatacagacacagtcgtacgtacagtcattccgttgtaattaatctcgttctatattctatactcttgcaaaatttcgggtctatcagcccaccccccattcccaagtacgaaattatttaacccgaacttttttttatttttcattttttatgaatttagccattgtgttaaaatattcaaataatttaggatcaaaattaccgaaattttagtcggtacccccatacaactagcaaaaaagggatttagaaaacattgaaggctgaatacacaaaatatattggacaaagcaataccaaattgttacgagttttctaatcagagtggcgcatcggaagcgtggtgggcccataacccacaggtcccaggatcgaaacctggctctgataattttttccataatttttggcgctacgcaatttcatttaatccttttttttggctcaatttcatttaattcattttttggcgcagtttcatttaatacatttttggcgctacgacgatttctttt

SEQ ID NO: 46896 - DNA, 591 bp, Oryza sativa
tccttcagagaaaggctttactcctattgtgctaatattctctcttttttcccttcttgttaagagtattggcttccgatgttgcccaagcctattaattgaagcagtattcagtccaagagtaccacttggtggaggatacacttcatatttgtaagtggttgatatctattgatgacaaaacatgaaacatcaagtgtataactgctgttgagatgtaagcagccgctggtaatacaaaacatctgatcaatcttctccctcagtcaatcattatatgcgagctgctaatgatatatactagtatcatgtttgtcccgtataactatttcaggtgctgaatcgcttgcaacaaaccgtccaatcattgccaaatgcgaaacagccttagcttgccaacgtcgttgtgcagttaactgatgtttcgtgatccctggttcatacatatgatgatttgacaagcttgacaagaacgggatttttacacgacatttgcggatttgccagtttgcagggataaatcactacaacagttatatgccagaacaggcccgattctgcactggtttccatctcaacacctgtcgttgg

SEQ ID NO: 46897 - DNA, 679 bp, Oryza sativa
ttatacacttacctaattaacaataccaaatatttcagcgaatttgtagtttaattaattgcatatttttttatctgtacgcttcccgttgcaacgcacgggcacttttgctagtccctcataaagtataatttatactactaggatactacagggaaacggttttaacagctcgtggatgtccactagtttattgcatatcatttaaatagttatgaaaaaaattaaaaaaatatgaataagatagatcaatatgtaatatgtaatatgtaatatgtaatgtatcaatccacaaacatgcaagctaaaattcaacttctacatattgtaacaaaaataacaaacaaaactcaaattaatatatgtatgttgacagttaaatttgttgttttttttacaacttgtagaagttgaatttgaactttgatgtttgtggagtgatatattacatattgatttatcttatcaattgttttaaaaaattttcgtaaccatctagttgatatgcaataaataaacaggtggacgtccaatcaagttattagaatccatcccgtttacgtttagtttcttgtattttggtacgatgagagtatgaccaattacatactaggacgattggtacgtaggcacgcgcgtgtacgtctttgatcgagatcgagttgctgttcccgggaga

SEQ ID NO: 46898 - DNA, 625 bp, Oryza sativa
atatagatgagaccgtgttatggcagtttacataaaaagattggggcaattccaaatttaccactcctttgaatcgttattacgagactgtcactagaaaattgcaaaaataccactagaactatcattcgagtggcatccttgcaaaattaaaaaaaccggtggcaaatttgcaaatgccccaaaaagatttgcccataccagatacatctcaaagaagatttgatgcaaagtataacttgttaatgctatattttaatctcggaattattataaacagaaaaagaaatgcttattatctaaaaggaaaatatggcgtgtttcccctaaaaaaaaggaaaatatggcatgtggcctagttacgtaataacatataaggaccgattccttggagaatcttatccaagcatcttataatgggaccatatgaatatttgattcccctggctaagctatatgacaataagttgtgtgtttggctgggacacttgtgtaaggaaggaagacgataggccttgaatacctagaatttttttaggggcccccttgagtacccgaagtcttgcatatatattgactagatgtgtatatatattgggtaccatgctggatggggaaaataggt

SEQ ID NO: 46899 - DNA, 828 bp, Oryza sativa
cgacgaaccaggaggccccgccgtcgtagtgggccaccctcttgtcccggatgccgaggccgggggcgtggtaggtcgtcctggagaagacgcagcggcacgcgccgccggcggcggcggtgtcgtcgtcgggcgtcggccatggcgcgagaagccacgggaggaagctagggcgccgcggcagatagcggagcgcgtcgcgccactccctgcagacggcgtggaagcggacgacgtcgacggcggcgtggaggtggccggcgatgcaggggagcagctccggtgggaggtctgagattaacgtcatgatgtgtatcgatcgatcgatctcccgggaacagcaactcgatctcgatcaaagacgtacacgcgcgtgcctacgtaccaatcgtcctagtatgtaattggtcatactctcatcgtaccaaaatacaagaaactaaacgtaaacgggatggattctaataacttgattggacgtccacctgtttatttattgcatatcaactagatggttacgaaaattttttaaaacaattgataagataaatcaatatgtaatatatcactccacaaacatcaaagttcaaattcaacttctacaagttgtaaaaaaaacaacaaatttaactgtcaacatacatatattaatttgagttttgtttgttatttttgttacaatatgtagaagttgaattttagcttgcatgtttgtggattgatacattacatattacatattacatattacatattgatctatcttattcatatttttttaatttttttcataactatttaaatgatatgcaataaactagtggacat

SEQ ID NO: 46900 - DNA, 782 bp, Oryza sativa
atatgtttttagaagaagaagggcccttgaggaaaataatagcagtattgtacaggccaattcaattaagatacaaacaagttaatagtaagtaacatgggaaaatcagcagagagtattaccacacatgtgaatcataactgttgtttcggttatctcccattacaaaaactgagttctcaggtacttgctgtcatgaaaaacatagtatcaacaaacacaaaaatataacccagaaaagaatcatgttcatttttcttctacaaggattgaaacataaatcaagtatgaagtgttgttgacaacttcatgttcatgcatatgtacagaatatgcacacagcacacaacacaagaaaccatacacaataatgtatctataaatagtggtaaccatatctatatccacctaggtgtggctagtgagcactattcaatagattctatagaaattttatgtcttcagcttacttggaggtataccacacgcaaaatgcaagtttttatatgtaattcgtcatgatatacgtctgattattaatgcagataaagtatttaaaaatcagtaacagtaagggatctaatcaagattgtttcttcaaatgtctccattcattccactgacacatccacatatgtagtgtcagtgaatcaaaactaataaaccatttgtgttttcttaatcctcttattgctcatcagccttaactggggaatgtggttcaaactatatttggttggttgttacattattgagctcatgtatcattcatgggtggctca

SEQ ID NO: 46901 - DNA, 649 bp, Oryza sativa
ctatagattataacaatctagcttatagcttatagtaatctgactcaataatttagattataataatcctaaactgaaagaaacattgcctcaatgtagctatgctagcccaaaattaatccaatcttatgcgtagatctacgctatcctcaagctaaattatgctggctgtacaattacattattgtgctggtcttgtttggtactagtactagaggttttgatatgtgattttgtccttgaaaaactgattacttttaagggcacgttcagatttatgatattttaaaccataccattatttgataaaattaacaaatgcatgataatatttagtttattatcaaatatttgtcatacttagagaattgacaataatatatttaacctatcctaccaaaacttagtaatgttgctaacttgctaagattttggcaataccaaattttggaaagattgaaaatggctataaaatgaacaagccctaaatcagactcggaagaataacaaattgcattgtattattgcgtttacaaaatacaaataattgggagaagctatagatgtctcgagtacagacacgcaaaacgaaatattcattagcacataattaattaagttttaattatttcaaacttcgaaaatagat

SEQ ID NO: 46902 - DNA, 1071 bp, Oryza sativa
tgcgatgcactggcgactgcgagcagcaccaacacgaacgctcgagctggggccatgtctgtcgtcatgatcggataactctgtaactaggcccttgagacttgatgaccgagttaattatctggagctatctatctctgaaagcaacactgctctgttgctttgtgttgatcttctatgtgatgtctgtttgcttggtgatctcctgatgattggatgggtatatatagccatcgctcggtcattgttggattgctgcattagtggctaatgaaatcccaataatgaagtagtgtgaactctggaaagccacgggacgaagctagcgcgcggcgacgcgcatgtgcatgcatcgccggccggcgcagccgcagtactactataacttgctcgccaattaatccgaagaaatgtgtgtccgccggccgccgcagacgtaagtatgtcgcgcttgtattgctttctgttttcctccttgattggtgcgagataatactatataacaaatgaacgccttttgacgtttctctgctcttgttctctcctgcctaagcaacacgtataagtattgagtaatattgaacaatattatagaacttacctagatatgagtacagcatgttctgcaagaagaaaaattctagggtgtaaaaggtttacatgctttgatatcttcatttatatatctgctctcatttttaaattatttatcgttttatatttgtaccaagttaaacatttctaatgttgaccataaatttatattgttaaacaccataaggtttttttattcaccgtgggaaatatttttactagtttatttattgttaaattttatataaattgatgacaggacaaagctaaatctaaaaagataaagtaattccaaaccgaagaagaatatttggttgctactggcatcaatccgaacataggtgcgtgtttgcaattgcacccatttgccatggcggacaaggattttctatacttggtacaatggtattcattatttgcatacgacttagaacggtcaaagaaaatttacattaattgaaatcttataattctaaa

SEQ ID NO: 46903 - DNA, 560 bp, Oryza sativa
aaaatcatggaacatgaagaaaatgatgttttaaatggcacgttgaaaaaaaaagtgaatatgaagaaataggaaaaatgaaaaaacacgttttgatttccacaaaattcctatggaatagattgttccgtatgctttcaggtatctttcatgagctaatcatttgtttcaaaaggacttgatattcattttatccatatgatttaaatcataatttacttttctttgttcataaggggaaaaataatcaagtgattcttaaacactccaatttttttatttgatgtactaaaatagtatcatccttccagttttatcgaattcaatcatttatcaagagtgcacaaaaagactatgtagcattacatgaacgagtaaatgtgccacaaaagggcaacaaaccaaacaaaaaggaaaggggaaaggagaaaaacatagaaaattaattataaaaattgttttttagcgcatctgcttacccaacatattttttggatgaatgtttttgtaacaaagattttcaaatgaaaattttcatatgaaagttttcttgatgaaag

SEQ ID NO: 46904 - DNA, 735 bp, Oryza sativa
cttttgcctgcaacgaggcttggaggctggtgaccgcggcggacgcatacgatggcgggcgcaggagacggtaacagcgacggccatggcggacaaggcggacgcaaactgcgacgacggcgaactcaggcgatgacagcggccacgatagctacaacggacgaggcggatgcacgcgacgatgactgctgcggtggatgatggcggacgcaagcgacggaaacatatgcagtggaccagggtgccggccatggcggactacaatggataggcgacaacaccgatgacgacggctgcggaggatggggccgaagttcgcggcagatgccgaaaccgacgccgacgatgaggcggacgtcggcggtgacgccggctgtggcggacgctggcgatgacgccggccgccgcgaacaaggcggacgtacggtggacgacggtgatgggtgcggcggcgattgcgatggacatagtcacggaccatcgctacaagcgggccccacaaccttgggccgcgcgtggagcctcgcgctcgcgctccaccgctctttcttccatgaaatcgcaaaatcctagctggagcgtttatcgccggttattgtaccgctcttaaaattttttactccctccgtaaaaaaaagtatgggacactgttaatttataatataaaataaaaggagtatttataataagttttcgatgttttgggaaaacaacatcatataattttaagatgta

SEQ ID NO: 46905 - DNA, 870 bp, Oryza sativa
ttatgtttattccaaattttagttagttttaaattcctatagggactctatactctacttcaaatattgcttattttttaattccaaatttctatttttttcttaattgtatttcactctacttctaatattccttatttttaattccaaatttccattattttcctagctaattgtatttctatatggactctatactctacttctaatattgcttatttttaattccgaatttcagttatttcctaattgtatttctatatggactctatactctacttttaatattccttatttttaattctaaatttcagttattttctaattgtatttctatatggactctagtctcctcttctaatattccttattttttaattctgaatttcagttatttcctaattgtatttctatgtggactctagtctcctcttctaatattccttaaattgtatttctatatggactctgctttttctttttctcctattaatgtgagaatttctaggccatgagagcaaacgtggaggctcctttttctattcttttaataatataatagtgtcggtgacatgggcccgggagtatcatgacttagagacttgaggcagacacgatcacccacgtggcctaaccccctcgggggggggggggggggttgggcccgagggtgatacggccgcccttctctttgtctccccgaggggtcggaccgctcctgtctcggccccgagggccgatgcgccccgattccttgtgggttttgcgccgcgtatatggggtaggtgagcatagcggggctcacctaaccacatttattgcggtttggacgagcgcgtcacgccgcatgggggatcctctagagtcgac

SEQ ID NO: 46906 - DNA, 551 bp, Oryza sativa
tttttcataactatttaaatgatatgcaataaactagtggacatccacgagctgttaaaaccgtttccctgtagtatcctagtagtataaattatactttatgagggactagcaaaagtgcccgtgcgttgcaacgggaagcgtacagataaaaaaatatgcaattaattaaactacaaattcgctgaaatatttggtattgttaattaggtaagtgtataattaaataaatttacaagtaaagcaagttgagaaataaaatgacatagttaaatttaattttattaaattctctagaattagttacgctctttggaattttcagagcttaattgctaattttaataatacaaatattatttaacaattatttaattggaaaaagaaagaaaatcctttcttttaggtttgctcagaaataaacacattcaataactataatcgtaaatgcttctggaaaaaaaagtactaaaatgacttttttttttttttggtccgagggacctaaaatagaattttttcaggccttgctagttggcccatggcttttg

SEQ ID NO: 46907 - DNA, 569 bp, Oryza sativa
ctcatcttaaatagagagacatttatgactctctattgaccggttaaaaaggtgggcggactaccacgtgcgcgcgcacgcgttggctgggccaagcccgtggcttccgtcgtccctagctttgatctcttacgtgcaaaagagattgggacgagtagagcctccgaaactctgtccgtctgagttcctgcacgggtaggcgggcaataaagtttttgcggagcgttcttccgtctgagttcctgggtctgagttcctggttcctattcatcaacgccaacatgtcgacagacgacaacgccaacggtgcagctggaggagatgtcagcaatggaggaggcggtgcagggaacggctccatcaacggaggcaactatgcctcacactccagcgaaggaccatttttagagtatgtctctattcccaacacgctaatttctgatatactactattaagcgtaatgtttttataacaatgccatgtgatgaatgtttatgcttattctatattaagcatgatttgtatgttgctcttgattagtattcacactagtttattccctaaaaat

SEQ ID NO: 46908 - DNA, 546 bp, Oryza sativa
cccaaggacgatcgtcgttggagcacttcatcaaacaggtggtgggcgtcgaagaaggtggtgcctggagtggaggatgtgatgcagccgtgaggacagtagtggtcgccttgatggaggcgctcatctcctcgaagaacttgctcctgttagcttctatctcattcaacttcttcaaaatcagatcgatcttctcctctagcctatgattggcctccaagcactcttggtcactcatggtggaatttggtgggggaatggtggctctgataccagattgttaggatcccagttatctcgcttggaacaatagcaaactcagaagtagcagtgcgaatccaatacaagaagccactgatttctattacaatagtggaaggttttgaggtggaaggtggaaggatacaaggggctaaaagactctagaagctaagcaaaggatttggaggtaggaggagaggtggggaaggagattgccaaggttccaagcccagaaccaggacgccgccgtcgttcgctgtcttgccacctgattgatcgatcctg

SEQ ID NO: 46909 - DNA, 955 bp, Oryza sativa
agatatacaccctatgactcatggatgacatgtcttgcgctttaggggtaaaacaaacaatgcttgttggtaaatgtatatccaaagccttaagatgttcctttgccttatggataaatttccttttgtgcaataaagtttctctagtatgttatcattttgtgcggtatgtcataaatgataagttaggcgctccttaaatttgttggtttgttgtcagttttgcgtggcacactatgcttgataagttagcggaacttttaaaataagaaacttgtaagcttgttgtcattttctttgacatactatcctctcccatatgtaaagtaaacaaattgatgaaatatatggaggttagatgattttgcatatccaactagtacttccaagtttataccaaaaaatagaaaatgttggatttaatttttaaaaaagtagaagcaatggacttatgtatcttttcttttttttatcattatattttctggcgtgcatttattaggcagtttattactgtgacataaatttatttaactcgccggtaataaaatatgccatatgtttgttagtcctcactgtcgaccatatcatacaagacattaatcaaatcgtcttgtctaaaatgaccacaatgtccctgcgtggtgtggactatgatttcttttcattcatggttagaactactgccggtccatgaaaggttaaactataaaatgccatctgaaaaaaaaaaggtaaacagacaagtactcgccctcgcaattaaattgttcaataataatagaaatggaaggatttgtcgtgtgtgtgtacatatatacaagaaaatatcaggaaagcatgtatgttattttacacaccgaaagaataaacgcacaacgaaacttatatacaatcatatgtttgctaggcaaccagagatgttactcccaaaagaaacgctccggtatcaatt

SEQ ID NO: 46910 - DNA, 1453 bp, Oryza sativa
agcagctgatggttttaattagtgttcatgttatttatagtagacactatagttaatatgtacgataaagaaattttatgtgaactgcgatattttattattttcgtgggtcccacaatcttcttctatctcttctctttctttcttttttccagcttctcttcctttctttaccttctctttgtttcttttgcctgcaacgaggcttggaggctggtgaccgcggcggacgcatacgatggcgggcgcaggagacggtaacagcgacggccatggcggacaaggcggacgcaaactgcgacgacggcgaactcaggcgatgacagcggccacgatagctacaacggacgaggcggatgcacgcgacgatgactgctgcggtggatgatggcggacgcaagcgacggaaacatatgcagtggaccagggtgccggccatggcggactacaatggataggcgacaacaccgatgacgacggctgcggaggatggggccgaagttcgcggcagatgccgaaaccgacgccgacgatgaggcggacgtcggcggtgacgccggctgtggcggacgctggcgatgacgccggccgccgcgaacaaggcggacgtacggtggacgacggtgatgggtgcggcggcgattgcgatggacatagtcacggaccatcgctacaagcgggccccacaaccttgggccgcgcgtggagcctcgcgctcgcgctccaccgttctttcctccatgaaatcgcaaaatcctagctggagcgtttatcgccggttattgtaccgctcttaaaattttttactccctccgtaaaaaaaagtatgggacactgttaatttataatataaaataaaaggagtatttataataagttttcgatgttttgggtaaacaacatcatataattttaagatgtagataatactttattataaaaaaaaatcggacaattttacgatggaggtagtactctattactcttcggacatagacaacgggatccgatcaccggcggctggttgcgaattcagtcgcggtgtggtgggtagcgcagagaatccaagggaggggaggtgtccacgtcgggtgatgcactccggccaagttggcatgatttgtccttgtccgctagctatgtcactccccaccaccttctcaccaaactccttttcatctttgttgccccttgtttacagcaaattaatttacctatgtttagcaaatctgtggcgacggcgcagtgcagaggccggtgtcttggccattcacaaatcacaattacttgaagcacaaagaaaccacactaaattatcgcctttaattgttcagaaacgtagtattcactccagagtaaaattcatttaccatatcccctatcagatgaaaacttttggaccgtttggtcacttacctgaattctccaggctctcaccaagtggatcatggat

SEQ ID NO: 46911 - DNA, 591 bp, Oryza sativa
attgctgcattagtggctaatgaaatcccaataatgaagtagtgtgaactctggaaagccacgggacgaagctagcgcgcggcgacgcgcatgtgcatgcatcgccggccggcgcagccgagtactactataacttgctcgccaattaatccgaagaaattttcggtttttccctgattggcgcagaatgacgcaaaacacaagcgcggcgacgtccaggctcccgcaatcgcaagcaagcgcatgaaggcaacgttcaacggcggcgccatgaagaatggggtggcgtgtgttgtgtgtggccggcgatcgagtgaggcatctctgaagtctgaactgaagcatctcgagtgttttggactcgtttcttttcctggtgacgttatgaggtgtttttttttccggggagacgttttgatgaggtgttgatcagaattcatcaccttgttagaatgtcaacaagaacaattgacggaagaaacaaataatcgttttaaaagttgacaaaatcatcgagggaaaaaacgttttcaattagccattccaattgacgaaattccgttggcaagtaaacaaaacaatccacggaaa

SEQ ID NO: 46912 - DNA, 515 bp, Oryza sativa
ttttagtactttcatggaatttctccctcctatccaactaaaaatgaatattccaatgcgcgcgggctccacgagctaatttccacatttacagagtgctttcccccaaaactcacttcgtgcagtgcctacagctaaaaccgtaaagtcgcgatgtcctatagcaaaattttcctcgattcatttgttctatcaatatagatgagaccgtgttatggcagtttacataaaaagattggggcaattccaaatttaccactcctttgaatcgttattacgagactgtcactagaaaattgcaaaaataccactagaactatcattcgagtggcatccttgcaaaattaaaaaaaccggtggcaaatttgcaaatgccccaaaaagatttgcccataccagatacatctcaaagaagatttgatgcaaagtataacttgttaatgctatattttaatctcggaattattataaacagaaaaagaaatgcttattatctaaaaggaaaatatggcgtg

SEQ ID NO: 46913 - DNA, 518 bp, Oryza sativa
aaatgatggccttatgctgcgtaatttgctgctgggccatgttgcagtgactgtttattcactcggagtagtgcgtttgcgaaccaaccaagcatttgccaattgctgcgtgaggagggaatctaatctgactaaatatgggttttacttccatgccaacgcgactaaactaaagcaagcaagcgatttcagtcagtagagggaaactaacacccaccaatttgtttgttattcttctgtgcgactgtgtattgtgcacgccaccgtgttgatattgaagggacgtgccgcgtggatggattgatatatatataggttgcacagatttcagatttctcccgtctgaaaaatatgcaggatccctgctcatagaatcatcatatatagtttgggaaattgtattgttgataaccaatatatatttttcaatccacttctttaaacctaaatatttatatgccatccatgagtacaccgacacgggggagcaattgttcatacagaccaaaaggatggca

SEQ ID NO: 46914 - DNA, 558 bp, Oryza sativa
tgaccacttgctacgcgagagaaagcagacgtcgcggccagaaaccaagtcaaacgaactgaaatttttgaaaatatttggattgttttgaccctgataacacccggctggagctgctcagctcggtctttgcttgctggcggcctaaattccatcaattcgtcccaggacaactggatcgacgggttgacttttcaatggaacacttgtatcaacctggtcgacaggatgtcgttactctactttttcatcaatcatctggtgacaattgactttttgtgtgagtgacagggtgcttgacctggtcgtagcccatagtaggccaactcagaatttttagtgggcttggttggacaagtgggccaaaagttgtagccctatataactaaaacggcccactagttagagccaaacccaatgcaggcaggaggcagccctcccctgaaccaaacatccgagatttttttttaataagttcactttaactcccttaactactcatcgaatctgattcgtattcttaaaccgaccagatatattgtgatgaactactgtacc

SEQ ID NO: 46915 - DNA, 680 bp, Oryza sativa
ctatagggcgaattcgagctcggtacccaattctctcttccactacaaaagagctggtttgccgcacagtttggaagtcagggacaatccgccgatacccatcatttttggacagactaaaactatcatagtaatgtttcatctcagtaaacctctgtacaaccttccttgctctatcagccaactcacttggaactggaactacgccaggtttaatgcggtagtgctcgtcatttaccttcagaataaaacatatattagctaagaaggagatttactaatttaacactaatttctacatgcattttcccatttttcaagacaaaatcatacagacaacttacggtttgtttacacaagttttagattggaacgatcaatgtttttgcagttatatatactaaacagtaaatttagttacttttctgagaggaaagtagtaaactaaataattagtttttcatgtacacacacagatatataaataatcattacatatggactgcattgatgaaataatgactatggttgtgtttagttctctccaaactttcaacttttccgtcacatcaaatgtttggacacatgcatggagcattaaatatggatgaaaaaaaaatcaattgcactgttgcatgtaaattgcgagacgaatcttttgagcgtaattacgctatgat

SEQ ID NO: 46916 - DNA, 662 bp, Oryza sativa
tggaagaattgtcaatttcgtctgataccatgaagttaatcaatcttgagccacatagcctgcctttacttagagagctcgagttagtatgccctaacttgcagaattgtgatgcacttgccagcctcagttccctcgagatactatgcgtaaatcgttgttctccccaacttcgggtgcctaattcacttcaaagccagctggaaaaactctacagtccttgatctttgtaataacagtcctctttttaaatgtactattttagttggtacttctgcctttacatggccacatatcttaattctccttttgctatcgactctgtagaagcagaacatcaattcaaagactgcaatttttcggaaggggattggagggagaatgcaaaacagcttctggtgtcccactcccaccttaacactgggacacggttttctttttcttgatggaactgtgggactagaacaataaaggaaaagcgaataattacacaattactaaagaaaaggattgttactgcgataatcatcgcatagattgattgagagatcaatgttagtacaactagaaaggtggcctgcgcgcatgacaaggtaagatttttattgtttgtaaaaaaatttgtctcatagattaagggaaaactaaaggttggatactat

SEQ ID NO: 46917 - DNA, 637 bp, Oryza sativa
aacaataataaactcaatgagatatggacacgtaataaaaaagtaagaaatgttttaggccttttagcagtaaataaattcagaaagaagcattgcggcttatagtgatgaactagcgcactagctatattccaaccgaccattgcctggcatgtcttggtttttagtctgtgatataaactatatgtgccccagtttcgtaggatattattccggggccgagaatctccaggaacaacggatggtccaacctgtgtgatagtacttgtttaagggtaattattacggtggtctctattagaagtactctgctactagtattgtcaccagtagaaacgatctcaattgttattgatttataagtcatactactgtaagaaacaatattctactatcaatgaggtggtcctacctctgtttttatggataacactgttgacttttggattaatatttcaccatccaaattaatcatttgggttaatatagtccttagacccacaaaaagtgccacgtgagtatgccaagtcatcctcgcatgtagcagtataaatgaaatgaccattctactcttatataccatataaaaaagaaggaaaaaaagaagataaatatttcgcacatgtatgatcatttt

SEQ ID NO: 46918 - DNA, 644 bp, Oryza sativa
  unsure (1)..(644): unsure at all n locations
acccgtgcactttgcaggtcatccaaatagtaacgaaatactataaataattatcaacacaaattacgacattatacatccaagtataaaacaatatttttttgacggacaacatccctgcccttttacatatcgtccaaataataaaataactatgaaataattcagcaacataggatgcaccatcatatattattttgtaaacataaaaactaaattaaatatacaatgcctaagaaaaatatatcaaatataaaaaatcggtgggacatantaccccattggcttttacatgtatccgaattgccataaaagaattatgaaataattcaacaatacaagtggcgccaccatacgttgttttgcacacatgaatagctaaattaaaaaaaaagctttaactcaaatacaaatagtccaagtcactacataaaaaaatccagtggctttagtagtagaaaaaaaaatccaattacttcatgttttctgaaattaatgcggtcaaataatccgagtaccgaaagcgctctaaacaatctaatagatttttttagaataccatctaattgattttagatggtgtttaatgcactttggaaaatctgtagatattcaaccaggtattcataataagtcccattaaa

SEQ ID NO: 46919 - DNA, 700 bp, Oryza sativa
gggcgggcagacaaagaataggatgggaacaagaggggctttttactatttggcactcttacggatgttgcttaacgatttgccactaggcccacatgtcatagacacatgagggcccacatgtcattgacagggtgtggcaaatcgttaattgccatgtcacaagagtggcaaatagttaaatttcccggaaacggaggcaggctaaactgatggcgaggagtttgaagacgacgatggaaacctgtgttttgatgcttgaaatgccaatgttttagtcctgtaataactgtttgttttccttttttttttctctcgtcttatctgtaagaacttgatgtttctggaactgttgtaatcatgagcgttttctttaatgaaaacgggggagataccctccctttctcaaaaaaaaaatcccaaatttgcacatttgcttcccgatttaattttatttgcaggtagtcgagaagttggaattccatgcaattaatcctaagaattattgaattccagagcatgccttctgaaattagcccattgcttgtccaaactacaagttgaaacatatgtttgcactgaggcaatgcacaagaacgaaaacaatgcataactggatgttcatgcccctcttggaaacctccatatatgcactccttatgtagctcctactgctcattgttccaaggtctaaaaccat

SEQ ID NO: 46920 - DNA, 579 bp, Oryza sativa
aactaatacttgatgaagtacctctgtggttaccagatagagcacatcgctcaccgtgaagtgaagaacagttgttatggttggctctttgttacttggcatttcatcgaacacttgttgagcgtcagtgtaggtggttgctcctaggcttgaaacagcaccaacagaagcctgttaggtagagggggctagctagggagggcgataccttgttgaggatgtgatccacagcagcgctcaattcatcaaccttcgccttaaacctcgccatgaatgccttctgcttatgcagctcaacggactccaccattgatgcttccattgggtaaggtttccactatcttcctcgtctctctacagatcgaaccttaggctagaatcacggtgcgtaaaacaccaacccttcccttgggtctaccaatcaagcagcaagagaaccgatcagaacagctctgataccaaattgttatgacccgagctcgtgagagatcgaatcacacaaactagcagcagaatacactgataacttaagataatttgagaagaaaatgcgggatcgggtgaagaacagaaaggggg

SEQ ID NO: 46921 - DNA, 1254 bp, Oryza sativa
aatatctacagttatgaccaaatggagagggcgaaaaccttttatatttatgaacagagggaatacgtactatatatggtgttgtgtccatgtttttccaatcagatctaaatactacgacgatgattatagtagaggtgatatgatagtcactctaattttgttcacatcatttacacattattactcagtagatataagataatatacacagtacacaccaccagcacacttgctctaatagtccacaatctgagttatattatttgttttgttcttaatccatttgtctatatatttcttcactcattattgccttgcatctcctctctcctctgttgccttatcggcttgtcttgtgagcttacatggtatcctaaggccaggacgacttagaggcctacttgctctacaagaggacaggtcttaaaaaatgacggcaatttgtagctcttgagtcgtgtgctcgttagtgcgagcgttcatagtggccttcctttcaggcttaattattttgttgtcgctgtattatatgtaaactttgtttctttatcaaggaacgctttcttaaagtcttaaaagaaatgcttttctaaagtgcggtggtaaataaaatcatatatccatttcttctatactacctccattttttaatatatgacaccgttgaattttataaacatatcaccattcgtcttattcaaaatttcaatggaagtataaaaaaaactaagtcatgcttaaaaaaacatttgataataaatcaaatcaaaataaaataaataataattatatattttttttgaatcagacaaatcactactagaaaaagtatttttgcaggcggccaaaagtgattttttcaggcagaggagaggatcgcctgtagcccaacgactgtgaaaatcgatgattttcgcagtcggggcaatggcccgcctgcgaaaatgcattgaaaaagcaaaaaaaaatcgccacacgccctcgccgtcgtcgccctccccagccggatctaggagggaaggggaagggagctgcgccgggcggcatcgtcgccgccgccgtcccgcgccgtcgtcgccgccgccgtcccgcgccgtcgttgtcgccgccgtcggcgcccgccccgccggccttccccttccttcttccggcagatctgggagggaggggagaggggagctgccgcccgctgtcccctgccgggcttcccctttgcttcttcagccatatttgggagggaggggggagccg

SEQ ID NO: 46922 - DNA, 1313 bp, Oryza sativa
aatcttcaccaaccacgtgcattgaactctagcctaagtatcccgcatgatgtctgaccgtcccggacatcgtcttatccccaagccgactcccgatcgatcactgtaaatactcccccgaggcatcaagtcacctacacatgaatcaaacaaagaaaccatattccgagaccaagctatctccaatttgactcattagtagcaaccaacagtattacatacgtatagaatccatctagaagccataaatatgaaacaaacatgaatatccaaataaacaactcgaaaatgaaaccgacacagtgtcggccggtctgaccgcgcgatacacgccggtctgaccggcaactactgcccggtctgaccggacccaaatcagcagtaccaatagatcacctgttaaaatccaatcatctccaaaaccacttcgcaaataaattccaaatataaaaaccaataatctccaatgccaattgttcatcacagaataataatcaaaaacacctttgattttacaatcttccccttgatgaacacattggcaaacccataaaaaatgttttggtgtttagaaaaataaaaacaaaagtggtaaaaagcacactttgtacaaatgtacacatcgtgctcaaaaatccaaaagaaaacttctctcatttttgaaaagaaagaaattcccccttgaaccaaaaaacatgttctcttctcaaaaactcattgtttctcccccttttgacaatgatttcatcaatcataggaattatattcaataatgttcaagagtttagcatacatatagcaaatcaagtcatgtgttgcaataaaaagaatatgaacccatctataatatagcaagcatgcagtaaagtataatcatgaaccagagattttacaattaagttcaaatcaacaatcaaaattcatgatttcatacgatttataatgcaacatcttaacaagcacataggttgaaaaacaaacactaaacatatatacctattgcatttatcactctttctcaaattagctctagcacaaaacaaccaagagaattttttgttttattttccttgagactttttgctcatattttctctctcaattattccgagtacgtccttgtcgtcaagactgtttccaaggattcggcacccattatttttgctcacatcgaatacgtctttgtcgtcaagactgtttccaaggattcggtattcatttttttctctcagagatatttttattctctttgcacaatgagcaattacaaagctatttgaggaataacaactcaataaagcatatatatataa

SEQ ID NO: 46923 - DNA, 608 bp, Oryza sativa
atgcgaaaagcagctccgacatccaacaatggacatcagccaagccaccgaggagcctcttccttcacatggccagcaccataactccttggaaaagactgcaacatgtcatgttgccaagcttcactgcaccccattagcgagcagcttcgacttcatcagcagaaacaaccgaagagcatgtcacccaccacaagaatgaagcagacccaagaaggtgaaggcctcaccgaacacaaggtatgaaatcttttgaactgaaaaagaccatcaacagtcgtcgatgcgttggaacttctccgaagtgacacccacaaggaggacacgaagcgtaacgccgtcaccgctcattcgaaaatcggaacaaggttttcacctggagattttggggggggggggatatgaaagaacgccatgacaacgcctccaagaagggaaacagcgcccgcgggcgccgtcgtcatcgaaccggccaaaggcatggcaaggctttcgccagcatattcacatcacccacacaagcacccccacattgatggccacgaaatagtccttgacatctcacaagcagtcataacttgaccgtaaccaacggcaaaacaggccct

SEQ ID NO: 46924 - DNA, 551 bp, Oryza sativa
cggtcctttttggacggtggtagtatatagcactcttcatcagagaaaatctaaaaagaatgaaacattcgaccatcgatttacattattttagcttataagatatatctttttcttaagaaaaacatcccaaacctccttccacgctcccatgcggcgttaaagcccattaaccatccttataaatgtttctaaaccactctatgacacttataaattagaaaaatcataaaaaattaagaacaaaacatccaatcactggtttcgacttaaattgatggacatattatttaggctgttattagatttttatttaaaaaaactgtcaaacctcctttcgtccctccccgcccctgcaatgttaaagattttaagtactttaaacatcctataaatatttctaagccactacgggtctctcttaagttaaaaaaaatcgtacaaaattacgagaaaaaaaacatctcactgtcggtttcgacttaaacatccaacatattattttaggtcattagatcaatcattttcttcaaagaaaaacatcctgccct

SEQ ID NO: 46925 - DNA, 2346 bp, Oryza sativa
ctatataagtaatcatgtcaaaattttggcaagtatgccacaattttagtatctataccaaaatttgtcaatgccaaaatttggtaaggttttttttggcatcaaggtgaacaggcccttagacatactcagcccaacatcttcaatccaatgcttcatcctaggaaacgtttccagttctcccaatctgtctcatacattaatgttgtactggtggttgttcagtcgaggccctgtttaattctcacgcaaaaacttttcaccctatcacatcgaatatttgacacatgcatagagtattaaatataaaaaaactaattgcatagattgcgtgtaaattatgagacgaatcttttaagcctaattgctccataatttaacaatgtggtgctacagtaaatatttgctaatgacggattaattatacttaataaattcgtctcgcagtttacaggtggaatctgtaatttattttgttattagtatacgtttagtatttcaaatatatatatccgtatatctgatgtgacacccaaaaccttttaccccctaactaaacacagcctaaatacgaagacacaacctaagtatgaagtggtatagtgacaataatccagattcctgtatgagttgacatttattttgtcctacgtacaatttctctaatttgcgagttttcttgctgcactctgcgtatatacaatcccatgtaagggtgtgtttataggcggtaaagttttggcgtgtcatatcggatatacgaacacacgtttaaaatattaaacgtagtctaataataaaataaattacagaatctgcctgtaaactgcaagatgaatttattaaactgcgagacgaatttattagtaaatgtttactgtagcaccatattatgaaatcatggagcaattagtcttaaaagatccgtctcgcaatttacacgcgatctgtgtaattagttttttctatatttaacacttcatgtatgtatccaaatattcgatgtgacaggatgaaaaagcttgctaggagatttaaacaggctcttagggcatttacaatgtgagccactcctagagtgtcctcactaactgagaacactcgtaggggaactcagctcgtaatggaggacacccttggatgggctcctaaaaatctaaagcaacttaataaagacattccaacccaaaatgggtatcccaacccacaaagccccatatttatttttactaccctacccctaatctctctctcccgccccctcttttttttcaccgccgcacgggcctatccctctcgccattgcactcgcctctccctctcgccgccaccgccgctcgcctctcccgtcgtcagcggccgcgaggacgacgaggagggccacctctcccgtcgccggcgtccaccgctgcccctctctctccctctctcccatcgccacccatcgctgtcctccccggcatcctctgtctcgcgccgtcgttggtcgggggcgccatatcctgcgccgtagtgggcggatctgggccccccgcggccagatcgaggaggatacggttgcaggcacaacgccggcggtggtgagcggcgcgcggatctagtcgtaactgtcacggatccattgtcgccgtcgcagatccatcgtcgtcgtcgcggatccatcgtcgccgccggaggtcacgtgccgcgccaccggatccatctctcctctctctctctctcgtcgcggggtcatcgccggatgccgtgtgccgtgccgccacccctcttcctccgcccgtcgccgagtcgtcgccgtcgcagggtcgtcgcctacttccaacgacgagggcgaggggtggaacggtaaaatgtggggtgggagcaatgtccacgggacactcacctagccacgccctctacaatgcgtctcctagctcggtgtctcaacaaaaggctggtgaggaacatgaccccagcgaggtgccgcttggcagaagagacgggtccggctgaaaagctacctggaggggaacggccacccattgctgatggcctaagactatctccaacaatactacccataactggagacccattgaacggtatgcgtcacgctgaaagaaaaggtcacgaacctatttctcgccttctccaacagggaacgcaaaagaaaaccagcacgcggactgtttctctctccacctcccgtgaaatcgttgtgccttgcgagccaggcgtttgggtcgatgagagagaacactcaaatttgggtcgcactctgcctggcacccaaaatgggtcctttgtatgggtaatctgttggaccgtgtttttgttccgctagagtggctgaagcatgcattt

SEQ ID NO: 46926 - DNA, 607 bp, Oryza sativa
agttcatcattaaccaactaccttgtacggttcccatctgccgccattttccaactaactcgagctactacaactaataatcatcagtaacacgagctaattaaaagcatcttccagcacggcaggaggagcacacatccctcatcctctgacaccgacatgtggccccacaccacaggcacttgacctgtgtcggatccggacccgccaacccgccaggtgttccctccaatgggaggcgagctctccctcccaagagaatttaagaacagagagaggaagtggagagactacttcccccacctccgcctctctctcgatccatctaccccctctctcctctcctctctctctccgttcccaatctgcggaggcggaggcggagctagggcgcggcgtcgccggcgaggagttccgcaggcgcggtgtggacggggctcctctgcttccgcacacggcgggcggcgacggcgagcaaggttggaggggcggcgcggcgacctcctcgttcctgccttgcctgcctacatctgggtatgaatcggacatcagtttttgtgtttccgaaatttcaaaaaatatatgcatgtcgggttggggggttcaa

SEQ ID NO: 46927 - DNA, 830 bp, Oryza sativa
agcccagtttaatgatatttttggggccttgacatattcactagcccagtttaaggatattttttggaccttgacttacataattttgagcataccgagcaggccaaatccttgtggggcttggtcaggttggaccacttgtgttatatttggtccatcgctacattcgtaacctagcataatttattagttagtttcagttgtcgcttgtcagaaaaaattgctcaggtcacaagtcccctgtgaaccaaaatgtttgagtcacgaaattgtcgatgccaaatttttatcctctgaaaaggtctagaaagtacaaaaaaaagaaagtggacccatatctttaattactgccatatcaataccaaatcatgcttatccgataactgcgactttcccatcatcgagttatatatatacccttttgttgattgagacttgtataaattgaaaaggagaaattcaggtgcataaggaatctacgttgcatgcataagacggtaagtactagcttgtttgccaactttctacttaaatccagttgtgcaatagcgtggctttagataagtttaatgatttggtctagcgaaacttgtttcagatgatcagatatatttcttgtagtgtttatatctgtgcgtgtgcgaaataaatgcatagatcgaggggggtgagcagttcaatgtacaatcaggaacatccttcagatatgaatttggcctgtttgattaaaattttctgtttcctacatacatttgactttgattgcctatctaacaaatatcacaaataccaaggtttttaaaattgttagctatgatgaactacttgca

SEQ ID NO: 46928 - DNA, 693 bp, Oryza sativa
tttacgtgcactaaaaatttatcttcaaaaggatagatcaaacgaggccttaaaagaagagagaaaatcataaaaactctcgagatcaaggtcttacaactcgaaaactaggtcatcacccaaatgccaggtataaaactccttaaccacttgctccaaatataaataagctgaagtgataataccatataaaccgagcttctggagaaataatcaagaaaacaacctgcaaaggaaaataaaccgttttcccataaaaaacaacatcattatttgagagccaaaattgctcggcacgttgttatcgtctctagtaaaaaaactggtctaaactttttgttatgtcgcaaaatccattacccaaagatattggacgcgtttatggatgatcaaatacgactacgagtatactccctccgattctatattaattgacgttttagacacgggtgaggtcaaacttttataactttgatcatcgataactttaaaaatatttagtttaaaggaactagaacaacatgtatagatttgtctttcaaagcactataataaaagtcaacatgtttttatgcactataatatcataagagaaacatgtatttatttattatttatattataatagaaaaataaggttaaagatatattttgtagaccgtgtcattgtctaaaatattaattaaaatgata

SEQ ID NO: 46929 - DNA, 808 bp, Oryza sativa
tggagaaaatattctctcaacataagctggtaataaattgatgtacctaaaagtttaggttagggactacaaattacaggtgggttatttctgaatttctttcagttgacttgtgctaattaactaactgcttatacatacattcctcgcaaaagatactcaatctattcacttgtttttctttttttttttcaggggtagttacttggcttggttgcatcgtgccaacggtaagagtaactgagtacgctccccacgcccaatgcacgtatactgcctccgttaaaagaaaaaatccaatacgagatgttatgtttaaattcatagtatcaacacatttcgcgctagttttttttttccctgacaaagaaagatacccttgtacacgccctaataagccagcgtaatgggttaggagacatcatggcatcatgcatttgtacactactttctgttatttgtaatgtttattccgaattttttttctatttaacttgtacacacttttctgttatttacgaagacaccacacaatgaataaagtgccttgacgacactccaaggccatactaatcagccctcaccatgaacagtaccgtttcatttttttttctttgacccgattgcattagattagcaatcaagcacgaagctataagcgactaaaacacaatgcaaaattgcaaatatcccagcgcaccaccgataaatcattcaaatggtggaaaaaaacaaacaaaatggttagattaatataggcctgcatgtgaatcccacaagaccagtttaaccaaaccattgtaggctt

SEQ ID NO: 46930 - DNA, 1219 bp, Oryza sativa
agcgaccactatatattatttctggtatatccatgggactacttggtcgtagtgcgtgatctggcacactacacctagaagacattcacggaatttctagttttgttgaatttgtaagtattgttatacaccgtttaataactattggctcttgtgctcacaattgactcgaataaatattttgtttacatagagcacataggtattacgtagaccataacggactagtcaagaatgccaacagaactaagcttctcgtgaagacacaatggctggtaatgacaagttcgtgaagatacaacgtttgtgagatgcgcaactaacgacaaccccgattagtagtacatgtacaattcgataatttgatattgctaccggttaatataggacgacatattcccaaatggctaggcaattctatataatgcctagtgggaagaactattatcccgtgactcgaccgtacggtataatagatctccccatgtggtcgtgttaagtcaaccgcacaggataatggttcttctcgtgtggttgggccgcctgcacgtgaaaatatgatttttgcagaccttctcgggtgtgagggccggccttttgcgcggcaatatgcctttcggctcgcacgcaaaaactctttctgtagttgtgactgccactgccacccccagaacccttggagcttggggccattgtggggacggaggtggcagaggaggaggccggttgcttgctcaaaagtggtctattcaatgcaatattcataatatagatagatatgaaatattatatagcactcccactatttttttaatacatgacgctgttggcttttagcacgacagttgaccatccttcttattacaaaattttaactaaatatcatttattttgttgtgacatgttttatcattaaataaagggtgaatagccaatacggtccttgaagtttcgcctcggactcaatttaatcctctgtgtttcaaatcatccaaacaagtcctccaaatttattatttaggttaatatagtccttagacccaaaaaaaatgccacataagcatgtcgagtcatcctcgcatgtagcggtatgaataaaatgaccattctacccttatataccatatagaaaagaaagaaaagacacaaaaaaaaaagggcagcctaggcccaacattgttgcggagggtggccgacaaaggaatttacacggtcagtg

SEQ ID NO: 46931 - DNA, 565 bp, Oryza sativa
cataaattaaattaagagggagagtatgacaaacatgtatattagataaataccagttataaatcttgatctcatataattatagttatagttcaactgtaaattaggattattcattgtaaaattatgtgatgggataatctgtacccataatatgattaacctgaacaactctaacatacaaagcatggataattattaaccttttataatttattgtgacaagtaaaatatgttcataattaaagtaaagcttccatcaataaaataataatacaaatgatgcactataactatttgattgatcctaaatccatctaacaacagaacctctagtaaataaccgtcctatgtagatagatgcatgcttagccataatccttccatagccacttgatagactaaaccactgattagccaaatatatatgtatcccataaatgctatgtaggttaactcctaaataggccacgatgacaatagaaagattaagaaactttagccttagcatgattgggatccattagcaaacacgaatagtacattttgttgcgcatatttgatt

SEQ ID NO: 46932 - DNA, 1138 bp, Oryza sativa
tgtcgttagttgcgcatctcacaaacgttgtatcttcacgaacttgtcattaccagccattgtgtcttcacgagaagcttagttctgttggcattctcgactagtccgatgtggtctacgtaatacctatgtgctctatgtaaacaaaatatttattcgagtcaattgtgagcacaagagccaatagttattaaacggtgtataacaatacttacaaattcaacaaaactagaaattccgtgaatgtcttctaggtgtagtgtgccagatcacgcactacgaccaagtagtcccatggatataccagaaataatatatagtggtcgctgcaaagaagatatgttaattataggtgatattgtagtaaaaaaatagtagtatggaagaaatatgtacggcaaagtggacattttagtcttggtgcatgtgcatcactttccccaagtacattgctacattgatcctctttttcttgtgcaattgtttgatgaaagctttttttccctctgttttatctttcaactccagacaatctttacgaagttcaaccatgtgttccgtccagcaaacccttgttgggtttacgtatcctaccggtctgctagcccttgcgcccatcaaggaattgcatcctaagtaatgcagcgggtaatttatcagaagtgagtttgcaaatgaattcatttatgtcataaaatgtaaatcacttataggcaaaacgcggcaactagattgatgtccattttaccgagcttgagaaatgtgtgaaggtcgttaaaatagataacgagcatcccattaggtccactaatggaagcgttatccgggaccttcatagtaatcatgtcgagtccctttttagatgccttcaagtaccaatcatgtatcaacctcatctcccatggtagattttccatgacatgccatcactggtggagaaaccctttgtagtcccggttcgtaacccccctttagtcccggtttccaaactgggagtaccaatccgggactaaagatcgctatctttagtcctgggtgaaataaccgggagtaaagatcgatctgagccatctttagtcccggttggtgttaccaaccgggactaaagatcgagctgacctttttttttttttcatct

SEQ ID NO: 46933 - DNA, 653 bp, Oryza sativa
ctaggctctatatgaggtgggttctaatttgggggtggtcatggaagtgtttatgcctttgctagctgctaaggatattgtcagaatgaaaatagggatgatggatatcaagcaatttccatttaggctgatattatctactcctgaggctttgatgtatgaggcatgttttactatggagaatgtggtggaaatgggctggtttaaaggacaacagcttgaaaaacagcatgacataaaggcaaacattgaagacaaggaagatcagaagtctgataccaaaggcaagcgagggatggagagttggagacaaaagagacagctgggcagctagcaatgtttcagcaaaggggagaatgcagtcaaatccaatgtcccagtatagagcaggttgagttgttggctgaggaggataagaacaaggctttgcagattatacaagacagggagttggcactggtgctgcaagagaaggaagcaagaggtcaggtcagtggggataaagctgctgaagataacatacctgaacacctcatgtggagtttgagaaggccttcaagtctgctccacatgacgtgtcagtagctcgagagacacaaagaggacaagttgctagcaattgtgaggatggtgtggaaatggaaagtgattag

SEQ ID NO: 46934 - DNA, 1327 bp, Oryza sativa
ctgtgcagcacagaactgaagtggtgtccaaaaccgaaaaaacaaacaaacaaattcgtatcttaatcttaccgaggatcgatgcgagcctcagattgtggctggtgtccggaggttctctgctccaagtgctcgaagaatccaaaggccagccgaaccacagtccgcacgctggaggaagaaggtggataattaggtgagttgggggcatgcgggggattgggtatccccttttcccaaaccctctccctcatttttcacacgcacgctttttaaactgctaaacggtgagttttctgcaaaagtttctatacaaaagttgcttaaaaaaatcaaattaatctatttttaaaaaaaaatagctaatactaaattaattacgtgctaatggatcgtttcgttttctgtgctcactgtccggatggggataaggatgtgcgaacacagcctaaaagtaaaacagaccgaggagaaaaacagggggccttaaaacctagctactgttgggctattggcggtgtggcgtataactctgtatctctagtgagttccaacccacctctctcatttttcgcacgcacatttttcaagtagctaaacagtatttttacacaaattttctatataaagttgtttttaaaaaaatcatattaatccattaaaatagtaaatacttaattaatcataagaaaatatgtcgttccattttacgtgccgaacaactccgtacaccaatctgaagcatagaacattggagacaagtcggagtaataagagaagtatataagaggatatgtggataaaaggagagaggaaataggtgattggatgagaatttaatttgaaagcaccatccattgggttcatagtttctatacataatgtatatatgacacgacaagtatgaaaactacttgatacgttttttaatatgtaacatcattcactttttgagatacgtttgaccattcactattagaaaatgcatttttcccgacgtggggtctgattttcacaggcggatatatcccttgaagccaaatgaccgcctataaaaatataaatcggggtgaagtgcgttgtccgtctgcgaaaatagattttcgcaggcggaccacttaagcgacgcctgcgaaaatgattttcgcaggcagaccacccaaaccgcgcctgcgaaaatcatacctaccccaaaaaattttaagtcttatcttctcctccaccccctccccaccactcatttccctcacttaactctctctccccctcaacactttcccctcccctcccctcccctcccctccctccctataccggcggcgatggc

SEQ ID NO: 46935 - DNA, 822 bp, Oryza sativa
agtccctagtcaactatgacacttgcttagaaatgctattttagattcatgcatactcatatttatcaaatgctatatgcttgggcaattacctttgggaaggtaattgagatgcggcatgtggagacatgagcgccacattgccatgatattgatgacataatttgtgaaaggaaaataaagtaaaacaattgttttcgactggggcggctggaggatttgggtggtgtccggaaaaggctagtgccgtccctggtcaattaaggaccgagccatgaagttaagcatgaaacgacccccgtacaaccgcatttctcgtatgggtatagacctagcagagtagatagctgagcggaggcagtatccatgcatagtggtttcttgatgtgtgaggcaggggctctacggtggggcagccattggtaggaccgcgaggcgggtgtctacaatggtgtcgccatcggtaggactgccatgtgagaatctaaaacataattataacttaatgcatgtgtgagtcttcccttcccgggtgcgccagaactcctctcactgctagaaaccgtgtacgcctagagtgtatgaggatgaaaagttcatggagcgggtactgccaatgcgaggttatcgaaaagctttgccgtgacgcgtctcatgtgttgggacgaggctcatgtgttgggcagtcgcggagtgggggtaaagtgtacatccactgcagtgtgagtaaaccaaatctattcgaatagccgaacttgaggttattgagccccgggacatgtattacacttggctagactctaaattcttaacttgtgtggg

SEQ ID NO: 46936 - DNA, 891 bp, Oryza sativa
tggattgcttgacaataaaatgtcgttagtatagagtaccggtgaatgaaatttcccacctttaattttcatgcaactgtccacctcacttgaattgttcgaaaatttccattagagtcaggcttaattttattaacccacttaaatggcctatttttgactcatttagaaacttttactaaattctttattacatggttcgaaaaaacatttagatgaacactttaatgtcttattttgttcatcaatctcaatttattcttacatggttcgaaaaccatttggatgaacgcttatttttaatgtcttcatcgggtgaacaagctttatttagtgtttaccaccataatccgatctcataacttcattttattttagcattagtatcttcaatcttaaatttcttgaaggaaatcggaggttgcttatgagtaaacatagccttatgggtaaacatagccaaaagttatttattggctaaattcttaacttagtgaagcttcccttaaagcttaaattacttaaaattaatccaagggaaagaaaatctccaacttatgagacgttctaacctcccctagaaatgtgacatcaatgacaatgtcacaatttcaatgacgtctcatcttttgtcattacaaacaattattataatagtcacatggtcatccaaaagaacaaatatgactgtcgtgcacaaggacaagaccaatcactttattatcacacttaatatatcatgttctatttggaaaaataacagacatgacccgtttctcacatgactttaaataataaactagtaaagtttctcttaatagagtgaacaaatgagacattattgcaactgctggagaaacctagtgtgaggtctccaacaacccttcactt

SEQ ID NO: 46937 - DNA, 705 bp, Oryza sativa
atgtaaaaagtacagccaaaatatttttctatgtaatgttaataaaaaataaagaagtatttgttggtaaaacttgttaatattgttataaaaatgtattgaagttggttgttgcgcaatttcatatgttaagtgagatattattttgtaccttattcgacgtattagtactcggataattaatataggcctatcgcagtctcggtcgtagaaacattatatggacttaaacaaggagaattatgtaacatgaagaaatagtagtacaatttgaacatgatacaactatttcgattgcggttacatagatgatattagattcgaactaggagggaggtagtgcaatagttgaacacaacgacgatgtagtaatgggacaaggaagcatgacagtagaaatttcaatatgccaagttgtccgataatagctaacccctacgtgaggatccctctcctctctcaaaccgcgctttagtaaccctgtattgctctggtagttcaagctgcacaacacggctaggtggagttagaacccttctggtgtctatccattctctgtattgacatctccttggtggttcctgggaggaaagaatagatgtaaagcgagcaaagttagtcaatgttgtgagaaaataaggattaatgtaatcaaaatattcttaccatgaaatcgtcgtcaagaatatttggacaaacaaagaa

SEQ ID NO: 46938 - DNA, 695 bp, Oryza sativa
  unsure (1)..(695): unsure at all n locations
aaaaggctagtgccgtccctggtcaattaaggaccgagccatgaagttaagcatgaaacgacccccgtacaaccgcatttctcgtatgggtatagacctagcagagtagatagctgagcggaggcagtatccatgcatagggggttcttgatgtgtgaggcaggggctcacggtggggcagccattggtaggaccgcgaggcgggtgtctacaatggtgtcgccatcggtaggactgccatgtgagaatctaaaacataattataacttaatgcatgtgtgagtcttgccttcccgggtgcgccagaactcctctcactgctagaaaccgcgtacgcctagagtgtatgaggatgaaaagttcatggagcgggtactgccaatgcgaggttatcgaaaagctttgccgtgacgcgtctcatgtgttgggacgaggctcatgtgttgggcagtcgcggagtgcgggtaaagtgtacatccactgcagtgtgagtaaaccaaatctattcgaatagccgtgcttgcgggtattgagcaccgggacatgtattacacttggctagactctaaattcttaactngtgtgggatgggatattgcatgatgaaatttatgctgatggaggcacatcccgagagaagggaaggtggacattctcagaaaaccatgacgaatcaatggcgccgagctatcctt

SEQ ID NO: 46939 - DNA, 635 bp, Oryza sativa
tcatcagttcctagcacggtcttaggtttgagaagatagatcccttgttcggtctttttgtttactacaccgggtgtctgaactaccaacattatacttatctcctctttattttgttccttatctagtcataccattctcttcgatctctcattcgccagcgccgtttgtagtctccgggtctttcatccagccgcaccctatctgctatatatatagaagacccctcttctccctcgttatcttccatctcccatctcctcccgcctcagattgccgttgcttgttcaccaaacagcactcccctagctctctgtatggctggcccatggccgccgcctgcctggcgcttactctaggttggtccgtccattcctatcacatgtgctccgggttccacgcatatcgtccagcgtggtcactttcactatggccgaagaaggagaatgaaagatatcaattttttttatcaagtttgattgtcattttcgaaggattgaattacccggatcaatatctcagtcatgactgaatgcccaccactagcgctgcgtgggggtttgggggcgtgccatatagtagtcatactaataagatagtaactataatcaaaatttgacatttatagcccgtac

SEQ ID NO: 46940 - DNA, 577 bp, Oryza sativa
agagccattgatttggatgacagcccagattacagtgaaaacacggtacaaattaaagcgaacctgcaattacagtgtctcacgagctgctgcttgacaacttgcgaccatataacagcctaagaaaactgatcatacagagatatgagagttccaaatatccctcttggttgggtgagccttccttctccaacttgacaacaataaagttcttgttctgtaaatctgagcgacttccaacgcttggtgagctaccgtccctccagtttctccatgtccgtgaaatgatgtttctgcaacacatccgacaggagttctgcagccatggccatggtttcaagggcttcccagcactgaagaaactgaaattcgtgcagatgcccgagtggtcagagtggtctggggtggatgatggtgcatttccgcgcttgcacaggctttccatcagatgtgcagataacatactgtctcttcctgtagcgccctttctgtccttggtttcttttcaagtgacagattgtcccaatatcactgcgattccagcatcgcccagcctacgtcaactacacatttgtag

SEQ ID NO: 46941 - DNA, 633 bp, Oryza sativa
ctgtccgtcttatttaaaaaaattataataaaattaaaaagaattagtcatacataaagtactattcatgttttatcatttaataacaacaaatatactaatcataacaaattatgacggtcaaatgttacacataaacaatacaaaactacggtcctttttggacggtggtagtatatagcactcttcatcagagaaaatctaaaaagaatgaaacattcgaccatcgatttacattattttagcttataagatatatctttttcttaagaaaaacatcccaaacctccttccacgctcccatgcggcgttaaagcccattaaccatccttataaatgtttctaaaccactctatgacacttataaattagaaaaatcataaaaaattaagaacaaaacatccaatcactggtttcgacttaaattgatggacatattatttaggctgttattagatttttatttaaaaaaactgtcaaacctcctttcgtccctcccggccctgcaatgttaaagattttaagtactttaaacatcctataaatatttctaagccactacgggtctctcttaagttaaaaaaaaacggtcaaaaatacgagaaaaaaaacatctcacttgccgtttcgact

SEQ ID NO: 46942 - DNA, 539 bp, Oryza sativa
tttttcttcaaactttcaactttttcatcatatcaaaactttccacacacacacaaactttcaacttttttatcacatcattccaatttcaatttcaaccaaacttccaattcattccaatttcaatttcaaccaaacttccaattttgacgtgtactatccacaagttgtcctgcctttgtttcagagctccaacaaaagctgctcgaccattttgagtcatacgcacgccaccaatcgtaagttcgtaatgtaggggtaattctctttggtttactaggactttatcacgtttcataatggcaaattaacaggcctataagtaaggttaatccttgattgtcaattaaccgcacaacatatttccgcacaacactaaaaagagggttattgccgtgttcttgcggtaacagttgaacatctttggatgatattcttatatgttcaatcgttcgatgcctctgttaaatttggcatatacaaatttactgcttttatgattactcgtatttctaccaatataaacatcaccctgtcta

SEQ ID NO: 46943 - DNA, 2023 bp, Oryza sativa
aatgctttattgattgattaagatgtatcttttttttcttttcataaatatatttatatgtatacactacaaatttaataatattattttgacttattataatgtcggattgagaggagtattttttgggaattaggttcatttagttttttcatcatatatatagtttaattactgttaagttatatacagtgataaaatctatatcactctttttttccataattttattattttttgaattggacacaaaggtcagaaaatataaccaaaagttacatattttattcatagttgaattatagtgaatgtgggcccttaaaagtaaaataatataaagaatgtagtccgtgcataggtaagatataaatcaggttcgacattgaaatcgaagcagattctgcaaagagatggattcgaagaacagagtatgcatcggctgcgaaagcatcggctggagtctgcatcagctgagatggatcggatagaaaacagccgatagaggtggtgcaacccgattccgacggtgatggcttcaaggatgtttctagaatcaatcaacgtgcttaacaaggattgccacgatggagataaagctcttagaaaggcaattctatctattaattaggatatcttacgtaaattccttagagatatgtttgggtaaaagtctaccgtaaaaacttatggtatcttagagtttgttaaagataagagtcgtgttcggcaaggacatattttgtatctcgggtataaatatgacccggacccatgtaatcaaacaacaacagttcaatacaatctcagcgcatcgccaccctttttactttcgttctatttcgatgagttcttactttcgggttgagctgcatcgattcgatcttcaactagaggtaaacttgtcacttgtcatggcggattgcgttctcgggattagtgcttccatctttatgacactctaatcctgtttatgtaattcgtcgagttatcatatgcacgttgcaatctctgttagttgtgttatataacttgttatcggttgtttctcattgttaggaagtgaccgatagggttatgtttcgttattaagttagattatatcgtgtatctatcatctcttagatgttttcatcatcttgcttagatcttatacttatctttatgcttaatgttgcatcagttgagttcgatctattaagtaatacctataattgtaatatctggcttgttttatgatcatcgagagagatagcatcggggtttcagtcgatcttatctgatttagctactttgtatctcatatgcttgattgacatgctagatctgccctttatgctaagatcttatagcattaaggtatattaggcattttgttcgatatattctgcttgttttaatatcttaatatagagtggtatcggagtattagccgatacatgctagatctatctgatcggctatgctataaatgtctatataatcagtactttaatgtatatttcgacttaagtgatttatactgtctcggcatggcgaccgatctatcctaatcacttagtttaaatatacatcgaatgatcgattatatgtcgttaatatctatagccaattgagtagatttagttttactttatttatacacaactgccgatcgattccaatatgacatcggcatcggctcgaagataaatgatatgccatcggcaactagccgatcggctatcgtatatggatttaaccgtggttttcttgtctttctttcttgttgattacaggatcaaatcaactagcacgctcacgaacctaaaagcaagattttggacctgcactgaagttaagtagatcttctaggccagtgtgtgtttttcacatcaacagttgtgaagtcatcccttctttcttccagctgcgcgcttttcaaactgttaaacggtatggtttttacaaaaaaatatatatatatatacaaaagttgctttagaaaatatattaatctatttttttaaaaaaagataatattaaa

SEQ ID NO: 46944 - DNA, 1024 bp, Oryza sativa
taattatagtgaaatttggtcttcaaccgtgaatttggtcataaacaatctaaagacatccatggattaaaaaaacaattatatgatttagatgtcgtagttacttgattttttaacaaataaagtatgaaaataggataaagaattaatggaaaatagaacagggaatcgaaggaagggagggagtaagtacataatgctcggtggggccgggtttaggagatgatttttaaaaaaaaaaattataatagttgtaaataatgggtccaccgaattgaatgaaaatcgacggttattttttaaagtgcaatgtgacggcttagaagcgtttataggatgccacgtgatgacttacgagcgtttgtagaaagtttaatggacttttagtatagatatatgatttttcaataaactacctcttattctaaactgctcatttcaattttattttattttcttattacacaacaaatgcacacgcaaactacatcactacacatagtcacatacttaggcaaatgtgcccctaacacatgcttaaaaagacataaacagaaatcagcagcatatctctgatcttattaaaaagacattagatttgaactctgatgggtaaaatcatgctgacccaccgagaaatccgaagtctgaaaaacagaaattcaccaaaagatgaaacggaaagaaggcacgtgaatccatgttgaaaattttacttgcgtatgaaatactgaatggggaaatgcatgaatgggtgacagcaattcgatttctgtgtccacattagacacccagaggaaagcattatttttgtttaatttaaagtacttgacaacgaaattgttaagaaatatatatatatgatctcatccatccgatggaataggcattgcggttgccatgcctcccgttaccacaaccggcagagaagggaataaggctaccatgccccttctctccttcggcacttcttgacaactggcgcgatggttcgcgctcctgtggttctgaccgtatccccttg

SEQ ID NO: 46945 - DNA, 5065 bp, Oryza sativa
cgggcacgtgcgtgcacccgctggttgcgcgcacggccgtcgaggggctccttgacgacgccctgtgccctcccccattccccctttgccggcgttgacgatggccagcgacgaggtaaggatttagggttaggttttttggtttcttttatttctttttctttggatttctttccccgaaccgatctaatcgctagggtttggctctgataccatcgttagagttcactttaggatcatcgagcttttgatctagtcgggtagtcctcttgggtgtttgaacaaatatagagatggaaagagagggtttaaagactgatgggtagagatggaggaggaggaagtgccggccatcgtcgttgtcatcgctcgcttgtcgtggacggcggcaacagtgggcttgacagcgatggtggtcgtggcagcggcggtcgtaggtgcgacgacgaggcgtggcgcggcggtgatgcttcccgtcactggctgcgccccctcgatcggttagggttttgtgggtggagttggcggcggcagcgaacctcgtatcatgtgccgtcccggcctccaccctctatttatatggcgcagggtgacgggggcccaccagccaatgggctgggcgcccccgatcaggacgcgggtcaaggtccccttgtgccgttgggctcaagaggagggagatctatctaacatgatctggctttctccaagacccaagccaaaaaccgattcaggctctttttccaagtcaaaccacataatctagttctgcttttatattcttttagcgtgcgttctacacatagcatcacaaattttatctaacatacatagtagtatagtactacttaaatagtcggagactcgcattagtaataataaatctctgaacttgctaaacttttatgaaaagcccaactactgatcacatgccagtaatattcataggcataacagtttttttttaattatgcataggaaggagaggaagaagaaaatagctagtactaattaagacgatgcagccgatagagaatcattgtgtataaaactagaaaaccgtagtgtttggtaacctactacgcgttcttctcatcccaccgatcgatcgcgcgagcttgctatgccgcaacatgcaccgtccgatcgaagtgtttcctgcatgcttcactgcgatccggccgtccacgagcacaatcaagcttgattaatttctgctggtttgtttgcggcaatgaggctgacgacgcgttaatcattttgggtgacgttaccagctgacgtatgtgatcttcatcttgtgttccaagtttcaaaagcttcgctcgatcttgagcttttgatatatcgtggctctcaattagctcttgctgactggcagctctaaatcaacgagcacaagcttgttggctatagctcttatcctcttggcctcttggcgagcaaaatatatctaatcttagccgtttagtgataaaatcctttcaaaagtagtagatgtaaatcctcaatcaagaaaaagtaacgaaaattaacccaaaatcaaggcaaatcgatcgatttgtaggcaacgcaaaaacagatactccgctctaagtagtaggagaatcttctagtatagggcgtggagctagcatggaacaattcgaagaaattaatcaagaaaccggaaactaaccaattatgtaattaacaacaaaatccatcacaagaagagcaaaaaaaaaagctgcagaagcagcaaaagtaattcatataattggttgaggaattattagagaatactactcacatattgttgagtacccagctgcgcacggcgtgcctcgcctgatatgatccagcaaacgatccgccgccgccgccatcggaagcgagaacgacgacagagcaagaggtcgagctagcgtgcaaatggccgcagtgttgctggcacgcggcaatagtcgaggcggcggagtcaacctactaggtaggtagtgtggtctcaactctctctagggcagacgatagctgtggttgcagagctggtggtcgtggtgggcgagatagatgactaatttgcagctagccgcgcgtgtgggccgccgcgcgaccaccccgcgttttccatttcggcccaggtgacgccggaccgtgcgcctccactttccgtcttgggttttcttatttcagcccagctcgcgcgatcagttcagcccatctgtctaaattttgtatacatatggatataaactttgaatttataagtatacaaactttgcatatgtctttacattttttatacatcaaaagtatgcgtatacataaaatacactcacacacacatatacacgtatgatatgtgcatatgcttcctccgcacgccaccaccttaatttgctccctgtacagtgtcaccaccgcatactcccttcgcacaagcaccgccccttctacctccgcgccgtcgctccctttatctctcgacatgtcagttgctttatctctcgacatgtcagttgctgcttctccctcaacgtgcctccatccttgctccctccgtatgtgtcgtcgctttcgctgctccctctgcgtgccgccacccctgctacctccgcacacactgcctccgcgccgctctctccgctcaccgccaccccttctcgctccgtgcgccaacggcaccgctccctcctcctgacctattcattgctacttctcccttcgcacacatcgttgtcgctcctactctctccacgtgtgccgccgcccccttctccctccacatgcaggtgacgtcgctccctcgttccccgcccgtccgctacaccagcctcccaatatgaaaggggatgagaagaaagttggagataggattgttgtgtactcatgggcattttggtacttttggctaataaatacatgctttttttttgtttttttatatacaaaaccttaacgtgtaatggaaacacggtcaaatgataacttcaattttaaaaaataggatcaaatgcaaacatgaaaatgtgaggttagattggtagaataaggtcaaataagcaattatcctaatttattattcttcttagagaaaggtacctgaactaatttaatggttcacttagcccactaaagttttttttttgccttatcttacccctaaactgttaaaaatgtttcactttgctccttaataacatgtacattttcttacccgtcatacaagttgcattttaagctaaaatgtaccagcggtattttaagctaaaatttgttaggagccatagatggcaccattaacgaagttcaaaagtattttcaaattttttttcatcgatgtttgcttgaacttaattttgatgtttgaatcactttcaacctaagtaaacagtgagaattctttttttacaaaaaatgttgaaacctaaattgtgaacgcatctatgttctaccaaatttccagagcaaaattgacttagatagagagagtaaaaaatactgctaggggggttcgaggtgtaaaatgagaaaaaaaagtttaggtggttaagtgctatgatgaaatggttacttttttttcttactctttattacgagccacctatcttgtcgtcatctagtccaccactgttctcacaaattaaggattattaaagcctattagaaacatatattgtttgtatggactttgggattaattagttagtaaacaaatgttaaaaaataatgtaaggttatactctctccgtcccaaaatataataagtggctattaaggagagaggtaaaagaataatgcatggttgcctctccttgggatgaatggagtatagccgtataggcctggacaaattggggctataacaaagggataatatggttaatttagtggtaaaagtcacattttataatactgggttgctttatttgggataaggtttaaactattttatgatgcaaggagcagtatttttccaatgccctagctaagctagggcctattctttttagatgacgcagcatattctgataatataagataacttacttataacaatgaattaaatattacattatagagttaacaaatagcttcaaaaagttaccaagcaaggctaatgaataattatttttctggagcattgtactttgaagcatggcaccaataatgatgtattgataatcagccccagttaattagctcattccaacagggcagtcattcagagccacaggcaaatcttcccaaaatataagaccatgaaacgtcaggacaacaacaatgaaggaatagaagtaaaaggaaaaaaaaaaggatcgatatttgaaccttggagccctagactttaattagtaatccatataagagctaagtgtataggttgacaaggaattaaaatacttaaaaagaaacataaaaaatatgtgaaaaaacaaatttccaaaaactatgtcgaattcaagctgatagtgctaaaattgacaaaaatggttcctatcgtccgtttaacgagaagcccaaatcccaaatgcttcaactaggtgggtcccaccgaatccttctccttcatctttatctactcaccaaacaccatcaacccatctatttctccacaccacactccaatcgtatcctctctctctctcccttatctctctccactacaacactacctcatcacgagcagcgacggggctcttgtcctcgatgataatctccttagcttactcaagggcagctcggtcagcctcggcttcctcaatgacaacgtgtcacaacatcagcggccacttgtttacaacggcaacacgacgagcttgaacttggcatccacgatgatccttgctttcatcaagtgtggcgccgcatggttgtaccaaactagtatcgattctggcgtcggtctgttactggagaggagaaataagtagttcagactttttttttatgcttcagccaatatgttttcgatgttccttggtattggatcagaatcttgcagtgagttttttttttcatattctatgtctttgaagagtgagattcgtggatgcaggggcggatgcaacgtgggtgcagg

SEQ ID NO: 46946 - DNA, 4889 bp, Oryza sativa
ttttaagtattttaattccttctcagcctatacacttagctcttatatggattactaataaagtctagggctccaaggttcaaatatcgatcctttttttccttttacttctattccttcattgttgttgtcctgacgtttcatggtcttatattttgggaagatttgcctgtggctctgaatgactgccctgttggaatgagctaaccggggcaaattatcaatacatcattattggtcccatgcttcaaagtacaatactccggaaaaataattattcattagccttgcttggtaactttttgaagctgtttgttaactctataatgtaatatttaattcattgttataagtaaattatcttatattatcagaatatgctgcgtcatctaaaaataataggccctagcttagctagggcattggaaaaacactgctccttgcatcataaaatagttcaaactttatcccaaataaagcaacccagtattataaaatgtgacttttaccactaaatcaaccatattaattatcccaagaagaggcaaccatgcattattcttttacctctctccctaatagccacttattatattttgggacagagggagtataaaataaccttacattattattatttttgaacatttgtttactaactaattaatcccaaagtccatacaaacaatatatgtttctaataggctttaataatccttaatttgtgagaacagtggtggactagatgacgataagataggtggctcgtaataaagagtaagaaaaaaagtaactatttcatcatagcacttaaccacctaaacttttttttttctcattttacacctcgaaccccctagcagtattttttattctctctatctaagtcaattttgctctggaaatttggtagaacatagatgcgttcacaatttaggtttcaacatttttttttaaaaaagaattatcactgtttacttaggttgaaagcacataaaacagattcaaacatcaaaattaagttcaagcaaaaatcggttgaaaaaaatttgaaaatacttttgaacttcgttaatggtgccatctatggcttctaacaaatttcagcttaaaatactgcttgtaaattttagcttaaaatacaacttgtatgacgggtaagaaaatgtatatgttattaagcactaaagtgaaacatttttaacggtttaggggtaaactaccaatctaacttcactttttcaagtttgcatttgatcctatttttcaaaattgacgttgttgtttggccgtgtttccattacacattaaggttttgtcttaaaaaaaagcatgcatttattagccaaaagtaccaaaatgcccatgagtacacaacaatcctatctctaactttcttctcatcccctttcatatcaggaggctggcgtagtggacgggcggggaacgagggagcgacgtcacctgcatgtggagggagaagagggcggcggcacacgtggagggagtaggggcgacgacgatgtgtgtgaagggagaagcagcaatgaactggtcaggagaaggagggagcgacgtcaccggcgcgcggagatagaaggggcggcgctcgtgcgaagggagcagcggtggtgacactgcgcacagagggagcaaattaaggtggtggcgtgcggaggaagcagatgcacatatcatacgtgtatatgtgtgtgtgagtgtattttatatatacgcatacttttgatgtataaaaaatgtaaacacgtatgcaaagtttgtatatttagagattcaaaaagtttatataagtatgtatataaaatttagacagatgggctgaactgatctcgcgggctgggctgaaaaaagaaaacccaagacggaaagtggacgcgcgcggtctggcgtcacctgggccgaaatggaaaacgcggggtggtggtcgcgcggctagctgcaaattagctatctcgcccaccacgaccagctctgcaatgtaaccacagctatcgtctgccctagagagagttgagaccacgctgcctagtaggttgactccgccgcctcgaccagcaacgctgccgccatttgcacacgctagctcgacctcttgctctgttgtcgtcgttctcgcttccgatggcggctgcaggcggcggatcgttgctggatcagtcgaggcacgccatgcgcagctgggtactcaagaatatgtgagtagtatttctctaataatccctcatccaattatgtgaattacttttgctgcttctgcagctttttttcccgctgttcttgtgatgaattttgttgttgcataattattggtttctttccagtttcttgattaattccttcgaattgttccatgctagctccacgccctatactagaagattctcctactacttagagcggagtatctgtttttgcgttgcctacaaatcgatcgatttgccttgattttgggttaattttcgttactttttcttgattgaggatttacatctactacttttgaaaggatttttatcactaaacggctaagattagatatattttgctcgccaggagggtagttaagagctatagccaacaagcttgtgctcgttgatttagagctgccagcaagagctaattgatcaaaagctcaagatcgagcgaggcttttgaaacttggaacgcaagatgtagatcacatacctcagctggtaacgtcacccaaaatgattaacgcgtcagcctcattgctgcaaacaaattaaaccagcagaaattaatcaagcttgtgctcgtggacggccggatcgcagtgaagcaggaacgcttcgatcggacggtgcatgttgcggcatagctagcaagctcgcgcgatcggtgggatgagaagaacgcgtagtaggttaccaaacactacggctttctagttttatacatataataatgattctctctcggctgcatcgtcttagtactagctattttcttctttcctctccttcctatgcataataaaaaaaaaactgttatgcctatgaatattactggcatgtgatcagtaggtgggggcttttcataaaagtttagcaaggacagagatttattataattaatgctatactactatgtgtgttaacataatcgtaaaatttgtgatgctatgtgtactgtagaacgcgcgctaaaagaatatgaaagctgaattagatatgtggtttgacttggaaaaagaaccagaatcggtgtttggcttggctcttggaaaaagccatgtcaaacattcatgcagctaaattgaactgctcttgactgaactgttaaagttgcatgatttatgttgcggtacaagggtgcgagagaggtttgattctcattgattgtaatgttcaatttatataaggggatacggtcggtaccgcaggggcgcaaacagtggctgagctaggaaattttcaaaccagggcaaactacttagctaaattgaactgctcttgattgattattaatgtttagctaggaaaaagctcggagtatctagtatttgctaaaatatttctaactttaatcctttcaaaataataaaaattcaatggtgtatttgatggcgagcctgggcggctgcccgtgcaagcctggtggtggccccgcttctgggtgcaaagtgcaatccatcgtgccagttgtcaagaagtgccgaaggagagaaggggcgtggccgcctcatttccttctctaccggttgtggtaatggggggcatggccaaccgcaatgcctattccatcggatggatgagatcatacatatatatttctcaacaatttcgttgtcaactactttaaattaaacaaaaataatgctttcctccgggtgtctaatgtggacacagaaatcaaattgctgtcacccatccatgcctttcccgttcagtatttcataagcaagtaaaattttcaacatggactcacgtgccttctttccgtttcatcttttggtgaatttctgtttttcagacttcggatttatcggcggatcagtacacatagccgcagtttaagatagatggtgatggtgaagttgtatgtgtatgactttacccattagagttcaaatctaatgtccatgaatactatgcaaatgcaggtcgacttttagcatggttatagtaagatcagaaatataccgctgatttccgtttatgtcttttaagcgtgtgttagaggcacattcgtctaagtgtgtagtgatgtagtttgcatgtgcattgttgtgtaataataaaataaaataaaattgaaatgagcagtttagaataagaggtagtttattgaaaaatcatatacttttaatcgcagaaaaacatatttttttagaagtgtcaaataaatactccatccgtcctaaaataactcaacctaggatagaaacctaggataggatgtccgtatccacgtacatccggacattcccatcccatccccttctcctctcatcttgtttctcaagctacaattaatggtggatcctagcgggcgcgctctctctctctgggtcatgaatcttctgatagaattcctaccattgcagcttttcttaggctatgatgcgttacaccggtgagttgtacatggctcacctccattccataatgtgcttttatgcaccagcgtaaaatattggttgctcattgggatatcgacatatcgtgcttcgtttaggctgtgttcgatgcaggagttcccaactctccctctcattttccgcgcatacgtttttcaaactactaaacggtgtgtgtttttttgaaaaagtttatatacgaaagttgcttaaaaaaatcatattgatccatttttgaaaaagagctaatacttaattaatcacgcgc

SEQ ID NO: 46947 - DNA, 1183 bp, Oryza sativa
ctggtgaggaggttgacgtgggctcggggacggcggtcttgggcggcaccgggctcggggacggcgtggagggaggcgccgggctcggggacggcggtcttgggcggcgccgggctcggggacggcgtggaggaaggtggtggccgttggggaggccggatcttgagtggccccggcctcggggacggcggtcttgcacaacggcggcggtcggcaatcgatagagggaggcaacggcgtggaggaggtcgacgtggcggctagcacgaggtcgacggccactgggcatagatctggagaggaggatgtgggacgcccgtggttggtgaggccggatcttcgagagaggaggaggcgacagcgttgaggacgaggaggtagcggtcttgaggactaggcggagaggaagccggcggtggcggtcttgggcgtggaggacacggacttggaggaggaggaggcggcgtcaacggtggtggaggaggacaaggtggcggcggcggtggatctgagagagtgagagtgtgagagagtgagaggcggcgtcggcggtggataaggacccgtggatgaggattgactaaataaaccctagtcaatcctcatctctatcaggcagactattatgcccgatgcggatgacacttatccgtgacgggcgttagtaatctacccgatacggatgatacctatccgtgacgggcattagaactaagcccgatagagatgtaataatctctatcgggcatagtactaaagcccgtcacagatgacttattaaaatatttttaagttataaaaatcatttataattatcttctgcccgatttaaaattgctattacatttgatttatcacatataattaacaaatgtcttatttacatagttcaaaattcctattaattttttaaaatcatataattgacaattgcctttctcacatatagtttaaaattcctattaattttttaaaatcatataattaacaattggctctctgacatatagtttaaaattcctattaattttttaaaaccacataattaacaaatccatttcttcaaagagttttaactggaatggcatgaaacatatgcaattcattcattaaggctccaatacaaattaaatacatcattcacagtgatatgccttccgaatggtctaaacaaacgtaagcc

SEQ ID NO: 46948 - DNA, 588 bp, Oryza sativa
gtcccctgtgaaccaaaatgtttgagtcacgaaattgtcgatggcaaatttttatcctctgaaaaggtctagaaagtaacaaaaaaaggaagtggacccatatctttaattactgccatatcaataccaaatcatgcttatccgataactgcgactttcccatcatcgagttatatatatacccttttgttgattgagacttgtataaattgaaaaggagaaattcaggtgcataaggaatctacgttgcatgcataagacggtaagtactagcttgtttgccaactttctacttaaatccagttgtgcaatagcctggctttagataagtttaatgatttggtctagcgaaacttgtttcagatgatcagatatatttcttgtagtgtttatatctgtgcgtgtgcgaaataaatgcatagatcgaggggggtgagcagttcaatgtacaatcaggaacatccttcagatatgaatttggcctgtttgattaaaattttctgtttcctacatacatttgactttgattgcctatctaacaaatatcacaaataccaaggtttttaaaattgttagctatgatgagct

SEQ ID NO: 46949 - DNA, 524 bp, Oryza sativa
cacatgacatcggcttgaaataaatgatatgtcatcagcacctagccgatcggctatcatttataggattaattgcggtttctttgttctatctcttgttgattgcaggatcaaatcaactggcacactcatacatccgaaggcgagctttggacctgcactggagttaagcagatctcccaggcctcgtgttttatatcaacagttgtctgcaggtttctccctccaccctccgaattccttctgctggttttgaatttctatgggctttctcttctgcatttgaaccccaattccattgctttccttagcgtctttgtgcatctttgcgaggcctacattggggtagagccctttcttgatctgttccgcttttactacgagttgcgctggatggaatccaatagggtatccggttgcgtcgggttccgacttcgtgatggcatgaagtcgcattatgtccccttccaatgtccctcttctcgcaacaaatggcggaacaggtggttttaccttgaaatcaa

SEQ ID NO: 46950 - DNA, 591 bp, Oryza sativa
gggcgtgtcacatcctcgcgtgtgtaaggttgtcgcgccctgaactcgatctgcgtgatatcttggatcagggggcggcaagcgacacgcgtaaggaggtgatgaaaaaagtcagtgacctgggggagtctgtcctccccctttttaaagagtaggacttcttgtattttttataatttgcaaatcttgaactctggttgctttcgggcgtatgattaccatccttgttcagtgttgatttcgaaagtttttcttgtcgattgtagagatgctggtacgaggatgttcagcagcgcgggtagcccgagtcactagcgataattccggtacttgagtttgaaccacgcgtctcacatgacgtcgaggaccaaactcttgatgtggaggtcgagatggggacaaccacctcaagtgagtagcctttttaacccgtgttgggttagtggtttccaggttgtcttagtggtcgttatgtttagcagatctcgaggatgcccttgcaacccaagatcgtcgtatccaatattagaagacaaaatttgaagtggcggaactctcgagaaccatgctagccgtgaagaaagagcaagt

SEQ ID NO: 46951 - DNA, 896 bp, Oryza sativa
gctaaaattgacaaaaatggttcctaaacttcctatcgtccgttcgacaagaagcccaaatcccaaacgctttaactaggcgggtctcaccgaatctttatctactcaccaaacaccatcaacacatatatttctccaccacacactccaatcttatcccatctctcccttatctctctccactacaacactacctcatcacgagcagcgacagggctcttgtcctcgacggctatctccttagcttactcaagggcagcttggtcagcctcggcttcctcaacgacaacgtggcataacatcagcggtcacttgttcccaacagctacgcgatgagcttgaacttggcttccacaatgatccatgctttcatcaagtgtggcgccgcataattgcagcatactagtgtcgagttcggcgacagtcagtcactggagaggagaaataagtactttagactgtttttttttatgtttcagccaatatgtttttgatgttcctttgtattggatcaaaatcttgcagtgaggttttttgtattgtttcatattctgtccttgaagagtgagattcgtggatgtttcaaacgctacactaaaatgttttaccatatgattcaattatgtttcaccaaaatacacaatgattatagcactttgcctttgcttaagcattggagtatttatgtactccctaccattgcatgtggctgcaaggtcagtaatcacagtaacctactctactagaaaatgcatttttcccgacgtggaggtcttattttcacagtcggacatgactcttggagccaaatgaccgtctaaaaaaaatataaatcggcatgacgttcgctgtccgcctgcaaaaatctattttcgcacgcgcctctttttcacagg

SEQ ID NO: 46952 - DNA, 1582 bp, Oryza sativa
atcgatggaggctgaggctgagatggataagatcaacgcgagactgagatgggggctgaggctgttaatttaatgaggaagggggaggggataagatcgacgactgaccgagatcaaaatgaggcctgcgttctcggggtgaattttggtcccggctgatataataaacaaccgagactaaagatatttggggccctgactcgacctgataacttgaaccgagactaaaaatgatatttattcttggttggtaacatcaacagggattaaagataacaatgttgttagccaggactaaaaataatatttagttccggttcctattcgaaccaggactattgtggattttggacgaccaaccaaagatggtttctccaatagtttaatgcatgcaagactaattcaccacataatcctgagactagtcccaacatgcacgtacgcactacttggctgccaatctactttaagcattcttccaaattttgtgcttcacatgagattagctcgctatgccataacgactaacgcatgcagctgacaacttatagtctactcctatatatgatgacatgcaacaaaataaacatgatcacctaatacaacaagattatttctaacatctccatcccaaaataaaccaacatcgtatactagaatgtgatacatcgtccagatttatagtgttaggatcgatgtgtcatacctagtatgaggttggcttattttacgatggagggagaaacagctagaaccattaagccagcgaaaataagtgcaagacgatactgtgagttaaacagcaccatcatacactcacaggcacccatcttcttgctcaacaagatgcttcaagctctcattcactgacgagattgtgttcttctgacgccgctcatttccaatgcaatcaccatgcatatatattgtcccatggttgatcatctatcaccgttacatataaaatttaattccatcctatagtagatgaagataacatagaaattatatacagtttggatcaaaagttgagagaaagagaagaaagctaaaagatatgaggagggagctaggttgtattagagtatgagggtttattatattatgagcatcagtgacatatggaggctttttaaagcagtcccattgtccaaattggtggacactaccctcatatctattttgtttgtaaaaatagataaagataccataaatctagtcctatctgcaatttttgcaggcatgatcttaagtggtccgctagcaaaaataagagataatttttgcaggtgtacctcttaagaccacgtttgtgagaatcgattttcgcaggagaccttaagatgtccatctgcaaaaaaggtcataccacataaaaatcaccacctacccggctagattccatttccacccgctatgaccggcctctctccctccacccctctcagcgggcggccatagtagtcagcacagccctctcctccctctctcctagatctgaccggaggaggggaggggcagcagtgggagtcacaataagcgacagtgcggaggaggagctcccctcacctcccttcccact

SEQ ID NO: 46953 - DNA, 630 bp, Oryza sativa
ctttttatgtgcatcataataattcccaagaattattgaatcgtgttaaaaaggattttaacagcattgggccacaccattgtgaacacaaatcgccaaagcaaaaagtgcctaagtccctagggatcacaacaggccacgctgattatagtattgggctgaagtactgtacaggcccaggcccattagtactcccgataccctaataataccgaagtgaaactcgtctcttcgtcttccccgccgagactctcgccattttccccatttcctgctacagtgcaaaactgcgccggccaaactagggttcatcaatccgctccaatccctcctcaaaatcttcacgaaatttctccccgtatccaccgctcaaattccccatccctttccagccgtatctcgaactaaatcagaccatccagttcacattcatggcggaagaaagagaaagcttcaagagtcagtgggcgccctccgatgtgacggaagacaatctgaaggagatggtggcgcacggcgttctttcaagcaaaagagatcatcgggtggcaaccggcatttggtgaggcattttcaacacccgatacacacgaaaatcgtggtatttgctcatttcttctacggcggatt

SEQ ID NO: 46954 - DNA, 658 bp, Oryza sativa
aaggaatatcatcccaagctaagtgcaagctagccagcgcagtacactgccgagtgggccatcctacgccgaaattgagccggagtttggttgcctggaccgagataggcaagaaacaggattgccctggtttaggactttggcccaattagaggagaaaatgaataagacaatttttttttgtggaattcgcaatattcgaaatctctatctctactgttataaaaattaaagatatttttaccggtactttggtacgtcatccgtgtatgagtcggtttttaagttcgttcgcttttgaaaatacatgtccatatttgagtcagtttttaaattcgttcgtttttgaaaatacagaaggagtcgtataagaaatctctttaaaaaaactcgtatgcttatttgtaacgatcagactcctaaccacagctcatgatttaaaaaaaatacatcaaagcgaattgccacaatgaatttcaccttagttaaaccatttaccaataataaaattaaaatagccttcacccgttgcaacgcacgtgcattttttctagtagaaataaaatatttgtgaaatgtgtcaggtttaaacttccatgaaaaattatatttgttttgcagaaaatagaaggaactcttcataaataatgttagcatt

SEQ ID NO: 46955 - DNA, 1294 bp, Oryza sativa
cccgtctgctccgaccctaaggaatatggatgctacatatctgctgacgaggcgaatgcagatagaacacacaggcaaccaaaacccttcctatccaagatttctagacttatctctaacgtaatcatcagcaaactcctagatttctagaaatgttgtatttgaacgaaatgttctgtttaccaatttgtcttggtcggtaccgtgcaggcagtaacgtgaccaaaccagatttggcaaccaggacacttcgtattctcctaaatgccataatttcagtaacttcatttaataacagatttctatgcatatccatcccatttcctatgacccatttaatattattcttgtacctaaaaaaacacaagtcatgacatataataagtttggcctcagttttgctcagaaattatgcttcaattatcatcatttgcaactgccccacccccaaaagaaattaagaataagtgtagagggtctgtccttatgcaaaaaagaaacaagtgtagaaacccacatttaaacctaaacaagaacaagagtgaggccggcccaacaatgcatccattttgcaaaacatcccatactgccactcccccccaaataaaatgaacaagtgtagatacaaaacagccataaaaaacatacaaaaactcacaattcccccaaaataattcaaccatcacagcccacatcaattcatccatcccattggacccaaaatatcccaaaaatggtatgttcttgagcaatcatcactggccattcatccatcatagcccacaatatttcatcatcacagcccacatctaaacaattttcccaacatcccattctcccccaaattcacaaattcatccatcacagccatataaaaatttatcactagctaacacatatagaaatgcacaagtcatcacagccatataaaaattcaccactaggtaacacatataaaaatgcacaagtatcacagccatataaaaattcatcactagctaacacatataaaaatgcacatgtcatcacagccatataaaaattcattattagctaacacatataaaaatgcacaagtcatcacagccatataaaaattcatcactagctaacacatataaaaatgcacaagtcatcacagccatacaaaaattcatcactagcacaagtcatcatatgtagacattagcatctaaacattgaatcaacaaataattgcactatcacattatcgaattaaacattatcatcgaatcatcaaatcatcacatataacatgtacacaacaaatcat

SEQ ID NO: 46956 - DNA, 588 bp, Oryza sativa
atcggcatcggctcgaagataaatgatatgccatcggcaactagccgatcggctatcgtatatggatttaaccgggggtttcttgtctttctttcttgtgattacaggatcaaatcaactagcacgctcacgaacctaaaagcaagattttggacctgcactgaagttaagtagatcttctaggccagtgtgtgtttttcacatcaacagttgtgaagtcatcccttctttcttccagctgcgcgcttttcaaactgttaaacggtatggtttttacaaaaaaatatatatatatatacaaaagttgctttagaaaatatattaatctatttttttaaaaaaagataatattaaattaatcatgtgctaatgagttgtttcattttgcgtgctagggagattagctcccaaccccatggaaggaacataggcggttcattttacttttagaactgtagatctaatttaattatcatgaagttacgttggatgataaaatctatattattattattattattattattattattattattattattattattattattattattattattattattattattattatta

SEQ ID NO: 46957 - DNA, 1417 bp, Oryza sativa
atggcccctttgaatttcatttcggcctgccgcacatcaaacaacttggatgccaagagattatatgcaacttcattttgcgcttccaagccgcgtaatgtgtaccatcaaattgtggatctcgcccggtaagcacggatacgatgttgggtgaaggaattgaaaggttcttgtaatcaaaaggtataatagctgccttgggtggtgaagttcccttgctgctcgctccatcttgatttccattttccccgtttttttccactaagtccgacatcgtggatcactcaaagcggcgaagcttgaatcaagagcaccctgctctgataccaattgaacgcgctgatgaagcctagaggggggggtgaataggctgtctctggatacttaaaaaccaatcgcagctgtaaaattcaagcagacccggaacttcctggtaaggaagtccggaacattcggcctgccaggcccggaacttccggtgttctaggacaggaacttctgggtaacagaatagagatgaaattcaaatttcgaaacaggagactaagccaatcttcacaagatggtgcacaggtattcttagcagaggatagatcacagaatcatccacagaaacatcacagaaagagacaagagcgattttttcctgaagttcggatctttcgatcctactctctgttgaggggctccaaagagctgggtctcgattaaccccttgcctcacttgtgcaaaaaccccagaggaaatccacagccttcaatcccaaacactcctaggcaaatttctagaattgagtgaccaccaagatccaactcaacctgcttctagaaatccaccacaagtgtaggttgctctacttggaaaacctctagaatctcagcacaagaacttcattcacttaccttgttccctttcggaggagaggagatccttcacaaacttacccgggacatccacaatatgcaacggattctcgcgggcgacacctaaccgtctaggagatcatctccaagagtaataagcaccgagatgacagcccacgagatattccaagagctcatccaagatcctagtcttcactcctctccaaatcttcttctctccctctcaatctctctttctcacaagaattaggctctagattgagtggagaaggcaagaaacacttgtgagagtctagcaacagctctaggtttgaaaagtgaaagtggaatggccaaagaacgagctggaaacgagctgtatatgtataacggctaggtgacgtcatctagctgttactcacaaatttgaactggagactagacaggaagttccggacctgtaggataaatattaaaaatctaacaatcatattatttacatcactttgcctgccgaatcccttcgagggctagcttaccacttcaggctgga

SEQ ID NO: 46958 - DNA, 783 bp, Oryza sativa
agtgtcactgcactggaagtagttcatcagagattttaggaaaaaaccatactattaagaggggttccaggtgatgctctgagatatctcaagtgctcttagtgtgaaccaagtttcaaatttccctaggagtcatatttgcaaatactccatctgtccagaactgcaagtccggaacttcctctcgtctaggtccggaaattccggtcttgtgaataagattttcctaagtatagtccggaagttcctgtcctacaggtccggaacttcctatctagtctccagttcaaatttgtgagcaacggttagatgacgtcacctagccgttatacatatacagctcatttccagctcattctttggccattccactttcacttttcaaacctagagctgttgctagcctctcccaagtgtttcttgctttctccactcaatctagagcctaattcttgtgagaaagagagattgagagggagagaagaagatctggaaaggtgtgaagactaggatcttggatgagctcttgggatatctcaagagctgtcatctcggtgcttattactcttggagatgatctcctagacggttaggtgttgcccgcgagaatccgttgaatattgtggatgtccgcggtaagtttgtgaaggatctcctctcttctgaaagggaacgaggtaagtgaatgaagttcttgtgctgagaatctagaggttttccaagtaaagcacctacaattggggtggattttagaaagtaggtgagatggatcttggtggacac

SEQ ID NO: 46959 - DNA, 595 bp, Oryza sativa
ctcttgatgttgattctagtgatgaggaaagtgataatgaattagatgatgtgcttaagagctttagcaaacccgctatgcaacatttggctaagttaatgagagctttggatagtaaagaacaatcactcgaaaggcaagaagaattgtttattcttgagaagaaaagaaacattgccttagaggagagcctagctaaagaatgtgctaaaaatgaacaactagctaatgagcttaatttggctaatggttctctagctagccttagggatgtcaatgaaactcttcaagagaaatttgctaatttagacaaaagtcataaagatcttgaagttcaatttgacactctttggaatagctcttctcaaccaaatgtgttttctaattcttctaagccatctactagcaatggttgtgctaggtgttacaacattgatttgaactctaatgctactaatgttgatgctatgtaagctcttaagaaagagaatgagaggttgggcactttggtgaaatatggatgcatgaagacataccattcaaaggatgccatttacaagaccatcactgctcatcctaacaaggatggacacgg

SEQ ID NO: 46960 - DNA, 779 bp, Oryza sativa
  unsure (1)..(779): unsure at all n locations
ggtggttgnnnnnnnnnnnnnnnnnnnnnnnnnnnnnnnnnnnnnnncatctgatcctttcttctgtgttgccattcgatttaacagttcatgctgtgcaggtgaaattgcattgtgcgcttcgtatcgctgaaaataaagataagattgagcattcgttcatttttcacctgagattattactgagcgttgcatgtagaggatcgaaggatcccattaaagagtgggttttaacaatatgaggatcactgcaacaaatcaggtacattttccaagtgagatgagagaggtcattgagactagaaggtggtctgatttagtatcaaaacatgagaactcatcttcaccaacaaattcccaacagttgatactgatcatccaggaacacgttattcaaaagtaaaaaacgggggaggggcaaaataatcagttctgactcctaatagcagccatggtagaaacgacatatacattcaaaacattgtcgcgttgtattccagatagaggttaggcatgaataaacatcaccttagagaggcaatttacagaatgaaatctgcgatgcatgttgaatgcctttgcatagaggcctacgaacccaggtcctacttcatgagtactagagtactggtactacataactagagtaaacatgaagagtgctacagtgtattgcatcaatgatttttgcggcatttggtggaactggaatcgataatgagatgatcccagtgaaatatcacctaatggctctttgtggcgcttcagcaaaatcttgt

SEQ ID NO: 46961 - DNA, 790 bp, Oryza sativa
  unsure (1)..(790): unsure at all n locations
aggtttttgaatgcgcctatgcgatggtacagnagntcatcataaatcaatgtcgaaatgagcaataacgtggttttgtgaaactttttggtcataatacctgaggttatgtgccacgtgctagaactcctgaggttttgtgcaacttagaccataatacctgatgtcacgtgaaatttactcttaaattaatagggatctaaattgagaatccaagattggtactccatatatatgaattcaaaattatttacaaattatagggttttggatgaaaaaagattccatacatgtcagttgcaatttacaattatcagtttggtatttagaaattaaattgataaagtccaaacggatacaactctatatctattaattctgagttttagaaaaaaaacaaatcctgaatagtcctcggtatcttctggctatggcatgttctgtttaacatgaattcttaatacaatataccgtcgcaataaatcttataaaaatccaacgacattaatatcaacaatatgcatgctatggactgtatacagtatgcatatggataatatggtcaacacatctgaaaattagttattaattgttagtttttatttaaaaaaaatattctttggtttaagactaagatcaaataaccaaatttttatagtgagcataagatttaggatgttaatcgactgattgctttgacaatgcacttatgagttatgacaaaacagatattcaataggtatatagtaaaatgatgagctnctgcaccagatataggagcgaatccccg

SEQ ID NO: 46962 - DNA, 788 bp, Oryza sativa
ccctgcggtagatttagcatcgtactgcaagtagttcatcaagctgactcagcattggacccacgtgggtcccacatgtcagccccttcttccccttccctctcttcctccctcctcttctttttctctccctttgctcctcagttcggcagtgggcagggcagctggccggtgggggaggccggagtccggtggcggtgccgcacgtccttccacgtagccgacaccggtggagaagctcctcctgatctttcgtggattatgatacctgcgaggatgtactctaaaaaggtaatcgttctctgccttttctgaccataattatcccatataatacactacagaggccgagtttagttccaaacttattctttaaacttccagcttttccatcacatcgaaactttcctacatacacaaactttcaacttttccgtcacatcgttccaatttcaatcaaacttccaattttagcgtgaactaaacacacctagagttgatgatactatacctatttaactaggctaccacatgttaatctttcagaacccacgatatatgataagtcaaactattagcactttctggatgtactgttggttacagtcgccaggaccactttttcgaaaaatacagtccgaaaagagacgaagtaatccgattcaaaccatatgacaagtgcggcacaagttctctggatttttttagcgcttatagcacccgtgacatttgcagctgccttcaccttgcctggaggtacagagcaaataaccacactgatggttgcg

SEQ ID NO: 46963 - DNA, 779 bp, Oryza sativa
  unsure (1)..(779): unsure at all n locations
tttgagtagattcgcttctactgcaagtagttcatcaatatatacaagtcaaaaatatgtggaatgtgggattccaactcacgatctctcatctcagcccttaagagcgttaccatcgcacatactacacacatctgagttctctagtagtggactcttaaggaaggggtcattgtaccagcccaattcatttaaagcccctgtattagtggtgtggttttggcccaagtgactgaggtgtagatcgattagtgacatacttttgctagtttcatgagtcgtgtgggcatgaattctagcaaacattatcagcctcatcttttggcttatgcttatgcttactaggacttgaaccactttgtacatagtgccccagacctctaccttaatttatctcccggtctccttcgaagccccgtccaatttcttccactcaacttgagtttgccaaggacgacgaaggaatattattaatcagctcatgttgctgattggcacattaaccacttggaggttgcttgactggcagcatggtgaaaccagcgtgcaaaaccacccttgggttaagtaaaccggggtttcaatacatcgagataaaaaatacttggtttattactttgggggctaagcaacacaaacagttttggggtttatatatagacattttacttgagcanacagtcagccaatcaacaattaatatagntagccgtcagctcatatttcgtcacattcaatttgcnnccgttcagattttcaatttcaaaaagagactttta

SEQ ID NO: 46964 - DNA, 753 bp, Oryza sativa
  unsure (1)..(753): unsure at all n locations
agcgcattgttgatgacctccncagtggnacagnagttcatcaacctaaaaccaaataaaacacaagagtgagtataaaaaatactcagcaagtacaatatggaactagaaaacacacgtacacaacattggcaataaagcttgaacataaggctttctttcgttgataggaaacatattttcaaacaccaagtcaaagaagatagtagttcccatcccgggcaggcatgaattgaaatagtagtttccatcccggacaatagtgaatacatcctttgatattaatgtcgttggatttttataagatttattgcgacggtatattgtattaagaattcatgttaaacagaacatgccatagccagaagataccgaggactattcaggatttgttttttttctaaaactcagaattaatagatatagagttgtatccgtttggactttatcaatttaatttctaaataccaaactgataattgtaaattgcaactgacatgtatggaatcttttttcatccaaaaccctataatttgtaaataattttgaattcatatatatggagtaccaatcttggattctcaatttagatccctattaatttaagagtaaatttcacgtgacatcaggtattatggtctaagttgcacaaaacctcaggagttctagcacgtggcacataacctcaggtattatgaccaaaaagtttcacaaaaccacgttattgctcatttcgacattgatttacaatat

SEQ ID NO: 46965 - DNA, 696 bp, Oryza sativa
cattacacaatatgagcattttcgagacattgatttcaatccacggaaattcaggtattttcaacctatcatgtgcttagtaggggaatctgacaagtcaaaattcaaaatttaaccaatagatgtctgaaagggatatttttttcacttcattcttagtctttgctaattactccctctgtcccaaaatataaccacttctaacatttagaatttgtcccaaaatataacaacttctccgtcaatattctcttctcaactaatcacaatcctccaccattcaattttcacacctacctctaatttttctccaatcacaacactcccctcatttaatcataccaaatttcttaataactgtacccaaccctaaaaatgcttatacgtaagcaatagaaatgcaaacattttctgagagggaggagtgtcacagggagtacaaatcagagggaacaaatttggctcgacccaggtgggccccaggaatcatagactgatcaggcacagaggcgggccccaccctggagctgggttgctttgaattcaaacaagccgggaattgaattgaactgagctcgctactctttctgcttcacttccctccctatttataccggccccatggctcgcctcaccacactgatcacctcgacctcactttctcctcaacctcgagctcactcctcgctctcccgc

SEQ ID NO: 46966 - DNA, 752 bp, Oryza sativa
ctgtggaaccttcacccaaactaccagctaatctaacagagctacagaaatccaaagtttttcatccatccatgcctcctgcaaatacagcctcagcagaaactttgtctccaaaacatgtaccaggacatcaccagattgaacaaaagaggatcagcttcctatcttccatttcatcactcattccttttcttctgtttcttagagcttccctcgccaggttcttctattccagtctgccagctcctatcctccagccatgctttgagttgtagatgtcatttgctacctgctttagcagatggagaccccattatagatttcttgtatttgccaccgacctctgcaaaattgcccacgaggagatccgagagctgatataatgaattagctcaattgggtgtgataatgattcattcttgaaacaggctttgttcctagtcttcaaaattgcccacaatacagctgcacttctgatcgctatccttctctgtaagtttctgtcatatttatttagccaagcacccagtaaatgatgtgttttacatccttcaggatgtagaggccaggttttatttaatccattatctaaaaaaaagtaaatgatgtgtgtcatggataacccccagatcagaagtgctagctgtatcatattccagggcaggtcaggagtaaattttttcttccccttccaccctcttttcagcaagttatatttggttaagggtaccgagctcgaattcgccctatag

SEQ ID NO: 46967 - DNA, 762 bp, Oryza sativa
atagtctactcacggtgatagtattacattactagtctacaccatagatgatatatttaaatggagatcaagatcactcacctcaccgaaatccgaattcccaaacaggggatgagtcatccattccaggggaagcaaacatcaattgctaatttgcaatcaatacagaaccggtaactaactaatgcacctttcagcttgtccaggacatctccaaggcttttgacttggtcagatgggactacctacttgcgctcctccaaaatagaggttgcccgtaaaaatgacgcgaatggataaccggattgctgtccacttccacctcaaagatcaccctgaacggaatccgggtcgaaacaatcagacacgggaagggtttgcgacagggtgaccccctatcccccctcctcttcatcttagctatagaccccctccagcgccttttagacaaggttaccgacatatgagttctaagtaagctgcggggcaaagttgtgcgcttctgcacatttatgaatgctgatgatgcggccgtcttcattaatccgatcaaagaggatgtgagcgccttcgccgatctgctaagtcgttttggaaaggtatcaagattatgcacgaacctacaaaaattgcaagtggcgccgatcatatgtgataacataacctgaccttgatgacattctacatggcaagcctacaactagggcaagcttccagatgaagtatctggggtggcctctgtccactggtcgtctgcgcaaa

SEQ ID NO: 46968 - DNA, 655 bp, Oryza sativa
caaggaattttctggtgttattttttgctgccaatttcagcctttgtgagcagcatgtttggtaccaatgtttggattttccaacaataaagctgagtgttgttggtgggcgaccattttcctgcgggggtaataagatatttagaccaaaacttctgtcaaaatggttggtaagagacatgctaaccaatagatacacatgtttatcagttttctttggtatatacttctccttactaaggagtccttaattgtcctttctttttcatgaaacagtagaagaaggctctactgaaaaaatactactgctatttataatagatttatgtaaaatagacctaatgatccacagtatccaaaaaatagttacaaggttcatgtgaaacatgcagtaatttaggtaaggcataagagaaatgagttgcagcatacttttcctaaagatactagtttggtatatccttgtcattttggtctacaaggcatttttaccttcccttcttttcatattgaattaagaagcaaacgatgtatgtgaactcgtgaaatgatgggtgaaatggcacaataaacagtagagttaccaacttatacttcgttctcatctgtagcactactgtattaggtagtgaatattttagagttcgatgatata

SEQ ID NO: 46969 - DNA, 915 bp, Oryza sativa
acatttgacatttgtcaacgaactatcccatttgtcaactgaatggatggccacagtatcggcaaagcgaagtacaccacgtgcaaagggagaattcctggatgaatgatcatgttcttcaaggacgatatggaagaatttccaaggaatcgtgtggcgatctgctgtagcgaagtacaccatagaataattttgagatggatggctgtgaggcgttcacaatttcgcggaatctcgcttgaacagttgaacttaacaaatttcgagcgtctcaagcaggtcaaaacaatatctaaaaacgtgaatattaggaaagaacctaatatcaaataattaaaaggggtgatgcttcgaacccaggtcgtctagctcaccaccttgtggagctagttgcatgaccctgggcgtttcaaacgtcccaacaagatctcaactgcttgaggtgcatttcgaatggtttgtttgaaatttgttaaatttatttgaaattagcgaaaaatcgacctctcccaacggggctcgaatttcactattctaatgatattgtaaagattactcatgatcagcactttcagaataagtacaacaaagtttttcttttttttgaggaacagggtgtgtctgaatctgattcagaactcagaagtgtccggttcattcatgttagcattaaaccaaacaaaaaactgttgagcctgcaactctgcatgcagtaacctctctaataagcattcgttgatcaaggctggctcttgagttgaacaaacggaccaaaacaaatttttgccattaaaagaagcaagacaacgaacaaattagcaccgaaaatatatcatatggccgtgcaaagatagtggcaacatgatcagatcacttctcatgatagatgtatataccacacggatcatgcatgcg

SEQ ID NO: 46970 - DNA, 568 bp, Oryza sativa
agaaaaaaaatagcacgctacaacaggcctcaggtgcagaccaatggctgctcgacctggacctgccgcagcctcaggctggacaacggagctggtcagttagctaatcaatgtctagagtgcggtgcacaatgtgcaattcacagagaacgaagaggacaagataatgtggaagctcactagccacggtgaatttactgtgacatcggcctacaaggcgcagctcctaagtactacagccaccaacttcaacatcctaatatggaagccgtgggcaccacacaagtgcaagacctttgcctggttgatcatccataatagagtttggacctctgacaaactggcaaccaggggttggcagaacagctctttctgtcccttatgcagacaacacccaagaaacagctctccaccttctcgcagaatgaagatacaccaggaaaatctgggcggcgttatctgaatggactgggtgtggtcaactgaatcctggccaatggcaaccagcttcatcggtgttagagtggtgggaggccaccgctcccttgaacgaagccccaaagaaagc

SEQ ID NO: 46971 - DNA, 677 bp, Oryza sativa
  unsure (1)..(677): unsure at all n locations
aaaaaggctggctgttattatgatcttagcagctataatagctctgactgattaatgatccgtaaaaacataatgatccaagcagctacgagacgcgtgaaccggttaaagaatgttcggttctttgtcttgttgactggtaatctcagtccaaatatttccggtgcagagaggagagttaattactatagtactaattaatagtagtagtaatagtagattgtttttgcttggaccagctaatataattactatagtactaattaatagtagtagtaatagtagattgtttttgcttggaccagctatatagccgaccaggcatgcatatgcagtgatgcaccgaattaacctgggtgatctattggggaaacgccaagaggaactctctgcattcacagataatacagattgttctaatgctgtacgtgtgccttaattntgttttggcatgtcatgtcttaaaatgcagaggtcgtgtttggtatctttgatacagtctctaattcgcatatttcgtaattttatttcgcatatggtggcctttcatcgtttaccccgtggtttataagctatagcaaaattttaaattttaaaatgtttttgggcttttgtatcgtagtttacccaagaggctgttctgtggaagaaagctgggctcctcccggattagggtg

SEQ ID NO: 46972 - DNA, 893 bp, Oryza sativa
ttttaagagagccccttgtgcttatttccacacctatcagaaaatttttggagctagttcattgccgatgatacagtatgttcatatggagtccatgtttagaataagtttcttcacactctctggttctgaacttggttgatctttttttagtttcacatttatacaaggactaggccaacattatttttcttttgagtcacaatatagaatagtatgttaatactcaacggcaaagcataaacagatccattgtgagaaaaagaaatttatatatgtgttattctttcatgagaaatatacatgttgaattgtggctattttttgttatgtgttggtgaaatgtttggtgcgagttctctggttctagatgtaaaaatcgaaaatcatagtgtggacattttgtatatacttctgtaccaaatgtttggattagaactgtacccaagtaataaaagtgcatctggaagtattatataaaatgctgtttggagctacctatcaagcaattctacatcatggtattctgtgtctatgatcgatgaatccatgcatttaacatgcaatactttttgtttcattttctttcactcatctagaaaaggacatgcatttggaggaggatgaacaacttgcaagagctatccaggaaagtttgaatgttgaatcgcctcctcgtgctcgtgaaaatggcaacgccaatggtggcaatatgtatcaaccactgccatttatgttttcttctggattcaggttcattttcatttttcttactttagtataactagatactttgtagtagatactttatgtggacatgctattttgggttcattgatgttgaagtgccacataactactgatacgagtattcaccataaagcagtataata

SEQ ID NO: 46973 - DNA, 763 bp, Oryza sativa
tcctctaatagagagagtgatatagcacgagcgatatcttcattgtcaaattctgacgggacatcctaaattgaatttgaaaatagatcagctacatagtcaaaagatgtagattcccattctttttaagcactaaataacagatactactacaatggcatataagctcattatatttggaagcaatttgtgtcatcctgaacctagaggcatatgcacaaaaaatcagtggtatagtttttgttaatacttaattcacattgaccaatcaccaaatcacctgaaactcaaccaacaaaaccacataacagtattacagataagaaaaattatgtttatatgacctactaagcaagatagcaatgtgaagcgatgatgtatttttcagcaggggaaattgcatttgtgcacctccaaattcggagattagaatagtacagatttacaccaacagaactggtaatagcgttatgctctgcatacaaaggaagacataaaacacacagaattgttctccctaaccagggtaaaaaatttcttgttttgtacaagagcgtcaagatatagttacattttacactgtaagtggcgtacatacaccatgctgatgagcatgagaagtttgcaagagttgcaattgtgagtacataggtgcaagactggttgggcctgttgcctcaacttacaacaatgtacatcgtcaatgacaagttgacggagatcagtagccaacaatagcaagtcgagttgaccaaatgtggac

SEQ ID NO: 46974 - DNA, 680 bp, Oryza sativa
ctttttgtggcacggcagaagaaggcaggtgacccgctcccccgtaacaccgcggggaagttggggggttaatccatctgtttgcagcttggtaaccgtgtaataaactaataacactgccttaaaaaaacgaaaattttaaaatgggttggagcatccatggttgatagaggagaaaatggtgagaaaacatgtattcgagaggatttgaacttaaggtcaatgcattagatccggtttagatgggattaaaagtaattttaagtctctatcgcatcggatgtttgggcactaattataaatattaaacgtagactattaataaaacccacctataataagtttttggatctaaataccatcttactctaagtagctgtcctatcaccgagctacgcgccggtgcattactccctctaacttgacgctagatctgtttgttcctgtaagcgaatacgaccgtctaattgtgaattagatgaaagtttacaagttatcgaataattatctgaacagatataaataaaatagcgtaactacatatttaaaatcaaaatacccacttcacaagaaaggactagacagcctatacatccttaaagttgtcatttgtttcttttcccttccagaaagtcaaatatgcagttttgcacggaacctattcgcttatatcggattgg

SEQ ID NO: 46975 - DNA, 509 bp, Oryza sativa
attcgttgcgttcgtacgcctcgtgcgctcgtcagggggctcgatcggaccacggtgtagcgcataaaagttggatctcttcctctttttcttttgccctttctgcactttgcctgaatcttgatctgaatatctgatggacagacacactggtaagaacttcagaaattggcatgtttgcaatattggcctgtttagatcgcctggcaaaattttttcaccctgtcatatcgaatgtttggacacatgcatggagtattaaatataggcaaaaagaaaaactaattacacagattacgtgtaaattgcgagacgaatcttttaagcctaattgcttcatgatttgacaatgtggtgctacagtaaacatttgctaatgatagattaattaggcttaataaatttatctcgcagtttacaggcggaatctgtaatttgttttgttattagactacgtttaatactttaaatgtgtgtccgtatatctgatgtggcacgtcaaaattttt

SEQ ID NO: 46976 - DNA, 1456 bp, Oryza sativa
taaagtccgtgctacagctggctatagatatgtagcccactgctcttctctctcatcttttatctcattaaaatatgtttatagctggctaatagtctgctattgtacctgttctaaggttacagacggcttaggcatatgaaccaagaaaatttgtgagacaaacagatgaatcatgaagagctaaccactcggctgagagatatatctcattaaaatatgtttatagctagctaatagtctgctattgtacctgctctaaggttacagccggcttaggcacataaaccaagaaaatttatgagacaaacagatgaatcataaagagctaaccactcggctgagagataggctataaagatctatacattcagcctggttatattatgattcttgctcttacgtgtgctcgatctgtaatagtacactgcacgatcaattgagatccagtgcagtctattatcgcagtcctgcttgcgttgtctataatctccaagtgatcatatagacgctagcatttggctgtttggttcccaacaatattttgctaggcatcatttgtcaataaaaattaccacactttatctaagatgaggcgatcaactttttagacacaatttacaaaggttgagggaatcttgtcatacttttagtcattagcacatgaaacccaatttattataaaggaatcttgccacaactatagttacaaccgaacatctatcaagttgatcaaatttacctaaccttagacataacaaagtgtgacttgaaaccaaatattcctgcttagtcgcttacttctcaatacatataatgtctaaaaagtctaaaataatttatcatcacaaatatatactgctatttctttcaaataactatctatataaacaattaatgtttagaccatatgtccattccccacagcagtttcggttatgtcgattataaactgtaacagtttattagctataaaaaataatttataaataaaataagagttttaataattaataatttatatatatctttattaatttaaaaaaaatacccgaaaaaaactctagtttctctgccaagcaataagagcgttagttctctgttctggtctattgctatggtcttcacgtgttagattcagggtttcccaaaccgtcgaggccagggttaccacgccccggcggtaagcacagttatcgcgcggtaaccgtgaaaaaccgtacgaaaccacgcaaaatttatcaaaaattcaaattattttttaaatttatttgaatttaaggaggttaccctggtatttctattaccgtaccccgcggtaaggccagtaaccacagtaaccgcgcggttaccgacggtttgggaaactctggttagatttcatgctgagtctggctctcatgtactcccttcgtcctgagttcggctgtcatggaaaccatccgttcaaaaaatt

SEQ ID NO: 46977 - DNA, 739 bp, Oryza sativa
caaaagatgaagtgcaggcatcatgtgggacgtagcaaatcgacctgttcaagaagctggtagctacaattaatctaggaacaaatagtagttcaagagactgatagttacaatctaagaacaaatagttagacaggatagctcagttattaagcatttagtacaagaaatatatgaacagaaagccatcagttggccaagagcgattatatgccacacggcttattagcaacgtaaaacttttatacatgtattcttagcaacttaaaagacaatggtaaaaagaaactacgttgaaaataccctaaaatcaacttactttgaaattatgctgtaaatttcggcagctgctaatttgttataggggacaaaatattatagcaggcataagtctattggcggtccatgcttggtatggacaaccaacagggagtccaaatccaacctgaccataggcccatgattatcaatgcgggcaactgggaggcggcgcgaggagctggcaggagaaagtaattaaagatgtgattaaattgtgatcacatgattaaccgccgaataggaatggaatatgaaatcctgaatatggctgaactggcaccttaaagaaataaagcaaggttaacctgaattcccatggcttgcttgatattgacacatcactttggttttgggactcgatgcttctttccatagaaagacatgagcagctggaaaagtggcaacctgaaatccaaag

SEQ ID NO: 46978 - DNA, 1192 bp, Oryza sativa
tcttattcaaacaaatttatgtaattatcatttatttttttgtgacttgatttatcatcaaatgttctttaagcatgacataagtatttttgtatttgcataaaaaaattgaataagacgaatggtcaaccgttggttaaaaagtcaacggtatcatacattaaaatatggagggagtaatatgttaaacattacaaataaagtgtacatggataagtgatagaacattgttagctgttagagctgacatgagggcttccttagtgggacacatgaatattcttggtgtttcatgtgaattgttcagtttcacgaaaatcctcaataaattctctgatgaataatacttctattgaatttgttacttctagccgtcggggttcaaattattgaggattcgtaaatttggaagtgtcacatgtataatccatattatccgcataagctggttagaacagaatttttaattatctttcaactttttaactttttatttttaaaataaactcttccaaattttttttttaaaatgggaaccttttgatcaaccatcccgcctgacgtggacgctgctagcaatgggcgtgccaatcttaactagcgtgaccaaaagaccagatttggttttggagtgtttattttaaacaaaataaaaatttagaaggttcaaaaaaagtttttaaaatcattagagcatcccttaacgatagcttcccaaatcagctctgaaagggatatgtctcatcggatattagattgttatattttggaacgacatagtactcgtaactgattagaacatcccttaacgacaacttcctagatcaagtttgggatcaatttgcttggagctgcagatataaaaaaaaagacttggagtgagagcattactacgaacatttttcaagaagaaattataaacgtgttggaaataaaggggttgtttggatgggagggactttagtccctcacgggactaagggcatgtttggatcagggactaaagttcacatttgatgtttggacactaattagaagtattaaacgtagcctaatgaatctataaccttgctaatttgcgagacgaatctattgagcctaattaatccatgattaacctatgtgatgctacagtaaacatgtgctaattatagattaattaggcttaaaaaaattatctcacgaattagct

SEQ ID NO: 46979 - DNA, 505 bp, Oryza sativa
tttacacaacattagacgctgacgaggaggaggacgatggacgaacacatggcgtgcgtgcgtgcgtaccaggtcgacggagtcgtcgtagatgtcgtcgagggagagggaggacgccatggggggtttattgggaagatgatgaagacgatggtggccggtgcccggcggcggggtgggcggcgcgggcacggagggaggggcggcggcgggcgagctattgcctccctctctcctctcctctcctcctctccttctcagcgtgggtggaggggaagggcggcacgggccggaagacggcgagccaatggcggtcgcacggggcgtcttatagggtcttttccggtttccaccatgggcgtccgagcgagcttcacggggcgcctcagcctgcgcgcacgcaccggcgctcgaccgccgcacgtgtcgcccctcccccacgacgccgcgttgtgaggcccaggattccgcgggaaaatggggagataatccggcttacatgcaa

SEQ ID NO: 46980 - DNA, 857 bp, Oryza sativa
cagttttttttcgtctgaaaatcactctaatatgcatatatatatatatatatatatatatatatatatgaacttctgcaggtggacaaacctttagatgccaaggcaccgagtgatatttatggcgaaatgccgaagaccgacgatgtgacatggcaggtgcctgagttccagcatcaccatctcaagcatctgtagttcagtggcttcaatgaagaagaaatgcactggaggatagtggagcttgtcaaggagagagctgtgaacctgcagagcattgctctggatgacggatgccaagcctgcgatgttgtggcgaatgaatatgttctctccggtgggatcaaaaacaagaaaccggtgttgttatcagtgtcccagatcacaggatctcctcctattctcacccttgtatagagggtgtatccggtgcgttgtgctcgcaggcgagtatagggttgacgctgactcttttaaatatgttcctaaattattgacatcgttgactttttaaagcatgtttgatcgttcgtcttattaaaaaaattaagtaataattaattcttttcctattatattatgcattgtcacagatctgtttatgtatatacttatatatagagagagttcgtcatacgtctcaaaagtttttaactaaaacgaacggtcaaacatgtttacaatgaatcaccagtgtccaatatttaagagtggaatggagtcagatacagtcactcaccgcataagcatcacaatgttaggatgccttcacgggccgtatatttaaaatgcaaggcatggccaccttcggattacaattcgctgacgcgtctccaactacaggctcagatttgaaa

SEQ ID NO: 46981 - DNA, 516 bp, Oryza sativa
aaatttcaaaagtagtgtgtacatacattaagaatgttatattggaagattcatgaggtagatagaattctaccaaaacatttcacaaagtggtgactgaagtgatgtagcattaagcaaggatcactttacacagaagcaaatttcttaagcctaaattcatgcactgtttactataatattcatcaacgatacatatgcaggtataacgagtaaacaacatggcccattagatagctatcctgctaggattaatcaatattcattcaacagttactgacgaccattctggacagtgaattgggaccacacaattgaagaattcacattcaaatgacctttgaatacaacatgattgaatgatcatgtcaaccataaaaagaatataagcaatagctacagaagatggatattataagcaactactcctacatggaatgggtatttgataaactgttcaacctaagatggtaaagaacatagccaaactatttaaaaactcatgtagcacggtga

SEQ ID NO: 46982 - DNA, 863 bp, Oryza sativa
tcatttcatcaaatatcagtgcatttatgttgaacactatccttgttggatgaaagaaatattcttacttctctgaaatctgatacgtgtgccaacagtcatgattcccaagaatagctgctttggggagctgaagatctgaaatgcttttaacaagttgaacattctcgttgccataatcacctgccataaatggaggacagcaaacaggagatgtaaggaataagcatttaagtgtaacttcacaaagtaacgagtatattatgtagtacagatataatagggcaaagggcgcacctgtaaaaagtaccaaatctggctgcattcacacggagagaaagttagatcttctgggaataagaaacataatgttatagaaaataaatgtagtacggatatttttctatcaaactccagtgtcattttggcagctggactgtacatcagtacatgttgatggcaggcatacaaaaaggcgtagaacatgaataaagaaaaggacagactgcacttcagatgatcttacatcataaaactagagacatgctacaataatcagatgtgaataacttaatgcaatacacagatacaattgactgaatttatctggatttgcaatacctggagaaaatgtagggcttttgagtcttcctcaagggtccaatcattatgctgcaatgttcagcacatcacaacagccaattagtgcattgttctcatcaagaggatattataatcccttgagccataattgatgttataaccaagtcaagcatgcaaataaagtaaaagccatcatattcctcttagtacaagaagtaaagcacatctcgacaggaaagcgagctaagagatttcaaacc

SEQ ID NO: 46983 - DNA, 526 bp, Oryza sativa
cctgctgatgtgccctgttcatctacctgttcttctatgctccatctcctgtttctttctctctctcttttttttctttcttttttttggtttttttagtttagtaagctatgtgaggaagaactctgatcgaggttagtttggtcacagtgagttctggagcagcttgtgtatacggtagcatcatttagagcataatagggttgcagttgagaccttcaatttttgttctgctactttaattagtgtcatgtgcttaatttcatcttcaagcttttcatgctcccatggtgataagttaggtttatattttttattactactgctcttatttgttagagttcgatgtgcacgtagggcttgtttggttaagtgccaaaggctaccgtgttaaaacttatgtgtgcctcaattatttttaacaagtcattagaggggagagattcccacctgaattttccattcatgcgaaaatatgtagtagggcgtgttaaaaaagtctggagttactcagttacatagattg

SEQ ID NO: 46984 - DNA, 582 bp, Oryza sativa
ttacaaatccctcctgcatcccagtgctcagaccaaggcagggaagtaaatgtgctacagaattgtcatcaataattttgcctcttgcaatgccattgggagctgttcctcgtggggggcatagaagcctgtggcattgcgggctcactactctaccttcttggcccaaatttaagcacaaccaaactgctcatctacctgcaaaccttttgcaggatctcttaatgcagaaaaatttaattgatgaatgccattataatccatgtatttatgcaagttccagttgatgaaggattgaaagccacatttgccagtgccactacattgatgaaatttgcaggcacataatttcttttttaggcagaaaatgggcatctgcccaacgaattcttgtgcagtgcggctaaaccataagaatgtaacctgaaatgttgtatacctaaagaaggcagtagcccagccacagtgaatctatgagcactgtctttttggtgcaaggaaaaatgcacagtaactaatgtgagttactcccttccctttctgaccatcacaaggaacgtatgaccagatggatgtggactg

SEQ ID NO: 46985 - DNA, 518 bp, Oryza sativa
ctgccaactcaacaccatctccttcttcagttgacccttttactaaccaaattttatgcgtggtatacttttttgaaactttatcagttctttttcatttctattaaggcaacctttctatttagatcagtcatgtactatgttcttgagatggcgttgagttggcagctcctattagaaaatgtaactgatcttttatttaatcgatggcaggcattttagactttgttctgaacttccctggtcatcataaatgcaagttccttgatgccatgagaaacattctgaagataatagctagtgctgcgtgggctgtgatccttccatttttctacattagcaccgcatctaaagtcaatttaccaattaaagatctggataaatggtttcaatatgttaaaggagttccacctctatatatcctagctgtggcagtgtacctgatacctaatatcctaagtgcagcactcttcctgttaccatgtttccggaggtggatagaaaactcagattggcgt

SEQ ID NO: 46986 - DNA, 660 bp, Oryza sativa
ttagtacatatgaacaagacttattccccatataccctatttacatgttgttcgattaatccttttcacatggcaattggagggtattgggcaatcaattaatttcacatgagattaaggagattaatcccacaccccttcaatcgaataaacccttaagataggagggatgtgagctgggttggctaatcagattgtggtgttagccaatagaccctaggagaatcctatgaaaattctgttgagaacaagtagaattttggaagggattgattaaagaaattgaaggacttctacggtacaatacactagcaatatatatttttggcatatacaaagatacactaggaatttccatgtacaagttcgcgtgagcatggtggagagtggggagttgggcatcattgctgctgcctcctccaggtagaggaactagctagggttttgggtgggtcggaaattgagaagacgaaagaaaggcaattcgaattaatttacaggcaggcaggcacaatagcgtggtgcgcgtgaacttgcagtgcgtgtggcgtctctctatggcggtatggcccatgatggacgacaactacgggactggggaatgaaatcaagtgaggaacacgtctagcattgtgcatttatgtacaacagttgtcgggt

SEQ ID NO: 46987 - DNA, 553 bp, Oryza sativa
cccatattttatttttatataattttcttgaatttaattagagttaattcttattccgacatttttcaatttaattgatacaaatatagtggtaataatattttactcatttctatcctcactaaatattattttaaattgtactttaattatttacttagtcaatttacttttcagggtttattcctaactaattatccattattcgcgatttataaactccgaaatcaaaattcaataaaataatcgaacaaaattggcatgatgcaactttatttaaaaagtttttgaagatccgtatttttagagtttagattttgtcgtcgaatttttagggtgttacaacaaccatactcttttttcttttttctatgttattaaatttacttgtatagaaatagaaagaccactaataaaaaccgttgtacgagtccttagtaccctataactgcgcgattatcggcggtttgaaaaactcttgtggggacaatgggccttggcacaaacgtggcatcggcgcatcgccaacattgtcaagctggcatgaaaattg

SEQ ID NO: 46988 - DNA, 1161 bp, Oryza sativa
acccaactaaagggaacaaaagctggagctccaccgcggtggcggccgctctagaactagtggatcccccgggctgcaggaattcggcacgaggttggcagtttaattaacggtagtaacagtgatttcacatctaggtttaccgctgagaaataaggcaagatgtaacttagtgtactgataaaatcactctcgtcattggtgtctagctgctcactcccaaagcctgacaagttgatgccactgctgtctgagggctcctctggctcaacaatcagctcagtgcttgtgtagttcttccgggcttgtaacaccttcatgaacgctccttctggattccctaccgatgcttcttcagctgtcaaaaaagaagagactgctttgatcatgaaagatgatgggatgggatgcatcagtccatagctgtacaccccagtcacacagagtaggagtcagcaaacattcgagtgccattcagagaggagaaacacacacccaatcctaaacctatgaaatggcaacaacaaaaggagaaaatacatcttttgaaaacacggccacctacttggaacattccatagtgtgacatagagtaactctgtttaggattatttcgttgatccccagaggccaattgcccagtgctcagtcaaagcccaaggtggaagacaagtgcttccctgatgagctggcctctctgcagactgctccgtaccctgtgctgtcctgcctcagatgcagagagagcacaaggctcctgctctcctcgtcctcggtgcacctgtgttcgtgctaccatcacagctgaatgcaatgaaaggcggtcctctaaaaggagcagggtggaaatgctaaagtggaggccccgtcccattgctgatagatcctcatttggcatgcgctccaccctccccattttttgctcccacgtatggtagccccatcacagaaaatgcgacatggaaaaacgccctgtgtcccccctagtttttaaatttgggcagggatttggggtgtatgttaaaagtttttcaaatttgccagattgcatgcctatgttgttaaatacccaatgaatccctggtaaaaaaaaaaaaaaaaaaaaaaaaaaaaaaaaaaaaaaaaaaaaaactcgagggggggcccggtacccaattcgcc

SEQ ID NO: 46989 - DNA, 624 bp, Oryza sativa
atacaaaaaaaaacatgggaagggctattaaaattacataaatttgagaagagataaagacttaaaggaaacttcccataagattctacctcttaaatttcctccaaaacttacatgaaatgagacattgtatagaatttcttagaatttaatgttctgattcggagggctatataagaaaaaagtcttataggaataaattctctaaaatttctatgattttcctttaaatcaaaggggtctaaatgtcccattctattttaacatgggatggagggactaagggtccctttgaatcgcatgaatggaaaaacggaggaatagaaaaaacgtaggattttgacaggaatgcaagtgtaaaacagaggattgaaaaatacaggaaaaacacagaaataaccgtttgattggaccacaagaaaaacgcaggaatcggatgagagagatagactcaaaggaatttttccaagaggttggacctcttgttaactttcctccaaaatctctataggattagtcattctataggaactcttaaggatagtattggatccaatcctttatttcaaaggctttcataggaatttttttaataggattaaaatccttcaaatttcctacact

SEQ ID NO: 46990 - DNA, 732 bp, Oryza sativa
gatacaaagacctaacaatttctcaagacaggactgattgtgtatatagaggttctgaccattcttatactaccagagagaagtatttaggttgtgcttgcaaaaaaggactatgaagatgaccacacaactgaatgtactataagaatctcctagaaaaaagaatgtactacaaggcatacatgttccgttgtctaaatgaatatatcttcagccaacaatggaaaagtgattacgatagctcactaagaaagaaagaaatggatcacagcaagggttgcaattaaaccacaggatgaaggtacattgtttgataggtcaccattatgatggcctcaatgtcacttgaacaacttctacaagcatgagtgcatcaagctagaaagaaagtatgatcagcaaaacacctaaatggcatactgatcatatgtgtagtaaacacttatgtaaagcacacatgtcagtgttccccccaaagcaactaaacaactaaccatgcaagtaaaggaacaatgaaggcaatcttgccgaacaaaggatttaaacacaccaccaaccgctcagtccatgacaatgaaaacaatatgctttccataagctacagatcatggccaatgtggaccacaattgggtacacgtgcgacaactagtacgcgataaacaggtaaagtcgcagcagttacagtgtaaggcagttgtaagcatattgcaagtgcacacctcctggggtac

SEQ ID NO: 46991 - DNA, 1299 bp, Oryza sativa
  unsure (1)..(1299): unsure at all n locations
accaatcggagagggagtcaatgcgcgggggccgccaaacagcgaaatcgaaaaggataggtggggaccgatgcgcgtggggctggcgccgtagcaagatgcggtagatgagagaagaggagctatgcggtaggaacggccgatctggatccaacggtgaggacaaaaagggtgacatggaagcaccaggaagcagagaattctaacagtgaggatgatttgtataggtatataggatatcatttattttactgtgacatattttattattaaagaagccttgcctgtgacttatatactttaggctaatttatcctaccgagaacgagagagaaagctgagagaaagagagagaggagatggagacttatacgtgatttatctcttctattcaattgtaaataaatattctaataagtgtggtgtccagcagtaaattttttatgatttctctcttctattaaattagaaataaatattttaatagatacggtgtccagcagcgaatttttgtattttgtatacaatgattaatgcgctaaccacagcacaagtaattgaagccccatttcatcaaactttcgtttgtggatttgcatcggagttgccccatgttcgttgggggtacttcagaaatgggctcaggcccattacatggccataaccattagcatcgcactttctctctgtttgctctcatctcgttccttttccttctttccagagcgaggctgtttgccgctgcagcgccggcggctcactaaaccccagaacccccttctctcgccgccgccccaatggcggtggacaaatccggcggcggcggagccgaagccggcgcctcttcctcctcgtcgggcgtcgccgcctccaccatggaccgcttccacaagatcgtcctcagctgggactacgtccgcctcgtcgcggactccaaggtacgcccctccccgccccgccccgagcgctcgctttgcaatcaccgacaccacctttgaattttttttctatatggcggcttgggaggacagggcgggcagcagcaggcgaaggggctggggcgcgtgaagaacacgtacgcctcggtggccgagtacctcgctgtgttcgagccgctgctgttcgaggaggtgaaggcgcagatcgtccaggggcgcagcgacgaggaggaaggtgggtgggtgggtggcgcgcccgatttcgtgttgcccccccaatttgctgtcggtttatttaacagtgtgtgtgtgtgggtgtgtgtgatganctnctgcagtgggccatgcaatcaaggccgcg

SEQ ID NO: 46992 - DNA, 768 bp, Oryza sativa
  unsure (1)..(768): unsure at all n locations
gctggccattgatgttgantcccttnctatgcaagtagttcatcaggagcaacaagaacatgacgaaggtcgaatctagtggtgccaatagggagaaaggaagtgccacggcaaacaaccggaatggagtgaccattaccaacggtaatataagtttgtgagttggggaggcgagtaacgagtataccgtcggtggaggacatgtgcgaagtggcacccgtgttgagaacccatgagttggggttgtgaagcgtcattccattgagagcggcgacaaggccggcttggtcccaagccagctggacagaccctgcaggcggtggcgaggagtatggcccggcgaatgcagtgtgagcctgaggatacggcccaagtattccggcgctgggagaacgccagggttgctgctgtcctgcctagggcaagaacacccatggtacagcttggcgtggagcatggacggagaaagtgctggtgccgaagctgttgctgccgatggtctattcaccagggcggccgtcgaatccaccgccgccgttgtcgtcggagttgcggatgttgttgcgggcgtcgttcttgcccttggtactgacggcgttgccgccgccggcgcggttcttgtgctgcccaccgctgacagaggagatgcaagtgcccctcgtgcacatggagtgcgctcttattgcttggacgaaggcattctccgactgtacttgtaccgagttggcgttgcgaagcttcttgagaaccagcgtgtttctcgagaag

SEQ ID NO: 46993 - DNA, 1344 bp, Oryza sativa
  unsure (1)..(1344): unsure at all n locations
tgattttcgatgtctgcacgtgttcatcataaacgaggagcattttgggactacacaatactcccatggtctccaaactcagctcctgatcaagctctcatgagagtgatcttggttactttgtctgggtgaccatggacaatccgagggctgaacacaaagtggagcgatttctgagcatgttttataccagaaccaggtttcaggtgggagatggggggcaatcactgagctctggagatccaactgactcgaacagggttcattcgaacatgggatgcttccagatgaacatcaccaatcccatgggatgcttgatgcttccagctgatgaacatccggagatatccctgaacccagatgaagaagacactgtgtggtgggagttggagacacatggccatttcactgtatcattggcctaccagatgttcttcatggcaagccttgtccttaatcccctatgtttgttcttcatggcaagccttgtccttaattccctatgtttgatgttgtgacggatcatccagaaggagagaaacacaggagcagtgtttgattatctgggcaagtacatatttcggtatttatgtcatgatcatttgctttggtctagttttcatgcagagtaggattagaaatctcaggccgatgtgtccgaaatccccagtgaagggcattggcaagcgtctcaagcattttagattacttcagcttttgtctctatcaactctttggtgaaacattctaggccaattattcctcttaaccagggttttaaatttcgaaagcagcagttctgccgctggtgagcgaaagaaccgaaatttcgtacgaatttttttgaatttttgacggattttgaataaattcgaataaaatctgaccaaattcacaaaaattgcaaaaaaccgaaattttcgggtgagatgttagcatttcggtggggggggggggcgaaatttccgaaatttcgttccaaaatttcaaacactgctcttaacttgggtagctatggaattttaatagccttaataccagttgattggctgtgcctttttattgtcagcttcagacataacaaggaatcattcgagcaaccatacatatatatatccaattgctagaagcaatacctgagagatacaccgaatggcaagagacgaantnggtttcttgcccatttaccattcgtggttgaaatcaatggcgcctgtggattatgttgcctacatgaactaccctgtgggggattaggaggtcccaggattttcaggctacgggcttgaagatgatccagccctcgcacgtgataggctttatgctcggattgatccaaaaagg

SEQ ID NO: 46994 - DNA, 3852 bp, Oryza sativa
  unsure (1)..(3852): unsure at all n locations
tagtcaagaaaagacaatcgtcaattcttcatttctgtatgtggatattggtctttttcttctgcccattcgtttacccttcagtctataagctgcaacaaaaaaaaatataacctaattttggagttgtttttgggtttttctttatcgtagtttaaaattttatactatgataccacgtgtatttgggggtttactattttgatataccacgtgtatttctcagtgcgaggtatctaataaggtgaagcaaattacctataagctcgagtttatgggcatctgcatcactgcatgcagtcgctgcctccgtgtaaatgaattgcacagaacctatccgatgtgacatatttcaataccaatgtgatattttcttggtaaaattagttgtgaagataaaggtcatgtaatctttgcatatggtgatttgaaaaaaaaaactcttatttcttcagatcagtacagaaaaaaaaacagataactacaccgatgtttgtgccgttggcttgaattggttgagcttgatgtgtttaggccagcaccactactggaattacggttctgttcgtccgttgagttctaccgcccaatacctggagattaattagccattctcatgtttgccgattggggctaaacaaactagcaaccggaaccggggctatcccggacgaaagctctattaaattataatatttttgaataaactgacgatgaaacttttataataaatgatagttacagtgaaatttgtctgggctcgaaaaattttctaaccccaccactggccagaattgtttaattatctgtaggttttgaggtgttgatacttcacatgaagaaaacaggaacacaaacacaagagataatagtttgtacgtataaatttctcaagataggaatatggctctagagtctttcaactttcaagactacaagcacaaccgtagctgcattcttttggggttgggaaccttcccctcatgcaaaaccggaacggtagactaacgaatattaattaagtatcagctaaaataacttgagaattaaatttatatgatttgttaagacaacttttctacataacagtttgggaagagtgtagacagaaaacaagagggtagaagttggaaaaataaaggtaggcagagatagttatagggttaattaggagatgatgagatgttatggtgtgcttcttgcaggtttgaatgccatattatcagctatgttatctagtattatcatagatactactagaaaaatcaattttacagtcggacaaatcggcttttcgtaggcggccactcgaaccgcctataggcaaaggcccacgaaaatagtgtatttgcagatgggtgaactggccgcctgcaaaaactgatttttcgcgggcggattccttaacaggtccgcctgcgaaaatatttgcatagcgcaaaaaaaaacctgggaaatttctaaatcccccgtacaagcagattcgaaagccctaaatccattcaacaaatttatcaaatcctcaaatccattcaacaaattcatcgcaattctcaaatccagtaaacaaattcatcacatatcaacacaacgaaacaaaaattcgtcgccagtcgaagccgtcactgctcacgaacaaacctgtgacagatctaggcgcccgaggacaaccaacggtggaattgctctcccgacgacgacccaaggcaggccggcagcggatccgcgtgcccgaggtcagccggcggtggatctgcgcgcctgggtgagccggcggcggatcaaggcgtcgtcgtcgtcatcacagccggtggcaggacccaggcgtcgacgccgtcgtcgtcgttgcggcagtcatcatcatcgtggccgaggccagcttgcagtggatccgcgcgcctaggcgagccgacgacggcagatccaagtggcattgtcgtcgtcatcgcagccggcggtaggactcggcaccgtcatcgtcaccaaggcggacctcctcggagccgttgccaaggcgccgacgccactcctctccctagccaatgcgtgatgagagagagaggaggaggggaatgagtaggttgatctgtaggcatgattttcgtaggtggaccacataaagtttcacttgcgaaaatcaattttccaggcaggctccttaagaggtccgtctagattttcacaggcggggttaaatctagaggttctttagctattttcgcaaacggttataagagggtattttttttggtccgcctgaaaaaaaataaaaagccaacgttgataaaaatcgtttttctattaatgtgaccatacatgtttggagaggtagcatgtctccaaatagtaacggtccacgggtaaatttggacacgaaacacatgcttagatttgcgttttgacctacataacggagactaaattgttggttttttacttgtgcccaaagttattgttggcatgctagcgctgatggtctctgtatatgtgctaaaggctgatgatgcgacagctagcgcgagatgcaggggccaagaagaataggattgggcggcactaggaactgatgaagctgaacgacgaaccaacttggggtgatcttgatcagaagactcctttggtccccaaaaacttctgatcttgcttcgcagcgagattgatcctggtgatttcatctagctgttgtggttaacttgctgattgtcccaactgaatagaggggcgccctgcacttctccttatctctacatataccaagtttgatttggatattttgaaagatgaccatgctcatctgtttacactctgtttcgatatcaattctttaagttaattagtgcttggtattacatggtaggatttgctaggatcgatccagtgtacactaaattttagtttcaggtatatatccaaaatcccgagagggagggaaaagcgtggtgctctctactgttagtagaaattaatttaaaccgattatctagtttatctaagggtttagatctttttatatagtactaccacattagtcaacagtagtagaaatgtgtataaggtataattgtccaacaaatataggagtatatgggtaaaattataatttttttccactttattttgcccagaaagtgcgaactgcagatccttaactaaagtaaagataaattatggacttgtacgtctacagtgtttcagttcgaaaataggactcgtagaaaacttcttcatggaatcaattggttccacatatatgatagagaaaatcccctgtgtacccctgaaggttcacctaatcccttctgtatccctgaattttgctcaatctcttggatacccctgaattttagtttggatctcttccatgccctttcaactagttgaccgttagttgaccgttaaattcttatgaaaaagtccattttgcgctttggtataaagaagcatataaattaatagagtatattgttggagcatagaaatgtgttatatgagactattatgtttatgagatagctatgcaccatattatttgcgataaatatacttttagatatgacataaaaaattaatacttatttatttttttagcatatgtattctgatagtaataaacaaatatgttatattactatgaaaacacatatgctacataaaagaacttttaataactaataaataagtattaaatttttatatcatatgtaaaagtaaatttgtcacaaataatatggtgcatcgcagactcataaatataatagtctcatccaataaatttttacattccnncgagaggcttcattaattcaaagtgtttctgtgatggggctaatgcactctgatatgcaactctcg

SEQ ID NO: 46995 - DNA, 777 bp, Oryza sativa
  unsure (1)..(777): unsure at all n locations
aactcacaccacattgagttcacacaagaaagaagctttttcggtagcccgtgacttgcaaacccattgcttgcccatcaaggttagtttggtggcctaattagctaagcctgctaccccttaaacttgatatgatatgtccaagattatttaatacaaggatttgtaaaatcaagaagttgattagattctataatgaaaatattggtggttcgctaatgtaatctggagattttatagatggttgatttgtgaagtgtacagtttcggttagccctggcggcaagaccgatcgtgctatgccagtcaatatgcagctgatgagacgatcagacaggtcggccctacgatctgaccctcaggatcatatgtgatgtcggttctgtctcgtatgttgtggtggaacacatcctcagggaaattggagtctcaaccgattcaatgtgactgtacaccgatgtaattcaaaagtgagtcatgtttcttcatacttagacgcaaaatgggctttttcggaagaagcaagcgggctgctaacggtcaactagcggaaagggcatgcgagagatccaaactaaaatttaggggtatgtaagggattgagcaaaattcaggggtatagaagggattaggtgaactttcatagatacgtaggggattttctctatatgatattactgatcgagccacagatctgtacgagtagactctttcggctggaaacttgatgagctacttgcngagnnggcaganagcacgtcaaatcaacggggcgct

SEQ ID NO: 46996 - DNA, 838 bp, Oryza sativa
tgggatttgaaaaccgagttgcagatctccatcagcttattgccaatgatatacagatgtgagaggaaggagatcgaagtgtaaacgaagggatctgggtgaatggggagcgaaccacaggaggtcgtgatccctcaactactacgcacaacagcgctgggaggaggagagtcaccataaaatcagcaaagcaagcggcgcggtgaatggaagaggcacgacgtttgcgcggaggtcgcgcttactggctgcccgccacgatcgaagaggagagcgatgcgggagaggggagtcgatgcgcgtggggccggcgaagcagcgagatgccagagaggagaggtggggagcgatgcccgtggggctggcgccgtatcaagatgctggagatgagaggagaggagcgatgcgggaggaacggctgatgcggatccaacggtgaggacaaaaagggtgacatggaagcaccaggaagcggacttatttattagttattaaaaggtcttttatgtaccatatgtggtttcataggaatataacatatttggttattactatcagaatacatatgctaaaaaaataaataagtattaattttttatgtcatatctaaaagtatatttatcgcaaataatatggtgcatagctatctcataaacataatagtctcatataacacacttttatgctccaacaatatactgtattaatgtatatgcttctttataccaaagcgcaaaatggactttgtcataagaatttaacggtcaactaacggtcaactagttgaaatggcatggaagagaccacactaaaattcaggggtatccaagagattgac

SEQ ID NO: 46997 - DNA, 776 bp, Oryza sativa
  unsure (1)..(776): unsure at all n locations
ctagtctccagtaggcgaggcaccaaaaagcgactaggtgaacactattacttgtgtcttaggtgttctgcaatagtcatttacattttcaatgtataatttgtatggtgtacattccatttgaaaaggaagtaaaaccatttggagcttaatagcagttctatttttcctcatgttcctcccaaaggtttatgtcccactttaatcagctattcagaagtttattttatgctttaaataaaattactgaaatttgacatcttgacaacaacatgattgccagtctgggaatgttattcatccttttagttatgtacttctctgaagtcctctgtgatgattgtgaattgttgctggtcctctctttatagaatgatcccagtccaactcttagaaaaagccacaaacacttccacaaatcttcatgtgctccaggggagaaatgtggaatggacaaataaagtaacttctttattgtggaatacttacaccatgccattttgatgattttagtttcatattggtcatctttgatcccctgactgatttgcctaagtcacctgtcactgcagcaactataggtcaagcaaataaatcagctcatcttacagcaactatgtctaatccaaatatagtaccttcttccagtcatgaagggacgcctcagcatgaaaaggcacctgtaattcgacccatcaccgtaaaaaatggtatgacacatcaatctcgacctggtgatgaactactgcagagnagccatgcaactcaaggcgcgg

SEQ ID NO: 46998 - DNA, 874 bp, Oryza sativa
tgaaaacgccgatttttgttggcggatatttaagagatccgtctaaaaaaagagtatttttttatggcggacctaaatacaaacctttttcttttttaataatttcatggcatgactctattttttctttttaatgtcatgaccctaaatagataagatccagagcagctgcattttttttcaatccaaattcaaaatcaatttaaatcggcatcagatccatactcaaatccacatacagattcatcacattttcaacaagcaaactgcaaaatatgcagatgaaattgccaacaccgccgggagctgctgccaaaaatgctggccatgcgtcgagccgccggcggcagctggatctgcagcccgtgcccggagccaccgccgcgccacccactacctgatccaccgcctcccgcgcctcgagccgcaagcatgtggatggatacgctgcccaggagcatctccgccgccggatttgtcgcccgcacgccgccaggaaatattttacagaccatgggcctgctgagcagccattgctgtggctgtggatgcacaccgcggccacagctagtagcttaggtacagccgcaacaatggctgccaagcagggcgtgtattatttgcatgtatttatatgtaggattgatgatcccttgcatgtatacactttttttaggttcgagggtaattatttttgcatttttgagcttacatatagtggaaaatttgttatgcatcagaattcggccataacatacgaagctggcaaacactatactatgctatattatcttcgaggtggagttggtatttgtaatcgtgtgatatgcatccttaccgatcctaacatatcatatatgctgatacatagaca

SEQ ID NO: 46999 - DNA, 2164 bp, Oryza sativa
ttttggtcccatgttaaaattcttccttggatgtcaaaaatctgcaaaacaagccacgtgcatcatccaatttgagtttgatttgggccttagaccttgtaattatgtcatgggataagtccaaggactggacaccctaggacatccctaatcatacttattcaatagccatcaaagtttagagtggtttttctatcgtcatgcagtttcaacgctagtcagtttgtagaattctaacttcaagttcttaatcattcatctacaattgagttacaatcgactttgttcttgcttgtgtttttcgattcgcatatagagattatccttctcggcgaagtcaatcaggttttaaactattgataaccaaaggagatatagaattatgattggagggtttgaaatcatgttgattggaagctggatcttgtatgtcaagtttccgcaaaaatcgataattatcttcacttgatggaagatcgaacactcccttgtcatcaatcgatcaagatttttgtcatcatcgaaactttcgatgttacataaggcagacgctaggatgtaatttatttgttgcttatgttgcaatagatttccttatatatatgtagatcataaaagggaaaaaaacaatttttactctattaagccttgtttgaccgtggtattgcatatgaggatgatgacatggaaaaatttcccattcccccttttcccccttcttttctcttcatcccccaccgttggatgcgccagtggcagcgtcatgcaagtagcagagatagggaggtagcaaaagaacggtgttggccatcagagaaagaggcacccgtagcggggttggcccgacggcagagcagatgctcaagctaaagccgaccatggtgatcccgagctcccggtcgtctcctttctctccacctcgagctccacttgacggtgaccaagagcttttcctcctcctccacctcctcatcgtgcgcactcttagtggacgccaccacctccgctccttcgcctcttcgttgttttcacatgcgtccctggttggtcgtcgccgcctcctcttatctgtctcgtctgccgcccttcgttgttgtcacgggtgcccctggtcattgtagtcacctcctcttgtttgtctcttcatctcatccgctacctcctctcctcctcttcacatgtgcccccgggtatgcgccaccttctcctcttctccatctcttcctcaccgttgcgtgcactggatctgtgcctcctccttcgacttttcgctgaatatgcgctcctcctcattaccagccggccggagcaaggacacactgccccaagggcggagtggccgatgacccgacgtggatatccgacggcgataaggttgtttgcggccatgggagggcggaggaggcatcggtggctgtagagaaaccctccctcacccctaactttccagaagcagtagcaggcgatgacaacggcggtgagggagaggaggtggtggcagcatcgaagcagcaacagcaggcagcgatgactacagcaacaacggagaagaggctgcaactggaacatcgaagcagcaacagccgacggttggatggtgagagaggaggaaaagggaagaaaggaaagagggagaggagattggttaggaagaggagctcccaaaaaataaataataaaatgagggaaaggggaaattttggcataggggatcctctagagtcgcatgacaggcatgcaagatcatggtcaaataaggctttggacccggatgatataataaacggggtttagggatttcaatacgtgctttgcaagttcatgaatctaggtaaaatttatttacatgttaaaaaaaaaaaccgctggtgcaatttactcatcaatacttaaaaggtgatgttatttctatcccttctctcataaggcacatatttgaaacggactttggaagccaccgatgataaatggaatatgtactacagatctttttctatttgtttccaatatgatatatttttttttattctaaaccttccatataatattttgatattttgtgaaagataaaatttgctacagattttttgatattttttccgaaagattacggcctttgctgtgagacacccgaagatagagaatttgctcgtggacacttaaa

SEQ ID NO: 47000 - DNA, 895 bp, Oryza sativa
ttttgtaggggcccgggaaaattaaatcccgggcggagaagaacaaccccaagcggtttaaatgccaaagaaaacccttcataagtccggcatgggcaattaaattttttgggggtggttaaaaaaaaaaagggaaaaaaaaagggaaaaaaaaacaggaacccgtttcccgggaacccccgtgtttttttcccttgggaggcaaaccttggttatgggccgccgcccccgccccttgttggcccaaaccgttttggcttgggccggccacccttgggcctctggttggcttaatagccagcttaagaaaaggaaggggaaaaaaaagaaagaggaaggggcattttggtacttacacaactctttctctctccattttaacctgtaataataatataatgggagaagtgtccagcagctaattactgcttttaaacagtgtccgcaatcaaatacacgattttggggtgtctcacagcaaaatccacaatctttcggtgtactgtagcaaattttgcctttgtgaaaagttccctttctatagaacctcgaccggggctgctccactagctctcttcttcccctcaccttgctcttctctagcaaatccttgtagtcttgtgagcggtggtggcaggtgtatcctagtgacttgcaccaagttcttctcctgttatattttatagatgcaatttatgtttataatagacaaaacttagcaattctggacctcattaatgcacacacgtccgcgtaatagctaggtatgatttgcgcttcttaaattcattctttttcagttttacaaatactgtcatccttgatagccccatgtatttacattttacttcattttatttgtgtccttcatgtcgtacttagagttttatttata

SEQ ID NO: 47001 - DNA, 1498 bp, Oryza sativa
  unsure (1)..(1498): unsure at all n locations
ggctcgaaattatcatgtaatataatgtgtccatcaaaaaattgccctcaaatcgagcaccacataaaattttttatcatctgcaaaaatgtttataaaagtagctctatattgataagcccnggtcttggatctaattattttgagggccattctacttcacaaattcttattttaatctttctcaaaatattaaccctccatcaaaagcatacagtaaaattagtttaggctctcccaatgtcttctccgaatcaagcctgaaactttcgacaagtgtagagtggagatgacaaatattgcttgaatgaagcattttccctacctctataagcatacaatgaaattcacattgtacacatgggtaataagcatataatgggaatattgcttgaacatgagaaataaggcaataagcaatgtacagacattttctctttctcaataggcatacattgggaatttcaagtgtagggtggagacgccaaatattgcttatcccctatgaaaatttctatgaagactactagtcaaagaaataaaaacgccaataaatataattatgaaaacatactgataaattgataataagttaggtttggcacgaagcaatcctagtaaattgatggctaaagcctactgggaatttttcttaagaaaagtatgggatatcacagcccataaaattttctattctcatattattgtgcaggatattatccatcctattatttgtctcctcaaccatttttgtgcattgaatttctcatatcatagtgatgcgttctataaaaaaaaagtgcacctccaaataccaacaacacacagacatgcttttgcacaatcttgcaaaagtggtttacaactagtagctctattattgataatgcccttatctttgtatccatattctgaggcccattctacttcaaaaattatgtttttttaaatctttcttcaaatattgacctccatcaaaagcacacagtaagattggtaatgaatatgaataaagaaatcttccgatagtaacactaagtatagctatgttttacgctgttttctcaattgtttttgttcctcgaggaaattaacgtatgcaaagctattttgcataaagtttctcgtgtgtgcacaaaatctcgcataggtcctcgaaccacctgaagctaggtgcgatcttgtaaattaatttgaaagttgtgccaactagtgcgacaacttgtctagctgctatgcctttgatcttaactaagaggtaccacgcgggcaatatttgcacaccaacaatatttacaaaaccaatttaacaacttgtatgcatgtagttgaatcagctaaggaatatgttggttctttttactatattcacttttacagtataaataagtgctaattaacatgtttctgaaaaaaatattgtgcaaatcttatagagctgcaatagttactgatggttggtgtcatacattgtcggttcacattaaagtactcgagt

SEQ ID NO: 47002 - DNA, 1691 bp, Oryza sativa
cgttgggagattgctacgtattggttcgagaccaaccgagcgagtagaatcatctctcgaacaccaaatggaagtcgccggaagatttgctacgtactggttcgagacccagcgagcaaagtagaatcatctctcgaacaccaatgaaagtttgcggtgcgagagattgctacgcactggttcgaggaccagcggacaagtagaatcatcttttggacaccaatagaggttgcggtttgagagattgctacgtactggttcgagaaccagcgaacgtgtagaatcatctctcgaacaccaatgaaggttgcggtgcgggagattgctacgtactggttcgagaaccagcgagcgagtagaatcatctctcgaacaccaatggaagcactagagttggtttattacatgtgtatctcatgtggccagcatgactcacacacccaacttgtagcatatccggatgtccgttcgcaatcatgtcgggtgatcaagccgacaacgttcacgaggaattatccgttaacaacatttttctcaaatagtccagccacggccggcgctatgagataggtcgtcggtctttgttggtaggttgggcgcgacgactctgcatttgtcgagattgttctcaataatgcggtgtacttgatcacaacctacttgagtgctcaattattcctgaaaaatattttctagaagacaagatatatagcagataatatcaagtgtgtactcaaaaaactacatggattttctagcattatcaggatataacgagcatatataaatatcaggcattatgtaaaccgtaaacaagcatgatttatatggaagaaaatagagtgaaccctgtcacgtcccaaaacgactctaaaatatatccctaaaattatgcctagaataattaaaatctgtgtgcaagccttcaacaattaaaatgtgcaaagttaaaagtcaaataaggcttggaggatttttgtatatttcctaaaagcctaaaatgcataaataaattttagtggaattttcagagcacaaataataattgttaagaaataaacaaagttaaaatgattttataaaaagaaaaactctagaaagtcccctatccctccctctccctcttgggccggctcggcccatctctctccccctcttttctctcccccgcgggccattcggcctttccccgcgcgcgccgctgaccggcgggaccgcccgccaccctcgctgaccggaggggcccaaccgtcataacctttctttcgacgctcccgacgtctaacccgagccctatctacgtccccagcgctaatcacgtcgaccccggtcatcacgcatgcaatcaagaccggggaaccatatctcgggattcccccccccctctcccccatcaaaacactctttctgtccctcggatggagttggcaacccctagcactatcttcgcggaaccaataatggccaccgagatttaccgaccccatttgcaccaattgtaaagatgctctgacacaccaacccatgtaaaagctagccgtgaaacgcacagcgtgtccgccacaaaccgactctttacacgcagagtgaactaaggccaaggtccctggataacccgaggcgaagaaattcggtctgcaacgacatggccaggaccacttctcctagagaaggctcttgggataccaaaa

SEQ ID NO: 47003 - DNA, 1293 bp, Oryza sativa
  unsure (1)..(1293): unsure at all n locations
cacattgtactcccntgcatatattcggcactgtgggtgtgtcttgttaagtacggtgttgaactcagtctggctcatnttttcccaaaccagaagagaagcccctgaagatgaaggctttggtgtttagctcatgcctgccgtcaagcgcctgtggtcgtcgccatagtcttccgctgtttcccgtttgtctttgtgtgtgctgggccttcgccgccctgtaataaattaactatttacgcttccgcttgttgaactctgaactgtatcaacttttggtgtaccttgcctcctaggacaaggaataatgcacgcacgtaaggaacgcccgttagattatttccggtcgtgacaagcccccagcgttagatcgtagtcgatttaacatcggggacactcgcgcaatatatattgtataaaaacatgctctaggtaaacataataaattatagatccgacaatgctgtatgatcttgaaaagtaggtacagtaaattgtatataaaatattgcgtacctttgtagatatatgccggatatatctacagaattagtagatcaatttaaaaaatcaatctactaaatacctgatcatgggtggctggacacgtactgactccatacatatgcatgtgtactgtgtacgtgtaaggagcaggcatatttgttgaattcgcgtcatcaggacgagtagtcagatttgtcaactagaaatttgattctagcgcaaactacagaactcctcgaatccgattaggatattagccactgaacagatcaatgtggtgcttgtatttcagctcctcgacgtgcttgttttgttgatggagatcgatgccgagtctggcttggacccggccagctgatgccgcccaccggttggcgtcctgcacgtcgatgggttagtgtcggatcagttttggattccgccaacactatggtcctctgccgctgcgacatcttgaagcttgattggtctcgccggatcgaatagttgatggcgatgattccaatctcgttgggagacgtactttggccaggttggatctccctgatccgaagtcgtcgagtagcttattgttggagaatccatctcttaaacccatctcgtctaaatcctgaagcaccaaaaaatccccctacctggcgcgccactgtcgacgtttgatgtcgcgattccggtatttgcatagtatggggatcgtcggtactaggacatacgcgagactgaggtaaaagagacagaggcgacgatttttatacaggttcgggcccctgaattgtcaggtaataa

SEQ ID NO: 47004 - DNA, 3261 bp, Oryza sativa
acaccaaccgggactaaagatatctttagtcccggttggtgttaccaaccgggagtgaagatctgcgggggctgacgagggctgacagatttagaaccgggactaagatcatttttagtcccggatggtaacaccaaccgggactaaagatcaaatatacccgctgtagccaccaaccgggactaaagatcatttttagtcccggtttttagtggaaccgagactattgtggatttcgggcgaccgaccaaagacggtttctccaccagtggtattatgtcactcacaaagaaaaaagatgcgcatgagatgaataaatattttatatcaaaaccgttgtgaaatgttatgtgtgtcatagtgaaataaaaaacgacagttccttccataaaaaaaatataggtgcacgataatttatataactacacgtctctaaatacaatatagacgtataaaaaaaatactatctaccaatagtgatcttaaaagataagaaaaaaattatagaattattttctttttcttctcagtcccttccataggtgcatttcttaacaaaataacaaataatagaatgactctatacttctttaacatattttcatgcgtatattttccttttatattgtatacttaattgcttatatataattaagtcttgcaaagttttattgtgcccacgtaatatcataatattgcactttatataaaatatattttatacacgatatgaatttaattaaagtttaaatgcacaaatcatataaaaatattattttggtaacatgaaattttaaaaaataattaaagacatatagaattgcaccgtagcgtttagcacgggcatattactagtactgaagttgcacttttatataccgaaagtcgcacgtctttcaacaaatttatttacagagagctatacaacattttgatagaaaatctaacaaaaatgtttttcctagaatttatatcgaaataaatatagcatgccacttgcacaaatgtaagagcaaaatctgacggatttttccaagaaaatatgtcgaaagaaagatagccgtataagagcaaatataagggtacattatctgacagattctttcacaagaatttttgtcacaagaaatatagcaattctgatttatttaaggtacccattattataatctccaatgaaacgttgccataaaaaactgggtaatcaattctcaaaaaaaaaaaactgggtaatcgtgcttgaaaagaaaagcatcacacgtttccaaaacaacataaaaaaaccctatagcgccattgttacacaggctgcgttctttcttcttctcaacagtgattacggaaaacggagcgatccattagcacatgattaattaagtatctgctattcttttttaaaaaaatggactaatatgatttttttaagtaactttcgtatagaaactttttacagaaaaatgcaccgtttagtagtttgaaaagcgtgctaacggaaaacgaggaggactaccctgaaaagaacgcagccacagtagtgctggtacagctgggccgccgccgcagcaaagctggccccactcccctcccatctccttaaccccaaccttcaggtacgaccaaaaaaagatctcgctttctttcttgtctcacaagccaaaagacccgtctcgcgaacatcgcgccgtccacgtggacagcctcggacaaggtgcaccgctcgatcgtgtccaaggtgtgaacgcgttcgccgcgactgaacaaggaaggaaatgaaacgcagttattacgcagtacgaaactgtcatttgtctgtcttgctgatctccccctgtaaaacatttaattgttaatcgtatccctacccaacattccagagtcaaatctccggggtttaaaagcaaatcggtcaacctatgaggggttaaagtggaaaagctccacggcccacgcagacaaaattctctctctcctctcctgtggttttgtttataattaggcttttctccgggaggccaggaggcacgtcgccctcgtccgccgccgcgtgttcgcaagcgagcaaaccgctcctcctccgccgccgcctccgcgcctcgcctcgtctcctcctcctcctcctccctgctccgtcccacaccacccgtagtaggggccgtggccggatcgcaatgtcggcgtcggggggattgagcttggtgcgccgcgccgttgaggccgcgcgccgcacgccgcggtggcagaagaggctcctcgtcctcaccgccgggtacgtttccgcctctccccctcatgctccgcgcgcccctgatatacacctcacccccgttgatcgatctagttatacgcgtgcgcaaccgtgtccttgcgctggatatggtgcgttgggccgccgtacgtgcgcgcgtccgcgctttggtttgattgccgaactttgataccccgtgtaaatgttttcgtcgcgattttgcgctagttctatcaaggcggctgtataaacatgagagtagttaaagcctttcctccaaaacatgagattagtttaatcggggatgttcttttcaatggattttttttttcggtttaagaattaagtcggtggtgatctgtcaacctgcaacttttcttttgcccctgaagtccgtagcccgacgcttactttacacctagcccaacacttaaacaccgcactacgttgtttattaagatttgggtgaaaaagttgttcagaagttcgatcatttattggtaaaattactcatagatctaacaaatctggttcacgtttatattcataattggttatggtgaaatctaaaaaatattatctatgtcatcttgacacttgaaaaagaatgtgattgtgatgtgaaagtgaaacaacaaattatttgaagtgtgctggaaccatggtgcctacttggccaatcgtctaaatcggattgtattattcttgttcattgacattgtaatattgaaatcaccgcctcacgattctagggagacgagtatgtattgtgtcaccaaaagtccaaaacatgtcctacttgtttatttaacgtcataaataataaataataatatattcgtccaataaaaagtccaatcctgaagatgtatttagacacgcacgttgtcctggtacatcttcagatatattggggttttgtgggacagaggagtgggcatttaagcagattgtattctcacccttttgcttaagagaatgtgctatagctattaatccatgatgctagacatgtt

SEQ ID NO: 47005 - DNA, 1431 bp, Oryza sativa
  unsure (1)..(1431): unsure at all n locations
gggaaaaaaaaggggggggccccggggcccccccccccgggggncccggagcaacccggccgagctcgtaccggccttgcagtacctttgaatagccgtcgccggcgccgttggccgcggcgactttgtcgtcgccggccggtggcatctctagcctcgtgaagtggagaggaaaatacgtagctactccctccatccctaaatataagtgattttagttggatgtgatgtatcctagtactatgaatctggagaggatcatgtctagattggtagtactaggatatatcccatccacctaaaatcctttatattttgagcagaaggagtacaacactaatagactagttcattataaaagtttaagtagataggtaaagatgggtagtttacttactactccctccgtttcatattataatactttctaacattacccacattaatatagatgttaatgaatctagacacacatatgtgggtaatactaaaaagtcttataatatgaaacggatgaaatactatgttccaacattccccttgcaaggatactcaataacctctagctctaataccatattaacatatttataagttatatgtacttattagtccaattcaaaggcttaatacagatccgaaaatgcaggttatgtactgatatatattccctccgtactcgtaaaggaagtcgcttaggacaatgtttaagtcaaatcttgagaatataaatcatgaataactctcgagttgttgagtttgaaaatgtaaaaattatatgaatagatttgtctcgaaaaatattttcataaaagtatacatatatcactttttcaataaatatttttatagaaataagaagtcaaagttatgttttggagaccgtgtcgctgtccaaaatgacttactttacgagtacggagggagtattccgaaaacattaattaagcattaatgtataatcaagaagggtaatgatgctacacgatggtgcaaaaatatattagtttttttcttgtacctttcaagcaatgcttaactatttgatcaaatagttaagcattgcttgtctttgccttagttataagtataagccaattttgatttcagagttactttaaagttttcttcgtcgatttagtcactcagttgtggttttagaaatgctaaaaatgcaaaaggtttacctaaaatgatcatccgtggtaatgatatatttgttgttcctttaaaaaaaacatctttgttgttgaaactttctttctatataattagtatccactaagaaacattaactcatataaagcaacactttctaaccattacattgcaatattagagcaaagatagcagtcgttggataagaagatacataaccactagaataaccatgtcgttattttttaagagaacatgttgttattgtttttt

SEQ ID NO: 47006 - DNA, 728 bp, Oryza sativa
  unsure (1)..(728): unsure at all n locations
atcgcccatgtctcgtttcgcgaaagaaccgagtatcnccgcctcggattcgacgggaacgaaggtgccatctccggcgcgactgagaaagtcctagacgctgtcgcaatccaatgagcnccatttccattcaatatgcgttctgtaatcacctctcaatgccgtcttttaacacaaccaagaacacctcatttggtgcacccaatctccaggaacgcgaccgcgtcaactcggaacaccgtagcgctctggacgccgcagcttcacctttgcctgtcgcccggcttcaacagttcgtaacaagctgagcctcttcgccacgagcttcatcaacaccttcagatcaagaatcccgaagtaatcgacgcgaggtggaccacgatgggagatcctcttcttcttccccaattccggccgccgacgccattcctttctttctccttctctggtcagcttcggcgcaatctttttcgcctagagctaccttgtgctgatctaaaccgaagcacgtaccctttctatgcagtacaagcccgggggtacaccgtagcagccgcgccgtcgccgaaccagtacaccatcgccaagacttcgccgagccgcgttcgcttcttggtgagtccctagagtccttaccatacgcatgcacgattagatcgagcctcaaaacccacatgcatgtgcaagccgagcttagccactgcctctaacaccctaacagccgctat

SEQ ID NO: 47007 - DNA, 790 bp, Oryza sativa
  unsure (1)..(790): unsure at all n locations
acgccaanataagagcatctgactacactatcggccgaattcgagctcggtaccctacagtatcctgatactttggtagcacctgagtttagaagatcgggtaactggtttaatggtggcggaagaaaaggccgaggccaaggaagaggaaggggatggagtggtcgttcttatcgacctgactctgatatggctgcgtatgatgggggcgacgatgaggagatgatggatacagccactagcccttcaaaacaagtggctaaacactatgctccctctacatccgtaaaaaagagattggctctggaacaggtgacgtcaccaaatctgaagagcaagcaggccctactactggagaatacacctgtgcaagatgatggaaatataaatactgaagctctcccaaaggaagttgatgagtcaaacagtaaggaagaggacagttcaacatcactagacagtaagcgtcagaagaaggtggatgaaggcagcaatacagatgacttggcaacatcggcgggctccctcgaggagtaccgccgggcctaatgtctatcctagcttggaactgtcggggcattgggcgagcccggacagttcaagatttagtctgcatggtgcagactcactggcccgaaaatagtcttcctagcggagacgaggcaaaatcaaaacgttgtgagaaacctaacatggagattaggtctgcgacgcttctttgtagtgaatggaaggggggaaggaggtggcattgcccttgttttggatgaaagcattaaagttgacctaa

SEQ ID NO: 47008 - DNA, 1296 bp, Oryza sativa
  unsure (1)..(1296): unsure at all n locations
ctttcataatacattccaattatcctttccttttgtatctggtacgtatttgaattaatattttaattactcttatttttttcatatgataacataaatttcataattgtttagtgccctgtgttgttgaacaatatttgaagccgttttcattttatatgctattaaaaacccttttttcattgttggttacacttcttattatgctgcattttcagctgatctttttagcattagcataatattgttattcctatgtccagcaactttataaaggtttttaatactctgtattgttctgtattgtacaggaaacaagaaaggtgggagctttcttcattgaaccactgcacaaataattcctttgacggtacgccattaaaatcctcttttccccttgatcatatctgccactgtagactgactaagttgttttgcattaattttagtagcggttgctgcaaccttgaaattatcttaacttaatagtgagacaagaaaaggaagcgagttgaattgcataagtttttcaataatttgaactgtcaatttgaaagtgaactgtcaatttgaaagttcaacacattgtgcatattcggttgtcttgacaacaatattgatgttatatttattggagtctgaactcctatctgatgttatatttattggagtctcggctcctatctttattattttattcttttatttgattgaatagaataaaatgaagggtgtaatattcaaactatttctttttttatacttcaaactgtagaagatttgccggatatattagaacgagaaaagaagtagtaaaccagagccttacatatgtctgttaaaaggaaaaaaacatctagggaagatatgaggattgatttacataaaaaaagagagcgattgattgaaagatcatgaaacagacagatccttgactattaggctaattttttccttcactagaaaagcgacttagaatccattcttcaacaattgttggaaaattctattgtgtaccagccatatgttccaccacatcatcaacaaaggtatggaattacagagctcactccaccaatctgtgatggtttgcatggcttgctgttctggggcttggaagttcatccaattgcacactttatcctaactatttctacatttatatcgtaaactatatctttagaaatgtgctatttgacttaacatgtcaatgtaggccatgtgatatttcatttanngttgcttgcacttgcagcagccgacccaactttcactatgagtactgtattttttaag

SEQ ID NO: 47009 - DNA, 1537 bp, Oryza sativa
  unsure (1)..(1537): unsure at all n locations
ggcgcnaggtaagatctacgactaaatatcngccgaattcgagctcggtacccacttattttattggtaacaataataagcacacatatttattgtgttgtatgcatttttttctacaacattgatacagttcgatctaaaagtttaagtagataggtaaagatgagcagtttacttatattccaacaacattccccttgcgcggattaatcaataacctctatctctgataccatattaacatattaacagcaatatcagttgggacatatttgcaaatgaaaaataatttattaataaaaatattacgtgtttttagcgatctaaaaacaaaggctaaaaaataaacttcgatgaaaaacctctaaatcaacttcaaatttaaagttgaaaatttaaatttttattaataagtataagcataaaaaaaaagatgaggttacttatcatttcaattcaaaagcttaataccgatccgaaaatacaggttatgtactgatatatattccgacaaacagtaattaagcattgctgccctataatcaagaagggtaatgatgctacacgatggtgcaaaaatatattactagtgttttttttttcttggtacctttcaagcaatacttattaataactacttgagcttgcttgtctttgccttagttataagtagcagccaattttgatttcagaagttactttaaagctgttttggtcgatttagtcactcaattgtgggttttgaaatgctaaaaatgcaaaaaggttacctaaaatgatcatccgttgcaatgatatctttgtttctatataattgatatccactaaggaacattaactcatataaagcaaacactttctaaccattagtttccaatattagagtaaagatagcagtcgttggataagaagatacatagccactagaatacccatgtcgttattttttaagagaacatgttgttattgtttttcattcattcctaagaattttcacatatcagctctaaatatataaaaaatatttatccacaattaatatttcagcttgattttttcttctcaaattctcacctcaagtgtaggcttttatctagttaaacaaaaatacctctcaaacatatataataataatgtgcacgaaaatggatttgtgtgtgtgtttcatttttccctttcggataaataattgaatagagaaacaaggtgctcaggccctggtttttctctggattttcttgtgaaagtcatgtgatgtcccgttggattggttgatttgatatgcaccagctggtacattgagatttcaaggcatggaagccacaacttgcaactgctgctaccctgcactaaattatcagtttgcctttttaatcataaaattaggaaattgattttgttgccatatctatagattgattggacttcttctaacgtgatatagaaatactttgtaataatggactgcggttttgttatctcagatgcagcaactagtttattcattatgtaaaaaaaaatcattttctgaatttca

SEQ ID NO: 47010 - DNA, 715 bp, Oryza sativa
tattatcattttaaacgaaaaccaaggttgaaccccgcctttgggttttttcaaaaaatttcgcgggaaagtaaccaaatcgcgccatttggcctcgctttttcaaaatgtcccccgggttgttcaattattcttcaaggcaaggaagccaccccccccagggttgtcctaacctacccgaaaaaaccatttccccattttaatccaaaggtaccaaaagttaagttgcccccaattggaattttggatagccatagttcaaccatataataaaaacctttgcaataatgaggtcctgctaatgttaaatcgcattcactaaacaagtctattcattctgcaaaaaattaactatatccataatgccatcattttaaacttttaatctgtatagcctagccttctttgtgatcaatcatcccgcgtctactcataatacatattttaaataataatgtctactatcaacaatattgggtctttcaaatctgaagcgtgtacccatccattattaaagtaaagttttatactctattaatcgccttaagacaaccagaatcatcgcacccaacttggttgtcaacttcttatgaacttatacagattgatcaggtccattccagtgttctaatgccctatgtatggtcatttgaagtatatactctcttattcttagtttattcagcgcatcatttagcgtgtcctgcccggcacc

SEQ ID NO: 47011 - DNA, 1170 bp, Oryza sativa
  unsure (1)..(1170): unsure at all n locations
aaaaactatcaaaagattggatgttttcattttaaagtgctngtaaatgaactcaatcatttttgttaaaagaaatatgtgttgctctgataactcaaacagatacacaaaacctaantattccctcgaccttgcattgttttagtttgacaacttctattttctattttatagataaatttataagtactaaaaattacaccgtgctaacgtagtatgttacatggtaaatataaacatatgaattccatttatcataatcgaacaatttaaaatatatcagtggtcaaagtaaagcaagcaccagtcaagattataaaatattaagaaattgatggggtattatataatggccccttaatttgaagtgctatttgttagtaagataatggtttttcactttgacatccctctttcaaataaacaagtcctttgtcgatatttgttacccaaattaccaactttaaattattatatttctgagtaccataaatttatcttacataagcttatgaataaatattagtttatttattctgactagctaatgggtttggaaaaatatgccccacccatcaggtaagattcaattctagccatccattcttttcatctcatttaatcctaggcatcctctccttttcatttcccaactccacctcccataaccattttgccaaacagggtctaagtgttgcacattcagtccttcatgtaattaacatgctgcaaaatttcgtatatgtatttacgttattttgattcataaatgttttttttccttgtagaaagcagggataatatattgggatgatatatatatggaataggggtcacaacaaatgtttacgagccaaaggtgaagcatcattgggttcctagtggatcatggatacaaattgaaaatggcacaggatgtggagatgtggttagtgctagctcttgggtctagccaaacttcagcgatgataactttgctaggtttcatatttttgtcacgcccggaaattcactggtaatttccgaacttatttgtgcataaaatcctcgtccaggaatcagccgaggtacacaaactgacaatttaatatacaaatccatcataataataacgttacacacttataatatcccaaggtatcaaggaataaagtaatcaatgcaaacagg

SEQ ID NO: 47012 - DNA, 719 bp, Oryza sativa
  unsure (1)..(719): unsure at all n locations
aacacactaaacactttcattcaagcacatgatatctcaacatagggaattctaagttctaagttttagttaagtttatacaacttataacttagataagtatggccgattggccgaatagttaggttcgcggaagcatcttctacccaaaagatctttcctgcaaccgactagggtagaccctagtaagaaccatcctggaagaaagaaacatccccatcgaaatagagtgatctcacctgcaaccaattctaaacatgcaacaatacaacaatacacgcaagagtcagtacataaattgtactggcaagcaccaagcaagcctaatactctacatgcatggcgtattcaaagtaaagcttacatgggataattttagcataaagcaaatttagtttgcaaagaacatttcaaattcagatttattttcaattaaatttcagcaagcatacacttagcaaatgggcatcaaaatagatgttaaacacatataacatagctccttattgccttccatggcagcaaggatataatccataaatcacatcacattttgaagttcaaattcagctttagaagaaaaaaacacatgtctatactcatgacatattcacacgccgctcatgacagcgagcacggctaatcgattaggtttaactctgcagagtacgtacactttacccacatgatgcngaattataatcatgcaaaaagcatgc

SEQ ID NO: 47013 - DNA, 1481 bp, Oryza sativa
atggggctcattggattgcgacagcgtcgaggacttctctcgccggcgccggagatggcacctccgttcccgtcgaatccgaggcggggttcctcggttcttccgcgaaacgagacaagggcgagagagagaaggttggtcggccgatcggcttatatgcggtcgccggtggaggaggagaggaggagctcacacgcgtggcgcgcgggttctgagccgtgggcccgaatgtgaggctgacaatgggatcccacattgcagccctggcccacatggcagcgactagtgatagataaggagaggagattatataatattgatctgatactggtttctcccattgatttaagaataaaatatctatgtttgacaaggtgaagtactggccaacaccataaaaccaccactaatgacgaaaagctttggaaaattaagtgcatgacaggcaaacttagacgctaattaacctgtgaatttgccagtaaatattaaaaattttcgcacaaactacatcagttccattttatttttctattttgtctgcataagtataattcgtagttgacgttcaggtcggatatataagaatatttttgttttcttaatacgatatatttttatataatagaactgtaataatttattgctacggttattacatatgatttacaaaacatagtaaataatatgcaatattatttaaaaatagatttttattataagtagggaggtctgatgaataatttggttatgctttactgattaagactctagtatcatgaaattcagaaaatgattttttttttacataatgaataaactagttgctgcatctgagataacaaaaccgcagtcaattattacaatgtatttctatatcactttagaagaagtccagtcaatctatagatattgcaacaaaatcaatttcctaattttatgattaaaaaggcaaactaataatttagtgcaggatagcagcagttgcaagttgtggcttccatgccttcaaatctcaatggaccagctggtgtatatcaaatcaaccaatccaacgggacatcacatgactttcacaagaaaaaccagaaaaaccagggcctgagcaccttgtttctctattcaattttttatccaaaagggaaaaatgaaacacacacacaaatccagtttcctgcacattattatcatatatgtttgagaggtatttttgtttaactacataaaagcccacacactttgcggtgagattttgagaagaaaatcaagctaaaatatattaattgtggataaatatttttaatatatttagagctgatatgtgaaaattcttaggaatgaattgaacaaaaaacaataacaacatgttctcttaaaaaataacgacatggttattctagtggttatgtatcttcttatccaacgactgctatctttgctctaatattgcaatgtaatggttagaaagtgttgctttatat

SEQ ID NO: 47014 - DNA, 5314 bp, Oryza sativa
tatttttgttctaaaataaattttattcttaattatcaggattcacatttgcattgagagaaaagacgaaagtatccctcattaataagagaacgtggttgtatttcggtagatggatagataggaagtatgaaagggaactcttctatttacagagagatcaaataaggaaatatgagcatatttatatacctctaaaatttcagcttgatccttttcatgtccctgccgttacatttttctatcatttcactgttaagtttggtggctcatgtctttaatgcccttgatgatttaggtttggaaataagtttgaaaaataatgaaatttttgtttgagtgtatagtatatgcattttatgtaactaatgagactaaataattagtgcggaaaattttgacataaattttaaaaataaaacaaatgtaataaattaaaatttttattttactagaaaagatgtccgtgcgttgtaacgagtgaataatattttaatcttattattattatacaatttagctatggtgaaattcactgtaggaatttgcttggatatttttaagataatcatgagctgcagttaggagtccgattttcatctcaaactagtatgcaagtttttctaaaaagatttcttatacgacttctttcgtattttcaaaagcaaacgaacttaaaattcgacacaaacaccaatatgtatttccaaaagagaacgaacttaaaaccaactcaaacacggatgacgtaccaaaatactggcaaaaatatttttaatttttataatagtagagaaatctaataggacaatagatttcttttgattgggagcattcataaaaaatatcgtgagcatttatagtcctagctttgtatggatgctcctcatttttatgacttttgaacaaataaaacaaatacatatgttttattttattatctaaaaataaattttatcatatactccctccgtccctaaatatatgggattttgcttggatatgacgtatcatagtacaatgaatatagacataaagctgtctagattcgttgtactgtaatacgtcatatccagccaaaattccttatattttgggacggggggagtataatatatcgcacaacaaacaataataataatagtctcatgtgataaacttttacattttcaataatgtaattcataaatttttatattcattcaaaggataaaatggtcatttttgtagaaattagacggtcatctgacgggaggagcatagaatggatcaaaatcaaattttagactatataatgaagtaagcaaaattcagaggcgtagaagggattagctaaaattttaggggtatacaagggattttctctatatattttatgaatatttagtactactatttattaaacggtttttgccgcttaatttgattacctcgtctaatccaatgatgcttcacgctttcgtgtgattggaatttgggaattccctcatttgtttttgcgttggattaggacaggaggggtcttttccttcttttttttttcctttgggtgacaattgttggagatcttttgggggggttggtgacgcgatcgattgcgtggttttggtcggccgtacgaatgttgcagccatgaatttgattgcgtcgatgttggcctcctccaaagatcataggatgcacatgttgagatgggctccagatccagctctcaatcaaaaatttgcagctttatcaaaaagagaatgaattagcgggttagagtgatcaaaagaatgaaacaaagaggtgaaacaaagcacgcgagtaagatttagaagctaaagccctatgaacagacctggagtaataatgacgggtctgattgaatttcatgaataagtttgctctgtccgtagatgtcatgtcgtcatgttaatttgaactttggatgattgaaagcatgaatgcccgaagcacgaatgatcacaaaactaggcgaagtgatcggtcggccggatgaaccggtttgtgtggttccaaatatgctggaaggtaagacagctacttgatgcagcttctttactttaatttcagagccttaattaattagcggagtagtcacggaatcacgtggctgtgcagctgctaatgaacgtcatggagtactgctaattcggtacgaacaaaatagaggaaaaaaataggcaaggaaaggaatatatgaacgtcactcatgactcgtgtattgcatctgcatcataactctatatttcttcgtctctgtgaatagtgaactccgtagctagattgaaacgtactgttaacgaaacaaatgcgcatcttgtcgttattttacttctaatgtgcttgggaggtacaactgaatatactatgcgaataattagacagcagatgctgtgcgatatgatatgccaatatatgtatgtctgctaaattactccctcgctccgattacaaagaagaaccagggtaactttttgatttcagagtagaaacagctcctcatgggtttcctgaaatccgaccgaaaaccgataaaagccgataactttcagtcaatactatacgaaaatcggttaataccgaccggttttcacaaacggagacatagtagtttcacgaaaaccaatcggtttttacagaattccattggttttgtgaaccccgcaaagaacacgttgtttttggcattaaggtacaaactttgattgataacttttattaaaaagatatttcaactaaaactagagtattataaaaaaaaacttttagggcgacccaaacctagagatgaaaacgatcgatcgataatagtctcttctttttatttttacaaaaatagttgaaatcttttatatttatgaatttaactatttaatgtaaacttcaatgtgatgctaatagatagtagaaaaactaatatttggaaactgtacctgctgataaagatattattattatactccctcggtttcatattataagtcgctttaacttttttctagtcaaaatactttaagtttgatcaaacctatagaaaaaattagcaacatctattacaccaaactagtttttattaaaactaaaatttaatatattttaatagatctttcgtttcatgttaaaaatattgctatatttttctgtaaacttagggtgtgttcggaatccccctttcccaactcaccattctctttttccgcacgcacgtttttcaaactgctaaacggtgttttttttccaaaaggtttctatacgaaagttgcttaaagactcatattgattgatttttgaaaaaaaaaagctaatacttaattaatcacgtgttaatggaccgctccgttttctgtgcggagagtttagttccaaactccctagccgcgaacacagccctagtcaaacttcaatttgaccatgaaaaagtcaaaacgtttgaaacggagggagtattaattttgtagaagtggataatatggttggaaaattttcttactgtttttaccggtacccgggccaaacctactgcttctgtgcttcggctgtgtttgtttgggtgatagggagtaagaatgcacatcgttttccgcgcgcacgcttctcaaactactaaacggtgtgttttttgtaaaaattttctatatgaaagttgctttaaaaaatcatattaatccatttttaaaatttaaaatagttaatactcaattaatcatgagttaatggctcacatctttttgtgtatcttccaatctcctcaatccccttctcctcaaacacacccttcaagtatcagacagtgagaactgggaagacttcaagtatcagacagtgagaactgggaagactgaagagatcagtggattatacaaattgtcaaagagcgagggcacgtggagtgcacggcgcggcgccgaaatatataattctgaaggtcattcggggtgatcgataggtgggaaacgagaaatgtgtgtgcaagcgcaagcgtgcacgtctaacgctcacctacagattcttccgtcgtgagagagatgcgtatatcgatcattgtccacttgaccacataattatgtggtgtttaggttactagtactagatgatacagacgtgcatgcagcatatagcgatcatcacgttaattcgcctgttcattactgcttgtttgttggatatagagtaatatgtacaggaactctatatcacaatatattaattaacttaatttgtcgttgatcgaaaagagtagtcgtatactcgtacttgctaccgcacccagaaatggtcacttggaccacgttctagcgtggcatatgctcgattgcccaatgtggggatcccaaagccacatgcatagtagtactgtgctgagtcagcgtgatgcgacaacactgtaacactccaagtacttcgtgtgaaaggaatgcaccattataaaatactagcgtttgtttagtttacgttaaaattgaaagtttagttaaaactagaataatgtgacggaaaaaagttgaaaattcatgtgtagaaaagttttggtgtgatagaaaagttgaaagttttaagaaaaattttggaactaaactcggcctaacagttaagtttactaagagcaagtagtttaataatatagcactctaaattatctatagttaatttaatagctaatttatacaatagttatctataaatatatattataaaattaatacctgattccacctatcatatacacacaggtatcttggaatccatactgcagctgtctataagtctatagtccgctgcttttctctttattttttgtcttctcgaaatgtgtttatagctagcttataatatacaattgtacctactcctgatcactgtagctcatatagctcatagaatggcacacattaatctacaattaacaataatgccgttctccataacaaaacaaagagagaggatattaagttaatttgcatcgatctagaaccacatgaatttcacgtgaggtggtactttaatcgccggatgaatatacgtcaagacaaattcgatatgtatgttgcaaacaactgggagcgattatttgttcttccccatacaactactagtgcatgattgtggggcttcttgtcctgttccctgcttctggccccaacaacgtttctttcttctagaagggagtcttgtactgttgctccctttgtcacgtcattctcgaaaggtggcttatcataaagttcacgacatacttaaatacacgtgttttgctatggataaaaatgaattatacatatgcacattgtttagagcaagttggttgtaa

SEQ ID NO: 47015 - DNA, 2084 bp, Oryza sativa
taagacattattagttaaaccattcactattttatttcattagaaaactattttttcgccccttgacaaaattgaaaaagctatacatactaacttttttttttactaaattcttactaacaataatgtgtcatgctataagtgtatctaattttttttatgatttttatctatataaatcaaacggttgagatgattattagtaaaatttagtaaggaaattttaatacgtgtagccgtgctcgataaaaaaatgtaaccactcttaacaccccgccccccggccctgcccgcgcgcgcatttaaacacaataatcctttcttacacacatgtaaagggttcaagtacgttgatctttttctagattaggcgtgaaataaattcacaaagtttgaaatatataaaattatcaaactagatttaaaaataaaagcatctgcattaacagaattacataaaaataaaccttgcattacataccattgcaatgtcaaataaccttagcaatttatattatttagataattaattattataaaggtctagagggctaaacaattctagcaaatttcttaatgttgtttattttgttttcatattgatgtgataagattttgaggtttaacaaaatgtcttatcaaaaaatgtttttcaatgcatggaaattaaaaagagactacttcctctatcctaaaaaacttcattgattttacctatgcatctgaacaattacttggccaaattcattggcagaaataataaaggtgggtttttggaccaaagttgcatcttgataagtacttggccaaatttggggttagaaataaagtcattttcttggacggagatatataagaatgtctgcctataatttgtatgtgctaatttcaagttaaaaagatacatggaggaattttcaactagtgatgcatctacgatctagtatatgggtggtccaacccaatttttttttctaatcacagtaaatctaactatcctaatatatacaacgcatgtataaatgatagaagagtaaattccctgtgtacccctgaaaactcactcgatccctttcatgcctctgaaatttacccgatcccttctatacccctaaaatttcaacttgatccctttcatgcccctaccggtacatttcccttcgtttcactattacgtttggttggaaatttctattttgcccttaatgctttaggtttgaatataagcttgaaaaacgattggaatttttgtttgagtgtatgggatgtgcattttatgaaactaatgagactaaataactagtgcagaaaattttgacataaattttgaaaaaaaacaagtggtataaattaaaatttttatttgaaattttagtagacaacggattttttatagtgagcattagtagtcctatcttttagaatgcttttcttttttatgacttttttaaaaaataaatacatattttttattttattatctaaaaataaattttgtgataaataatacatcacacaacaaccccataactataatagtctcatgcgacaaactttcatatttttagtaatttaattaataaatttccatgtttatccaaagggtaaaatagtcatctttatagtaattagacggtcaactgaccgcaggggtatggaagggatcaaattcaaattttggggatatacaaggaagcaaccaaaattcaagggcatagagtggattagcttaaaattcaggtatatacaacggtttttctcataatgaagaatggaccataagtgtaccatgatattttaataaagcatcttaaaacatataaaattagtaatatagctataaaagtttgaataagatcaccatattacttttaattcttatcggatgtacgtcttctaatggccatgaaagtgctcattatatcttcttcatccccatcttgttcttgagtgtgctcgtctaccataaccggggaagaaagcaatttagaagcattcttctttgctacatgttttccaaaaagagatgcaatcaacaatctactatataatactacaatttaatatcacaatgcaaccagagt

SEQ ID NO: 47016 - DNA, 1860 bp, Oryza sativa
ccctaacatatcatatatgttgatacatagaccccatgagatgcccatttatataccatccagtattaaacacgttttcttttgctgccaaatttaccaacgagaaaaatatacaatacctaccgggctgcagcaaatcaggacaacaacctcttgaagaaccgcggcagtagggcaagaagcggcagcgctgtcgggcccggtcttgcggcgtgaccgtgcgagggaggcctgctgggtggggaatggtagggctagggatttggtcggggagctgtggacgacaggacacgggaagaggggaggaatgggggagatgagagcgagagagagaagggcacctcgtcggcggcgcgcgtgcttgaggtgcagaggtcggcaacggccatgccgtggcagcagcgatgggaatgggggcaagggaagggaaggtggggggattggatggttcgagcgactcggggagggaagtggagcggagcctcccgggagataagatttgcgcggaggcatgcgtggcctacgcattggcaccgctggcttccatctgggccgtcggcttcccagccgacggagttggtgtcggggctcggggcatggtttttgcgttttgagggaaatgcgtttcatatgtttccgacgaggagtattctagaataatacctactacatctagaatcatgttcattatttattagtgttgtttttttatttctttcgatgaaagtaggtaaggtgtctattttgattggtaataaagaacagagtttacataaatattacatatgctctagcagataaatagttaaaacataacgattttttaccataacggtggagggagccaaactagaaattaagaaattgggagtaaacattaaccaaaagtgcatgtatgattgttatgtaagatttattgttatatatttcaataaacattattgtaacatgagtcatgtatcttctcgtttgcagaaataattgcatgggtgaagtaaagggggcgggtatacacagtgcttggatgatcataaagttgatcagggactaaccaatatccttccccaaatctacttccatgataccacgtcatttctcatctattgaataccagagataaagttctacacttttttatttggattcgggcctcctaacagcatcaattttaaacggacatgccgctgaactagacggactcttagggtccataagtacttgttaaaatgtttatggagtctactttcaaatagttttggtcccatgttaaaattcttccttggatgtcaaaaatctgcaaaacaagccacgtgcatcatccaatttgagtttgatttgggccttagaccttgtaattatgtcatgggataagtccaaggactggacaccctaggacatccctaatcatacttattcaatagccatcaaagtttagagtggtttttctatcgtcatgcagtttcaacgctagtcagtttgtagaattctaacttcaagttcttaatcattcatctacaattgagttacaatcgactttgttcttgcttgtgtttttcgattcgcatatagagattatccttctcggcgaagtcaatcaggttttaaactattgataaccaaaggagatatagaattatgattggagggtttgaaatcatgttgattggaagctggatcttgtatgtcaagtttccgcaaaaatcgataattatcttcacttgatggaagatcgaacactcccttgtcatcaatcgatcaagatttttgtcatcatcgaaactttcgatgttacataaggcaaacgctaggatgtaatttatttgttgcttatgtagcaatagatttccttatatatatgta

SEQ ID NO: 47017 - DNA, 1623 bp, Oryza sativa
caggctgtatggccgcgtggctggacgggattgagacttccccatacttctcatatcctcaggcccatatcaccgacaattattctcacccctagttagctaatgtaactagttagttcaggtggtggtttgggcttgtctcaatgtggtgtagtgttgagcagtgattggttaatattgattaaatactacaactgtttttactgctttcaactactgcttttaaatgcaagcattatgcaaatgaaccgctagcctcctttggttatatcttgcatcatacctcctcttccggtatgacttgttgagtacagtgggaagtacttagtcttgctctctcttccccacaccagagttgaagttcttcttagttggagatgtctcgaagaaattggtttcgtcgctgccgtcaaggatgcatgtggagtcaagtcttcaggcttagctggctttcatcttttccgctgcatttgtaatcttttatatttttgtaaaacgtggatctgtatttcaacaattgtcgtttgtataccctggctggttctggacatgggtttaatgcacattcagcttagaaattctggttcgtgaatttctgggcgtgacagttgtccatcattcttgacaagatgtagtgtacaaggcattctttagttgagcctcgctcactttgcatcacagaagtataacctagacataactaattcagtatagaagcaaaatgtgcagcagcaacaataagggtgaaaactagaaagaaggatttatgatgcttcttagtttattcagtcacgaaagagtgactttaaataaatgtacacttcttccaaagtgaaaattatgagatgtcttacttatggaatgctcctacacactaaggttgtgtaatgccccgagtttcgaattagtatatttcggggaatattagaacaaatgcgcaaaagttcaatttttttaaaccgttgttcgaataggcgatcaggaaccatggatgtatagagctcgtcaagtagtgcaaaatatactaagtcccggggattgaaacaatgtgggacgttggatctcctttttgtctctttatgtaactaaaagaaaaaagaaacaacggttttgctaaaaaactggcgacagttttttctttagaaaactttcgattttctagccattagatgcactccaggattcgtgcaacatatacggccatatgggtagaataaaaaaaatctcgtgtgggctagacaagcattgaacgagctaggatctatccatcaaacttgccacacgttacgctgaggtacgggcactttctgattattaatagcatttgtagttatatatcacttacaccctaggtacataacacttatactctagttacatactctagttagttacatagcacttacaccaactagagtagttacagggtaattacatggtataaaattaggatttgtaatttttttcagggacatatatatgcatattacttttgaattgaaagttattatcaatttgggcactaagactcgtggtttgtactagtgcagactgttttcctgtaatcgttgatgacaaatcctatggttgaaaaatttgacagttctggacctaaaaaactgt

SEQ ID NO: 47018 - DNA, 1216 bp, Oryza sativa
cggatggatggtagggattagggacgatgatttggcctgaagcattgctaggctcaactcatcctttttatattagtatagatatagatgtacaattcttccaaagttaaaattatgacatgtcttacttatggaatgctcctacacgcggaggttgttcttgctgacactctcgtttctatgagaagttttttctaacatagcaagtcgatagtttactgccaataaaatggataataagcctgatgtttcaacaaaactagagaaactcacgcatgatatacccaaaggaaaccggttcttgacacactacaaatctgtggtagttcttttctatcttaaaaacgaatcaaggctgtgtttggaatcagctgttcccaacatgcaaagtgcgcacggaaaacggagcggtccattaaagcttgattagttaagtattagcttttttttcaaaaaaatagattaatatgattttttaagcaacttttgtagagaaactttttacaaaaaaacacaccgtttagcagtttgaaaagcgtgcgcgcggaatacgatggagatgggttgggaaccctggattccgaacacagcccaagtctatccaaaaagtttagacaagaaaacacgtaacaagttggtttgcaagaatacgaattacgtcaatcctgcactataggtagagcaaaatggtgatttctcgtaaatctctcgaatggtgatttaagaatttagtgcaaacctaactcttgctataaaatcaaatgttcggtaccgtatcaacggaacaataaaaagcacttggcgtaccataattttgtcattcttgttgaaattttgtaacataaaatgcatgaggccacacgaccttaatgttcaacgtgtcatgcattagtgaaataatagcttacaaaacataacaaatatagctagataacggttgcaatccttaccaaactaacgtataaagtgagcgatgagtcatatcattatctttctagcctgctaaccatcacgtacaccttccgatcccaaaaaatgacaacttctatggatgaacctggacaaggtttagggtttagggatgaatctggacaaatgattgtctaggttcatccctagaagtgggtttctccttatgggacggagggagtatatttgatggacacaaaagttactttcgtgatgaaatcaaaggggatttgttgaggcacctaat

SEQ ID NO: 47019 - DNA, 1077 bp, Oryza sativa
acagaagcataacctagacgtaacttattcaatatagaagcaaaaagtgtagcagcaacagcgagggtggaaactagaaagaaggatttatgatgttctgtttattcagtcacgaaagagtgactttaaaaaaatgtacacatcttccacactatgagatgtcttacttatggaatgctcctacacgttgaggttgttcttgctgacaccctcgtttctatgagaagtttattctaacatagcaagtcgatagtttactgcaaacaaaatggataataaacttgatgtttcaacaaaactagaggaactcacgcatgatgtacccaaagaaaaccggttcttgacacactacaaatatgtggtagttcttttccatctcgaaaacgaatagggctgtgtttggaatcaactgttcccaacatgcaaagtgcgcacagaaaacggagcggttcattagagcttgattagttaagtattagctttttttacaaaaaatggattaatatgatttttttaagcaacttttgtatagaaactttttgcaaaaaaacacaccgtttagcagtttgaaaagcgtgcacgcggaatacgatggagatgggttgggaaccctggattccgaacacagcccaagtctatccaaaatgtttagacaagaaaacacgtaacaagttggtttacaagaatacgaattgcgtcaatcctgcactacaagtagagcaacatgttgatttctcgtaaatctctcgaatggtgatttaagaattcagtgcaaacctaattcttgctagaaaattgaatgttcggtaccgcatcaacggaacaataaaaagcacttggcgtaccataattttgtcattcttgttgaaattttataatataaaatgcatgaggccacacgactttaatgttcaacgtgtcatgcattagtgaaactagaatataccccgcgtgttgctgcggcacttttagttgtcactggagatgtcggcttatttaaaacaatggataaaaattatatgtgcagtatttacttgaaaaatacagtactcatagtgaaagttgggtcggctgctg

SEQ ID NO: 47020 - DNA, 749 bp, Oryza sativa
taaagtactgattgctatatttttatttttatcaagatatttacatcatcattttttggccatgcggtgtctacatactataaggttttaagccaacaaatgagatatattctgattttctctttggcagagtttgtttggaaaattttgccaaatgtttatatggatgcatttcctttgtctttaggtgcacatgtgcacatgtgctgtttgcttgcttttgtccaaaatatgatttggacttactggagtttgaattatcaattatgttaattggccacatacctatccatgtgcatgagtgcatcgctgttcctagcttttctttttcctgagtggatgctgcttctagctaggtgaattgttcacattcacacatcggcccagggcatgtgttggcccaacttgagattaggctttgccacacccctaagcccaaccttcattggacctgtaccttgcttcaaaggcttgaaaagtagcctcatcctgctagaccaagcttatagggaacagatagacacatctacacacacaaactgaccctggtaatccattaattgactccacatctaccttcatggctacaacatctgtctttcctttcatctgcatgtgcattttgtttctcaattagtttacgaagacagacatttttttccacccatcacttgtgtatctgcaatatttgctttcacttttgaaacattgtaatcacgctactttgtttctgccaaatagttaatcat

SEQ ID NO: 47021 - DNA, 709 bp, Oryza sativa
agggaatttattccagagccaatacctaaaatgaaaattatagctctagacatcccaaagcggtataaattagtaggaaaatatgtccgtataatccaatgtatttgtagcaaaatgtatatgattacccagaaaattgtcacatcctgatttttgtttcaggatttctaaattatttaataaattattattagaatttatattaaatgttcattaattacaaagtgaagttaaatgtgggaaataaaatttcctaaatttaaagcatggatggatttaacttttattaaattctccatgattaagtatactctctgaaattttctcggatttttcggagctcaattcctaaatgatacaaagaacagttcagtaattatttgatcattaatgatctaattataattgttaagagcttttcttgtttaaaaatccttaaattataaattgttgtttaaaaggaattattagaaatgatcttaaaagcctaaaagagaatatctaattttaatttgctaaatctcaatataaaattgggctagataaaattttgttaaatacttctcttgaatctttagttcctagatttttctgggatttatttgagccaagaaagtatttttaataaatggaattgcatttcatgaataatttaaattaaaaaaggtttttaaaagtctcttttggctttgggccgaaagccggccca

SEQ ID NO: 47022 - DNA, 670 bp, Oryza sativa
cggagcagattaagctggctgtttttcaccaattgggactcgctatccgatgggtttatattggataatattgccctcctatattagcatcaactgattgccttcaaaacaaaatatgcattggacatatagccgattgctcaaaaccctatcgacatcgcctggtatagccatcgggtggaatacaccatgggcttgataacagaccagctcatagagctgctatccgcatagctcagcaaaggcaggatcaaactgagatgggacgcccacatggtaccaaactttggacctgcactggagctaaacagatcttccaggccagagtgcgtttacgcgtcacaggttgttaacgattataaggggtttatcgagtatttcacttactatctagatgctatagagactagggtctctttctgagagtcttattaagtttattgctaaaccattggatatacataagacaagtggacctgttcgagcacgatatcagctataagtttttgaccccaaaaggtacttgttgcataactcttaagggtacccgagttttccttttttacggcgtgtctaagcgggtccaggggatataacactgcatattctttcatccagcccttcgggactgtttgtaagggccgaactattttaaaaggcctggctttcg

SEQ ID NO: 47023 - DNA, 1401 bp, Oryza sativa
  unsure (1)..(1401): unsure at all n locations
tgcatattagtttcaattgaaagccatcttgttgtccatccttcctgacaagatgtagtgtacaaggcattctttagttgagcctcgctcactttgtatcatagaagcataacctagacgtaactaatttagtatagaagcaaaaagtgtagcagaaacaacgagggtggaaactagaaagaaggatttatgatgtttcttagtttattcagtcatgaaagagtgactttaaaaaaactagtaatcatgcacgtgcaaggcacgtttttcatattacatatggcatcaacgtaatattttgctgtcgcaatatgtatataagacgatttatttcaatgtggtgataaaataaataaaccaagcttcatgttaatccccattcaagctaaaaaatgcaaaaaaaaaaagagagctcattgttgcatacgatcggaatacaatagcgcatgaaatctatgttggtaaaaaaataaatcactgaaacagagaaggaattaaagtttttatatagtcaagtcaaatttgaaagagagtaatgggttttgaaactaataagaatgtattattataaaaatgttgttattccatatatttccaaattgaagttggatcatccattaagatttctttgagttgattatatactacgggccctcagatcgaaaaaaaaactcttctcgaagttgaactccatttaacatacatggaacttccttagtattttgcgaacatcaatttcaaatattcattaataagaaacatacgtagtatttttctgatttttcaagtttacgacttattgtttaactgtcattcatttgttttgaaaaaaaaagcaattttcaattgatatagcacagccgcacaccccttctgagatgagttctgattagcatctcctgataacatggcatctcttctttacaagcatacaaaaggacatacatcagaactatttatgttaacaccaaataaatggcagagaaataactaattttgatttaattagattaagacagtcacaatatccagcttgcgcttgttgccggcgttgttgattgactgcttgctcatgctgaagtagcctatgaagatctgcacccaatgtccctacatcaggagcagactttcttgtgttaagttcatgagagcttgccaggcttgtgttaagttcatggcatctnctgaagtttatgcattcatcatctagctttatctcacattagatggagcaagctggggtcttccgatagcatcataagttggtgacccttcgcaccgtcgctgctatggaaccatgaagaagtgtctgtgtcacctattcatattggaactataattttggtataaagggtttttaaagttttttcccccagaggggaattattttttttttttttt

SEQ ID NO: 47024 - DNA, 682 bp, Oryza sativa
  unsure (1)..(682): unsure at all n locations
ttacactcagatttatgagtgatcagcancaaatatgtatacttatgattctgatgtatcagagatttcttgagagattgctccatcactcttttattatggcaaatatattctcacccttctctggacgnctccaataattgaagaataacatgcaccattgttatacatgtccattaattccctttaattttctccctattatctatgagaatctaccatgatttttggcatcaatgtgatctgtctgaataaggggcccttttaagatcatatgccaccaagccactattgagttcatcaatgaatataaatatttacataattattgcagttttatccaattagagtagataatttgtgccacaacttaactgagctatatacttaagacacctttggacatctacccttaacattgcaaagccccaaggtgacttgacaattccttccaaacaattgactgaataaacatctgaatatcagagacatgaagcaggaaataagagatttaacaagttgttatatcgttattgaattgttgataagtaccttgacaatctgacccctgcaaatatacaatagattcaaaagaattgcagagtgagaatctttctttgcaatagacatttgtgttattgtatatttttattccatgttatagcataagctggcagaaatt

SEQ ID NO: 47025 - DNA, 1582 bp, Oryza sativa
attgatttacataaaaaaacagagcgattgattgaatgatcatgaaacatacagattcttgactattaggctaattttttccttcactagaaaagcgacttagaatccattcttcaacaattgttggaaaattctattgtgcaccagccatatgttccaccacatcatcaacaaaggtatggaattacagagctcactccaccaatctgtgatggtttgcatggcttgctgttctggggcttggaagttcatccaattgcacactttatcctaactatttctacatttatattgtaaactatatctttagaaatgtgctatttgacttaacatgtcaatgtaggccatgtgatatttcattttaggttgtctggcactggcagcagccgacccaactttcactatgagtactgtatttttcaagtaaatactgcacatataatttttatccattgttttaaataagccgacatctccagtgacaactaaaagtgccgcagcaacacgcggggtatattctagtttcactaatgcatgacacgttgaacattaaagtcgtgtggcctcatgcattttatattataaaatttcaacaagaatgacaaaattatggtacgccaagtgctttttattgttccgttgatacggtaccgaacattcaattttatagcaagaattaggtttgcactgaattcttaaatcaccattcgagagatttacaagaaatcaccattttgctctacttgtagtgcaggattgacgtaattcgtattcttgtaaactaacttgttacgtgttttcttgtctaaactttttggatagacttggactgtgttcggaatccagggtacccaacccatctccattatattccacgcgcacgcttttcaaactgctaaacggtgtgtttttttgcaaaaagtttctatacaaaagttgcttaaaaaatcatattaatccattttttgaaaaaaaaaagctaatacttaactaatcaagctctaatggaccgctccgttttccatgcgcactttgcatgttgggaacagctgattccaaacacagccttgattcgttttcgagatagaaaagaactaccacagatttgtagtgtgtcaagaaccggtttcctttgggtacatcatgcgtgagttcctctagttttgttgaaacatcatgtttattatccattttgtttgcagtaaactatcgacttgctatgttagaatgaacttctcatagaatagctagtcccaagaaagggactagctagtgtgctgtcgacagttttttaggtccagaactgtcaaatttttcaaccataggatttgtcatcaacgattacaggaaaacagtctgcactagtacaaaccacgagtcttagtgcccaaattgataataactttcaattcaaaagtaatatgcatatatatgtccctgaaaaaaattacaaatcctaattttataccatgtaattaccctgtaactactctagttggtgtaagtgctttgcacttactagagctttgtactagagtattaggggtttgtacctaaggtgtaagtgatatattacttcaaa

SEQ ID NO: 47026 - DNA, 729 bp, Oryza sativa
tatttgacaacctctgcctcagtacacattgttaaccattcgacaacctctcgctgggagggctataaaataacatgaaatggtgtcagcacagacttttgagacaatgtgaataattgactatcgacatggacagcacacatttgtaagtaacataactctctttagctaatcgaatcaaatattgcatgaaacattgggtacacgcaggatgtcgccaaatacttacacagtacgaagttatctacagactacagcttggctatagcacccctgtacaggggaactgtatcacttgcaaagatgagaatggctattcgtcatcacctgaatggctgattcttgccataacaatcctacatcatacacaaagagtatgttcagcagaggataatccaaacaggcatcaagatctgatgggttatgttcacttttctgatgatatgacagagttcatgacgcctaatacacacaattgataggacaggcgttctcagtgaagatcgtgatttttgtctttctatggctaagagaagcagccgcacttaaacgttcaaagtgccgtagcagggcagatgcaccaaagcatactcttgttaacctgggtgagagagacagtgggtcctatacacccacaatggtttgcaaggcacttataacacatctacatttcggttaggccgtcgaattcaccaggcacaatcagtgtccacaaatttgattgttctt

SEQ ID NO: 47027 - DNA, 728 bp, Oryza sativa
ataaagagaaaagcagcggactatagacttatagacagctgcagtatggattccaagatacctgtgtgtatatgataggtggaatcaggtattaattttataatatatatttatagataactattgtataaattagctattaaattaactatagataatttagagtgctatattattaaactacttgctcttagtaaacttaactgttaggccgagtttagttccaaaatttttcttaaaactttcaacttttctatcacaccaaaacttttctacacatgaattttcaacttttttccgtcacattattctagttttaactaaactttcaattttaacgtaaactaaacaaacgctagtattttataatggtgcattcctttcacacgaagtacttggagtgttacagtgttgtcgcatcacgctgactcagcacagtactactatgcatgtggctttgggatccccacattgggcaatcgagcatatgccacgctagaacgtggtccaagtgaccatttctgggtgcggtagcaagtacgagtatacgactactcttttcgatcaacgacaaattaagttaattaatatattgtgatatagagttcctgtacatattactctatatccaacaaacaagcagtaatgaacaggcgaaataacgtgatgatcgctatatgctgcatgcacgtctgtatcatctagtactagtaacctacaccccacat

SEQ ID NO: 47028 - DNA, 1001 bp, Oryza sativa
  unsure (1)..(1001): unsure at all n locations
cggttgcttttgaaaatacgaaaagaagtggaataaaaattcttttaagaaaaccntgcatactagtttgagataaaaatcggactcctaactgcagctcatgatatctttaaaaatatcaaagcaaatccctcaagtgaatttcaccatagctaaattgtataataataataagattaaaatattattcactcgttacaacgcacggacatcttttctagtaaaataaaaattttaatttattacatttgttttatttttaaaatttatgtcaaaattttccgcactaattatttagtctcattagttacataaaatgcatatactatacactcaaacaaaaatttcattatttttcaaacttatttccaaacctaaatcatcaagggcattaaagacatgagccaccaaacttaacagtgaaatgatagaaaaatgtaacggcagggacatgaaaaggatcaagctgaaattttagaggtatataaatatgctcatatttccttatttgatctctctgtaaatagaagagttccctttcatacttcctatctatccatctaccgaaatacaaccacgttctcttattaatgagggatactttcgtcttttctctcaatgcaaatgtgaatcctgataattaagaataaaatttattttagaacaaaaatagtaataatccattacacctcccgaaatttcgcttgctcggctggatcctctgactctcccagtctccacgcccacagccgcaacaactggttaaaaagatccccgcgacgcgcacgcgacgcgacgaccacccagccacgcgcgacgcgccgcagcagccgcgcccgccatggcgaaccccatcatcccgagcagcagcggcagcgacggggaggaggcgaggaccaagctcgggcggctgaacgcggcggtggagcgttcgtgggtcgggcggcggttcaagctggcggcgcgcgggtcgacgttcaccacggagctccgcgccggga

SEQ ID NO: 47029 - DNA, 724 bp, Oryza sativa
attcacgtcccgtttgcataacgggacaaataatgggtgccaccggccgcaaaatcggttgtgcagcagtaaaaggctcaacccaagcgatacaactccagcttcacaggacaactccatcttgaccccacagaactcagtcttgctgatgacagtgcagtgctgtagacgtcagttcttccgcacaatgttccagtttgatttgatcctcctggctttgtaaacctgaccaatataagagggaaacaaccagatgaaacaccccatatcaggagacttgatcttctttatccttcaaaacatattacgggccggcttcctagagggcccaacacatggcggccaatcccgcaatgtgattttttttttccatttggtatataaactatgccctgatcaaaaattgctcgaaagagttgggacgacatttgagctccaaacacataagccattagccatgaggctccaaatatatttggccaactcacagtgaaaaaaaaaaacaggtcgttgacagtctccttttccttgcaaaaggcacaagtttcattaccattccagtttcgtcttacgagattatcttttattaatattgcattgtgtacggctaactaaatttttttttatctttaatggtagtttagctttcaatgcaatttatatgatgtggccatatacagctgtgttgtcacatcctgattttttttcaggatttataaattat

SEQ ID NO: 47030 - DNA, 729 bp, Oryza sativa
ttagggcgacccaaacctagagatgaaaacgatcgatcgataatagactgttctttttatttttacaaaaatagatgaaatcttttatatatatgaatttaactatttaatgtaaacttcaatgtgatgctaatacgatagtagaaaaactaatatttggaaactgtacctgctgatcaagatattattattatactccctcggtttcatattataagtcggtttaacttttttctagtcaaaatactttaagtttgatcaaacctatagaaaaaattagcaacatctattacaccaaactagtttttattaaaactaaagattaatatattctaatagatctttcgtttcatgttaaaaatattgctataattttgtgtaaacttagggtgtgtgcggaatccccctttaccaactgaccattctcttttttcgcacgcacgtttttcaaactgctaaacggtgttgtttttccaaaaggtttctatacgaaagttgcttaaagactcatattgattgatttttgaaaaaaaaaagctaatacttatataatcacgttgtaatggaccgattcgttttctgtgccgagagattagatacaaacttcctagccgatacacagccctagtttaacttcaatttgaccattgaagagtcaaaacgttcgaatacgggggagtattgatttctagaagtggataatatggctggaaacatattcttactgtt

SEQ ID NO: 47031 - DNA, 731 bp, Oryza sativa
tccctctcgcttcctttattgtcgctgccaagggtgatctcgacagctcctgttgtgacagagccttgaacacctctacgctgtcagtttccaagattcttggcatatgaatccattccatggctgcccttaatccttctagacatgccaatgcctcagcttggacagcagtagcacaggatttttttgcacagcaaacagcactaaacccctgcagtctctaatgatgattccagcagctgaaactcctgtgtcttctataaaaccagcatccacatttacctttgctgaaccttcgggaagggcgtgccatttatcaacctgattggttgtctgaacctgcagtaatttcaccattggttcattatacattaatccttttcctttgatgtcatcgctttgttgtcggatcggcaacagtaccttctcatagttgacgaggaaatttacagactctgcaattgtggccgtcccctttccatggatcatatcattcctgaggaaccatgctcttcacaacaagtacaaaacacgcgccttgtctgaactattcaagctatccaacaggacaaggagccagtcaggcccagtcatagcaaactttcttttccggcggtagcgcccagaactctctgatggcttttccgaacgatctcggcattggacattcaacagtcgcatggaaaccattttccttctttacaccacagattaggcagatgcctactggt

SEQ ID NO: 47032 - DNA, 729 bp, Oryza sativa
caaaggtctgcttatgtagaaccattgtgacaactttatataaaacattcttctcacctagagaaaaggtcacttcctcacagtgttaatttaatgttaaagaggcgtattgcataacaaggagaccattattggtactcataggtgcaacaaggggattgtcttaaaggtctacttcctatataaaaaatcaaactatggataaatctgctaacaggtaaatctgtgtacagattatcgttaaattcaatttggtttgcacacagcggtattgcagtatacttaaagtacgaggcatgtaatgctttttctagctgttcacgataaatatagcacctaccgatattttgatcaagattttaaaaatctgttccatataaaaaacaatagatttagtattaaatttatcacaaagctatataattaaagcaagtaaaaaaactatagatttctaaatataaaattagcacacaactatagattttagagtttaaattccttgtataaccattatgtcgaatctatcagtgttatagaattttgactaaattggtgctaaatttattttttatgataactttattattaaattagtagttttgtgacacgccatcttaaatttgtagttctgtgataaattaaatgctaaatatatagtttgtgataaaccaacttaaatttatagttttaggatgattaagtcaaagtattattttgtatcttgtattg

SEQ ID NO: 47033 - DNA, 1394 bp, Oryza sativa
aagtatcacaaaactattgatttagtaataaaattatcataaaaaacaaatttagcaccaatttaattgcaaaactataacgctcatagtttcaacataatagtagtacaagggatttaaactctaaaatatatagttttgtgctaattttatttttaaatctatacttttttatacttgctttaactatatagttttctgataaatttcatactaaatctatagtttttttatagaacatcttaattctacagttttgtaatatcttgatcaaaatatttgtagttttgctatttttatcatgaacggaccataagaagcattccatgcctgttacttcaagtatctgccatacctctctgcgtaaacaaaatcacgatattcacatgtggtcagatttatccctaatttgattttttacagaggaagtagctttaagagaatctcctgcttgacacctattcagtattcacacgttctcctgtttatgcattccatccctgtcaatcactactaaaaaatcatttttctagcgtaaccctttcgtttttcctgatgggttttatgcaaatacgcttgtgaaaataaatgatagggattccgggtaccaatcgtcagcaaaaatcaattttcgctaacgggtacttaaaagatccgcttgcaaaaatagaggtatttttaaaagcggacctcttaacttaccgctagcgaaaatcatatattttcgctcgtggctgctaatggccacctcccgcaaaacaaaaagaatgaaaaaaaaaaaaaaaaaaaaaacaaaaaaaaaaaaacttcactatattaaaatttcacccccacctttccccgctcccccatttttccatctcctaactccatctcctcgactccttctgctaaccccctttttcaccacgcctctcctcctcaccccggcccggccctctcccccctgtgcctttcctcctcctttcctcgacccccacgcacgcgcctttcctcctcctttcggcaaccaaggcagggacggcgacgacaacgggggacgtcctccttcctcgccaagccaccgccgtggagccgcatcgactggagcgggccagcggatccggcctgccggatggtcgcgggtggcggattcagtcacaggagaggcacatgtagagaagggaagcgtgcacacggtggattcggtagcggcaatggtcgggctcctccctctcagaccaaggggtggacacctccttttttgtggagcaccaacggggagccgtattgaccggtaccgaatggttggggagcttgcggacgacaaaagatctcaacccctgccttttctgtgatgaagggggtgaggcacctaatgaccgtgctcgtaggcaagacaacggaacacaggg

SEQ ID NO: 47034 - DNA, 727 bp, Oryza sativa
cagctcatggttaactaatcacgctataatggaccgccctggcttcctagcgcacttttggtgttgagaacaggtgatggcaaacacagccttgattcgttctggagatggaaaagaactaccacagatttagtaggggtcaagaacaaggctacttcgaggacatcatgcatgaaaacgtctagcgcttttgaaacatccggattattatacattttgtgtgcggtaaacatatctacttgctatgttagattaatcttctcatacaatcgagggagtcagcgagaacaacctcagcacggacgagcattccataagaaagacatttcataagcgctactttggaagaaatgtacgttctttgtagggcaatatttcgtgaatgattggactgaggaacatatctaactcttcgttctagttttcagccatccgtgctggtgttgcacttaatgctggtatactgaatgacgtacttataggctatgcttctgagataccaatcgagcgaggctgaactaacgaaagactagtacactacatcatgttatgattgatggacaacaagatggtttcgatttgaactcagatgtatataaaacaggcgttaatatatccatgcgccagactttacaatgtcagggctttgatgacacataactaatggtaattggctaaatttcgggagccaccaccagatatcgtgttctataatgaaacaacctat

SEQ ID NO: 47035 - DNA, 1376 bp, Oryza sativa
taatttaatagctaattaatcaatagttatctataatattatataataaaattaatacctgattccacctatcatatacacacaaggtatcttggaatcaatactgcagctgtctataagtcaatagtccgctgcttttctctttattttttgtcttctcgaaatgtgtttatagctagcttataatatacaattgtacctactcctgatcactgtagctcatatagctcatagaatggcacacattaatctacaattaacaataatgccgttctccatacaaacccaaagagagaggatattaagttaatttgcatcgatctagaaccacatgaatttcacgtgaggtggtactttaatcgccggatgaatatacgtcaagacaaattcgatatgtatgttgcaaacaactgggagcgattatttgttcttccccatacaactactagtgcatgattgtggggcttcttgtcctgttccctgcttctggccccaacaacgtttctttcttctagaagggagtcttgtactgttgctccctttgtcacgtcattctcgaaaggtggcttatcataaagttcacgacatacttaaatacacgtgttttgctatggataaaaatgaattatacatatgcacattgtttagagcaagttggttgtaaagtttttggaacaacatatatcatccctgatttttttggatgtttttgcatggtaaacttaaattcttagagagaggataagatattaacaatacgtagaaatattgttttataaagaaaaaaatacgaattacctttcccaaacaatccggggtgatacgtaattagttattcaattcgccgccgcccctattccaccgccaccttttgccccgacggaaacgagggcgacggcgagcgcgacgtcgatggcgaacatggtggcgaccgtcgcggcgaggatccagactaccttcccataaaaggcggcgcggcacaggcgaagggtggtggcattggggtggagcttagcggcggcggcctcgacgagcgcggcgacgaggtgcttgaagcgggggctgagtccgcggcccccgcgcaggtcggcgagcgcgagactgatctggtcccaggaggggctcctcctcatcgaccatcgccgtagtctcggctacctgcacgatataatcacagctgtcaaattgtaaaatccaaattcgtagacgcactcgaatcgagcaaattttggaacagaaacataatcttcagttggaaccaagaagtggattcagaatcgaagcaaacttaacaaaaagggaaacaaaaatgaatctgaaatgattggggatcaaatcgaagttaaaaaaaaaaacacccgatgccataaacccaa

SEQ ID NO: 47036 - DNA, 1162 bp, Oryza sativa
atatgggctaatagctagtcttttttgctgcctcaagtaagtgctccaaagaatttcgtggaaaatagttcgacttgtgtaagtatccggggaatttcatgtggtcaaagcaattattgaaccgataaaagagattggcttcagtttttggcttctgacttgctttcgatcgagacatttctttcgtaggtaggctgccttttccatcaccttgcttatgcctccttaatacggagtattgcaagtccaacctactgtttcatatttgacaatataggctgaccatataagcttttgaggtaatgagaaaagacggacaattcatttatccttcaatagaaataagaggcacacaatcaaatttggatactcctttattgtcttgatctcaatactctaagtctcaatattttgaatagtcaaatggcagacgacggtaaaaatccatgtcctcttttataggttcgtgtagttcaaaagttggatttgtcggtacagtagttaaaggttaatccaaaggaattagtaacaagaaaatgttctcactttaccttttaacccctttaaataagctccaaatactttgtactgaaacttttgagatagtaccgcttgcactgtacatatagtttgtgccaccactacatagtggtgtaaccacgattgagtaatttaacttattgaagccacttaaaagatttacagcaaatcttgtgtccactttaaggcacccaagatcaattcaattattctcttgcctacttcatagagaatttctgggattatagtttaatttcttgtttgacttcacacaatggagtttatgttgcaataaaagtgttttcgcggcagaatgaaacctttgtaaaggcaatatcctgatcgacacatatattatagagaccccaggcaacgtaaatattcccatttgttactgcaaaggcatttccttttggatattaatgggtgaaattgttccttgttgcactagatctatgtaaaaactgttcgaaaacgcactactacgagaaagattttcgtgtgcggtcaaaaccggttttcgcgtgcgggtgagcagcccaccagcacccagggtctgcaaaaaatcaagattttggcgtgcgggtggcgcaccagcacgcgaaaatcagattttcgcgtg

SEQ ID NO: 47037 - DNA, 2009 bp, Oryza sativa
cgccggcgaaaaaaaatttttttcatgaagttcgaaaagggaaaaaattaacaagttataattttaataagggtttttttaccaaaatggtaaaaaaaaggaaaaccatgaaaatttggtaaaaaacaaactttttaccttttcaaatttaataaatggcccaattttaaccttacgagatttatctccatattaaagtgatacattatcagccttagagtatgatgtctctaaaaatgatgtctcaacctcaaggttcaaaaaaccgtcctaaacttctgaagaaattaaatgataacttcatgaggaatacaattcagatccctagtttcgatcggttcatccagtacttgatcctcccattcatccatttgaattcaacttctatatcaaccaaaaagcttagagttgtatctgatttccagagaccaacttacctagtaaaactacacattctggtgaatgaaacccggtggcttcaattgttttacaactgaatgtactcttttgcacctttaatgcattttggacggccttgaaatagaaataagacgaaaaaccgtggttattcgtttggatgcatgagaggggttgctttgggaaatttcaggattcttttggcaatgttggcaaaatttgaagagctaaaaatgatagaagaaggtatttaaatagggaatatatcctatgcacacaagcttcccatgcacaccaactagcaaatgtcacagaaaattctagaagaaaaatggacacatactttgaatagtattacacctatgtatgaaatattatcttcaaattcattatattttagccgtaacaaaaaaagacaaatttctgacaaatttttacccttaaaattgttgttacagctaaaatataatgaatttgaatatgggactttgtagatatgtgtaatactattaggagtaaatgtctaatttttttttgtagaatttttcatgacatttgctagttggtatgcacggagtgtagatggaagcttatgcgcatagcgtatgttcccatttaaataggagtaaattactcacaatccaaaatatggagagtgagtaggatctacaaaaagcttgagggttgtataaaccatttttgcatggctattggacgtgctttcggactttaagaggtgccacatatatagacccttgtttgtacaagcttttggtagacgcaacttttttcaaaatctatagctctcccaagttgtctagattctcaactagattatgagaaattgtacttataccatctaaaaataaactagaagaagaagaagaagatggagaacacatcgttttcatatttagactagctgtctaaaactaaactagaagaagaagaagatggaaaacacatcgtttcatatttagactagctggctatccaccagccgcttattaaaatcttaagctcttctatacaaggccatatgtaacttaggccatgtcaccatgctagcaaagcaagacgtcaggcaacaacattagggatgcgggatctgctcagatttgttcttttggagtcttttcaattgcaaccaatgtatgttattcactctcggatgtctaacattcgaatggaaaattaattaaaattttaatgtgaaaaagccatgtatggccccaaccatcactaactactacagctctctaagatttgaacaatattcttttcaagaaacatattagttagcacttatctagactctaaaagtgaatataatagaaagaacctacatattccttagttgattcaactacatgcatacaagcatagtttaaccaatcagtggacgaaacacaattgaaagcattgctggtgtgcaaatattgcctgcatagtacctctcaattacgatcaaaattatagcaactagacaagtcgtggcactagtttgcacaaatttcaaattaatttacgagatcgaacctagcttcaggtggttcgaggacatatgtgagattatgtgcacgcacaagaag

SEQ ID NO: 47038 - DNA, 1122 bp, Oryza sativa
tatcttatcactttatcaatatgtttgcataatatatctttgctagtggttttatttctttgcctaggaatcttcattgggatttttgtaggggataaacaatagttgtcgtctccaccctacacatgaaattcccattgtacgcttattgaggtagggaaaatgtttgtacttagcttatcgtcttatttcccatgttcaaccactattcccattgtatgtctatttcttatgtgtacaatgggaatttcattgtatgcttattgaggtaggaaaaatacttcattcaagaaatattaatttgttgtgtccaccctacacttgtggaaagttctaggcttgattcgatgaagacattggaagagcctaagttgatcgctgaggagggagaggtaatgcattgttgcttcttgctcttcctagcaccaacgaccgctgcataaccttgttaacttaaacgaatcaaacacaacatgcctgccaattagttatggaaggaaaaaagtaataatggtttaaccctacttacccatcctcaccgatcaggaaccaaacataacaagattaaggcagcaagaagagaataataagatcaggaggagaagaagcgttggcggctagcagggtttaacttaaaccacattcgaaaccatcaatttcttcttgcgcattccttcatgttgtgagggtaaagacacgactgtgttgtttcaatctcaaccattagtttgctgtaatttcctggccttccaggatgaagattagctgaggcggtgttggcatcgcttccctctatcgaatgaggcggttacactagcaatgaggcaaggaaagaacgattgatggagttatttgagtggaggaggccgggatgttttgtacgttgggcttacgaccggctgcgttactagtttgttgtggtagagttgcgcgcctggactgattttggcttggctggtggcggtaggtgcctagtctacagtgaccactgtctccatatcctaacaacacacacataacctctatcgctcgtttctatgccacacaatcgaatgaaaactctactcgagtactttaatgtgaaccgacaatgtatgacaccaaccatcagtaactattgca

SEQ ID NO: 47039 - DNA, 902 bp, Oryza sativa
aagttatgttttgaagaccgtgtcgctgtccaaaatgacttctttacgagtacgaagggagtattccgaaacatttaattaagcattaatgtataatcaagaaagggtaatgatgctacacgatggtgcaaaaatatattagtttttttcttgtacctttcaagcaatgcttaactatttgatcaaatagttaagcattgcttgtctttgccttagttataagtataagccaattttgatttcagagttactttaaagttttcttcgtcgatttagtcactcagttgtggttttagaaatgctaaaaatgcaaaaggtttacctaaaatgatcatccgtggtaatgatatatttgttgttcctttaaaaaaaacatctttgttgttgaaactttctttctatataattagtatccactaagaaacattaactcatataaagcaacactttctaaccattacattgcaatattagagcaaagatagcagtcgttggataagaagatacataaccactagaataaccatgtcgttattttttaagagaacatgttgttattgttttttgttcaattcattcctaagaattttcacatatcagctctaaatatattaaaaatatttatccacaattaatatattttagcttgattttcttctcaaaatctcaccgcaaagtgtgtgggcttttatgtagttaaacaaaaatacctctcaaacatatatgataataatgtgcaggaaactggatttgtgtgtgtggttcatttttcccttttggataaaaaattgatagagaaacaagtgctcggccctggttttctgtttttctttgaaagcatgtgatgtccttggattgttgattgattacaccactgtccatgagattgaggcatggagcac

SEQ ID NO: 47040 - DNA, 1465 bp, Oryza sativa
  unsure (1)..(1465): unsure at all n locations
ttaataaaaatatttctatgtgttgctcgtatttgaaggggcaattttttgatagaacacatcnctatacattgataattccgatgcacaaaaatggttgagaagacaaataataggatggataatatcctccacaataacatgagaatggaaattttagagtctgtgatttgtcatacttatctaaaggaaaactcccagtaggattaagacatcaatttaccatgattgatttgtaccaaacctaaatattatcaatttatcagtatgtttgcttaattatctttatgggtgtttttatttctttggcgagtagccttcatagcaattctcataggggatatgcaatatttgacgtctccaccctacacttcccattgtatgcctattgaggaagggtaaatgtccgtacatagattattgtattatttgtcatgttcaagaaatattcccattgtgtgcttattccccatgtttacaatgtgaatttcattgtatgcttatcgatgtagggaaaatgcttcattgaagcaatatttgtcgtctccaccctacacttctcaacagttccagggttgattcagacaagatattggaagagtctaacctaattggcatggagggagagttattatattgttgcctcatgttcttctgggcactgacaaccactacataacctagtaaataataacgaatcgaacacaacatgtttgccaattagattttatggaagtacaaaagtaataatggtttagccctacttacccatcctcaccggccgggaatctaacgtaacaagaaaaatataataagatcatggtggagtagaagtgttggcggttagcaatgtttaacctaaatcacatgcgaaaccaacagtttctccctgcgtattccttcccgttgtaaaggtaaagacacggccacaccgtttcagtctcaaccatcagtttgctgtaatttcccagcgttctagaatggatattagctaaggcggcaagattaaggcaacaaaaagaaaataataagatcaggaggagaagaagcgttggcagctagcaagttttaacctaaaccacatgtgaaaccatcagtttcttcccacgtattccttcccgttgtaagggtaaagacacggccgcactattttaatctcaaccatcagtttgctataattttcttacattctaggatggagattatatgaggcggcatcagcgtcgctctcctccctcaagtgttgtgcttatagtgccaatgaggtaaggaaataatgatcaatggagttttgtttagtggaggagcccgagatgttttgtacattgggctcatgatcagtagaggtactagtattttgcggtagttttgcgagtgcgtggactgccttttgctcagatggctgcggcaagtgcccagcccatgatgaccactatcttaagggtatatttgggagtgagggttg

SEQ ID NO: 47041 - DNA, 687 bp, Oryza sativa
  unsure (1)..(687): unsure at all n locations
tcaccaatttttgatcttgccgatatttctatgacacaatggaggttaaatgatttatacatcagtactttataatacagttcagtatcctagtaatttaaatgttgatgttatgtgttttttttacctcgtccttctcttctagcgagatgacgctaaccacagattcaattccctgtggaggccttcctttagttgtttaggaagattaccgttaattatcttcttgaattgttgctgatggagataataaaagcagaacagagcctagttccgcctttctcatccattccaatttcctgataaagtgaacgtacatcagtaccatttgaaggatacgtgcatcagcaaaataatgaaattcttgaaccaataaatattcccaaatcgaaatttgaatcctaatcctcgtccaaaaaaaaagaaaaaagaatcccaacatccggttttgagcaaaaaagcaacagaattttgatctgtttccaatgaaaaccttgttgagcagaaatttggaaaccgatgaaaacgtgagaacaaagatggcaaaccagtttgagtggaaaaccaatcggtgcagttaaatcgacgaaatcaaacaaaaatccagaacatctataggctcaacaaacgtatattacanatcgacgaaaaaagaaagagacccagcgcatgtgcaagccccagaag

SEQ ID NO: 47042 - DNA, 793 bp, Oryza sativa
  unsure (1)..(793): unsure at all n locations
ttattatcaatttatcagtatgttttcataattatatttattggcgtttttatttctttgactagtagtcttcatagaaattttcataggggataagcaatatttggcgtctccaccctacacttgaaattcccaatgtatgcctattgagaaagagaaaatgtctgtacattgcttattgccttatttctcatgttcaagcaatattcccattatatgcttattacccatgtgtacaatgtgaatttcattgtatgcttatagaggtagggaaaatgcttcattcaagcaatatttgtcatctccactctacacttgtcgaaagttccaggcttgattcggagaagacattggaagagcctaagctaattttactgtatgcttttgatggaggtttaatatttgaagaaagattaagataagaatttgtgaagtagaatgggcctcaaaataaattagatacaaagacaagggcattatcaataatagagctaccttttataaaccacttttgcaagattgataaaaatatttctatgtgttgctcgtatttggaggtgcaattttttttgatagaacacatcactataacatgataatttcgatgcacaaaaatggttgagaagacaaataataggatggataatattcttcacaataacatgagaaatggaaatttagagtctgtgatttgtcatacttatctaaaggaaacttccagtnngattagacatcaatttaccatgattgatttgtcccaacctaaatattatcaattatcaatatgtttgtg

SEQ ID NO: 47043 - DNA, 675 bp, Oryza sativa
  unsure (1)..(675): unsure at all n locations
agccactcctcgccgccggcacaaccaccaccaccgggctttctcaccgacaccaccggcgacggcagcggcagcctgacggccaatgttctgcacaatgtcaatctcctgcatatcaatcacactcccaaccctgaaatggtggaatacctgctagtattccactgcagatcaaacactttcctttggttggcttgtagagtagagatagggtacagtctgcaaacagaattggttcatcggcactggatataggatacagcttgcattgcaacagagtttgcagaatgcatggctttactaaagagggatcacccttacaatttttgcgctgttttattggactgaaaattaacacaaatcaatgtacccagtgacttgccatcagccaagcagctgtcttttcggtttccagattggattcgggtaaagtttaagactccggaagcaggaattttaggcactgtattgccattagataatcgggtggataatatacatattggtttgccaaacacttggaacaggccacaaatttcgagttaacttttatttgattgaggatttcacaaccggtttatacaaggtctagtacccaagagaaaaatagcgtctgaaacaaacaaaggacaagaaagaacaanggcctgttcctgtcaagacccatgttcactt

SEQ ID NO: 47044 - DNA, 1279 bp, Oryza sativa
  unsure (1)..(1279): unsure at all n locations
tgcgcnagtgagaactgatcacctttggcgaattcgagctcggtacccgttgcacgcatgatatttgacaaagcagtcggtatatcactcggatcatgttattcagggattcacaccgcatatgctatatattaatattaagtcacttgtttgactacgattatcaaaaccactcagttggtgcatctattaggtacatctactcgatgcacctgactttatttttcagccctccacagtcttcatatttggtaaaagtactcgggagatcatggcgaggatgattgaagcactcggctttggagtaatctagttcgagagaagattatctttccgactgtgaaggtctcaggggctactgtggagattatgggtaccccatacccacacggcatggttatccgactagtcataggggatagcttatatctatggaatatgtaaccgatcatgacttgggtattacgtttccttttatattatgaagcggcctaaagtcctgatttgataatattgtaaaatagatttaggaaaccgataccgtatgggttaaggtttctatcttgtaatcctgccccccatcctatataaggtgggcaggaggccctctagggggcatgagacaacctgatcgtcagatcaatacacactcggcggattcaaatccccaaacaggagtagggtattacctctcatcgagagggcctgaacctgtctaaatcctttgtctctgcatccatccacttttaggtctcgtgcgctaccccttttattattgccgaattcatgtttcgacaataatcattaaaacagcatcaacaaaaagatctaattatcacgagatttcttcagtacgagctttgatcatttggaaaggcaaagcaaggggtccatggccacgaactcctgttcggaaaaggaaaagaccaggatgcatagcatagcagtgagagagtacaattaatgatcgatagcaaaaggacgatgcgacgctacatgaaaaccaaaaaaccacaccagcacacacatgcatcaatcggcattattgacgagtgaggaccccgggcatgtaatcgtcccgtcctctgtggagtgtggatccagcatattgattccagattcagattcagctatgcaccgaatcgaaacgacgttggttgtagcgtgctgcgtgcatcgtcactgtatggtggtggttggtccaggtacgctcgctcgagattggagaaccaaccgggcgggccagacgacggtgggaccgcgcgcgcgggggccatct

SEQ ID NO: 47045 - DNA, 1050 bp, Oryza sativa
acaaccaagaacacctcatttggtgcacccaatctccaggaacgcgacctttttaactcggaacaccgtagcgctctggacgccgcagcttcacctttgcctgtcgcccggcttcaacagttcgtaacaagctgagccacttcgccacgagcttcatcaacaccttcagatcaagaatcccgaagtaatcgacgcgaggtggaccacgatgggagatcctcttcttcttccccaattccggccggcgacgccattcctttctttctccttctctgggcagcttcggcgcaatctttttcgcctagagctaccttgtgctgatctaaaccgaagcacgtaccctttctatgcagtacaagcccgggggtacaccgtagcagccgcgccgtcgccgaaccagtacaccatcgccaagacttcgccgagccgcgttcgcttcttggtgagtccctagagtccttaccatacgcatgcacgattagatcgagcctcaaaacccacatgcatgtgcaagccgagcttagccactgcctctaacaccctaacagccgctatagagcaccaaagcttgcaataaagccaccaatgggtttgtatggttgttctctacacttttcgttttgggagcttgagctgaatcgccgccgttcgccgccggtgatgctgtgaagctcgcggctgtgctgctactctgctctgtccagagcaagggcatggcttttaaaatttaaagactcccagggatgtattaacaactcgagcagtcacttacaagtgggaccaatactaatctgtaaataaaataaaacgcaagtgtcgttttgcataaaaacctaaaccacgtgctaggggctgcgggacctattttcccaagaacccaggggcttatgcgaaaaagcttagtcgctgactggtggacctgagagagtaaatgatttgagaagattggagaaaatgcaaaacttgtttcttattaactgaaaaatgacagaactttagaaatttgtagaaaattcatcctaactataaaaattgaactaaattttgtga

SEQ ID NO: 47046 - DNA, 1993 bp, Oryza sativa
acctgagagagtaaatgatttgagaagattggagaaaatgcaaaacttgtttcttattaactgaaaaatgacagaactttagaaatttgtagaaaattcatcctaactataaaaattgaaaactaaattttgttggaatcatattttcatgctctgcatataaaaatgtttaacttaacagaatcataaagatttatgtctcaaaaatccgaaatgcacttaggaccatatttaacatgtaaacactttaaaaatctgtaactttgaatgtaaattgttagattgaagtttctttcattaaaaatcaaattaacacagagcacaccaactccataaaaagcattcattttagagcatgttggatttttatgtatgttttaattttaatttttgcatatgtatgtttagacgattcgccgccgagtctcgaggagatctactttggagctgaacaaggagtggaagagcaaggcaagccacctcccctctttgatcacattgaacctatgatttggtggtttttgaaaagtttgcaaaatatgcatgtctattgtacactaatccattaaaatcttgtaaaatttgttagatcaactcctttacttgcattatcacctaaactccacaaaagaccttaaccattatttcaaaccttaggaacaattgattgtgtcacattaagaacgatgtttgaagtcacaagtctatagaaatgcttagccatgcttagtgatgagtttacttaccatttgggctcaattacatatatgaaatgatttattttgtgatctgaattaaaatgataaaatgtgatatttgttaaataaaatgttggaaaatgtggattttaagtttgggcctcatgtggtacacatatggtgtttagttgtgtgtcgatagggggagaatgtgcccagaccgacctaaggacttcactcaatgtcagttcattttgtatacagtacaaccacatgtgctagtatgggatagcccaagcttagtaaattatttatggtttagccttacattctggtaggccggtgtgtatgagttcgtataattcagaggagctttctatttaccccgaagtggtagtttaggtgactaagtgtgtccaatacaatgctattgtgccacgtggtgtgttcccgttgtgtctgccaccacggcgttaagtttaaggcgtggacctgccacttaacggttctaggtcatatatcgagtatggcttaggatggagtaacacgtatcgtgctggtgtaagtgctggtgtaaggctaaatcatgaatcttggaagggctttgttgtgagtaataaatcgggtgcttatgtatcgcgtgccatgctttttgcatgattattatttcgcatcatgtgggtaaagtgtacgtactctgcagagttaaaactaatcgattagccgtgctcgctgtcatgagcggcgtgtgaatatgtcatgagtatagacatgtgttttattcttctaaagctgaatttgaacttcaaaatgtgatgtgatttatggattatatccttgctgccatggaaggcaataaggagctatgttatatgtgtttaacatctattttgatgcccatttgctaagtgtatgcttgctgaaatttaattgaaaataaatctgaatttgaaatgttctttgcaaactaaatttgctttatgctaaaattatcccatgtaagctttactttgaatacgccatgcatgtagagtattaggcttgcttggtgcttgccagtacaatttatgtactgactcttgcgtgtattgttgtattgttgcatgtttagaattggttgcaggtgagatcactctatttcgatggggatgtttctttcttccaggatggttcttactagggtctaccctagtcggttgcaggaaagatcttttgggtagaagatgcttccgcgaacctaactattcggccaatcggccatacttatctaagttataagttgtataaacttaact

SEQ ID NO: 47047 - DNA, 2508 bp, Oryza sativa
gaagatgcttccgcgaacctaactattcggccaatcggccatacttatctaagttataagttgtataaacttaactaaaacttagaacttagaattccctatgttgagatatcatgtgcttgaatgaaagtgtttagtgtgttccttttgttagggacatattaaacatgagtatgagttaaagatatttgagatgttgtagatctttagccatttttgttaagtcttctgaatgtgtaacacatctggttgccgtcttcgagtggtttgacaggcacatctcaagctgaagttgactggcaggctaaaggcctagcaatgtctcacatatctttctctcggagcgtcgaatgtcttaatatgtttgatggaagaattgtgtatagctattcatccttcaaatatactaatgggttcggagtgcttccgacactaaatcgggcgaaccatatattcggttcgactgtctcaacgagagattcaatatggtggactcaaatatatatttggcctcatgttgttggtggttatggtgcgcttttttataactcaatcggaaactctccaaaatgttcagaaatgaacttatttatgaccttaccttgcaaaacatgttgaaccaataaaactcatggaattctgttgatttaaaaaagaatggcaaggtaacatgttatcttcttttattttactaaaatgttggtggttgtattatgtttaatgacaaccaacacctacagtattacaaacacgctattgattagcccatagagattagagtcttttcctacccacaaaacatataaatttgaaggtaggagtatttccctttgtttttcatgtcctctatgtaatcttcaagtgatggtatcttacacaattattaatacaacatgtgctttaaatattttgaaaactcattcaaacataaaaacaatgaaattactgtcatactgataccatccaacgtatcaaatcttgtgcattcaatactgcatttatatatgccttgcctacattgtttttattccctcaaagcattaaaaagaatatcaccaaatctgtttccaccctataaatagtatctcttcttcatgtatcaataccaatcttggaatcttccaagataatcacaatgagggaaagtcgagtgattacagtaactcttcttctatcgcatatgttgttctaatcataggggggaagaaattcagtatataagccaaaggggaaatactagtcaaggtctcacaaattatggggttaataaaaccatcgaggtaagtgcaaaattagatctttttgtacatacatagcatcttgttttgtacctaacaagcaaaaagaacatcgtatcaggctgaagatggtgatgtctatgattgcatcaatatgaatagacaaccaggctttaaccatccattgttgaaagatcatacaattcaggtaaagcacatatttcaccctaacatttgatatcatgtctaatatgttgctaaaaaattctgaatacatatatagagagataataattaagtatgttattatagtcataaatcaaaatacaagagttttgggggactatagtattttttttttgttgggggggggagactagaatattcactaattcagcttgttttggataaaatagtaaatttatttgtttgttacacttcgacctggcactaaagccaaaaaaatttgcgtatctttgcttcatcatgaaagaatgtaaagtacaaaccaaatcatacttaggattttttttttcatagtgcgatgtaaactcatcgtttgtaaaatggtcatgttttcgtttgtcaattagttgaaaccaagctctttactaatggagatggatgttgaaaatccatttatatcttccatatcagaagcacaactacctagctactgcagaatgccctataggaaccatcccagtactacgcaacaagaaacaagactatctcaattcagaataccaatgcagtcagcaccagtcaacaaaaaaaggtaagatttttgtatcgagttgttcatatgtctagcttcataatagactcacaaaaccgctatattactattggtctatgaaaaagctatacaaaagtattggatgttttcatatttaagtgctaataaatgaactcaatcaattttgttaaatgaaatatgtgttgctctgtataactcaaacaaatacacaaaacctagatattccctcgaccttgcattgttttagtttggctgcttgtattttctattttatagataaatttataagtactaaaaattacgcggtgctaacgtagtatgttacatggtaaatataaacatatgaattccatttatcataatcgaacaatttaaaatatatcagtggtcaaagtagagcaagcaccagtcaagattataaaatattaagaaattgatggggtattatataatggccccttaatttgaagtgcgatttgttagtaagattatggtttttcactttgacat

SEQ ID NO: 47048 - DNA, 823 bp, Oryza sativa
ggaggtttaatatttgaagaaagattaagataagaatttgtgaagtagaatgggcctcaaaataaattagatacaaagacaagggcattatcaataatagagctaccttttataaaccacttttgcaagattgataaaaatatttctatgtgttgctcgtatttggaggtgcaatttttttgatagaacacatcactataacatgataatttcgatgcacaaaaatggttgagaagacaaataataggatggataatatcctccacaataacatgagaatggaaattttagagtctgtgatttgtcatacttatctaaaggaaaactcccagtaggattaagacatcaatttaccatgattgatttgtaccaaacctaaatattatcaatttatcagtatgtttgcttaattatctttatgggtgtttttatttctttggcgagtagccttcatagcaattctcataggggatatgcaatatttgacgtctccaccctacacttcccattgtatgcctattgaggaagggtaaatgtccgtacatagattattgtattatttgtcatgttcaagaaatattcccattgtgtgcttattccccatgtttacaatgtgaatttcattgtatgcttatcgatgtagggaaaatgcttcattgaagcaatatttgtggtctccaccctacacttttaaaaagtccacggttgattcaaaccaaatttcgaaagagctaaccttattggcatgggggagaagtattatattggtgcctatggttcttctggcacttgacaccccttcataaccctataaatattaccg

SEQ ID NO: 47049 - DNA, 1084 bp, Oryza sativa
  unsure (1)..(1084): unsure at all n locations
aaaatggtgaaaaagaccataatttccaaaaaaaaaatgaaaaccccataatcctccggcagcggtgcggcctcctcctcctccttgtcattgccgtcgtcgctcaagaacaccgctcatgccctcgttggcagcggctccgccgctgcgctcggcggattctgtgctccctctgggttgcaccaccactaacgcccctccccttcgccgatcttgggaggaaagaaagggagggaagggaagncggatccccaagggggggggcgaggcggccctgccgccggatccatgcgggggttggcccccgcccgccggatcccacgcctccaccgccgcagtgccgccgccgtcacttacgcctgccgctgccatcggaaggagagaagagggcacagatgagtgaggccactattgttgactgatagaagaaaaagagatagagaggagaggagagatagaggggaaaatttaaagtgggtaagagggaaaagagggagtgggtatttttgcatgcggcactcttaataggtccacacgcaaaaatgcatattttcgcgtgcggtccatttaagaggactgcacagaaaaatcgattttttcttgcggtcctcttaaatggaccacacgtgaaaatgagcttattttcctagacgcgaccagttatggtccatctacaatctaaatgggtcgctgtacagaaaaatcgtttttcagtagtgacgagaagggaaaagagtagcaagtgataagtctagattaggtatctttatcaaaatgtgtagaaagaggggaaacgcatggagatttggtatataatcaacttttttacttttacaaatttcatatatgtccaatttttacccttacgagatttatctccatattaaagtgatacattatcagccttagagtatgatgtctctaaaaatgatgtctcaacctcaaggttccaaaaaccgtcctaaacttctgaagaaattaaatgataacttcatgaggaatacaattcagatccctagtttcgatcggttcatccagtacttgatcctcccattcatccatttgaattcaacttctatatcaa

SEQ ID NO: 47050 - DNA, 724 bp, Oryza sativa
agtccactagatagccttggttgaacaagtcttggtagcccaactttttcaaaatcaatagctctcccaagttgtctagattctcaattagattatgaaaaattgtacttatcccttctaaaaataacctagaaaaagaagaggaagatgcagaccacatcgtttttcatatttagacaagctgtctaaaactgacctacaagaagaagaagatgaaaaccacatcgtttcatatttagactagcgggctatccaccagccgcttattaaaatcttaagctcttctatacaaggccatatgtatcttaggccatgtcaccatgctaccaaagcaagacggtcaggcaacaacattagggatgcgggatctgctcagatttgttcttttggagtcttttcaattgcaaccaatgtatgttattcactctcgaatgtctagcattcgaatggaaaattaattaaaattttaatgtgaaaaagccatgtatggccccaaccatcactaactactacagctctctaagatttgaacaatattcttttcaagaaacatattagttagcacttatctagactctaaaagtgaatataatagaaagaacctacatattccttagttgattcaactacatgcatacaagcatagtttaaccaatcagtggacgaaacacaattgaaagcattgctggtgtgcaaatattgcctgcatagtacctctcaatta

SEQ ID NO: 47051 - DNA, 746 bp, Oryza sativa
  unsure (1)..(746): unsure at all n locations
acgcccagataagaacccgctgcactataggccgaattcgagctcggtacccggacaacaagatggctttcaattgaaattaatatgcatatatgaaagtcattaatataccaatgtttaaaactttggaatcatatcttgatgtcgcttgaaacaacatatttgcatgaagtgacacgtttggtcgacaagggcatgtcatattcacaatgatcatgcatatgcggcctttcatatgcgcttattttagtagtggatgaagaatcaatgtggattgctacatctttacgtgctttgtatgttcttcgattttgttggagtggatttagtatttgccatatgtgcttcgtgtttgttcttattggaattaaaggatggacatcctttatacgctccatttatatcttaaagacaaagtagcttcggatcgaatataagcacacagtaaaattgtagagtaccaacgatggtaattagttacgacgatgtactaggatatatcaccccgagtttcacatgtcaaatatgatgatatctgagcctattttaacttccaaccactatattgtaaaactcagtacaataaccgccaagggtggtaatgctactaggtgcactatagtacctaaggtagataccatatctagatggcagttcaaagcccacagagcttgggctggagcttgagccagattccgatcaaagtagagatcatcaaacttgctgagtngtagctgctgcgctat

SEQ ID NO: 47052 - DNA, 677 bp, Oryza sativa
ttgtattaatttcctgtggacatgatcatctcgtggagtcgaagctaattgtcagatgggcttcttggaaatttcatcccatgcatggatggagatttgcaatagaatactctcaaactaattactcgtgctaaaatcgaaagagcacttgtgccaagggctttgcataattgcattttgggaatttcaattaattaaggatatatccagtgacaagctaaatattaaaaactcgtgaaagtcatacctaaaagtttcgtaaattcataaaaaaaatactagtgataggtgtagatatgaaatgcattttcaccaaatctcaaattcaaacttaatttcatttatgagtaacaaagaagaaaaaaaaggtgaatggtaacaagacactgttcatctgaaatttgtctttctttttctcttaaatgaagttgagtttagagttaaagattttgtgagaatgtattttatatctacacctatctctaatatttttttcatgattttaagaaacttttaggtatgattttcacgagtttctatcacttaactcgttttcaccggatatgtccccatttcaatttagctgtgatatattttctccatttctggtaagccatttattttgtccatttttccttcaatagtttatttctgccacagggtttatctcactgacc

SEQ ID NO: 47053 - DNA, 704 bp, Oryza sativa
ctgtccctttgtttgttcagtacgctattattctcttgggtactagaccttgtataaaccggttgtgaaatcctcaatcaaataaaagttaactcgaaatttgtggcctgttccaagtgtttggcaaaccaatatgtatattatccacccgattatctaatggcaatacagtgcctaaaattcctgcttccggagtcttaaactttacccgaatccaatctggaaaccgaaaagacagctgcttggctgatggcaagtcactgggtacattgatttgtgttaattttcagtccaataaaacagcgcaaaaattgtaagggtgatccctctttagtaaagccatgcattctgcaaactctgttgcaatgcaagctgtatcctatatccagtgccgatgaaccaattctggttgcaaactgtaccctatctttactttacaagccaaccaaaggaaagtggttgatctgcagcggaatactagcacgtattccaccatttcagggttgggagggtgaatgatatgcaagaaattgacattgtgcacaacatttgccgtcatgctggcgctgccggcgccggtgtgtcggtgagaaagccccgcggatggtggttgagcccgccggcaagaatggctgcaacaagaagggccggtgggcattggcggataaccggtgggctatggcggtggcaacctgtttacggca

SEQ ID NO: 47054 - DNA, 1242 bp, Oryza sativa
tgtgaaaacaaaggctaagatgatgtttttatttagagcagtcaaccattagatgagaaataattaattgagatctcttccatccccttctcctgtcgtgcacgtgcatacttagaaagtaaccatcggattcaatgtattaggccccgtttggtaggactctaaactctagctcccagctactaactccaactccaactgaagtgggtacgaaagtgtttggctagagtagttagctccactccaccacgtctcttgtaggcatttcgtcgaacacctggttggcgtcgcactgccgccgccatcgccatcgctcagcccgcgcgtcaccgttggtggcagcccacgggccaccgctgctcgcccctgcgcccccgcccgcacgcctcccatgcaccgcctaccgccgctggagggccgccagcgaaccgccacagcctgtgcgccaccacggcacgcgcgcctgccgctgccgctgccgtccgcggctctcacgcatcgtgccacgccaccactgctcaccacaccgtgccaccactgcccaccgccgccagtcgccgccgacgccgacgccgacgccaccgcccgtcgctgctgtagggaggaagatggggaggagagagaattggaggagatgaggtgtgaaggggtactttagaggcatttttgtgtaaatacattaaaaaattaaagggtagagggtcttttggggtggagtagagctgtggagcagcaaaagcccacctccacccccgtagtacaaatttgtggagtagctctgccaactccactccaaaaaatagaaaatttataccgtttggcacagttccagctctagataagttggcgttaggagctagagctgtgctaggccttattcttaatcaacattctaatctatccttaccatatgagcatgacccgttataatgtaggggtatattacttatctattaaatggtaaattattaaagtcatctatactcgagcaaaaaaaagatcgtgtgctggtagcacagtgcacgttatgtgcacagcgccatagacctagcttgaagaatttcccaaaaagaaaaaaaaattcaagtgattgagtgctctaaataagcatacaacggaagaaacaagggaatttaaagaaaacaatgtgtaattcaagtgtagaaggatgatatgtcccgtacaatgggaatttcattggtatgtgggaaatttcatttacagcattgtatgcttatttct

SEQ ID NO: 47055 - DNA, 692 bp, Oryza sativa
aaaaactagtacctctactgatcatgagcccaatgtacaaaacatctcggcctcttcaataaaacaaaactccattgatcattatttccttacctcattcccactataagcacacgctttaaggcaggagagcgactctgatgccgcctcatataatctccatccgagaatgtaagaaaactatagcaccccgatggttgagattaaaatagtgcggccgtgtctttacccttacaacgggaagtaatacgtggaaagaaactaatggtttctcatgtggtttaggttaaaactcgcaagctgccaacgcttcttctcctcctgatcttattattttctatttgttgccttaatcttgccgccttagttaatatccattgtagaacgctgggaaattacagcaaactgatggttgagactgaaacggtgtggccgtgtctttacttttacagcgggaaggaatacgcagggagaaactgttggtttcgcatgtgatttaggttaaacattgctaaccgccaacacttctactccaccatgatcttattatatttttcttgtaacgttagattcccggccggtgaggatgggtaagtagggctaaaccattattacttttgtacttccataaaatctcattggcaaacatgttgtgttcgattagttattatttactaggttatgtagtggtt

SEQ ID NO: 47056 - DNA, 666 bp, Oryza sativa
ggaaagttacctcacagcccagccgttgaaggcctggtttgtggtaggaagataagttcttccagggcatcccgcgaagcggtctcatactgcgcagggtgcgacaagcaaaaccatgcaaccacagcccaccatgtggttcgttttatttatccaccacagagcggtggtattaactcatcatcaccattagagctaacagtctccgcactaatatgattttccccagtgtgatagagttgacctaagcaagggtaagcaattcctagtcctaactctagtcatgttagaacccaagctaacaaaggagcatggtatccaaaaagcatggctgtaactataggtaaccatgccatagtgatattatagtaacaatgcaatatttgaaaggaaccaattgagcatttgcaatataggatcaacatgttcaagtgacaagcatgacgtgccttgctatcctgatgggggaacgtcggcgagtatctgtaatgtacgccggagcgtcggagggatgcggaatatagcggcaagcaaagcaaacattgcaaacaggctaagagaagcttggttcagaaagctcgtcagtttttaatgcattccacacatttttcttgattaactgacacttgagtgcccgccacaagattggtaaaggatgcatcggta

SEQ ID NO: 47057 - DNA, 2216 bp, Oryza sativa
  unsure (1)..(2216): unsure at all n locations
ttgccaacaatagattttcagaaatataaacagtatcgagtctagaacgcaagatgatcagttgcagaaaatgatactgaagacagcataggcttgtcttagaatagttcaaggggttttgctgagatagccttcaaattagatgaaatagcaaatatttgagttactagtaggaatagtaactcaaatatttgctatcttccctgggaagcttaacagtttctgttgtacatatattttagaccttcacagtcggaaagataatcttctctcgaactagattactccaaagccgagtgcttcaatcatcctcgccatgatctcccgagtacttttaccaaatatgaagactgtggagggctgaaaaataaagtcaggtgcatcgagtagatgtacctaatagatgcaccaactgagtggttttgataatcgtagtcaaacaagtgacttaatattaatatatagcatatgcggtgtgaatccctgaataacatgatccgagtgatataccgactgctttgtaaaatatgatgcgtgcaacctaaagctgactacatcattgaaaattcacatagcaaaatagctataaagaagcttgtatgttgtgaaataaagaaatttccaaagtattgggcatacgccatgcgcacactgctttaacagatgtgcttaagtccctagaagacacatggtcccaccacacctgaaaatatatggcatatgtggtataaaatccgagtaaataaactcataaagaattcaccaaccgcttgaaaaatgaccacaatatataatcagcctaagccataatattggtcaataaaaatgcacacttacgtggcaaaaagcaatgatattgtatccaatcaattgcttaaaaacccaaacagcaccatgactatataaaaaagtcagcgggccagctatataaagctttactgtttgacaccttttaagatgcattgtaccaactcctaaaaagttgagtaactgcggtataaaaggattttaaggtattgggcacttgattacgcgcactttggcctaagcgaaaagtgcctaagtccctaaaagaacgtgacaggccacacctgaaaatatgggctgcagacatattaggcctaggccaaaaaatatgccttcgacaccatttaaaggatgacgcatgtaacatgctcccgagtaataaatcttccgggtaatatagaccaagtgtagctcatatgaatagcttctgatctgaatgattatcccttatgggatactccaaaataaatataataattgaatcccgactggcgcaagtattcggttgatagcccttacggggaataataattggtccagtctttgagcatagaaaatagactcatgactatgaatccatgtggaatgtatccggaacaagtccaaattggagatataatcctcacgcttgagttgatgagcccctgagcatatagcttgtccttctgtcatagtcaaaattgtctattggcaataactgacgcagtcggcatggagatgaaatgaccaacatgaagacgaaattgctcatcagaagtaacggaagatgtcagtggtagtaaagatgccaccaatcaaatgtaatgaaagagcataaccatggaggagaagaaaccaggcggtaacagtcacggccagtagaagagaagaagtatgcgcccaacaacaaccaaagaacaagcggcggtgacaaaagcaaaccaacgatgaagacgtagacgcgcatcaacggtgatggcgaaatcccccattatgaagatgaagaaaatagtcggcaatggcaaacgcatccgacggtaatgatgattagcggcaacagagatagccggctatgatgacgaagttgttttataacgtcgagcatagtagactatgttgtgagcctagtcagtatctttgatgaacatacccatgtcgttggtgaggtaatagtaggaggcagtcncagatagccatcagatcagttgcgacgcgtgaatgagtagtggcgcctgatacggtatattctcattcggcatttgtagggtgttacgcccagagtatggtgcgctcagagtgcagtcacctcttagcccggatagttaagccaggcccgataaagtaaaagagccggtgataagaccactgtccgccagcattgaatacaatttggaataatgtatgctagcatgcgttatgatcgattagat

SEQ ID NO: 47058 - DNA, 671 bp, Oryza sativa
cagactaattagatcagcatcaaattttttcatttgatatagttcactccataaagaagtccactagggcgagaagatataatttgcagtagtttatcccttgatccggtttgatcactccgtaaaaaagaaaaatacctgtagcctttaaatgcgatgaaacaatgtaattttctggtgtcatagaattaataactgatatacttgaccaaacaagttccaattctgttatttcatctacatggtttagaaacaaacttaataaaactctcaaaaaaaagctactaatcactgataccccccaagctagtagctgaactactaataaaacactttataatcgttaacaacttgttgacccgaaaaacacacaattgccctgggagacttgttagctccagtgcaggtccaaagtttggtgagaggtgtgcgtcccaacaatttgatccttgcacttgccagatttccaattagaaattcaatgggccgatcagttgacaggccattggggtatttcaggccgtgccgaaccccaccgttgcaataggggttcgggcaattcggctttttgcccaaggatattaaggtattgaaggcaatcacttggcgtattttattttggcatttaatcccattgaacccatcggttggaagtccaaatttggtcaaac

SEQ ID NO: 47059 - DNA, 1034 bp, Oryza sativa
  unsure (1)..(1034): unsure at all n locations
agagccaattaatatccataaagaaatttttcttccactgttttacagggcaattatgttctcccccagcgtcacaagttaaaaacgtaggagtccagcacagcagtaccttttctgcaatgccagagagatgtctccggttcctccttccctgaggcttaggagtaggagtagtagttattttttcgtttcgacttgtttaacattatcgttaacaccatcaagtgtcaatgccagtagcctgctgtatctgatcatttcttccatccctcttctaacgccattatcgttttatctcaccttgcatttatgttcaagtgaccatggttcttgacagaagcagcccttgttctttcctgtccctttgtttgttcagtacgctattattctcttgggtactagaccttgtataaaccggttgtgaaatcctcaatcaaataaaagttaactcgaaatttgtggcctgttccaagtgtttggcaaaccaatatgtatattatccacccgattatctaatggcaatacagtgcctaaaattcctgcttccggagtcttaaactttacccgaatccaatctggaaaccgaaaagacagctgcttggctgatggcaagtcactgggtacattgatttgtgttaattttcagtccaataaaacagcgcaaaaattgtaagggtgatccctctttagtaaagccatgcattctgcaaactctgttgcaatgcaagctgtatcctatatccagtgccgatgaaccaattctgtttgcagactgtaccctatctctactctacaagccaaccaaaggaaagtgtttgatctgcagtggaatactagcaggtattccaccatttcagggttgggagtgtgattgatatgcaggagaatgacattgtgcaaaacattggccgtcaggctgccgctgccgtcgccggtggtgtccgtgagaaaagcccgtggtggtgtntggcccgcggcnaagagttgcttcaacaagatgggcttgtgtgcatgggcggatcaccgggtggcta

SEQ ID NO: 47060 - DNA, 697 bp, Oryza sativa
cgcatcaagattggtgaaatcttcgatcacccttggctccaacaagatgggagttcatcatcattcggtatgatccaagctgcgtcctctcattctaaaccagaggtagagaaatgggaggctgaattggagcaagcaatggagctaaatgctttcgacataatcgggttcgcctcgggatgcgatctaagcgggttgatcggtccattgccagatcgagttcgattcgtcgtgccgggtggggattccaagtcagttctggacaaagttgagaagctagggcgagaggaagggcttgttgtgaggaggaaagaggaagaatggcgtggaggagttcatgtgaaggcaacaagtgggaaattcactgcatatgtgaaggttagtttattggccaaaaagatgctgatgatagaggctgaaaagtatatcggaaacgagatttctaaattttggcatcaacttcagatcgggtaattattcgtcagaaaatgagtatatgatgaacatgtttttatgcacgagatcgtcaatatatagaaaaaaatagtttagagtaatactccctccagattaaaaatactttggcgtttggatataacaacacgatcctcaaaaactaaattttacactatttttctatacaatagagatcatacaatattatagaagactaataatatatgatttataaaatacc

SEQ ID NO: 47061 - DNA, 1079 bp, Oryza sativa
aaagtttaagactccggaagcaggaattttaggcactgtattgccattagataatcgggtggataatatacatattggtttgccaaacacttggaacaggccacaaatttcgagttaacttttatttgattgaggatttcacaaccggtttatacaaggtctagtacccaagagaataatagcgtactgaacaaacaaagggacaggaaagaacaagggctgcttctgtcaagaaccatggtcacttgaacataaatgcaaggtgagataaaacgataatggcgttagaagagggaaggaagaaatgatcagaagcagcaggctactggcattgacacttgatggtgttaacgataatgttaaacaagtcgacacgaaaaaatcactactactcctactcctaagcctcagtgaaggaggaaacggagaacatctctctcgcattgcagtaaatggtactgctggtgctggactcctcacgtttctcagctgttgaacgctggaggtagaacagtagtagcactggtaaacagtggaagtaaaatttcatttatggattattaatttgctattaaaggacagtttaaactgatctaaagccaagctaacatggtgaacttttgtggctaacgcaagtatggaagggttgccatacaatgtacaagctaacatgaacgttattgaagctgaaaaaactataatgtaatactcctatatcctactgacatgtctgcaccatatattgatccatgagactcattcctgactggccttttactggcacatgcatggaacaatcagcttaaagttaacagtcagctatactgcatttagctgcacgcctgcactacaacagattttgcaactgccattacattggctaatagagaaagctagcatacagttgaaaaccaaacggaacaaacccccaacgcttaagagcacatgaaaacctgctgccaaaactttgatgttacagcttacaataacaatcagaatggtctggtgcttctgcgacaaacaaatgtttcaaaactcgtcccttttgcaccattaaatatttctccctaggcctttca

SEQ ID NO: 47062 - DNA, 664 bp, Oryza sativa
agaatacaatctgcttaaatgcccactcctctgtcccacaaaaccccaatatatctgaagatgtaccaggacaacgtgcgtgcctaaatacatcttcaggattggactttttattggacgaatatattattatttattatttatgacgttaaataaacaagtaggacatgttttggacttttggtgacacaatacatacttgtgtccctagaatcgtgaggcggggatttcaatattacaatgtcaatgaacaagaataatacaatccgctttagacgattggctcagtaggcaccatggttccagcacactttaaataattggttgtttaacttttacatcacaatcacattcttttttaagggtcaagatgacatagataatattttttagatttcaccataaccaattttgaatataaacgtgaaccagatttgttagatctatgagtaattttaccaataaatgatcgaacttctgaacaactttttcacccaaattttaataaacaacgtagggcggcgtttaagtgttgggcttaggtgaaagtaagcgtcgggctacggactttaagggcaaaaaaaaagttgaggttgacagataccaccgccttaatttttaacccaaaaaaaaatccattgaaagaacatcccctttaaactag

SEQ ID NO: 47063 - DNA, 657 bp, Oryza sativa
  unsure (1)..(657): unsure at all n locations
ttgtattttttttaaaaaaaaaacttgacccaccaaagacaaaatagaccctgtacatcctgtgtagaataaaaccttctcacgcaggtcaagaaagcccttgaacccatgccagcccttacacaatggcattggagaacgaccaacaaccgaggcctctagctgtaaaaattgttagcaatgtacattatagtaacttttatcaccaccaaaaaaatataattcaaattcgatttacatattgagaattaaaaaaagataaatccagagcactttgatttgattcttttattcctagatgggtgatttaagttttaacttgattttatatagagtattttatatatacattattaatgttgtcgtttttttataaaaagatttaccaactatttatatgatgtttaaacaaacaagattatattccctcaaatttaaaacacttgccacatactccctccgtttccaacatataagcatttttaactttgaccattaatagtnaaataataaaaaaagatccaatcatgtaaattgatggtactagatttattattaaacatactatcataatgtgcaactcttttaatttaaaaataactttatagatatngntagtcaaagtagcatctccgagactgtaccagagtccaaaaa

SEQ ID NO: 47064 - DNA, 1484 bp, Oryza sativa
caatcaaaatagacaccttacctacttttttcaaaagaaataaaaaacaacactaataaataatgaacatgattttagatgtagtaggtattattctggaatactcctcgtcggaaacatatggaacgcatttccctcaaaacgcaaaaaccggggccccgagccctcgacaccaaccccgtcggatgtgaagccgacggcccagatggaggccagcggtgccaatgcgtaggccacgcgtgcctctgcgcaaatcttatctcccgggaggctccgctccacttcccttcccgagtcactcaaaccatccaatccctccaccttcccttcccttgcccccattttccaccgccgccgcgccttgcccccattccccaccgccgcggtgcggccgccgacgacctccacacctcgagcacgcgtgccgccgacgaggtgcccttctctctctcactctcgtctcccccattcctcccctcttcccgtgtcccgtcgtccacagctccccgaccaaatccctagccctactattccccacccaccaggcctccctcgcgtggtcacgccgcacgatcgggcccgacagtgccgccgcttcttgccctactgccgcggttctttaagaggttgtcctgatttgctgcagcccagtaggtattgtatatttttctcgttggtaaatttggcagcaaaaaaaaaagtgtttaataccgaatgttataaacccgagcatctcatggtgtctatatatcagcatatatgatatgttaggattggtaaggatgcatatcacacgattacaattaccaactccacctcgaagataataagcccaatagtctaaccctaaaatccctccctacctgtccgttccttttctcaacgattcccagaagcgccgcttatcctcgagccgagtggccgacagcgccgcccaggagtcgaggagtcgtagctcgtagcgccacccttccttgtgcgcgcggttgtgccctttctcgccgccggtctccccgcttcacctcgcatcctcaacgtcaacagctgccatccgctcctcacgctggctatcgggaaggtcagtaggtcacgccgtctcctttcctacttgcctccggccaccctaagaccccaactcgcctgtttctcgcgcgaatcgtctagttacccggcgggcgacacccctactcccgggtggacgctcgtactcgtcgtcatgcttgccctgctttctttggctcacgagccaaacgagcccgctcgagctagacaactagccgagcctagcttgggtttctagctcgttaggataataggccgagcctagctagaccgagccgagctggatcgacatccaccccctacacgcgtgcctttgcccaaatcttatctcccgggaggctcacttctctcccgagtggctgcgacgaccttcgcagctcgagacgagtgccactttctcttctctctcttcatcccccatg

SEQ ID NO: 47065 - DNA, 725 bp, Oryza sativa
  unsure (1)..(725): unsure at all n locations
gacgctcatacacaaaacattagtttgtaaacctaattcattttcagtttttcatatattctataacacgttaccctttgagcactcgctcgggggatatttttatctaatgttcttttctgagtgttgatttcaggaaaattctattcaacattgtcgaagacttcatgtctctgtggttctacaccaagatcgactaaggcgagtacgacaaatgttgacaaggctccgtcgtagactctgcgccttctcgatcactcaagaatggttggtggatctcaacaaggaatacggaatgaagagatggtgtacccgccaagataaaatttcatgacttcaatccaaattctcgattacagcaagacgggagacttagtcgtatgctctgtactttcttggttgacgttggagattgactcagacaaaccctttaggtgcctgcacgaggctgataaaggaaatctaacgttatctctgaactcaccgaaaacggtcacatgagctcgataacagttccttcaaggtctgctgtggagaataggaactcggtcatttgcattgaagtcgggggctactgtcagggttatggataccacatacctaatagtaggtgactaaatcttagcaggacccaccacataccatgttctatacggaaacaacctgcggatattggaggagttatgggataaggaaagacacccggaggtctatantggatacct

SEQ ID NO: 47066 - DNA, 669 bp, Oryza sativa
tgacggttgaagctttgtggaagtccatacagtttctcaatggcgaggctacagggtggaggtaccttggcccccacacttggggaacaacctaaactgttgcccaggtgacctgcacttacaagagatatttatgctggtccacaatgtgtggtggcgaaaagtggggatgtgaatgtgatgaacacacgtgaatgaactaaggaatcctaaaaactggacacattggtaagataaaaagtgaattactttgagctaaccgaagattatataccgacttttcgcgcagactggaggcacgattaaacacctgtgagcacctgctgctcagtgacaatctacgacatcttccagaatattaaccatgcagcatcaccgacatttcgacataggaacgagctcacgggacattgccagaactgatgccgtgagttaccccattgcgtgtcttgtaagccgcatgagaaaaaatacagtgcccgacaaggattgctaatttaattacaggatccccaacccaacctgggtgcgacaagaaagctagcaaactgacatcaaaagcggaaccgtgttatatttgtcattcagggcatgcactgaatagctttctaacaataaaacaagacagccaacttggatatccataatttgaacccggcagaagccggg

SEQ ID NO: 47067 - DNA, 957 bp, Oryza sativa
  unsure (1)..(957): unsure at all n locations
ttattgagtatccttgcaaggggaatgttggaacatagtatttcatccgtttcatattataagactttttagtattacccacatatgtgtgtctagattcattaacatctatattaatgtgggtaatgttagaaagtattataatatgaaacggagggagtagtaagtaaactacccatctttacctatctacttaaacttttataatgaactagtctattagtgttgtactccttctgctcaaaatataagggattttaggtggatgggatatatcctagtactacgaatctagacatgatcctctccagattcatagtactaggatacatcacatccaactaaaatcacttatatttagggatggagggagtagctacgtatttcctctccaacttcacgaggctagagatgccaccggccggcgacgacaagtcgccggcggccaacggcgccggcgacggctattcaaaggtactgcagggccggtacgagctcggccgcgtgctcggccggggcgcctcctccaaggtgtactgcgcgcgcgacgcccgcacgggcgcccatgtcgccgtacgtcaaggccatccgaaagcagccgcagccgcactaccacccatgtcgctcgcccgaggcggccgccgcggcgcggaggtgcgtggagcgggaggtcgccgcgctccgccacgtgcgcggacacccgcacgtggtggggctccttgacgtcctcaccacccgctccaccgtctttacctcgttctcgagctcgcccgcggcggcagcgtcctgtccgcgctcgacggtcgcggcgtggggcactacaaccagccccgggggcgccgtctctttgtgcagatgggcttccccgtggcccacgcgcactctctcgactgttccaccgngaagtcaagtaaaaaaacctcttctgacgagcgtgccgacctccggtttacgact

SEQ ID NO: 47068 - DNA, 675 bp, Oryza sativa
caatagtatcactgccttgttactacaagaactgccccagttttcaataaaatctcgggccactataatgttctctggttaagcatctgtccctgtcgaatcaaataacaggtcaaagtgatgagaaagtgatgacttgagataaaaaaaggtttaatatataatatgcacaaatcattcatacaaaaacattatttgtctcctcgatatattcctaagaaaatgaatacataatagacattcttttatgcaagaggcaaatatatagaccagaaaaaatagtttagagtattaattgagagtggacattttcatatttatgtatcttgcaatgcgcaatacaagatacaaaataatactttgactaaatcatcctaaaactataaatttaagttggtatatcacaaattatatatttagcatttaatttatcacagaactacaaatttaagatggcgtatcacaaaactactaatttaataataaagttatcataaaaaataaatttagcaccaatttagtcaaaattctataacactcatagtttcgacataatggtaatacaaggaatttaaactctaaaatctatagttttgtgctaattttatatttagaaatctatagtttttttacttgctttaattatatagttttgtgataaatttaatactaaat

SEQ ID NO: 47069 - DNA, 714 bp, Oryza sativa
ttactgtgggctgttcaagtctgtaccctattttttgttctctagttagccattgtgcaaattttccttgaatcagattctctacctgttgtctatgtgtgttatcttggtctgttaatttgcatagcccacttgttcattacaaaaggagatctttactacttacaaaaaaaaaaatctagtgggaaagtggttgcaaataattgaagaaattatagctagaaggtgtatccatggtggtggcttgagcccttgaatcccgttattttgcatacaattacatatgttattatagcttgcagagtacaccattagctgtagttacctggtccaccgtagtatacatgcatacagtaagcattaattccataactatcggaggtacgattttgctatatatttgtcgacaaatttttcctttgacagatgtaattacagtacaatcgtagtgtaattatattgtaacttgcatgtaattacactgtaactaacttgtatgtaaccttttaaaaatctctccataacatgttattttggtaaaatagaggtcatgggaacaaaatctttcacatatgtgtgtgctatgatttgttttttttttctcatcaaaataaatcttataatagatctaacgattcacaattatgtgaaacttacatataaattacagtgtagttacatgccagttacagtgtaattacatattagctaccg

SEQ ID NO: 47070 - DNA, 968 bp, Oryza sativa
  unsure (1)..(968): unsure at all n locations
ttattaataaaaatttaaattttcaactttaaatttgaagttgatttagaggtttttcatcgaagtttattttttagcctttgtttttagatcgctaaaaacacgtaatatttttattaataaattatttttcatttgcaaatatgtcccaactgatattgctgttaatatgttaatatggtatcagagatagaggttattgattaatccgcgcaaggggaatgttgttggaatataagtaaactgctcatctttacctatctacttaaacttttagatcgaactgtatcaatgttgtagctacaaatgcatacaacacaataaatatgtgtgcttattattgttaccaataaaataagtcatgtgaacaatttgatgttatgctgtgtttgtaagtgcctgtatatataattgcactttttaattctgccttttttaacatggtgcacatagcaatactttgtgtccaggtacacagcccagctaaccactgtacaaaggccttttagcacagagactccacgagaccacgagcagagaatcaaccgacacaaactactctccatcaaatcatcaaaccaaacaccactactttcctcttcaacttcacgacgccggagatgccaccggccggcgacgacgagtcggcggcggacaccggcgacggctactcgaagaaggtcctgcagggccggtacgagctcggacgcgtgctcggacagggcgcctactccaaagtgtaccgggcgcgcgacgaccgcacaggcgcccacgtagccgacaaagccatccgcaagcagcagcaagcggaccaccacccgtngtgccgcttcgccgaggcggacaccccggctccggaagtgcttggaggtggaaacgggagannccaattctccaaaaccctcccaaggggggggggggccaaaacaactcccccgctttctcccggcgggggggttttttttaat

SEQ ID NO: 47071 - DNA, 1733 bp, Oryza sativa
cgacataatcgggttcgactcgttatgcgacctaagcgggttgatggggccatagccagatcgagttcgattcgacttgccgggtggggattccaagccagttctggacaaagttgagaagctagggcgagaggaagggcttgtagtgaggaggaaagaggaagaatggtgtggaggagttcatgtagaggcaactagtgggaaattcactgcatatgtgagggttaatctattgcccaagaaaatactgatgatagaggctgaaagggttattggaagcgagattcctaaattttggcatcaacttcagattggtaatctattagtaagaaaatgagtaaatgatgaacacgcttttatgcaagagattgtaaatatatataacagaaaattagtttagagtgttcaaaatacttggatataacacttggcatttaggatactccctccattttaaaaaattcttggcgtttcggacataacaacacgatctccgaaaactaatttttaccactattttctattacaatattatagaagtattagtaatatatgattttattgaagtacatctaatcaaaatactttagaagttattcagagttaaactttttaaagtttaacattagttatgtttaaaacgataattatttttaacctagagggggtaattgaccgtggacgtttttcacatatgtatatcttgtaaataaatacagaaatatggatacggaaatcatctcattttgccttgttaccgcaagtagctgccacagatcttcaatagaatctcccgcctgatactagtactgataatgttctcttgtttacgcattctgtccatgtcggatcaaataaacatgacaaagtgatgactttggatgagaaaaggtttcatatataatatgcacaaatcattcttacaaaaacattaattgtcctagctttcatcttcatccaaagtactcctcaatatattcctaagaaaatgaatacataataatatagacattcttttatgcaagaggcaaatatatagaacagaaaattagtttagagtattaattgagagtggacattttcatatttatgtatcttgcaatgtgcacaacaagatacaaaatgattgccgatttcatttttataagagtaaattttataaaagtatagatgctttgactaaattatcgtaaaactacatatttgagttagtatattacaaactatatatatagcattcaatttatcatggaactagacatttagaataaagtatcacaaaactattgatttagtaataaaattatcataaaaaacaaatttagcaccaatttaattgcaaaactataacgctcatagtttcaacataatagtagtacaagggatttaaactctaaaatatatagttttgtgctaattttatttttaaatctatacttttttatacttgctttaactatatagttttctgataaatttcatactaaatctatagtttttttatagaacatcttaattctacagttttgtaatatcttgatcaaaatatttgtagttttgctatttttatcatgaacggaccataagaagcattccatgcctgttacttcaagtatctgccatacctctctgcgtaaacaaaatcacgatattcacatgtggtcagatttatccctaatttgattttttacagaggaagtagctttaagagaatctcctgcttgacacctatt

SEQ ID NO: 47072 - DNA, 712 bp, Oryza sativa
aggatgaatagctatacacaattcttccatcaaacatattaagacattcgacgctccgagagaaagatatgtgagacattgctaggcctttagcctgccagtcaacttcagcctgagatgtgcctgtcaaaccactcgaagacggcaaccagatgtgttacacattcagaagacttaacaaaaatggctaaagatctacaacatctcaaatatctttaactcatactcatgtttaatatgtccctaacaaaaggaacacactaaacactttcattcaagcacatgatatctcaacatagggaattctaagttctaagttttagttaagtttatacaacttataacttagataagtatggccgattggccgaatagttaggttcgcggaagcatcttctacccaaaagatctttcctgcaaccgactagggtagaccctagtaagaaccatcctggaagaaagaaacatccccatcgaaatagagtgatctcacctgcaaccaattctaaacatgcaacaatacaacaatacacgcaagagtcagtacataaattgtactggcaagcaccaagcaagcctaatactctacatgcatggcgtattcaaagtaaagcttacatgggataatttagcataaagcaaatttagttttgcaaagacatttcaaattcagatttattttccattataattcagcaagcatacacttagc

SEQ ID NO: 47073 - DNA, 1218 bp, Oryza sativa
  unsure (1)..(1218): unsure at all n locations
ttggttttaagggagaaatttttttcaaaatttggctcccctaacacttgaaaattcggcttattgaaaaacttggaaacctagccatttncggaagctttagagaagtttaatttaagaaagattagtaagaatttgggagtagatggcctacaattaatgagaccaaagcaggggctttccaataaaagagctccttttataaccactttggcaagatgaaaaaaatattcaatggttgctcgaatggaaggtccatttttttgaaagaccacatccctataacatgataattcgaaggcacaaaatggttgagaagccaaataatagattggataattcctcccacaatactatgagaatggaaattttagagtctgtgatttgtcatacttatctaaagnaaacttccagttaggattaagacatcaattacccatgattgatttgtacaaaacctaaatattatcaattatcaagtatgtttgcttaataatcttaatgggtgtttttatttctttggcgagtagccttcatagcaattctcataggggatatgcaatatttgacgtctccaccctacacttcccattgtatgcctattgaggaagggtaaatgtccgtacatagattattgtattatttgtcatgttcaagaaatattcccattgtgtgcttattccccatgtttacaatgtgaatttcattgtatgcttatcgatgtagggaaaatgcttcattgaagcaatatttgtcgtctccaccctacacttctcaacagttccagggttgattcagacaagatattggaagagtctaacctaattggcatggagggagagttattatattgttgcctcatgttcttctgggcactgacaaccactacataacctagtaaataataacgaatcgaacacaacatgtttgccaattagattttatggaagtacaaaagtaataatggtttagccctacttacccatcctcaccggccgggaatctaacgtaacaagaaaaatataataagatcatggtggagtagaagtgttggcggttagcaatgtttaacctaaatcacatgcgaaaccaacagtttctccctgcgtattccttcccgttgtaaaggtaaagacacggccacaccgtttcagtctcaaccatcagtttgctggaatttcccagcgttctagaatggaatatagctaaagccgcaag

SEQ ID NO: 47074 - DNA, 967 bp, Oryza sativa
  unsure (1)..(967): unsure at all n locations
cgcttgatgacnactggatgaatcaagccgaattcnagctcggnactcttgtttctctattcaattatttatccgaaagggaaaaatgaaacacacacacaaatccattttttttcacattattattatatatgtttgagaggtatttttgtttaactagataaaagcctacactttgaggtgagaatttgagaagaaaaaatcaagctgaaatattaattggggataaatatttttaatatatttagagctgatatgtgaaaattcttaggaatgaatgaaaaacaataacaacatgttctcttaaaaaataacgacatggttattctagtggctatgtatcttcttatccaacgactgctatctttactctaatattgcaatctaatggttagaaagtgtttgctttatatgagttaatgttccttagtggatatcaattatatagaaacaaagatatcattgcaacggatgatcattttaggtaaactttttgcatttttagcatttcaaaaaccacaactgagtgactaaatcgaccaaaacaactttaaagtaactctgaaatcaaaattggctgctacttataactaaggcaaagacaagcaagctcaagtagttattaataagtattgcttgaaaggtaccaagaaaaaaaaaacactagtaatatatttttgcaccatcgtgtagcatcattacccttcttgattatagggcagcaatgcttaattactgtttgtccgaatatatatcagtacataacctgtattttcggatcggtattaaacttttgaattgaaaagataagtaaccccttcaaacccttttttttttttttttttaaattggcccttttattttttcaacccttctttttattagtaaaaatttaaattttcaactttaaatttgaagttgatttaaaagttttttcatccaaagtttatttttaagcctttgtttt

SEQ ID NO: 47075 - DNA, 1582 bp, Oryza sativa
cgcttgatgactgcctcatcactatggccgaattcgagctcggtaccccgttggcagtcaactgcccgccagcacaaatgtattattttcactggcctttgattgctagcgttacagcaacctccagcgaaaacccatttcggccgcaagtaaaaatggttttttagtagtgaatcaaataaacatgatgaggaagtgacgttgactctagatgagaaaaacgtttactatacaaaatatacacaaatcattcatacaaaagcaattacaatttacaaaaacaacactaatgaacatgattattctagatgtaggaattattctggaatactcctcgtcggaaacatgtggaacgcatttctctcaaaacgcaaaaaccgtgcccagacaccaatccgccgctggatgtgaagccaacggcccagatggaggccaacggtgccaaggcgcaggccacgcgtgtagggctggacgaaaagctcgtggctcgttagctcgctcggctcggctcgtctcgtttggatttgttaacgagccgagctagagttagctcgttagctataacgagccggctcgagctagctcacgagctgctcgcgagccaaacgagccaaggcccagtacaaacagcgtgctcaaccacacaccataagtccaacaaggcccacgagacaaggtcacagctcaagcccacaagtagagtcaacggtgccaggtcatgaaacagcaagcccaactaagcccaatagtctaaccctaaaatccctccctacctgtccgttccttttctcaacgattcccagaagcgccgcttatcctcaagccgagtggccgacagcgccgcccaggagtcgaggagtcgtagctcgtagcgccacccttccttgcgcgcgcggttgtgccctttctcgccgccggtcttcccgcttcacctcgcatccctaacgttaacagcttgcatccgcttcttacgcttgctatcgggaaggtcagtaggtcacgccgtcttctttcctacttgccttccggcaccctaagaccccaaacttggctttttctctcgcgaattggctaaattcccgggcgggcgacacccctactcccctgtggcccggccgtcctccgcggttggcttggcctgctttttggcttacgaagccaaccagcccactgagcttacaacttagccagcctagcttgtttttaacttgtagggggatgagccagacttacttaacgggcccactgggttaattcaccctaacgccggtttttgccaatttatttccggagggtattcccttcccgatgttggaaacctccaacttggacagggcccttttttttttttttaatcccattctccctttttcggggccgggccaaattccaccaatccttaccttttttccgcccccctctcttttgtaaccccaaacaaggccccgctttttctctttccgttttaaaggttttttttttttccccccggtttttatttgggggggagccgcccaaaaaaaaaaaaacttttataccccccctgggcgcttccatataattgggcggggggcgcccaccc

SEQ ID NO: 47076 - DNA, 2562 bp, Oryza sativa
  unsure (1)..(2562): unsure at all n locations
aatctaatttggcggtttaatgttcccagaagaaaacatttaaatatttttaaggggggcgagaattgtgtgttcnataaaccaagcacatacacaagattttttcaaaaaaaaagatgggcgttgaaacacaccgcgtccttttccaatttttaatccgtgtaaaagcccacattaatatagtgcccaaatcttttctatttagtataaaggccacttatattaatcacggttccacagttccaagtgtgcttccatccctaatccaagtgacaantgggcattccaatcaccaatccacnggcttcacttgcttcacagaaatccaaagaaaaccaggcctgagcacttgttcttaatcattttttatcgaaanggaaaatgnacccacncncnatcattttcgtgacatatattatatatgttggagagtattttgtttactagaataaagcctnacacttgaggtgagattgagaagaananaatcaagctgaatattaattgtgaataaatatttttatatatttagagctgatatgtgaaattcttaggatgaatgaaaaccatacnacatgtttctcttaaaaaatacngacatggttatcctagtggctatgtatcttcttatccaacgactgctatctttactctaatatgcaatctaatggttagaaagtgtttgctttatatgagttaatgttccttagtggatatcaattatatagaaccaaagatatcattgcaacggatgatcattttaggtaaactttttgcatttttagcatttcaaaaaccacaactgagtgactaaatcgaccaaaacaactttaaagtaactctgaaatcaaaattggctgctacttataactaaggcaaagacaagcaagctcaagtagttattaataagtattgcttgaaaggtaccaagaaaaaaaaaacactagtaatatatttttgcaccatcgtgtagcatcattacccttcttgattatagggcagcaatgcttaattactgtttgtcggaatatatatcagtacataacctgtattttcggatcggtattaagcttttgaattgaaatgataagtaacctcatctttttttttatgcttatacttattaataaaaatttaaattttcaactttaaatttgaagttgatttagaggtttttcatcgaagtttattttttagcctttgtttttagatcgctaaaaacacgtaatatttttattaataaattatttttcatttgcaaatatgtcccaactgatattgctgttaatatgttaatatggtatcagagatagaggttattgattaatccgcgcaaggggaatgttgttggaatataagtaaactgctcatctttacctatctacttaaacttttagatcgaactgtatcaatgttgtagctacaaatgcatacaacacaataaatatgtgtgcttattattgttaccaataaaataagtcatgtgaacaatttgatgttatgctgtgtttgtaagtgcctgtatatataattgcactttttaattctgccttttttaacatggtgcacatagcaatactttgtgtccaggtacacagcccagctaaccactgtacaaaggccttttagcacagagacttcacgagaccacgagcagagaatcaaccgacacaaactactctccatcaaatcatcaaaccaaacaccactacttttctctccaacttcacgacgccggagatgccaccggcccgcgacgacgagtcgccggcggccaccggcgacggctactcgaagaaagttctgcagggcccgtacgagctcgggcgcgtgctcggccagggcgccttcttcaaggtgtaccgcgcgcgcgacgcccgcacgggcgcncacgtngccgtcaaggccattcgcaagcagcagcagncgcaccaccacccgtcgtgccgttcgcccaagcngnncgcccgcgccgaagtgcnttgaagtttgaccgagnctnncnnnncccccntcctttctgcccccctccctccttgtcgtttttctcctttcttttatctcttcttctcntttttctttctcaatatctatancatggcaaacattgccttcctggaaagacctttattcgtaatatttggttcgggtaaaaattcttttttaacccttttattctggatggggcactaccttcctttgcgagttttttattcttctaaggggtttatcgggctacatacattttataaaccttggaaaaaacaattttctgcccgatttaaaagagggattccatcttcaaccgctaatcctgggtggttaatctttcgagaccatctttaaatgtctgtactcactctgatgggccacctttctcacgttctaattgtgaaatctggtagttgttgtcttacccggtgtataacgcactccatattctcgttcgtgaacactttataacgtctctctttttccaccacgtctttttctcaacacctcttctcctgtatagatatgtggcgattaaataacgacaacatttcgattgtctctctgtcg

SEQ ID NO: 47077 - DNA, 3194 bp, Oryza sativa
  unsure (1)..(3194): unsure at all n locations
agggacccgcgttaagattgggtaagggttttaaaaacacaaccctggccccaaagggcttcgcgcagcatgggttcccggcattgcgccgaatcctctaaaaggcggtcaagcaacaaaggggaaggtgttcttnggtttgttctttggtcttacgcgggttactgcgttaaagacgcaacctatggccatgaccgaagttttgcccgatagttcgggtgtcaaaatgtgctcgaaggagtcgtctccntatcggcgaatgcttgaccggaaacgcgatacggcatacagatggggaaatcttcgatcaccttgggctcaacaagatggnagttcatcatcattcggtatgatccaagctgcgtcctctcattctaaaccagaggttgaaaaattttttgctgaattggagcaagcaatggagctaaatgctttcgacataatcgggttcgcctcgggatgcgatctaagcgggttgatcggtccattgccagatcgagttcgattcgtcttgccgggtggggattccaagtcagttctggacaaagttgagaagctagggcgagaggaagggcttgtagtgaggaggaaagaggaagaatggtgtggaggagttcatgtagaggcaactagtgggaaattcactgcatatgtgagggttaatctattgcccaagaaaatactgatgatagaggctgaaagggttattggaagcgagattcctaaattttggcatcaacttcagattggtaatctattagtaagaaaatgagtaaatgatgaacacgcttttatgcaagagattgtaaatatatataacagaaaattagtttagagtgttcaaaatacttggatataacacttggcatttaggatactccctccattttaaaaaattcttggcgtttcggacataacaacacgatctccgaaaactaatttttaccactattttctattacaatattatagaagtattagtaatatatgattttattgaagtacatctaatcaaaatactttagaagttattcagagttaaactttttaaagtttaacattagttatgtttaaaacgataattatttttaacctagagggggtaattgaccgtggacgtttttcacatatgtatatcttgtaaataaatacagaaatatggatacggaaatcatctcattttgccttgttaccgcaagtagctgccacagatcttcaatagaatctcccgcctgatactagtactgataatgttctcttgtttacgcattctgtccatgtcggatcaaataaacatgacaaagtgatgactttggatgagaaaaggtttcatatataatatgcacaaatcattcttacaaaaacattaattgtcctagctttcatcttcatccaaagtactcctcaatatattcctaagaaaatgaatacataataatatagacattcttttatgcaagaggcaaatatatagaacagaaaattagtttagagtattaattgagagtggacattttcatatttatgtatcttgcaatgtgcacaacaagatacaaaatgattgccgatttcatttttataagagtaaattttataaaagtatagatgctttgactaaattatcgtaaaactacatatttgagttagtatattacaaactatatatatagcattcaatttatcatggaactagacatttagaataaagtatcacaaaactattgatttagtaataaaattatcataaaaaacaaatttagcaccaatttaattgcaaaactataacgctcatagtttcaacataatagtagtacaagggatttaaactctaaaatatatagttttgtgctaattttatttttaaatctatacttttttatacttgctttaactatatagttttctgataaatttcatactaaatctatagtttttttatagaacatcttaattctacagttttgtaatatcttgatcaaaatatttgtagttttgctatttttatcatgaacggaccataagaagcattccatgcctgttacttcaagtatctgccatacctctctgcgtaaacaaaatcacgatattcacatgtggtcagatttatccctaatttgattttttacagaggaagtagctttaagagaatctcctgcttgacacctattcagtattcacacgttctcctgtttatgcattccatccctgtcaatcactactaaaaaatcatttttctagcgtaaccctttcgtttttcctgatgggttttatgcaaatacgcttgtgaaaataaatgatagggattccggttaccaatcgtcagcaaaaatcaattttcgctaacggttacttaaaagatccgcttgcaaaaatagaggtatttttaaaagcggacctcttaacttaccgctagcgaaaatcatatattttcgctcgtggctgctaatggccacctcccgcaaaaaaaaaaaaaaaaaaaaaaaaaaaaaaaaaaaaaaaaaaaaaaaaccttcactttattaaaattttacccccacctttccccgctcccccatctttccatctcctaactccatctcctcgactccttctcctcaccccctctctcaccacgcctctcctcctcaccccggcccggccctctcccccctgtgcctttcctcctcctctcctcgacccccacgcacgcgcctttcctcctcctctcggcaaccaaggcagggacggcgacgacaacggtggacgtcctccttcctcgccaagccaccgccgtggagccgcatcgactggagcgggccagcggatccggcctgccggatggtcgcgggtggcggattcagtcacaggagaggcacatgtagagaaggaaagcgtgcagacggtggattcggtagcggcaatggtcggtctcctccctcttcagtccaggtggtggacaacctcttttcttgtcgagccaccaccgcggagccgcatcgaccggtcaccgaatggctgcgggagctgtcgggacgacgaaagatcctccaaccccctgccctctcctgatgatgcagtgggtcgaggccacctagtgaccgtggctcggtaggcagcgacaacggcaaccacggcagccacggtgaagcctgtagcgagctcgggtaccgagctcgaattcgccgtagagggatagtcactcaaaaggggacgcg

SEQ ID NO: 47078 - DNA, 2410 bp, Oryza sativa
  unsure (1)..(2410): unsure at all n locations
ttgtcnannntttgaantcgctcggacccancgggaggatgcatatacacgattacaaataccaactccacctcgaagataatatagcatagtatagggnttgccttcttcgtatgttatggccgaattctgatgcataacaaattttccactatatgtaagctcaaaaatgcaaaaataattaccctcgaacctaaaaaaagtgtatacatgcaagggatcatcaatcctacatataaatacatgcaaataatacacgccctgcttggcagccattgttgcggctgtacctaagctactagctgtggccgcggtgtgcatccacagccacagcaatggctgctcagcaggcccatggtctgtaaaatatttcctggcggcgtgcgggcgacaaatccggcggcggagatgctcctgggcagcgtatccatccacatgcttgcggctcgaggcgcgggaggcggtggatcaggtagtgggtggcgcggcggtggctccgggcacgggctgcagatccagctgccgccggcggctcgacgcatggccagcatttttggcagcagctcccggcggtgttggcaatttcatctgcatattttgcagtttgcttgttgaaaatgtgatgaatctgtatgtggatttgagtatggatctgatgccgatttaaattgattttgaatttggattgaaaaaaaatgcagctgctctggatcttatctatttagggtcatgacattaaaaagaaaaaatagagtcatgccatgaaattattaaaaaagaaaaaggtttgtatttaggtccgccataaaaaaatactctttttttagacggatctcttaaatatccgccacaaaaaatcggcgttttcactggcggctactaaaaagatccgtcagcgaagaacagagctactataaaaaattttggcggcatttaaaaccacgcgctccacactaactcccacatccccgcacatgctcacaaacacatgtttagagggacccactaaatttgtattaaagcactttcgcatgtgtgtaatatttatgaaaacaaaagattcatggtggtaaaagattcatggtgggtaaagtttgtatcaacgactctacaaccatacaaccacacctttagtgtgtcctagtcccttgatcggtggttaaaaataggaaccacccaaaaaaagtggcaaccgacccactcctacttctctgcgtattggaatttacaaaaaaaaaaaaggccggtgcacgcacccgaagagtcgcgcgacaataacggcattgctacgtgattgactccatcgccatgttttttgcgcggcatcacgacgcatgattcactcgagtcgactcactccacttccaccgtccgcgcgactcacatcacaggtgcgacgccgatgcccgatagccgactccgcaacaaggactcgaggaccacgaccgcaagttccgcacaccatcgccgagcgtcgccgccattcggccgccccgccacgagcgccaattgctgctgccgccgcccgcgtggccgcgtcccagtgacagcagccggctagtagctctccgccactctccactgcccacgcggctgcatgctccccattccgactttcggtattctgtgaggtgagaccgcgacgaccaacaacactacttcgtttttcaattttaggtcttctacctttttcagatttatgtttaaaattttaactctggttgcattgtgatattaaattgtagtattatatagtagattgttgattgcatctctttttggaaaacatgtagcaaagaagaatgcttctaaattgctttcttccccggttatggtagacgagcacactcaagaacaagatggggatgaagaagatataatgagcactttcatggccattagaagacgtacatccgataagaattaaaagtaatatggtgatcttattcaaacttttatagctatattactaattttatatgttttaagatgctttattaaaatatcatggtacacttatggtccattcttcattatgagaaaaaccgttgtatatacctgaattttaagctaatccactctatgcccttgaattttggttgcttccttgtatatccccaaaatttgaatttgatcccttccatacccctgcggtcagttgaccgtctaattactataaagatgactattttaccctttggataaacatggaaatttattaattaaattactaaaaatatgaaagtttgtcgcatgaaactattatagttatggggttgttgtgtgatgtattatttatcacaaaatttatttttagataataaaaataaaaatatgtatttattttttaaaaaagtcataaaaaagaggagcattctaaaagataggactacttatgctcactataaaa

SEQ ID NO: 47079 - DNA, 2283 bp, Oryza sativa
tgttcaagtaaagttattaatcaagtttcagtccctgagtgcctgtccattttcggaggtaatataacaaaacaatcatcatttgaaaaaaaaaaatcgaccttttacaatagatgtcgagaacttgtaaaagatttgcacattattccatcgaaataacatggtgcgaaggtctaaatatacaacgaaccaaaattttctgacaagctgatctaaattcatttgtctgtccacttttaggtgaaataacttgctcgagtgtccatctgtttgtcattttttttgaaagaactaaaaagagaatggaactaacccttgtgagcgcctgagcgggctcctcatttattgatttttttaatcataaaacaaggtttagaaaaaataaactataatacccttattaaatgaaatatagctagggttggaagggtggttagggtaaaatgaaaaaaatgaatactaagacatgattagtactgtagatgttaattattttgagataaaatttgaatactaatgagacaattattttagaacggatatagtatttttaaggagaaaaaaatatgaaatgttatgagaaaagaaagggcaaacgatgccggcgaaagtcaagaattgcgtatcaagtaaacgggtatgaccttacatgatggtatctttaattaaatattgctaactgatgccaacttatgtgaattggcgtgatgggagcttttaagtggcactatcaatcagtcataacattttgacttgttgacatgaacatatatactgtagaaagctacgaatttgtattaatttcctgtggacatgaacatctcgtggagtcgaagctaattgtcagatgggcttcttggaaatttcatcccatgcatggatggagatttgcaatagaatactctcaaactaattactcgtgctaaaatcgaaagagcacttgtgccaagggctttgcataattgcattttgggaatttcaattaattaaggatatatccagtgacaagctaaatattaaaaactcgtgaaagtcatacctaaaagtttcgtaaattcataaaaaaaatactagtgataggtgtagatatgaaatgcattttcaccaaatctcaaattcaaacttaatttcatttatgagtaacaaagaagaaaaaaaaggtgaatggtaacaagacactgttcatctgaaatttgtctttctttttctcttaaatgaagttgagtttagagttaaagattttgtgagaatgtattttatatctacacctatctctaatatttttttcatgattttaagaaacttttaggtatgattttcacgagtttctatcacttaactcgttttcaccggatatgtccccatttcaatttagctgtgatatattttctccatttctggtaagccatttattttgtccatttttccttcaatagtttatttctgccacagggtttatctcactgaccttgaattcaaacagtgaagggggaaattaacgactccctccctttcatactataaggcactttaactttttttaattaattttttaagtgtgattaagtttattgaaaagtataacaatattttcgacatcaaacaaacatattatcaaaatatatcaaatgttatatttgtataactaatttgatgttataaaagttgctatatttttctataaatttgattaaatttataaaaaaattgacttaaaaaatcaaaacatcttataatataaatgaaaagaatagttgtcactccatacatatgactttaacaaaaaaaatctcaataagaggacgacttcaacaattcgccactttacagatgttagttaatattttttcatctaatatttcagtgctgttaataaaacatcaatgtagccatttttcacactaccatctaataggaggggaaaattgatatgaattaattaaaataggacccatgattagggggtaaagtgtgaaaacaaaggctaagatgatgtttttatttagagcagtcaaccattagatgagaaataattaattgagatctcttccatccccttctcctgtcgtgcacgtgcatacttagaaagtaaccatcggattcaatgtattaggccccgtttggtaggactctaaactctagctcccagctactaactccaactccaactgaagtgggtacgaaagtgtttggctagagtagttagctccactccaccacgtctcttgtaggcatttcgtcgaacacctggttggcgtcgcactgccgccgccatcgccatcg

SEQ ID NO: 47080 - DNA, 2287 bp, Oryza sativa
atttttttttgtttttataaaaagtttataaaactctcttaatagagaagtggtgcgtccactgattttgaaaaaattacgggggccccccaccttcccctcgaggagaaatatttcttcaaaagagggaggggaagaacacggagattttttccccccctttaggagggattttttttttttttaagggccctttttgggtgtagtggaaaaaaggccaaattttttttttaaagcgcgccccttggaggagaaatgttatgggattttcccccaccccttcccgtggggcggggggtttttgaagagacccccggtttcttttttttggcgccgttgtggaggttctaaaattgggtccccggttttacttccaatcccaattaagggggtacaaaggttttggcaaagaatttacccccccccccagtgtcttttgaaggctttttgttaaacacttgggttggtgttgcatttcccccgcattgccatggtttagccggggtgtcacgttggtgcaagcccagggcccccgttgttggcccttgggccccggccggaagcttccaatgaacggctaccgccgttgaagggccgccagcgaccggccacagcctgtgggcctcccggggaaggcgcgcttgcagctgccgatcggtccgcggctctcacgcatcgtgccaggccaccagtgctcaccacaccgtgccaccattgcccacccccgccagtcgccgccgacgccgacgccgacgccaccgcccgtcgctgctgtagggaggaagatggggaggagagagaattggaggagatgaggtgtgaaggggtactttagaggcatttttgtgtaaatacattaaaaaattaaagggtagagggtcttttggggtggagtagagctgtggagcagcaaaagcccacctccacccccgtagtacaaatttgtggagtagctctgccaactccactccaaaaaatagaaaatttataccgtttggcacagttccagctctagataagttggcgttaggagctagagctgtgctaggccttattcttaatcaacattctaatctatccttaccatatgagcatgacccgttataatgtaggggtatattacttatctattaaatggtaaattattaaagtcatctatactcgagcaagaggaagctcgtgtgctggtagcacagtgcacgttatgtgcacagcgccatagacctagcttgaagaatttcccaaaaagaaaaaaaaattcaagtgattgagtgctctaaataagcatacaacggaagaaacaagggaatttaaagaaaacaatgtgtaattcaagtgtagaaggatgatatgtcccgtacaatgggaatttcattggtatgtgggaaatttcatttacagcattgtatgcttatttctcaagcatagaatgaggatagaggctatcgtatgctagtaatggttgggtccatacatggctttttttttactcgtgtggctcataaacgagtgataaggttatttgggcgtcgtcgttaagatctaaggctgagttcttatctatacttttccaactcacctccctcatttcccgcgcgcacgtttttctaactactaaatggtgtgtgtttttttaaaaaatctaaatgaaagttactttaaaaaatcatattaatctatttttaaatttattttagttaatacttaattaatcatgtattaaacattacttttgttttgtgtgctaccaaccctcactcccaaatacaccctaaagatagtggtcatcatgggctgggcacttgccgcagccatctgagcaaaagtcagtccacgcactcgcaaaactaccgcaaaatactagtacctctactgatcatgagcccaatgtacaaaacatctcggcctcctccactaaacaaaactccattgatcattatttccttacctcattgccactataagcacaacacttgagggaggagagcgacgctgatgccgcctcatataatctccatcctagaatgtaagaaaattatagcaaactgatggttgagattaaaatagtgcggccgtgtctttacccttacaacgggaaggaatacgtgggaagaaactgatggtttcacatgtggtttaggttaaaacttgctagctgccaacgcttcttctcctcctgatcttattattttctttttgttgccttaatcttgccgcctaagctaatatccattgtggaacgctgggaaaattacagaaactggtggttgaaacttgaaacgtgtgg

SEQ ID NO: 47081 - DNA, 3800 bp, Oryza sativa
  unsure (1)..(3800): unsure at all n locations
tgtaaaannnttagaatccctctcgccacccatcaaatattgcatattccctatgagaattgctatgaaggctactcgccaaagaaataaaaacacccataaagataattaagcaaacatactgataaattgataatatttaggtttggtacaaatcaatcatggtaaattgatgtcttaatcctactgggagttttcctttagataagtatgacaaatcacagactctaaaatttccattctcatgttattgtggaggatattatccatcctattatttgtcttctcaaccatttttgtgcatcgaaattatcatgttatagtgatgtgttctatcaaaaaaattgcacctccaaatacgagcaacacatagaaatatttttatcaatcttgcaaaagtggtttataaaaggtagctctattattgataatgcccttgtctttgtatctaatttattttgaggcccattctacttcacaaattcttatcttaatctttcttcaaatattaaacctccatcaaaagcatacagtaaaattagcttaggctcttccaatgtcttctccgaatcaagcctggaactttcgacaagtgtagagtggagatgacaaatattgcttgaatgaagcattttccctacctctataagcatacaatgaaattcacattgtacacatgggtaataagcatataatgggaatattgcttgaacatgagaaataaggcaataagcaatgtacagacattttctctttctcaataggcatacattgggaatttcaagtgtagggtggagacgccaaatattgcttatcccctatgaaaatttctatgaagactactagtcaaagaaataaaaacgccaataaatataattatgaaaacatactgataaattgataataagttaggtttggcacgaagcaatcctagtaaattgatggctaaagcctactgggaatttttcttaagaaaagtatgggatatcacagcccataaaattttctattctcatattattgtgcaggatattatccatcctattatttgtctcctcaaccatttttgtgcattgaatttctcatatcatagtgatgcgttctataaaaaaaaagtgcacctccaaataccaacaacacacagacatgcttttgcacaatcttgcaaaagtggtttacaactagtagctctattattgataatgcccttatctttgtatccatattctgaggcccattctacttcaaaaattatgtttttttaaatctttcttcaaatattgacctccatcaaaagcacacagtaagattggtaatgaatatgaataaagaaatcttccgatagtaacactaagtataggtatgttttacgctgttttctcaattgtttttgttcctcgaggaaattaacgtatgcaaagctattttgcataaagtttctcgtgtgtgcacaaaatctcgcataggtcctcgaaccacctgaagctaggtgcgatcttgtaaattaatttaaaagttgtgccaactagtgcgacaacttgtctagctgctatgcctttgatcttaactaagaggtaccacgcgggcaatatttgcacaccaacaatatttacaaaaccaatttaacaacttgtatgcatgtagttgaatcagctaaggaatatgttggttctttttactatattcacttttacagtataaataagtgctaattaacatgtttctgaaaaaaatattgtgcaaatcttatagagctgcaatagttactgatggttggtgtcatacattgtcggttcacattaaagtactcgagtagagttttcattcgattgtgtggcatagaaacgagcgatagaggttatgtgtgtgttgttaggatatggagacagtggtcactgtagactaggcacctaccgccaccagccaagccaaaatcagtccaggcgcgcaactctaccacaacaaactagtaacgcagccggtcgtaagcccaacgtacaaaacatcccggcctcctccactcaaataactccatcaatcgttctttccttgcctcattgctagtgtaaccgcctcattcgatagagggaagcgatgccaacaccgcctcagctaatcttcatcctggaaggccaggaaattacagcaaactaatggttgagattgaaacaacacagtcgtgtctttaccctcacaacatgaaggaatgcgcaagaagaaattgatggtttcgaatgtggtttaagttaaaccctgctagccgccaacgcttcttctcctcctgatcttattattctcttcttgctgccttaatcttgttatgtttggttcctgatcggtgaggatgggtaagtagggttaaaccattattacttttttccttccataactaattggcaggcatgttgtgtttgattcgtttaagttaacaaggttatgcagcggtcgttggtgctaggaagagcaagaagcaacaatgcattacctctccctcctcagcgatcaacttaggctcttccaatgtcttcatcgaatcaagcctagaactttccacaagtgtagggtggacacaacaaattaatatttcttgaatgaagtatttttcctacctcaataagcatacaatgaaattcccattgtacacataagaaatagacatacaatgggaatagtggttgaacatgggaaataagacgataagctaagtacaaacattttccctacctcaataagcgtacaatgggaatttcatgtgtagggtggagacgacaactattgtttatcccctacaaaaatcccaatgaagattactaggcaaagaaataaaaacactagcaaagattattatgcaaacatattgataaagtgataagataggtctagtccaaagcaatttcatgccttaagcccactaggaattttcctttaggtaagtacgacatattacagatcctaaaaaaatttgttctcgggttaatgtgaaggatattgtccatcctattatctgtcttctcaaccattcttgtgcatcgaatttctcaagtcatagtgatatattctattaaaaaaggtgcatctccaaataccagcagcacagagaaatgcttttacacaatgttgtaaatgcggtttataaaaggtagctctattgttgataatgcccacaacttctaatctaatttatcttgatgtccattctactttacaaattgttctttaatctttcttcaaatattgacctctatcaaaagaacattataaaatttgcaatggatttgaattgagaaatcttccgatagtagcactaagtatagctctgttttctgaattgtttttgctcctcgatgaaattaatgcgtggaagactattttgcaaaaagcttcttgtgcgtgcacataatctcacatatgtcctcgaaccacctgaagctaggttcgatctcgtaaattaatttgaaatttgtgcaaactagtgccacgacttgtctagttgctataattttgatcgtaattgagaggtactatgcaggcaatatttgcacaccagcaatgctttcaattgtgtttcgtccactgattggttaaactatgcttgtatgcatgtagttgaatcaactaaggaatatgtaggttctttttattatattcacttttagagtctagataagtgctaactaatatgtttcttgaaaagaatattgttcaaatcttaaagagctgtagtagttagtgatggttgggcccaaacatggctttttcacattaaaattttaattaatttcccattcgaatgttagaca

SEQ ID NO: 47082 - DNA, 5497 bp, Oryza sativa
tccattcgaatgttagacatccgagagtgaataacatacattggttgcaattgaaaagactccaaaagaacaaatctgagcagatcccgcatccctaatgttgttgcctgacgtcttgctttgctagcatggtgacatggcctaagttacatatggccttgtatagaagagcttaagattttaataagcggctggtggatagccagctagtctaaatatgaaacgatgtgttttccatcttcttcttcttctagtttagttttagacagctagtctaaatatgaaaacgatgtgttctccatcttcttcttcttcttctagtttatttttagatggtataagtacaatttctcataatctagttgagaatctagacaacttgggagagctatagattttgaaaaaagttgcgtctaccaaaagcttgtacaaacaagggtctatatatgtggcacctcttaaagtccgaaagcacgtccaatagccatgcaaaaatggtttatacaaccctcaagcttttgtagatcctactcactctccatattttgtattgtgagtaatttactcctatttaaatgggaacatacgctatgcgcataagcttccatctacactccgtgcataccaactagcaaatgtcatgaaaaattctacaaaaaaaaattagacatttactcctaatagtattacacatatctacaaagtcccatattcaaattcattatattttagctgtaacaacaattttaagggtaaaaatttgtcagaaatttgtctttttttgttacggctaaaatataatgaatttgaagataatatttcatacataggtgtaatactattcaaagtatgtgtccatttttcttctagaattttctgtgacatttgctagttggtgtgcatgggaagcttgtgtgcataggatatattccctatttaaataccttcttctatcatttttagctcttcaaattttgccaacattgccaaaagaatcctgaaatttcccaaagcaacccctctcatgcatccaaacgaataaccacggtttttcgtcttatttctatttcaaggccgtccaaaatgcattaaaggtgcaaaagagtacattcagttgtaaaacaattgaagccaccgggtttcattcaccagaatgtgtagttttactaggtaagttggtctctggaaatcagatacaactctaagctttttggttgatatagaagttgaattcaaatggatgaatgggaggatcaagtactggatgaaccgatcgaaactagggatctgaattgtattcctcatgaagttatcatttaatttcttcagaagtttaggacggtttttggaaccttgaggttgagacatcatttttagagacatcatactctaaggctgataatgtatcactttaatatggagataaatctcgtaagggtaaaaatggacatatatgaaatttgtaaaagtaaaaaagttgattatataccaaatctccatgcgtttcccctctttctacacattttgataaagatacctaatctagacttatcacttgctactcttttcccttctcgtcactactgaaaaacgatttttctgtacagcgacccatttagattgtagatggaccataactggtcgcgtctaggaaaataagctcattttcacgtgtggtccatttaagaggaccgcaagaaaaaatcgatttttctgtgcagtcctcttaaatggaccgcacgcgaaaatatgcatttttgcgtgtggacctattaagagtgccgcatgcaaaaatacccactccctcttttccctcttacccactttaaattttcccctctatctctcctctcctctctatctctttttcttctatcagtcaacaatagtggcctcactcatctgtgccctctcctctccttccgatggcagcggcaggcgtaggtgacggcggcggcacggcggcggtggaagcgtgggatccggcgggcggcggccaacccccgcatggatccggcgggaggccgccctcgccccccccctgggggatccggcttccctccccttccctttctttccttcccaaattcggcgaaagggaggggcgttagtggtggtgcaaccagaagggagcacagatccgccgaagcgcagcgcggagcccgctgccaacgagggcatgagcggtgtcctcgagcgacgacggcaatgacaaggagaaggaggaggccgcaccgctgccggaggattatggggttttcatttttttttgaaattttgtttttttcagatttttgtttttccgtgtaggcgacataagcacccgcacgcgaaaatctgattttcgcgtgctggtgcgccacccgcacgccaaaatcgcgattttttgcagaccctgggtgctggtgggctgctcacccgcacgcgaaaaccggttttgaccgcacacgaaaatctttctcgtagtagtgcgttttcgaacagtttttacatagatctagtgcaacaaggaacaatttcacccattaatatccaaaaggaaatgcctttgcagtaacaaatgggaatatttacgttgcctggggtctctataatatatgtgtcgatcaggatattgcctttacaaaggtttcattctgccgcgaaaacacttttattgcaacataaactccattgtgtgaagtcaaacaagaaattaaactataatcccagaaattctctatgaagtaggcaagagaataattgaattgatcttgggtgccttaaagtggacacaagatttgctgtaaatcttttaagtggcttcaataagttaaattactcaatcgtggttacaccactatgtagtggtggcacaaactatatgtacagtgcaagcggtactatctcaaaagtttcagtacaaagtatttggagcttatttaaaggggttaaaaggtaaagtgagaacattttcttgttactaattcctttggattaacctttaactactgtaccgacaaatccaacttttgaactacacgaacctataaaagaggacatggatttttaccgtcgtctgccatttgactattcaaaatattgagacttagagtattgagatcaagacaataaaggagtatccaaatttgattgtgtgcctcttatttctattgaaggataaatgaattgtccgtcttttctcattacctcaaaagcttatatggtcagcctatattgtcaaatatgaaacagtaggttggacttgcaatactccgtattaaggaggcataagcaaggtgatggaaaaggcagcctacctacgaaagaaatgtctcgatcgaaagcaagtcagaagccaaaaactgaagccaatctcttttatcggttcaataattgcttggaccacatgaaattccccggatacttacacaagtcgaactattttccacgaaattcttgcaagcacttacttgagcaagcaaaaaagactagctattagcccatatcggcgatagtgaactccactgctcaaaacaaatgatccaaacaagccctgaaagctccttttccccaaggcaacagctaactgaaccagcaaaatctgtctgcctctgaaagaaacaaaacaaagagaaaaaaaaaaaccctttccctcccttctcacggcactggccaacttgcaagttgcaactgatgtgaagcactcactgagactccaagcacctatatgcaggtagctctcagcacgcttgagttggtgatgccttgattcccactgttttgtccgtcaaatactactgcgacgacgacgacgatgacgatgacgatgacgatgacgatgacgatgatgatgtggcccttgcagaaccatgttatgttgatgatcaatgcaatgccaatcaaagtagcttttgcaaacgatggagaaagtgacctccattttcttgaccattggtgggttttggaccagaggctcaaggccaatctcaagcagaagtttcacttattaaatgaaactctacagtgaacggcatatattgtcgacgttaggatttaatttgtagcaccttgggagatttaattcatacacttcacatatttcagttccgagtttcgaacaacactgacatactataattcaagtttgagcttctcaaaaggcatggatatctagagtatttgagccatatactaccaatagagactaccgtaaaggtactctaattaaacatgaagtgagttgtgagcttgctccaaggctcacggcctttagctcatgagaaccattcagaacaagaggatttcacaaaaaaaaaatcaattcctatatgaatcataaaaaaaagaaataatcccatgccccagacaaggctttaaagaccccaacaattttagtcctgagacaggattcctgttaatttgacattgaatggacaggtagggctctcttgtttgtccccttgccacatttcatgaagataagcattccctctgctactagtgtgatgtgcacaaatatctgcctctagagcataacattatagattccatgagcatatatataactttggtccactcacttctctctggatgatcccattacatcacatcactccatcagggtcaggggccagggtgatactctgaatgaatcagggttccagtctaaagcaaactacataacaaagataaggtttttgtaagccaaaataaaaggatgtctttgctatttgttccacaaggatgagtatgataaaagcagcttttctttacctactggcttggctactggttcctccaacaaaaagggagaataaaaagaaaaggactcgtagcatagcactatagcagtgctccctcatttgaagttacttaatttagttcattattagctgttgttcctttgcctttgttgattgatgactttttacagacaagtgacagcaattggaaattgacaaccagcaaagtcacactgatttttttttatatagcagctactaccgacaagcaaccaatttttccattgcttttggagtacaactactagtgtcaggatagaaatgtttttcattagtattttttataactagtgctagtgatctgtcaaggatgaaaaggatgcaatccttcaaaaaaaaaaaagataagtagtgcagtcctgaaaagaaaaggaggtagagttgagcaactaaatgactaatcatttgtccaacaggcaaaatgatgagaattaactgagtgcttcaaatttctgaaatcttgggcttttctaaacacaattaaatttctgaaatcctcggcttttctaaacacaattgcaactttcaaagattcacctgcaactctctgtaagtaccactgttgacactgtatgcctaatatcctgtaatcagcaatcacattacaaaaacatgtgaaagtactcaaatattaagtaggtgctatgttcatccagacgacgatgtgaggtagcttatcctttgatgtatttcaattacgaacactgaactgc

SEQ ID NO: 47083 - DNA, 2506 bp, Oryza sativa
  unsure (1)..(2506): unsure at all n locations
accgcctttaaaaatgtgtgtcaaccgcccaaatttttgcggccacaaacccttagaagggttccacaaaaaccgaaatttccccaattttcctcaatctggagaaatttcttttcaagccatttaaaaagggggntattttttggtttaagaacgcgaaccaaactccccttcacaattgttttaagaacgtgttttactataagaccattttttttgtttgcaaagcccgggttacattaatacctcgttttcaaaatgggtgtgcaaccaatggagaaagccttttttaatggaatattttttgggggaagcaatctttgtgattccatagagggctttccgggaacttgcattttgcattccaggcaataagccatggtactttttggcagaaccaaaggagcgtattacaatggttaaaaagtgaaagaaattatgcagatacacagtaatgggtgaaaaaatggtcgtcttgttaactattgagaacaaaatgcacatcagttgaaagaaagcangttgttgtagcaataaggttagatgtgagtccattaattgattacaagggtcagtttgtgtgtgtagatgtgtctatctgttccctataagcttggtctagcagattaaggctacttttcaagcctttgaagcaaggtacaggtccaatgaaggttgggcttaggggtgtggcaaagcctaatctcaagttgggccaacacatgccctgggccgatgtgtgaatgtgaacaattcacctagctagaagcagcatccactcaggaaaaagaaaagctaggaacagcgatgcactcatgcacatggataggtatgtggccaattaacataattgataattcaaactccagtaagtccaaatcatattttggacaaaagcaagcaaacagcacatgtgcacatgtgcacctaaagacaaaggaaatgcatccatataaacatttggcaaaattttccaaacaaactctgccaaagagaaaatcagaatatatctcatttgttggcttaaaaccttatagtatgtagacaccgcatggccaaaaaatgatgatgtaaatatcttgataaaaataaaaatatagcaatcagtactttagatatatactttaattgactagaaatcaggtataattttattattaaggcccactgcagtaatggattccattactgttgtccttatcagcagattattaaagtttggtaggaaaggtatgtagaacaaagtagatcacctaaacctttaaaggaattttttttacaataaaaagcagagacactgagaaagcacaaggtaaaaccagtgataaatcaacccagtggattatctgaaattttcttcctatggcaataagtgatgtggaattgtggatagtctgagaattcactaaaacagcatgacttattctgtagatttaattacagctttccaatttactgaagtaggtccctaaccagttaaacaaaaatatctagagaaacgttttatggaaaggagttgaactatttggctggatacattaattagcagcaagaatatgtgcaatcaattactagtaaataagaatgctaagcatccttgacagcttgacctgtatcactcaacataagtatggtcaatgaacactcaataaaaatgaattgaagcccatgtggaagtgaacatgcatgatggttttcgaacacgtattagatggaggttacctaggggttcaggtgatataatgtagatattggaccacacagtattttttttattccaagtggaaattttgtttgtccctatgtgattaacatataattgagtgagagatgcactttctgtaaaagtacaccatatttttaccataggcatagttttaggcccatgaaattgtagcgggcccagtggctaaattggttgtgcagagaaaggaaatctagatctgaacagcaaattctatttaacagatcgattcattcagtttcaccagaagacacactgacacacaggtaataccagctgggttaattaagaacgtcaatactagaaatgggttcacaggtgatagtctctctacctctcttaatcctgctacagcctatgaccacacaagaattcctggtctggtggttatgctacttaaaaaagggaaaactctttacgaaagagagctcagttgcataattagcgcaaacaaactatctttatcattggaacaccgacaattcaaaggggaacccgttgatattgagctaagattctaccaccgtgtaaggcttatgaaacctttcagtgttgtnggccccggagacaaatttttcttgggcctttttcccggtttgtaggatcacggccaaagtttatgaatttctattacttttgaagaccgacaacccattaggggtttatcgcgccccctttaattgaacccaaatctctcgggttatggggatttgcttatcccaaaaacccttaattatgtgtgaagacacaacgccttcccct

SEQ ID NO: 47084 - DNA, 1168 bp, Oryza sativa
  unsure (1)..(1168): unsure at all n locations
aacgtactttgtcttcccgtccctaaaacattgtgatatatctgtaatattttaatatttttaattttaaaaataatttagactaataatatagatatttaaattaggtgattagtaaattcaaatcaactatagtttggaataaaaaaacaaaatgatatatgccaagtacaatctaataacaatagaatgcacttttggttaatgtttactcctaatttcttaatttctagtttggctccccccaccgttatggtaaaaaatcgttatgttttaactatttatctgctagagcatatgtaatatttatgtaaactatgttctttattaccaatcaaaatagacaccttacctactttcatcaaaagaaataaaaaatgtagtaggtattattctggaatactcctcgtcggaaacatatggaacgcatttccctcaaaacgcaaaaaccggggccccgagccctcgacaccaaccccgtcggatgtgaagccgacggcccagatggaggccagcggtgccaatgcgtaggccacgcgtgcctctgcgcaaatcttatctcccgggaggctccgctccacttcccttcccgagtcactcaaaccatccaatccctccaccttcccttcccttgcccccatttcccaccgccggcgcgccttgcccccattccccaccgccgcggtgcgggcgccgacgaccttcacacctcgagcacgcgtgccgccgacgaggtgcccttctctttcttactctcgtctcccccattcctcccctcttcccgtgtcccgtcgtccacagcttcccgaccaaatccttagcctactatttcccacccacaagcctttctttcgtggtcacgcgcacgaacgggcccgacagtgccgccgctttttgcctactggcgcgggttttaaanagatggtgtcctgattgtttggacccacaaagggattggtatattttttgctgggaaattggccgcccaaaaaaaagttttaataccatgttgttaacccggcccttcatggggggtttttataccctttttaattgtttggatggtnaggggcttttcacccattcaattcccacctcccccgaaaaaagagcccaaaattacccaaaaaaccccctccctgcggctctttaaaaaattcaaagaccg

SEQ ID NO: 47085 - DNA, 1271 bp, Oryza sativa
  unsure (1)..(1271): unsure at all n locations
acggttttttgacgtgattttccgactgcactataggccgaattcgagctcggtacccatttgtgattcactgtgatgtacttttgtatggacaatattgtgattcattgtacatttgtatggatctgngatgtataagatttgtgatgttactttggtttgggtttgatttgggtatttggggtttgatttgggatatgtatcccacttgattcgagagaaaataaaaaagaaaaagaaagaaaaggaccatctcaccgccgctacctctctttggtctcggttggtgttaccaaccgggactaaagatcccctctctttagtcccggttggtaacaccaaccgggactaaagatcgatctttagtcccgggtatttgaaccgggactaaagataacgatctttagtcccggattggtagtcccggtttgaaaaccgggactacaggggggttacgaaccgggactaaaaagcacttctccaccagtgtacacaacaattaaccaaatgctcctatcttttaacatgtaaagacatgttcagaaagcaatttgggagatgttcagaatgtattctggaagaaaacatatgcatattgttttgcatgtggatgtgtcagaaaactcatcacatagttcaactgaggtgattgaattacactttggatcatattatcatactggtaaaaaattcaccagtaattgattcacattcagtttcagcaaaacaattccccatataaaggcacttttcagattttactgattcagtttcactcgaatgaacaacccaaaaaattttacaggttcccaaaatttattaaattccaacctatcctggattgaaacataaaacaaaatttattccaatttgtttggcatctcacaaccatattgtatatgccctgacacccattgtttaagaaatttttatgtaatttcaaagaatttttttttttttatgggcaaacacataagcaccaattttaaatctgggccgctcccgggggtaattggaacatggcattacaaattttttgtttctttcttgggaatacacagataattccctctccccctttttttcaccttggctttcatcctttggaccttgttctctagaacattacacctgtggctctcattgacataacatcttgtggggttaccgccattatattcccttttcttatcttagaaagtcacacaacactctaacattctctcctttgggcggcggggaaaatctcttcacaatggtgccgcttctcg

SEQ ID NO: 47086 - DNA, 3053 bp, Oryza sativa
tagtagcattaccacccttggcggtttattgtactgagttttaacaatatagtggtttggaagttaaaaataggctcagatatcatcatatttgacatgtgaaactcggggtgatatatcctagtacatcgtcgtcctaattaccatcgttggtactctacaattttactgtgtgcttatattcgatccgaagctactttgtctttaagatataaatggagcgtataaaggatgtccatcctttaattccaataagaacaaacacgaagcacatatggcaaatactaaatccactacaacaaaatcgaagaacatacaaagcacgtaaagatgtagcaatccacattgattcttcatccactactaaaataagcgcatatgaaaggccgcatatgcatgatcattgtgaatatgacatgcccttgtcgaccaaacgtgtcacttcatgcaaatatgttgtttcaagcgacatcaagatatgattccaaagttttaaacattggtatattaatgactttcatatatgcatattaatttcaattgaaagccatcttgttgtccatccttcctgacaagatgtagtgtacaaggcattctttagttgagcctcgctcactttgtatcacagaagcataacctagacgtaactaattcaatatagaagcaaaaagtgtagcagcaacagcgagggtggaaactagaaagaaggatttatgatgttctgtttattcagtcacgaaagagtgactttaaaaaaatgtacacatcttccacactatgagatgtcttacttatggaatgctcctacacgttgaggttgttcttgctgacaccctcgtttctatgagaagtttattctaacatagcaagtcgatagtttactgcaaacaaaatggataataaacttgatgtttcaacaaaactagaggaactcacgcatgatgtacccaaagaaaaccggttcttgacacactacaaatatgtggtagttcttttccatctcgaaaacgaatagggctgtgtttggaatcaactgttcccaacatgcaaagtgcgcacagaaaacggagcggttcattagagcttgattagttaagtattagctttttttacaaaaaatggattaatatgatttttttaagcaacttttgtatagaaactttttgcaaaaaaacacaccgtttagcagtttgaaaagcgtgcacgcggaatacgatggagatgggttgggaaccctggattccgaacacagcccaagtctatccaaaatgtttagacaagaaaacacgtaacaagttggtttacaagaatacgaattgcgtcaatcctgcactacaagtagagcaacatgttgatttctcgtaaatctctcgaatggtgatttaagaattcagtgcaaacctaattcttgctagaaaattgaaatgttcggtaccgcatcaacggaacaataaaaagcacttggcgtaccataattttgtcattcttgttgaaattttataatataaaatgcatgaggccacacgactttaatgttcaacgtgtcatgcattagtgaaactagaatataccccgcgtgttgctgcggcacttttagttgtcactggagatgtcggcttatttaaaacaatggataaaaattatatgtgcagtatttacttgaaaaatacagtactcatagtgaaagttgggtcggctgctgccagtgccagacaacctaaaatgaaatatcacatggcctacattgacatgttaagtcaaatagcacatttctaaagatatagtttacaatataaatgtagaaatagttaggataaagtgtgcaattggatgaacttccaagccccagaacagcaagccatgcaaaccatcacagattggtggagtgagctctgtaattccatacctttgttgatgatgtggtggaacatatggctggtacacaatagaattttccaacaattgttgaagaatggattctaagtcgcttttctagtgaaggaaaaaattagcctaatagtcaaggatctgtctgtttcatgatctttcaatcaatcgctctctttttttatgtaaatcaatcctcatatcttccctagatgtttttttccttttaacagacatatgtaaggctctggtttactacttcttttctcgttctaatatatccggcaaatcttctacagtttgaagtataaaaaaagaaatagtttgaatattacacccttcattttattctattcaatcaaataaaagaataaaataataaagataggagccgagactccaataaatataacatcagataggagttcagactccaataaatataacatcaatattgttgtcaagacaaccgaatatgcacaatgtgttgaactttcaaattgacagttcactttcaaattgacagttcaaattattgaaaaacttatgcaattcaactcgcttccttttcttgtctcactattaagttaagataatttcaaggttgcagcaaccgctactaaaattaatgcaaaacaacttagtcagtctacagtggcagatatgatcaaggggaaaagaggattttaatggcgtaccgtcaaaggaattatttgtgcagtggttcaatgaagaaagctcccacctttcttgtttcctgtacaatacagaacaatacagagtattaaaaacctttataaagttgctggacataggaataacaatattatgctaatgctaaaaagatcagctgaaaatgcagcataataagaagtgtaaccaacaatgaaaaaagggtttttaatagcatataaaatgaaaacggcttcaaatattgttcaacaacacagggcactaaacaattatgaaatttatgttatcatatgaaaaaaataagagtaattaaaatattaattcaaatacgtaccagatacaaaaggaaaggataattggaatgtattatgaaagtcaaatagaacctcaagcaaaactgcaaggaagttaattagagcgattagtctatgaagattagtctatgaaaatcagaattggtgagagagagacga

SEQ ID NO: 47087 - DNA, 1424 bp, Oryza sativa
  unsure (1)..(1424): unsure at all n locations
gatctttggagggggccacacccgagtgtttttataagcatatccgggtagggaagntttctttcattcacataatcggaagaggaaatataaggacaattaaatagttggncttttacgaaataaaagattattcgtgagtttggacacgagcttttctctgggtagggaagaaaacggcccagtcggttaaagcgccgggagataggaagcaaacctgtggggcaagaaaaaccaacncactagatctgtggccccttattggatgcccgccgaatgggaagaaaaaccaaccgtttgcttgaagttccaacgctggtgcgtgcaaaatatcggaagtgaagcgcgaccaacgcaagaggaaaaagcgagtgaatgtgtaatgcgacagtgatccttttttttttttgacttcaaaaaaggaatttttattgataccgaaaaagatgattacattctgggtctatcaagtctaagattcctgcgggagcacacaacttctactccacacacgatttagacctcatagccatttgagctaaagcatgagcaatcctatttgcttccctcttgatcttgcaaacctgcacactttagagacactgcatcatccctctcgcttcctttattgtcgctgccaagggtgatctcgacagctcctgttgtgacagagccttgaacacctctacgctgtcagtttccaagattcttggcatatgaatccattccatggctgcccttaatccttctagacatgccaatgcctcagcttggacagcagtagcacaggatttttttgcacagcaaacagcactaaacccctgcagtctctaatgatgattccagcagctgaaactcctgtgtcttctataaaaccagcatccacatttacctttgctgaaccttcgggaagggcgtgccatttatcaacctgattggttgtctgaacctgcagtaatttcaccattggttcattatacattaatccttttcctttgatgtcatcgctttgttgtcggatcggcaacagtaccttctcatagttgacgaggaaatttacagactctgcaattgtggccgtcccctttccatggatcatatcattcctgaggaaccatgctctccacaacaagtacaaaacacgcgccttgtctgaactattcaagctatccaacaggacaaggagccagtcaggcccagtcatagcaaacttcctttccggcggtagcgcccagaactctctgatggcttctcgcaacgatctcgccattgtacattcaacagtcgcatgggaaaccattttccttctttacaccacagatagggcagatgcctactgggtgtattcctcttttttcgttattcttccaaagtggcaacctgtcgtgagcaagttttcatgcaaaaatctaacttttggttga

SEQ ID NO: 47088 - DNA, 1225 bp, Oryza sativa
aaaatttaccgagaaatcaccatgttgctatacatgtagtgcaggatgacggtaatccatattcttgtaacccaacttgttacgtgttttctcgtcaaaactttttggataggctttgggctgtgttcagaatccagggttcccaacccatctccatcgtattccgcgcgcacgcttttcaaactgctaagcggtgtgtttttttgcaaaaagtttctatacaaaagtggcttaaaaatcatattaatccattttttgaaaaaaagctaatgcttaactatcacgctctaatggaccgccctgttttccgtgcgcactttgcatgttgggaacagctgattccaaacacagccttgattcgttttcgagatggaaaagaactaccacagatttgtagtgtgtcaagaaccggtttcctttgggtacatcatgcatgagttcctctagtttttttgaaacatcaggtttattatccattttgtttgcagtaaactatctacttgctatgttagattaatcttctcatagaaacgagggtgtcagcaagaacaacctcagcatgtaggagcattccataagtaagacatctcataattttcactttggaagaagtgtacatttttttaaagtcactctttcgtgactgaataaactaaggaacataataaatccttctttctagtttccaccctcgttgttgctgttgcactttttgcttctatactgaattagttacgtctaggttatgcttctgtgataccaagtgagcgaggctgaactaaagaatgacttgtacactacatcttgtcaggaaggatggacaacaagatggctttcaattgaaattaatatgcatataagaaagtcattaatatatcaatgtttaaaactttgaaattgtcagggttatggataccacatacctaatagtagttgactaaatctcggcagcacccaccagataccatgtcctatacggaaacaacctacggatataggagaagttctggataaggaaagacaaccagagttctgtatggaaacgacaagtactactcggattgtatccatattggtttccctagttttacttggacaaggggacacttatgggtataaatacaagaccccttaggaggagaggggacacgaccacctcaatcaacaccgaccataatcaacatacacggaacaacagaagccacaacatacaaaccaacatacg

SEQ ID NO: 47089 - DNA, 688 bp, Oryza sativa
ggctttgggaatccccacattggcaatcgagcatatgccacgttagaacggggtccaagtgaccatttctgggtgcggtagcaagtacgagtatacgactactcttttcgatcaacgacaaattaagttaattaatatattgtgatatagagttcctgtacatattactctatatccaacaaacaagcagtaatgaacaggcgaattaacgtgatgatcgctatatgctgcatgcacgtctgtatcatctagtactagtaacctaaacaccacataattatgtggtcaagtggacaatgatcgatatacgcatctctctcacgacgaaagaatctgtaggtgagcgttagacgtgcacgcttgcgcttgcacacacatttctcgtttcccacctatcgatcaccccgaatgaccttcagaattatatatttcggcgccgcgccgtgcactccacgtgccctcgctctttgacaatttgtataatccactgatctcttcagtcttcccagttctcactgtctgatacttgaagtcttcccagttctcactgtctgatacttgaagggtgtgtttgaggagaaggggattgaggagattggaagatacacaaaaagatgtgagccattaactcatgattaattgagtattaactattttaaattttaaaaatggattaatatgatttttt

SEQ ID NO: 47090 - DNA, 3999 bp, Oryza sativa
  unsure (1)..(3999): unsure at all n locations
ctgtcccttganaaccatcttgtgcncgcacgccngcaggtcgactctagaggatcccctttccgtgcgcactttgcatgttgggaacagctgattccaaacacagccttgattcgtttttaagatagaaaagaactaccacagagttgtagtgtgtcaagaaccggtttcctttgggtatatcatgcgtgagtttctctagttttgttgaaacatcaagcttattatccattttattggcagtaaactatcgacttgctatgttagaaaaaacttctcatagaaacgagagtgtcagcaagaacaacctccgcgtgtaggagcattccataagtaagacatgtcataattttaactttggaagaattgtacatctatatctatactaatataaaaaggatgagttgagcctagcaatgcttcaggccaaatcatcgtncctaatccctaccatccatccgcatctgcatcgcatcatcaccctaatccctaccgtccacccacatcgcatcacaaatccgcactaatccactgcaatttcaccctcccacagcgacctcatcctctctccaccgaattttttggcctgcgggctttcccccggccccaacccggnnggaagggaaatggaaacctttccttttttgggggggggttcgccctagcgcacggtgtatcgggccatcgcgcttgcgcgccatcctaaacactccccgcaaacgtcgccctccacccacccctctagattaagcccacccttcctccaagctcccaatccaccctttctcaagcctcccagggccagccgtgatcccctccaccgggccactaccgacggtaccccccccccactccctgacgcagccagtcctcctcgccgggtgcacccatcttcgtcgttgtccactctttcggcggcatcaccacccaggtgcgccacccggtcgtcattccttctaccaccgcttgaaggtgcagactctggtcacaatgcacagcttcaccgtgccccggtcactatttctctcagtcgcgtgccttccttccttcaaggcttcaactgacgtcgccgtgctctcttcttgctcgcgttgcttgaatgggcaaaggctgcttcgatccacgcagtattcacccgtcagattactttttgtatgggctcaaaccctgaacctcttttctttgaatcttggtatcaatcttaattaaggttcctcaacctccctccatctgctttggatctttccttcttaatttccagtgaataatcggtgaaaagaagaccagctctggcgcctaccaatgcacagcttgagcagagcagcgatgaggaccagatacattcgacaggcggagaacaatgcacaacggctatggcagatgcggctgagaggatgagacctcattcccgatctagctgcaagctgcatgtggctgatgcaatctcctccgcatccgtttgctgcgtctccggccctccgcagcccgcccatgcaactttggcgcatggtactctggcagccacaacaattaatttgcgtcgctcagtggtgatgactgacgaggtacacatccgcttgattttgtttatatatgttactgaatcttagctcgaatgattttttttcttttactgagcgcagtaagattgagatagatcagatcaatttctttttgctcttccaaaggccttaataagacattcaagaagctagatcatgatgtcaaatattccggacttctttggctcagagtaaatttctgccagcttatgctataacatggaataaaaatatacaataacacaaatgtctattgcaaagaaagattctcactctgcaattcttttgaatctattgtatatttgcaggggtcagattgtcaaggtacttatcaacaattcaataacgatataacaacttgttaaatctcttaattcctgcttcatgtctctgatattcagatgttaatcagtcaattgtttggaaggaattgtcaagtcaccttggggctttgcaatgttaagggtagatgtccaaaggtgtcttaggtatatagctcagttaagttgtggcacaaattatctactctaattggataaaactgcaataattatgtaaatatttatattcattgatgaactcaatagtggcttggtggcatatgatcttaaaagggccccttattcagacagatcacattgatgccaaaaatcatggtagattctcatagataatagggagaaaattaaagggaattaatggacatgtataacaatgttgcatgttattcttcaattattggagcggtccagagaaggttgagaatatattggccataataaaagagtgatggagcaatctctcaaagaatctctgaataacatcagaattcataaggtatacattatttgttgcttgattcactacataatatctagagtgttaatgccaagccatgtagtgctctactcacactatgtagtacatatactatttactcataataatttcattttgaaacttgtataggagaactttgcaaagaagcatatgactacaatgtgctgctgctcaggtaataagtttcagcatcaaatttcaatatgtgcaatgctggttttaggttcagatatctgactaacctttaccaaatttagttccaatatgaataggtgacacagacacttcttcatggttccatagcagcggcggtgcggagggtcaacaacctatgatgctatcggaagaccccagcttgctccatctaatgtgagataaagctagatgatgaatgcataancttcaggagatgccatgaacttaacacaagcctggcaagctctcatgaacttaacacaagaaagtctgctcctgatgtagggacattgggtgcagatcttcctaggctacttcagcatgagcaagcagtcaatcaacaacgccggcaacaagcgcaagctggatattgtgactgtcttaatctaattaaatcaaaattagttatttctctgccatttatttggtgttaacataaatagttctgatgtatgtccttttgtatgcttgtaaagaagagatgccatgttatcaggagatgctaatcagaactcatctcagaaggggtgtgcggctgtgctatatcaattgaaaattgctttttttttcaaaacaaatgaatgacagttaaacaataagtcgtaaacttgaaaaatcagaaaaatactacgtatgtttcttattaatgaatatttgaaattgatgttcgcaaaatactaaggaagttccatgtatgttaaatggagttcaacttcgagaagagtttttttttcgatctgaaggcccgtagtatataatcaactcaaagaaatcttaatggatgatccaacttcaatttggaaatatatggaataacaacatctttataataatacattcttattagtttcaaaacccattactctctttcaaatttgacttgactatataaaaactttaattccttctctgtttcagtgatttatttttttaccaacatagatttcatgcgctattgtattccgatcgtatgcaacaatgagctctctttttttttttgcattttttagcttgaatggggattaacatgaagcttggtttatttattttatcaccacattgaaataaatcgtcttatatacatattgcgacagcaaaatattacgttgatgccatatgtaatatgaaaaacgtgccttgcacgtgcatgattactagtttttttaaagtcactctttcatgactgaataaactaagaaacatcataaatccttctttctagtttccaaccctcgtggttctgctacactttttgcttctatactaaattagntacgtctagggtatgcttctatgatacaaagtgagcgaggctcaactaaagaatgccttgtacactacatctttgtcaggaaggatggacaccaagatggctttcatttgaaacttatatgcatatatg

SEQ ID NO: 47091 - DNA, 987 bp, Oryza sativa
  unsure (1)..(987): unsure at all n locations
acgttggtgaggaatcctttactatangccgaattcgagctcggtacccggtgaggtggggtcggggccccacatttttgcggggaggggacgggggaggcatttcaccgcgggtgacccgcggggccccgtgggatgtaaattaaaccttaaaatgtagtccatggaagacccaaaagagcccaatccaacaatagtctaaaatataaaaataaaaccctagccttatcctctttcctctcccaatctcctctccccgtcaccctcacaccacacaggcggcggctacgtcgaccgccaggcatgggcggtggcgacggccagggcgcgggcggcgacgtcgatggcctggcgcaggcggcggcggtgaccagggcgtggccggcggcgtcgacggccaggcgcaggcggcggcggctcgcctcatcgtcttccaactcgctgtcctcgtcgccattgtctatcttgccgtccaccggcccagccgggtagtgcggggccctgctcacccgccaggtccctgtggggatcggggctggtgacgttttccacccaaccacctctgcggggtcagggtcggggggagaagtcggggagcgggggcgggggcattccagctcaacccgccccgttgtcaaccctaatccgggccatgacatatgaaattcaaagactcagagagcaaaaaaagtttactggctaaaactcaaaagtactacagctccaacttgagacgtttctgaacatatttatacattccagcatatcaaaacactactggagaaaacatctttgcccggtcgagcaaaaaccacaatagtcccggttgcaataaaaaccgggactaactattatctttagtcccagttcaaaaggttcgagctacttttttatctttagtcccagttggaaacaccaatcgggactaaagatcatttttagtcccggctaaaagaataacaggcggtgccatacccctctaactaa

SEQ ID NO: 47092 - DNA, 679 bp, Oryza sativa
  unsure (1)..(679): unsure at all n locations
aggtcccttgaaacttatatccactcggacccacgngatttgtgcttctgtaaattcttggaatgttatctgcactgctgaatgcaatgttatctgcaatttatagtatatgatagtttgcaatgttatctgcactgcggaatgctgttctaggaatggtatcttgaatattttgtagttttgaaaactacattctgaacattagtggaagttcactcttgcattgttcttgtgtcactacatactactattcaaggtttctttaaaaaagaattcagatgttctgactggttttatcctgctagtgtttaatggatcagtaccatttcctgtctaggatttagggtatcttcttcaatgaaagagaaggctgtagtatcttaaacgaaagtctagtaattactccctatgtctgaagacggcacagagctcaagttaaaataatttgttaaatactattccctctgttaaacaatgtaagcctctgtagcagagggataaaatgtcttacattctgtaacataggtaatacatggcatcagatgaattcctgaccataatttgttgctgtgagcattaaaaaatgacatgaattttatgtatagtctctgattgaatgaggtgaagtactgaaatgccttatcttctcatgtgtagtctctgatgaaatgaagtgaat

SEQ ID NO: 47093 - DNA, 628 bp, Oryza sativa
ttctcccaccgaccactgttccgcgactcggcggctccacctaggccccacttgtcattgttgccattccccgggtcccggacgcctgtggctgccacaggcgatctggaagcctgcagccgcacctccatgtttttgtgcatgaacccatcgttacccccgagcacctctgctgctctacgtgtcacagccaattattataactaggggattccctgcgatttactgcggaaattactaagtaattttttaatgctattttttttataattcagctaggagtaaaaagaaaaaaataatcaaatcttagggcttatcaatatttatcaaattcacactttaatgtaaaacatattgatatgtacatattaaatattaaaaaaatgatagagagatttgtaaaactattgtggaaataatgtgagaagtgatgattgaatatgcttgcatgttaatctaatttggggcatttgcaaatttgccaatcggttttttcaatattgcaaggatgccactcgaatgacagttctagtggcatttttgcaattttctagtggcaattttacaatagtgtttaaaagagtggtaaaatttgcaattgggccccttaaaacatctttttcaaaca

SEQ ID NO: 47094 - DNA, 1790 bp, Oryza sativa
cttgtccaaaattcgccggttttccccggaagttgcctgatttcgcgtggcgtggaaggcgtgtgcatgcgacttgcttgcttgcgtcctcacgcctgcagcgtgcgcgcgcgccgcgccgactgacatgtaacacgtcgtaaccgatcggcgcgcgcgcttgccgtgcatggccgcatgcatgcgcgattgagcgcttgtttggatgccaccatgcgacgacgtacgtacatgtcacagatcgagatgacacagttgcatatgcccccttcatcccaaaagaatctaaaaagaatctaaacctgaacatatgtgtccaaattcatagctaggatttatttttttttaggacggagtagtaggttataagacgttttgactttggtcaaagctaaattgttttaagcttgtaaaaaaatagtaactttttaagccaaaataaatttattatgaaaaaatatattcaattattgattcgatgaaactaatttagtattataaatattactatatttacctgtaaacttagtcaaatttgaaataatttgacttttactaaagtcaaaacgtcttgtaacctggaacagaggaagtatatatgatggcatctcaaattgtttttgctatatgtttaattatcgataaattttcttttaaaagtatattaaatgtaaatataatacaattatcgtgtagtcacattatactttatatacaattataatgtaacttgtaaatttgaatcgttagatttgcttcacgattcgcgcaaactaggaaggaaaaaaatcacagcatgggcatagatgaggggattcggtcccacgacctccgttttacgaccattggatttttaaaagctatatacaagttatattatagttaaatacaagttaactagcatttaaaattgccaggctaacacggtttaaatttgatttctaccattacactagtacagtataaaaggttacattccgtaaacgcgtcccaatcatcagtgcttacggcacagttgagctagcggtggctagtttgtgttaattacactactagaaaaagtatttttgcaagcggccaaaagtgattttttcagacggatgggaggaccgcctgcatcccaacgactgcgaaaatcgatgatttccgcagtcggggcaatggcccgcctgtgaaaatgcattgaaaaagcaaaaaaaaatcgcggggccagagccacgccgtcgccgccgccccgcgctgtcgtcgtcgccgccgccgctggcctcccccttccctcctccggccggccagatcttggagggaggggggagggggagccgccaccgccctcccccagccggagccacgccgggcgtcgtggtcgttgccgccgccgcccccgccggtctcccccctccctcctcgggccggatctaggagggaggaggaggggagccgccgccgccgagccgtcgtcgccgccgcccttgccggcctcccccctccctcctccggccggatctgggagggaggcggaaggtgagccgccgccgccgagccgtcgtcgtcgccgccccgcgcgcgccgtcgccgccgccccgcaccgccgccgccggtagagggaggggaggggaggggagggggtgcctagacgcgcgttgaggataggggaaagtgtttgagggagagagaaagctgagtgagggaaatgagtggtggggaggggtggaggagaagataagacttagaaatatttggggtaggtaccattttcgcaggcgcggtttgagtggtccgcctgcgaaaat

SEQ ID NO: 47095 - DNA, 3615 bp, Oryza sativa
ccacaacccccacatgtgatcaattaacattatctaccatttattatcatcctaattacctcaacactatctaagtcctaactacagtaattaattaggttctccaactttattggcactcaacagttgtcggccccgatcgatcaacttcatgcatgtctccaaaaggccataattaatcattatattggcatgtacattcatgtgtgtgctattttctcaagcattctgctgagagagagtagtgagattgatgatcgcttgcggaggcatcgatcgagcgatcgttgtcgattcgatcgataggattagttgtgcatgtctgcgttggtttgcaactgtgggctctagctgcttaactatcatgcaattctggggcgcgaaagctacgtatcatgctacgtatgacagcactacgtgtgctagagcgtggcaggttttgtggcctcaaaattaaggctctgttttgtttctaaaacaaaaaatttcacgctgtcacattaaatatttgaacacatatataaagtattatatataggaaaaaaaatcaattgcacagattgcgtgtaaattgcgagacgaatcttttaagcctaattgcgacatgatttgacaatatggtgctatagtaaacatttactaatgacggattaattagggttaataaattcgtctcgcagttttctggcagaatctataatttgttttgttattagactacgtttaatacttcaaatgcgtgcgtatatccgatctgacaatcaaactcaaaaattatctccaactaaacaaggcctaaatgccaatacacttggttgtaaattcaccaaattattattttttaaatgaattgacaagctgtcaattttattgaataaagcaggaaattttcaccaaattattactagtactgataaataataatttgtagtattcatgaaaaggttgggtagctatagctagtaaatttaaagttgactctagtcattagtggagtccaatacatgttgattagttaaagagaggatctgacacattacaggaatcccagcctttttcttccatgatagtgatcgaagccatatgctgagtatataccgatcgtatgggtacatatatattagttctgcattagcttatgatgcaatgcatgtacgtagttctttttttatgaaaaaatatcgctatgttcatttgtctcctagcaaaaggaaattactgatgaaaagcaagcagctagacaagtatctttacagcctgcattgctttgtcctccaattgcattcgaaggtcacaaagtaagcactggtattctaccatattaaaactcctcatgtggagtcaaaatccaggagaaaagtggcaatgatcgatggaaaaaaatagaagtgcgtggggtatatagagctagattgagagtgaacctggccgagacggcgtcctgatacaatccggccagaggccacatatatatgcctgggacacgcattgcgcctctcaccaacaacctaatggtgtagtgtagagtccagtaggcaggcaatgaggcaactgctttgattcggtgtgagaagcagctagtaggagatgccaacgcccaagtgcttctgcttttttaggggagagttgagaagaaaacaattggagataaggctcctttttagtgagtcagcactcagcagttgcaaacgccactaggtactgtgcagatttccaaatatatttcttgaccaagagtagtcgtcggtaattgttatttcttgctctctctcttttttgccactcgtcagttttgtttattttgttttctattttgaaaggaactcgttgcttaattctctcttgacgtaatgctttcagaatttctcatttcatctcctcttctatttccttcttcctctatgctatagctgtgtgcgcaatatgttgggaggaaaatttatggtgaaactaccattggatcgaaaatgaacgtacgagattcgtccactttgagcatgatgacgtggataaatctcatatatttatttttcgatccaacggtagtttttaggatatataatttccactacatattttctcgggttgggaggaggggaccagagaggacatgggtgtgtttcaattttaaagttttgcatttaattcgttatatttgaaattgagtactttttttcaacggtagacaaatgttgacatgttttttttttcttcatagttcttaaagatacgtcaggagcatgatccgaatatctccaagatgcatgtaagggtatggtgtctgtgcgtgtgttgtgcatatgtaggtaagcgtgtactgtgtttattataaaaaacaagtcgagtaaacttgattagagaaatatcttaggatgtattcccaactccttctcttcgactcgcaaaacaaagtaagttttaattagcgcatgattttattttcaaggcacgttagcgtacggttagttaagtattaaaaaattaaaatagactaatataattttatatataattttttttagaaaatacaccgtttaatattttagaaaatgtacgcgtgaaagataatgaaaatgaaatcggaaaattagactaaataacacagctttagtggcagacacagattatctggctatcagcacggcgagaacacgcaccggcaaaagtgtcaaacgagtgaccgcgtagccggcagtaaaacgtggcgaaacttcgtgccacagaacctcgaaatccggccggtgcatccatgactaattattgaccatgcaccacggagcgatcagccctgtgtcgtgtaaaatcacaaggaaacctgttccaccctggtttcggcccgattcggcctccaaactctcgggccgagtgggagtgggaggatacatgggccggaaggaacggtgctgccacgaacacgatagatgggctggaactggatgggctgcgcggtggatgatgggctagaaacgaggtattgggacggagaagacgtggattggctgggattacactgaagactattacgggcaccgccatgtgggccacacgtatcgttgccacgtacacggtacacgtccacggtccaagcgccacgtaggattcgagaagcgatgcatcgaactgaagcgagaagcgcggaaatattctagagcccacgagagcgcgaaacgaaccttctccaactttccctttccctcctcctaaattttcgccgcctcctcttccctcccctcccctctcgccattgccgcatcagccatcatcgcgaaccacacgagctctcgacgaaatcatcaaccaccacatcgctactggatcagttggggtctgtctcttggagacggggagtttgagcagcaggagttgagatggcgatggacgcggcgccggcgctgaagaggaaagacgcggacccgccggagctgtggatgggcggctctctttgctattaacggttataatggtaatttcatcatgcaatttaagaaaaattcctagtaaatgagtttctaattataaaagccaaatctattactttccttggagaaatttcatgtaagaaatttaaccacttaggcttttttggtcgtaacggtaaccgctctacctttcttc

SEQ ID NO: 47096 - DNA, 837 bp, Oryza sativa
  unsure (1)..(837): unsure at all n locations
acaaattaaacctccctttccttttggggggttcgggacaatccccctttccttcgaaaggccgggcccttttttccttcctgggcggactcccttttcttttctgggcagtcggccggttttccctcccctcgcgcagagtctaataacccctgggtcttctcctcctctccctcccgacaggtgggccgcggaccccaccgtcaggccctcctcctaccttcggcttcctaggccaaagccgccatggccggcggttgccgcccacgtcccgccaaatccggccctcccgctcgcgccctcgcgcccaaaccgcataaaatcggtcgccctccacgtctcctccaccttttcccccactctccccatggaaatcggcgccggtttgcccccgtcacgtgcccacgtcgccactccatctcgccggccgttgccgccccgttgccgcccatcccggccacgatctccctcccccgcgcccatttaaacgaccccgtgctcccctcatccatttccccattttcagaaatgtagtgcttctgagctgaagacgaagttagaggaccaaggctcagaccccagttgagttttgcctgtggagtggagctgaagccccgctaggatcgccttttccgctgccgccgcttttgtttcggtgtgaggactaagtgcctctcctgtaagtattttacgctttatttacgtttggaactgtttattacttgtcgttttgtgtaccctggctggtcctggacagagatttaatacacaaaatagtctggggtacaaagctngaattgcgcctatagtcatcaagtggatcatcactcccagtcg

SEQ ID NO: 47097 - DNA, 2562 bp, Oryza sativa
agggttcaaaattttggacttgaaaatcaaatcattgccaaggggtgggtttttttttcttaaaaaaagtcttccaaaggtaaagtttttttttttccaaatcaattaaaaacatcgtgccctggttgatatttgttgttttaaaaaaaaaaattttcacttgaatagaagtgcaacatttttttttgacaccttaattttaagacaaataatgtcgggtaggggcatctctttggaaatcatatatttaaaaacaagaaaattccttgacagacatagtggtagagctagtaaaagattgattctgcatgcacttcatgcatcatgttttcattatttctacactactttacaaaccttgccataaaaccagaggagaggaaagagttacaaaaactgccaattcagttggtcttgccacgaaaacatgggaaattatcaagctcttctgggatgcccttgaacatcatgggaataaaatatttcatatatttcttcgcgcctttgatttccgaatagactgaagaaaaataaccgaagaaaacggctagcctgcatcgagaatataagtaagcaaataatgtaagttccttcaactgcatggatcaaatgtccgacaccaagaacgtacatgttattcaaaaaaaaaagaaaggaggatgtatgtgaagcgtaattgatatatattacaaagtttttggccaccactcttgctaaccatgtacttaatcatttgtgttttgaaattactgaaaaaatcaagggggggggggtacttttgggtacttctttgatgataactagataatatcccacgctttgatgcgggaatatagaaactaactttcggttgaaattcgagtggtatgatatatttagaagatgtatgtatgaatcgaagtaaaatatgcaataataatggtgataaactgtgacagagttggtgatgcataatttgaatacatgctttgtcaggaaaaccaaacatatcaaataaaattgatcagaagatggctagaatggtaagataatatgaaattttgatggcattgttgtctaattgactgctagattaaatagagtctttagatgggtggagcagggattaatggtgctatttaattgctgtggaagtgtaatggacgaacatctctaatggctaatactaccaagactcaccgatccaacggttgaaactattttgatgatgtggctaaacgtggtgcctgcttgtaaggttacacttatataaaaagtacagatatataccaatagcattttcttgtaatgaatcgaattggaagaagaactctaataaattgtgtatacacacaatggtaaaaagtttataattttgacaagtaagaattaatgcataaggcacttggtggttatatatattttagcacatgataaaatagactataaaatgaggtgtgtgctatgaactctaaccagaccgaagagaacgatagcaatttgatacccaagaaaaaatcaggctaggatgggatgtaacattttctagcaccataaatctggataagtctctgttaagatttattgtactagaaaatatcacatctcatactagtttcgtttattttgagacgggaggagtatatttcaacgtttgtagggtttggaatgcacacacagatggtcgcaatggtgtgagtgtgacgtgtgaatcctatgcgcattaattgtcttaaagtccctgtctatctaaaataatatagttgactttgctcggccaacaaaggtgacttatactgacctgatataatcaagggggataatatttttgttgatgtccttgaagtacataactaccatgataactgcaattggaacacacacacatactgttagagatcttagacaataaattcaaacatcaaatgacatgtttgattgcaagataaacaagaaagatttcaaatactactatatctgtctcaaaatataaaaaagttttagaattgcatatggatattaagaaaattgatgaaattaaatgaggaaaggttatggttggttgagaaaagaagttcgatagagaatttgaatagcgaaaatttgtgattggttgagaaaataatataggtgaagaaattgttatattttgaggtaaattttggagaccaaaagttatattttgagacagaaagagtgatacgttgttaagaaaaagtaatcaacggaatgtttgactctagttaaatatatgaacatcattgacttcgagatattactcctatcggttttataattcttgacgtttgaagaatgacataattttcaaaatatatcttttgactatattttttaattataatatatatgataaatgatatattttttattatagtatttggtcttagtgcttttagctaaagttatttataattaaaagtataagagtttaactttaaactaatctaaaacatcgagaattattgttccagtgctttttagctttataataatcaaaagtttattcagttaactcttaacttattttaaaccctcagaattttatgaaaatatgcattagag

SEQ ID NO: 47098 - DNA, 913 bp, Oryza sativa
  unsure (1)..(913): unsure at all n locations
tagtttcaatgagttgaaccaaattaggattctagttcgtgagcttaacgagacagctgctcgtttatctcgttagtccaacatattatcattaactaatatttagttccttaattacattgaaactatttatatgtttatataataaattttaccggcacttgccggttaattggattatagcattataatttatccgatcttaaaatatgtcattcaaattcgcgatattcaagttgtgccattaaaattttatgggtatttgagatatactactgcttaccccttcgatgcatttctcaaattttttttaccaaattaataagggtcaattggatccatggcaatataaatttgtccgttttaaaagttatcattacaacttgcgaaattagagccataccattaaacaatagtaagtatttaagatgagtgtgaacatgccaaggccatacctaggcgttgagataactcaccccagcgctaacctcgttggtgccgaccctagaaccatgttgtttcaccgagctgatgatgccacgggagagaggggtttggggggggggggtggttttggtgctattgtttggcgccaagttggtcttggtcggctgctatttttgtggatgcaaatgtggtgctaccataaaaatcacagccgaacaaccccgaaaagattgagggcctcatcttttcgcttatgcttatacttatcagtcaaaatttgaattttcaaccttaaatttaaagctgattttgaggtttttcatcgaagtttatttttagcatttgcttttaaatagctaagaacatgtatataaaattttattcacaaattagttttcgtttgcaaatatgccgagatggcaaaatatnntgtggngtngtgctncagtgtgtactattgccacat

SEQ ID NO: 47099 - DNA, 1035 bp, Oryza sativa
tttgctcccagggatccgcagagaccaatgtgtccgggtgatgtcgatggaatgaataaggcgcccgtgctcaggtggggtgaaaacccacgcccacggctcccccaaaatcagcctgttgtcgtcgccgcccacgccaggagacgagatgccaacctgcgacgccgccattgcgccggcgagaggtattagctagttggtcgcgtcagcccgtatcatgttaggtcatacaactataattactccgtattatatacagagaatacttagcaaacgtgaaacatgccaaaatgtacgtgttcatcgaggagtgaaactcaaccatgctataattaattaggttcaaagcgattcgtagagaaccatatttgttccgtgttatcccggacgtagtcaatcatgttatcatcaggttcaataatacagcgacttctatagtagcccgaattttcttttttctccgtattacatacatgcctcaagtagtcaagtgcaccatcatatcgtatatcactcaaacttttctaaactgccgatcgcgcgacagcgacgacatcagcgggcgcaggccaatcgagttagcaacaagttcgcagaaaaaaccaaagcacatatatttcagatataaaatgggccagcttaaaatgtgccaacatgtgtcgatatgacgatatcccttcgagcatcacggtgctacccatcaaaaacaaactggatatatgtgtgacatagggcagcaaatcaaatcctgaatatatctagctaataaatccaaacaaactggattatatgtgtgacatagggcagcaaatcaaatcctgaatatatctagctaataaatccactgaacctatctaggtaaacttcctattgcctgcatagtatcaacctcaacctcctattatctgcataatgtcgactcctgggccaaagtactcttcacatcttcgatggcagttagctaccgtctgtataaagagaattccattagaaactatacaggaaatagggaaggaaatgtttaagtaaatggaa

SEQ ID NO: 47100 - DNA, 714 bp, Oryza sativa
acctaccttgggtgcccgttggaggggggtgaggttaacgggccaacgcacacttggagcggtcaccccccaccccctactatgcggtcctctacccctttctactcagggtcttctcttcctactacactgtaaaaggctaaaaaaatccaaaacaacgttggaaggcattttgttttgtactactgtatatcaaacagtgtttgaatcccaatttaaaatgggtacgtcaactttcgacttataaactttgggactataaactaatatgtgaaatcaaatttaaataagaatcgggtatgttaactatggactagtaaacttcgggtgtaccaactttggagatatagaagtaccatatataaataatctttgaatttaaattcgaatttggatcggatatataaacttttgacttatatactttggggctctaaactgtagatgtgtaaacttgaggtgtacaaagttaagtgcgtaaagtcgaaaagcactgcggcgctaacagaggaaaccacatggacgatggcttaggctttttgcgttggaaggttcggtctaccattcatatgtgaaacttgaccctgagaaaccagattcagactctcttggggatgatctctgacagtacattcacatgtgtgcgaggttgacacatgtatcaacagacacagtgcatgcatctgtctcgacatagacattgaagggagctta

SEQ ID NO: 47101 - DNA, 558 bp, Oryza sativa
tatttccagtttaaagaaaattctcaaaaaaaattccagtttaaaggaaaaaatgtttggactgaacagctacagagattgaaataatatttttttagaccctctcagagaaccatgcttatattggaaccaaagagattgataatcctcactccttaaaatgagcaatgctattttccttcagaaacccaggtaaataaatgaagctttgaatatcaaataaatgtttctgtgttattcatgcaaaggatcagtttcctggcatagtgataaccagaacaaactggatttcctgggctagatttggaatgcttacacggcagtctatttaaagtttaagtctgaatctttttattttagaatacaaagtctgcagtccatgtccacccacttcttcaatttgtggaacatatacttgatataacaacaattagttcaaccattaggaaatgatcgccaagttttgcctgcaaatcacgcttagcaaattacttgggtgcatgtttagcaaatggattttggaggcattaagttccataatgcacaatatgtattata

SEQ ID NO: 47102 - DNA, 660 bp, Oryza sativa
  unsure (1)..(660): unsure at all n locations
cgtgtggaatgattgnctgtcgtctcncttccangccngcaggtcgactctagaggatccccagtttgtacagctttgttttactccaggttttttttttgtttctgttcttcttaattttctcttcctccttgctcgtgaagacgcaattcatgaatgaatccgtgtcagctctctgatagttttatgtcatgtcatggcatgccctgatttagtgctgtatactgctacttcttcttctgagactagttcctcatgcacgtacgtacatacgtgagcttttcagacgtttgatgattgaaattggttgcgctaacttattatgcccattctgtacaaatctatcttgcacgtccatcctggcatcatattgattaatttactgccaaagagtacgtaaactctcgagtaacaataatgcaatcagctagcgtgcacatactggtcgaataatcctcttccatccttgcatcatcttgattaatcccggaacgtaggaattttataggattttcacagaaaacaggtcgatttctccaaaattcccgtgaaattcctccaaatcgaactagccttaaactttggttgtctatgtgcctatacccctcacaatctcacagcggagcactatccatgatctgatcactaatatataaggtg

SEQ ID NO: 47103 - DNA, 644 bp, Oryza sativa
ttcagccaccatagtaaaacttgtatagtaaaacttgtttattgtcatccaacgagtaggatatttgccacgttgggaagagaagtatgtttggtccttaccacatatggacacattcagatgctgggcaaggagggttcattgtgtaccctctttgtacaataagaagagcaatctggaaggaaacacggaaaaacatcagggcattaaatggcaagtgtgcataataaatattccagtaaaccaagactgcggggaggttgatgattggtacagtataaagtatgtagaaaaaggctattttcttttgttgtacatagcttggtcagaatttcatatttagttagttataaataagtatgaaaatattaatgtgaaaggaaatctgtagtttttataatattcctagaaacagtgatagaatgcattctaacactgtggacttacatgatattttcaatgtaacctaccaaaaggttgaaagttcaaaccacaggcttaaagcacagcatcaacttaggagaaacaattataactgtcaactaccatgtcgcactacaaaactactcaaaatgatttgttgcattttctccttgcaatacaaatgtagtacttagataatcatgagcgcagggaggcactgc

SEQ ID NO: 47104 - DNA, 716 bp, Oryza sativa
  unsure (1)..(716): unsure at all n locations
ccgctgcnattgagaactatgctagatgcctctangtcgactctagaggatcccctgagctggaccaccataccaagggatcgccccaactaacatctaactatcacaagctgccatgctagctgactaccgggacccaccgggtcaaacctagccccttactgccatctattaactttatggacgagtatagaaccgttcgtacaaagagatgcaactaacaacaaaatcataactagcaagttacacgatctatacaaaaccatactctataagagatctattaccatactactaacatatgcatatgcttgagaggcccaacatacatgactatgtgcataaaaaacatgagtatcaacgcactagttatactatgatattatagctataacagaactgtgacataagagctattacaacataacaccctttaacggctgtacataccatgaaaaatatatagtacacacgcttaatacatagcacatgaactcatggctaataatatcatctcaaggagcatatgccccacatgtataaagaccattggttcatagacgaaaatagcaggcacatcgttaaatgcatagagcatgggctcatgacaaaaggtatcatcacagaaagcatatgcctctttctagacacgacatgtgacagcctatgtctctgaagcatcctcctatattctacacatatgacaggcagtgaca

SEQ ID NO: 47105 - DNA, 549 bp, Oryza sativa
accttgtcccttttttcttcaggaaggggggctttttaaaaatcaacgtaaggttttaaaatggggtaggcggtcgttccaaaatgggttgtggccaaaaacccgttataccacacctgtgcgtatatggaaaatttttgttaggcccaaccggaaaaaacatttatttccctttggaaccccttgaaaagattttacaaccgggtttggcgcggtcaaaattttaaaaggggcgccaacaccgtcactaaaaaaaattttgttttccttcttctaacacaaaactcttaaaaaaaattttgttttttcctcaaaaaaacctcgtgagggggtttttttgtcgcccctaatctccaaaaaagatctaaaaaattcttttttttggggttgtcttgggagaaaaccctcagggaggtgttggatataaagagcatccctcctctctttataaaagggttcacccaactattttatattttttgcgcaaacttatatagggcctcacatcttttttttatatttttctcccgcagaaaaaaaagagagaag

SEQ ID NO: 47106 - DNA, 833 bp, Oryza sativa
  unsure (1)..(833): unsure at all n locations
ccgcgtggcacatgtgttctatgtgacagaccttgcaaatttgaagaaagaaatagttctatcaggaaaacaaaagatcttgggagtagacggggtcgaagatgtcgaagattacaaccagtacgatagtatgccactttatacgtaatttgtacaaaagattaagcttgtagaggcatcaactcagaagaccatgaagccttacatgcacaaggacggtgtggggaaaaatgttaaagagtaattgtttgttctgtaatgatggtatgtagggggctatatgtactcatattgcacattattatgtttttactcacaatgcaattgttatgtgcacttatcatctttattataatatttatatggacttaccatttttattatattttataaaatcaattacatttttaaaatgttttttattaagtttttaatattttgtaacaatttttgggaaacttatcatctttattacaatttttatatggacttaccatctttattatattttagaaagtcaattacttttttaaaatgtttttattaagcttttaatattttgtaacaatttttgggaaacgtaccatctttattacaatttttatatgggcttaccatctttattataatttataaagtcagttacattaataaaatgtttctttattaagtattaatatttgaccttttctaattatttttgcaagtggggtgtccgcatgcgaaaaatgagtactgaagtgggggtgacatcttctcaggcgggtggcccgcctgcgaagttagttagnatgttcttcgcgggtnccagctcgatatgcattcatggccac

SEQ ID NO: 47107 - DNA, 760 bp, Oryza sativa
tgaatgtttttgaaaactaatctgtatgccttcatagtcgactctagaggatccccttcaatagaaattttggcatgacctcccctcttttttgaagaaattttgaagcttgctcgggcagctggaggaggaagaagacatatatataggggtgggactttagtcccggttggtagcaccaaccggggctaaagatcaccgggatctttagtcccggttggggccaccaaccgggactaaagtcccacccctaaatatatgtcgtcatcctccaccagctgcccgagcaagcttcatcctttcctcacgatgggggcccctgaatactcaaaagactttctttgcaatatgatgaaaaagctttggtcatgtggctagggattgcattgcctcagatcactgcatcaattgtgctcaagctactcataggaatgaggattgcatttttgatcagcaacctatattggtaaccaaattgtttagatatggagccccaggacttggttgtatactgatttagaacaccaaaccaatccctcttaaggaacacgcttatccaatggctctgacacgtgctgcgccgattcgacccgtgaacgccttgtgcatgacatttagggatttgacggagcggcgacactacagctgtacctgcgggtagctccacgagtggtgttgcaacaactttacaccaggtcctctacatagacccacaccttgctgacatgatcatgcgggaacgtgtgcaatgctctctatc

SEQ ID NO: 47108 - DNA, 1226 bp, Oryza sativa
atgtccccacattcacacgtccgggaaccaaaatttaaaatttaagcacgcaattacccacgttttttctaggcttatcaagcactgacgtacggcatctgctctagtctacttcaagtgcagtgcaggaggcagcgctggaatccaagattcgtggacggataattgaattatactatatatgcgttgtttcttggctttatttatggaggcgacgcatccgcctttttctaccacggcacacacatgccatgcctgccttcccaacgaaggaacaatatggtaccctttcctctcgaaaaaggagaaaaagagagggggtgagggtacgacgatcgacgatgactctccccggtccggtgcattgcatggacggacaaatttgcgtttccgtccatggtggtgcatggtgcatggtgcatcgcatggtacattttttttaaaagttttgtaagttactttcaaaaatcatattaatctattttttttaaaaaatatactaatacttaattgattatatactaatgagtcttttacgcgttcagaagaattagtttccatccttagggaggaaggccggatctttgctggtgggctccacacactactacggaacgtgtaaccagcagtaaccgcggccatctgtaaccgcttagctaagacagtttgcaaggacataacctgtaacacttaattatatagactgttatagatagaggtaggatcaaacactggttactgacgacaacctatctgtgtaatggttcaatattctaaacctattatagattttattctaaggcaaattttgctacaagacactgctaatgtgtggttttaatcttaggatactgcctaaactcacttttgggggaaaacactgcataaacgtggtaatttggcagtggacactgggctgattaaaaaaataatatttcggtttaagaggtgagagaaattacgtgaaatgtcaaaaatacccttgggcccacatgtcaaatgttctctctttgttctttctcccttcttattcctacccttcggcgcggcctgctcggagacaagagacatgcccggagcgcgaccggtttacttgataccggggggccgtggaagaacttcatacttacatggccgcttccttcgttcaacttgggcgcaataattcacaacgggcccagccggccagggctaaaagacgggcgcgccagccattaacggccaaa

SEQ ID NO: 47109 - DNA, 734 bp, Oryza sativa
  unsure (1)..(734): unsure at all n locations
cgcgcgccatgaactgacaacgtcacgacnngtcngangngantttaaggatcccctttctggctggcatagatttctattatctctgtccaaaatatatcttgtattacattagacacatcctagtaccgcttgttcagatttgttataatagggagcgatgaattcggttatattttaagatggaagaaccactgtttattgatcagcccattgggctatattcttctttaatccaggaatacgttggtcttctgacccacttgtcatttggcctgggcttcaagccattgtaagcccactagatctctcatctgtttgcctgtctggggttgacatgtaagatgggttagcccaatggcccagacgaagaggtgaaatggtgaattgacatattgtgaactaatgccttctttggaatgggcgaattttgcggggttttgaataaaacaaactaacgccttgtttagatccaaagtttttctttcaactcttaatttttctatcacatcaaaacttttctacacacaaacttctaatttctccgtcatatcgctctaatttcaaccaaacttttaaatttttgtgtgaactaaacacagtctanaccctgtgaaaacactgcaattttttgcgttccatataaggtgcccaaactgatgctccgagactgagcatgacaatactgaacggagggcttattcactttatgtcaaaggaatcttactttttgt

SEQ ID NO: 47110 - DNA, 744 bp, Oryza sativa
  unsure (1)..(744): unsure at all n locations
ccggccctgaactgacaatcgtactcccannngcngnnngtngantttagaagatcccctatattaatataatgttataaaatgtatgaaaaaatttaagtttaccttggagaccatgaaatgccatagcaccaaaaggagtgggatattcactgatccgtgtaggtggttcattatataattgaaatgaagtatttgctccacccttcaaaaataagttttctgaacaaaaatatcttatattgtattccttaatttataacaacagcgcctaaattgttaattagaaatattgaccatcattaattacgtaacattttccctaatttgattattcataagtgcaaaatattattgcacaaattaatttaacgcgaactatgcacagctaactgcaaagtgaaattcataggattaaatatgcatttagcttttaaaacgcatagaaaatcctaagccacgtgtcatggagtttggctcaactatctatatatttcacaataatcatataagatttgcaaagagaatatgtgtgatgtaaggatgaaagatactgctcttaatatatgcatatatagcaactgcttttttttttcaaactatatatgctcgtaaccgtccaagtagagatggatgagcttctatgatccttcatggcatagatgggacttgctacgtgcttgccctagcaatggctgttggattagctcaaaaacgtaatcaccgatggaagagcccttttta

SEQ ID NO: 47111 - DNA, 743 bp, Oryza sativa
  unsure (1)..(743): unsure at all n locations
cggccctgaactcacctcnacatcccacangccngcangtngattttagaggatccccggaatggttggcctgggttggcttgcgacgagctggctcccttggtcaggttgccacttcggtctgaatcatcacaagccttgggttaaagcaggttcgtgtgggcgcacagcttttataaataatattgtatagctctagaatcgtgtttactaaatagctttgagcaactaaatatctctcaatgctggttactgcaaccctaaccctttatagtataactcctttgtactcccttgcatttattctgtacttgtgggtgtgtcttgatgaatacggtgggtgtactcagtcttgctcaatttttcccaaacccagactatgagcccctgcaagatgaaggctatggtgtctatctcgtgcctgccgacaagcgcctgtggtccgcgccctagccttccgctgtttctcattgagctctgagtgtgctgggccttcgctgcccatgtaataaattaactatttacgctttcgcttgttcaactctggattgcatcaacttttggtgtacctagcctcctgcgacaaggattaatgcacgcacgtaaggaaccgcccgtgggttatttcccgtcgtgacaaagccactgtggtgcacgattcgcaacaatcattgactgtgatgaggatgggttgtagatcctcctgcatgaaagccgntgctcaagattattgcttttgcgga

SEQ ID NO: 47112 - DNA, 749 bp, Oryza sativa
  unsure (1)..(749): unsure at all n locations
ggggctgtttagtacctcnactggcancngccngaggtcgactttagaggatccccttacaaactacattcaacgtttagtctaaatagtgcttgtcactgaaaaaagtttattactgcgagaagagtgaaaaaaggagtatttcttggccaatgtaggcatgacaccaatactgacctaaccctagtggaaccaacctttttaagagaactagaattttagagtatgcttattaggacaaataccaaaatataactccggacagtcacaaatacttatccttttggacattgacactatcttcaaaatgcaactttgaccattaatttctattttaatgtattcgtgaaataaaacaaatatataatattatgataatacttttgaaacaaatctacatgcacgggttttatatttacaatcaaaatattttaaaaagattggatccaaggtatatccagaaggacaagtatttctgagttctgaccggtgcgagtatatttgcagcgcttcgggtaaagttcaaacatgaaatgccaactacttgaaatttgacaagccatcttaacattttattgctacgttggacacttaagcacggatccaatagctctaacctcataatttttggtaggctagtttgtaactgcaaaattgctttactgtgcaacaatgaaataacacagatgtattctgcacctaataaaagaatggggggaccctcaactcgccaccatgatccttcattt

SEQ ID NO: 47113 - DNA, 756 bp, Oryza sativa
  unsure (1)..(756): unsure at all n locations
gcgcccttgaaatgacatctacttgccgcangcctgcaggtcgactttagaggatcccctactaccgcaaaagaggtggaccagtacatattccatcccagaagaagttatccgtcaggactggctggccggtactatcaaatttataccaatacaactaagtatggaacagtacatatatactaaatatatctactgagatcggtccccataattatatcgcagtgctacaaacaaccaccaggaaccaacttgtgtggttattacgtgtgcgagatgctcaaagtaaatggaaggtacaaaacaaccagtaaccgagcaggtcatcgaactcttctctacaaagaaacccatctcgcacacacttctcactgagtaccattttattttcctttctgtgtgcagatccccgaaatcccatatattgcacaacgattcaacgacactactatcttgaacgtggccgctgacctatgccgattcatccttcgtgatgtctgcaacgcaagaggtcttttctacgacaaccagagtgaactcacaatggacgacaaatttaaacctctcagagagtgggagaaagaacatatgcaataacatgtacactacttatacatatgcaataacatgatgaaaaaactgggccacttgctattatatattcgaatgtaaattacgattgaaaataatgggtatggattacatgtttggtactgcgggacttggcttatcttatatgcttactacttcgaaata

SEQ ID NO: 47114 - DNA, 746 bp, Oryza sativa
  unsure (1)..(746): unsure at all n locations
gtgtccatgatacgtacttnacatgncanaatcnnccttngnnttnataaagccccaccggccccatcaagtttggcattttatatggaacttaaattttttcacgggtttcacaaggctcaagctccacttagttttgtcaaaaatttaaaaggtgggttgggaataaaactatatcacngaaaaattacaagtttttccttttaaaatttttgatgtgatccaaaaattaaacagtctgaagaaaaacttttgaactaaacaacgcattagtttattttattcaaaaccccgcataattcacccattccaaacaaggcattagttcacaatatgtcaattcaccatttcacctcttcgtctgcgccatttggctaacccatcttacatgacaaccccttacaggcaaacagatgagagaactattgcgcttacaatggcttgaagcccaggacaaattacaagttggtcagaagaccaacttattcctggattaaagaataatatagcccaatgggctgatcaataaacactacttcctccatcttaaaatataaccgaattaatcacaccctattattacaaatctgaacaaacagtactaggatgtgtctaatctaatacaaattatattttggacagagataatagaaaacaatgccagccaaaaagcaatacttgacacactaagtaaagcgatcttttcttctcaagacgaacattaattttttacccaaacaagctga

SEQ ID NO: 47115 - DNA, 747 bp, Oryza sativa
  unsure (1)..(747): unsure at all n locations
cgtggaccttgttgaatgacaatccacctggnacccgngancctccacaaaaatatacatccggggagaaagtatgtgaaatgacagagaaaatagtttgcgaatttggaaaagggactaataaaccttcaaagggtacaaagcgcaagaaacctgacaagaccaagaaaccagaagttctgtgatgataaattttgtactaaatctgtagttttgggatacacatatttaaatctgtagttttgcaaatagtttgattaaagtatatgtagttttatgaaatttaatttactctattttttactaactggttttgatatatctaggaaattctagtgaaatttattggccggaaatgcactctaccatcaagctaagaggcatccatgcatgcatgaagtgaaacatgtaatgttcttacttgttattttggataccgacattatctcaagaagacgcgaatattagggaaagtcctaatatcaaataattaaaaggagtgaggctttaaacccaggtcgtctagcccatcaccttgtagagctagccggaatactctgggcgtttctccaccgacattatctccagtgcagatttaaagctattagaatataactacacgatgttatttttcatgaaaatcgtctactagtatgtttttacatactaattcttaatattttttttgcatatttttattttagttatgcataagatttcgaggggatcctctagagtcgacctgca

SEQ ID NO: 47116 - DNA, 800 bp, Oryza sativa
ttgcttttgtcagtcgtacatgagacgcttgattatgtgagtcttttacccctatgccattaagaaagttgctgcttacctgtgtgccacaaaaaagtttggagttacgtgtatgccatgagcccaactttcgttgactcgtgtgccattttggatgaatggagacataacagaggtgttaggggctgtgtaaagacagttttgcccttgcagccccaccttcttccggcacgccacgcacctgttcggcttcgccggcgccgtcgacgatgatgcggcggcggttgcctcctccttccccttgagcgacgacgtcgggcgccgtggcggccggagtcatggggacgatgatgttgggagtggaggcggtggcggtggccggcgacgtccccttgaggtggtcgcggtagcacttggagcacatgttcttggtctccttgctgctgaagaacccacagctgctcgcgcacagcgctagctgctcgtcggcggcgggggcggccgtgctcgcctcctcctccttgttcgcgacgtcaggcgccgcgggggcaaccgccgctgacgacgccgcctccttgagttggtcccggtagcacttggagcagaggttcttggtcgcctcgctggcgaagaacccgcacccgttcgtgcacataggcgcgccgccgccgcccgccggcgctagctagcccgatgctacaagtggtgacggtgtaaccgcgctccggtcaccggagagatcagtcgtcagccctcgcggccggtgcttgttgaagagatctccgcggcctgggcgcacg

SEQ ID NO: 47117 - DNA, 1411 bp, Oryza sativa
caggaaacttagacactaagatcaagcactgttctatgaatatggttgtctttcctatgattttgcagaaccccagtgtgtcagtatctgtgaatgtcatgtcgtgcttagtggcaagcaacgttgaaggctccttctgtccaaaaagtgggctgacctttcttttgtttggactctgatatgatcttgaagtgtgcagttgttaggaagcatgcacagagatgggcagcttcaacatcatggggattggtgtggcatagatgcatcctactcccggtaatggtgagtagtgtttaggatcgtttttatcgctgtgctttcagctactgtctttatcagttatcacctcacaaatgcgcgttgcgcctgggcgcagtcacagatagttgaacagctttgggttggacctctcatcaccctccatgtaatttctggataatttcttcccatgatcatcttctaaccttaaatacttttttttgtcattttgtttggaattcttcagacatatgggagtagtaacttaacagtagttaatctgtagcacgtttccgtttcgtgtctgattgtgatggctcatggttcctagtctcataagcctctaatttctaattatctgaatatgattgattcctttgcctcgtagacgtaagtgcttacgacagcccggatgtcagtccccaaaaattaatgttttgtgtgtgtttttatatagagctggttccttcgattggcattttctgcaggtattatttgctggtagttgtgtcaagggcttggaagtcaagcgttgacgtcagtgggcccacatgtcagtatgcgtataatttgttgaattgtttgaatagtcagagttcggtttaaccgattatatatttttaccatgctgtggccatttccttctgctgattcatttacatgatacattgggaactggaatatgtccatgtataaagggtcctttatacataattttcacagaaaattttaggcttgaatgcatatggttgtcaaacaatcaaatatgtcaggtcagatgcactgtaacgattagctatatattctcctgtctatttcttttttaaaaaagtcaagatctcccgccaatagttatgtgaacgcgctgatccagatctttgaatggaactcttatccaagttaaaagagcactccccgcgtcgctacaggatgattatatatggataaatggctttaaaaatacatgcaagttaaagaaaaaaagagtacgaacaaaagaaaattgaagaacatgaactcttcaatcacttgggagattctttctactaaaagttaaaactgcataaatgcatcataattccaaagataaataacatgtatatagaaaagaattaaaggattttagcatcagtttcacatcaattggggcctt

SEQ ID NO: 47118 - DNA, 662 bp, Oryza sativa
tcagatcaaacagacaactggacataatatcagagataattgatctgtttatgccagagatacatggttttctttttcaaccacaaagattaaaaaaaacaaattatgatgatcctaatggcaaagaaaatggatagctttgatgcttgtcattggtactgcaaaacaagtggtatttcaacagccagaccaattataagatgtgggcaaaccctcccatcaagagataacggtatgtccgaaatcatagggcctgttcagtttgtagccaaaataaaccttaccaagttttagcaattccaaaattttggcaagatggcaatattgccaaaataaattttagcaggatttcttatgtattgaccaaatttggcaacaaactaaacgtagacattttttggcaactttgccaaaaaaaaatggtatggttgaaaatgacatcaaaataaacaggcccatatatgcacagaaaacactgatggtgatgtaaagttgccagcaaccagaacttctagaaaattcttcagcataattgcagatttgcaataccatgacttcactaaaaaaatctgcactatcatcaacattgccagaaatacagaaacatagcaatcaaggttctaaataccaactggcaggcatatagcatctagatacaagaa

SEQ ID NO: 47119 - DNA, 873 bp, Oryza sativa
ccagtgcgccctttcgccatcgacagttcgttttagccacggagcttttgctggtaacctggtactgctagtaacacacagagctgctatctgctactagcaggtttataaaaccgtatgattattacgtggttattatgtgcgataatcttctcagtttgtgaaactgcgttatacctcacggctacggttttttaaccactaaaccgtgaggtaacagtaaccccacttaaaacggtttggtgaaccctggttagtagtgataagttttatcccaagaaaaaactgtcattaaattgtacaaaatcttcacaacatgtgacttattagtagcgacaacattttttttcgcgaacgtgcaaaaattagtagcgacaacatacaaattgtttttttataagagtaaattacactcacggtacataaacttgtgtggtgagtgcaaatagatacaacaacttacaaattgctcactttgatataataacttggctatttggtgtgaaccgggccaaaatgatccacacaagtaaaattgctctaaattagtgcacactaatgacataacagcatatacatataactgtgatttggagatcttatttcgaatccaaataaaaatgtgcaaaagtttatttttcatgtccatggtacaatatttgtttcattttttggaaaaatttgatcatctatataactcgtctaatgtttatttatctattcaagaccaagacaatttttatatgtactattaactactaaaagaaaattttaatttttatgttcatgttctgacactttcatcgaaagtgtattttaacaatcaggtatttttaattattttgctttttcgttggtctagatcttgaaagt

SEQ ID NO: 47120 - DNA, 1465 bp, Oryza sativa
attacaaaagtgcatatttcactatgtgaaaggaaattcattaattaccaactacctattacattcgcttcaaattacttgtcattttaaatttgtcttaagtccaacaataaaaacttgaccatcaattattacaaactcatatgagtttaacatcatgagatttatatttttatattcattacgaaaaatacttgcatatatataatttacatgtttttaaactatagaaatttctaaaattaatgataaaaaaataaacatgtttgacttgaattatccacagtaggaatttcgttaactcacttctccatacggtgcaattgtttgagttcgctatcccaacttccaaagtaatcgtccgtcgccgcctgccaattgacaaaggaaaggggaaaaaaaaacaccgtcctttgttcatacacttcattgtgaagtgtgaacgtagcattttctgaggccattaaactagtcgtctctcctcttctttgtttccctccacagcagcttcggttacttcgaaccttccatccataaatccttcctttctcctcataccagaacgcatagcggcataggacgacgagctccctacacagacgggagagagagagacagagagacgagggagaagaggatgaagcccaagaacggcggcgcggccgcggacaggaggctgccgccgaggtggatactcctctgcgcgttcagcttcggcctcggcatgctgttctccgaccagtgagtgatcgagtcgatcccctagccttgattagttcagttcagccgtcccccgtgttggggtttcaggtttcttgtgttttgctatcgccatgcggccgtgcgcgcgagcgacatgggagagagtgctctgctttggtgcgactgatgtttggatgtttccggtgatcaggtttggatcggtgccggagtggcagaaaccgttggcggcgcagcgccgggtgcaggacaggaagctgcagatccttgatgaagattttgttgccaagccggtaaggctgactaacctaacctatgggactatgaaccataagtctttgcctttgcttctacctctctctgttttttctagacgattttttcccctaccatattgcaatcttgttatccccggaaatatccccattatcgaacaattgatcatcttgttttttcagacattgttgtttgtaactttgtagtgtcatgatccatgagtgtcttaattaaaaataataccttttcctgtaaaagtttggccgtattatcatgcagaaacagctgtttcaacaattaagcactcgcaaggcaccccttgattgcacctcttttacatggtagtacctggtttgtaataaaaagaaaaggaaaaggcaagttttttaaaatgaaaaaaaagaaagaacataaggttgaagccagctgttttatatgaatgcaatgcagagtagagttggctatctga

SEQ ID NO: 47121 - DNA, 2965 bp, Oryza sativa
ctgcagcatccaagtagggtgttgcaagctacagcctacaagaggctacttttttagtatcagccattgatgtacagcaccctggtagatgcatggagttatacattcatgattctaccgccacacagaaaatattatattgctatattgtaaaaggtctaatgaagtatctttaaaaaaacctctcagaaggattaatccaatcttttcttttttttttagagcatggaggacttctaaccatgtcttagcatgattttgataccctgtggcccatggggagttggatcctctaaccatgtcttagcatctgtttaaaagagtttttttagtggctacaacttcttctaaaatttacatctccgctatgcaatttaaattctcatctaatttgttagactctatatttataaaatctagaaaataaattaacagttagaaactatgaaacccaacctttttagattttcattactcccttcatgtcaaaatataagaacctagtcatatcggttgagatgcattctgtactatgaatctgaacatattcagcactatattattatattttaggatagaagaagtagatgacttagtaatcactagctgcatattataatctcgagctccacaaacaatgtcttaatcaattgatagtctcggataacttcaggcgtcgagttgtaccatcaaactgaggattttggaggcgtctgaacatgtaccaacatgcctaattgcctatcaaagtagtcctaatgatgcaacatcaatgtctggattgggtccaatcatgtctggccatgtcggttgtagaccaaatttgtaggaccctggactccagtggacatgttataagtacatcacataggtacgtagcaccattaagtgtgaccgtgtcaaaagggaggagctagacgaatggattgccacttattaacctgaagaaagtgtcttgtgaaagcacggtcggtgatgtcatcagtcatctgactgaaaatggttatggtactgttcagctagccacttgtgagtctccctccatcaatattgttttacagcagagatattccagcatttgttcttggactagacgtcttgattagggatgaaaacggtcggaaacgatcggaaaacagcctcaaccatttccgtaaccatatttttctcggaaaaggtaaagtcggaaacgaaaacgatatcggaaatatcggaaaaccggaaacggaacaatacggacggaaacatgtcggtacagatcggaaaccggtaacaaatacggaaacattaaactataaaaacatatatttaactttacataagtatgttatatatatacataaattcaagcttatactatataaattataaattaacttcattttagccatgtacaaaagttagagatttattgaagagtcattcaatctataagctgtgggtcaagtatagacatgtcctataatatcgacatatttagaatacggtaattaccatattataagaaacggtaatttccgcaagaatacggtaaatacggaaatgataggtataacagcaaaaccatttccgttttcatttccatattttttaccatttccatttttgtttcggtcgattaccatttccatatggctcggccggtagaaagtcgaaaacgaacgccggtcggccggtaattaccgttaccgttttcacccctagtcttgacgaacgaaaagttcatcgagctaggcagagtccgagctggaaatatgaactctgaatatagttacactgaatttgatacaatgtaatcacgtgaacaaccaaaatggatcatctaatttactgctctctaactttaaagtagctgatatgtaaatcacataacttatggtccacatgtcagcgacctatgtcagagaagtttcttcctatggacaacatagtttgaagccatttttatttgaagccttactaaaattttgataggataaaatatattagacagtttaatactaccaatattttatattagattgtctcaactacatagatttgataaaaagttgtatccaatcaaaacaactatcacgatcggagaactcatttttactaccggttaacaacctcttttattatcgattgtaacacgatctttagtaccgattgaaagaaccggtaataaagatgcgtactaaatcaaaaataacatgtgggatataggattcaaactcaagatctctcatctcaaccctcacacacgttaccatcccgcctactacacacatctaacttgaataaatatattttccttttaagctaaccctgaggcatctttagtaccggttggtaatattaaccggtacttaaaaatagctttagctagtccgagttggtggtaccaaccggtattaaaaatactaacccgcactaaagatcttttagctttagtctcggttagtgttatcaaccggtactatcttataggggcttgaatttttagaaccggtagtaatgcatctttagtacctatttttaatctaaccgagatatttatgtttaggggagtaagaccctctttgtttaggcttaggcttattggcctagacttttaagtcagtttattggcttatatgatttataagccagtggatttaatgtcctaagtttagtggtggagtcatacatctatctcatataagccaaaaaagcttctccaacctagcttttggcttaatagtgttagagtggcttatggcttcaaaaaagccaaataaaaaagttgcttgtttgttttggcttagactttttgacttataagttggcttataagcctaaacaaagagggcctaagataaaagatcgtttctagtaatgtactgctcaagttagcaaaaaaattggcaaggggcaacaaacaaaaatgcctcttccggttctttctctccctctctcttactcttttttcttgccaagcatc

SEQ ID NO: 47122 - DNA, 1585 bp, Oryza sativa
taggaggtatctctggatgggctcctcaaaatctgaagcaacccgatgaagatactacagcccacaatgggtatcttggcccaaagtaaccccagatgaaaaatccccaaataaccctcccagcccattcttcttttttccttctcttttcttccaccctctcttctcacgtcttctttcttcttcttctcgccctcctcgtcgaccattcgccgcccccgcctcccagcctgccgccgccacctccctcctctctcccccgccgctcgccgccaccgcttccctcctcgccctccccagccgccgccgcgcctccctcctcgccctctctagcagccgccttcctcttccctccgcctccaccagccgtgtcccaccgtcgtcgcagaagtggttccagcgccggcggcggcggatccggcaccgaggcgggcagatctggtgggcggacgcggccgtcgaggtggcgggtgcagtcgtcgccgggtcatcgtcattctctccgtcgcggaagccgagccccgtgccggttggtggccgccggctgccgcggcggtggccggatctggtcgtcaccgtcgcggatcctcgtcagcgacgcctctctcttatctctctctcgatgccatgccgccggtgaggggcaagaaagggaaacgccagaagagaatgtaggagatggggcaccgggtcgccacaacgcgtagcctcgagggagtgtctctggaaaaagtgagctggggagctagaggggcgcgttccccgcgtgagggtcgcacctccctctagagacacgccgcgcggacggacgggggacggcatgagcggggggacgacccagggacaccgactgtggatgggctaagaaattttgtttctataatttgtcccgcaatataagttactatttggaatcccaagataacacaatccctttcccattcatcaatttttttgctccctcatccataaatataaaagattttggttagatgtgatgtatcatagtactaaatcctttacatttagggacaaggagagtattactttattcttccacctatcaactctttgctaatttattccacatatatcaaatcttgtacaattttatcctcctatctaccacaatttgtattattttatcctcctatggtacaattgtgttaactaaggataatttggtgaaggaattagaatgatagtttaagatgttgttttttatgaaaaatgaaaccatctaccatctattcattgaatgtcattttttgagatttctttggagatatgtacacatttcttttgatttacatcctccacaaagtatgtctcatatattcgggaattggcttgttggtgttgataaaagaattaagaatcttattcttgttggagcatccgctttatgttgggctctctggcttagtaggaatgacatggtttttgataaatcaccatcaaaatcttatttacaggtacttttgagggcaacgtattggctctggtgttggacccaattacaaaggtgtaaagaagatatcagcctaattaatgatgcatgtcctaaacttgagtcaacgattat

SEQ ID NO: 47123 - DNA, 1469 bp, Oryza sativa
  unsure (1)..(1469): unsure at all n locations
aacatatactcattctatccaaaaatctaagcgctcattctatcaaaaaatctaagcagtatttcctttgtcacgaagacaaaagaggaatttactcatgcaaggaggaattaactcatacaccacgtgaaaaaaattaataaactatatgtatgcatgcacctaatgagtattaaaaaggctccctaagttctagacaatatttaatttaggcacataaaaactataaatatgccatagacttcataaaaataagaaaatgaaaaacgacttagtcttttggatcgtgagagtatatcacttcttttttttttcactaaacccaatacaaacaaatacaaacatttatgctcgtataagtgtatctacatatacaatataaagatacatttgcacaccatatacttatgataatccccaagagactaggccgacacaggccttgtttggaagattagcccagggctaattttaagagctaatgttggcccctttgaattggaggaaaaacataggaattttagaggatttcaattttatagaaaaatttcctatgaagccctttgaaacaaaggattgaatcctatccaatcctttgaaatttctatggaatggacaatcctatagagattttggagaaaatttagcaagagtttcaacctcttggtaactttcctttgagtctatctctctcatcctattcctgcatttttcctgcggttcaatcaaacagtcattcttgtgtttttcctacgttttgcaatcctctattttccacttacattcctatcaaaatcctacgtttttcctattcctacgttttttcaaccctgcgattcaaaggggcccttagtcatgaattggtaggctaaacattagcctaaagtggtatgtttggatccatgagctaattcaagactaaaaggtggagagagagtaaaaagagaggagagagagggagagatanagctgctttttatggtccccacacaaaattagccccattagagcaggttcaatagtgctattaagctggctacaaaacttacaaatcagcttaatctgtgattaatgaaagaaaatcacaggaaaaggaacaagcagcgcttgttttagcgccggcgcttgctcagcgcctgaaactgtagcgctcgcatgcagcaaaaagacgataaaaaatacatttatgtgggtcccacatggaaccatgtaactatttaatgtatatgtatgctttaaccaatgcagcttatagctaacttatagttagtttgttatatgagttgtctccttaagttagctctattttaacatgataaaattttgaagcttgctgctagctatactattgaccttgctcttagcactccttgaaggggctaatgttttgaggggggcttattcactttagcctcaaatagcccacctgtttggatacttgagagctaattcagggctaaatgatgggg

SEQ ID NO: 47124 - DNA, 2191 bp, Oryza sativa
caacaaagtctggcaagttgagacattcagtactacgaatctggacaagctcctagtctagatccgcagcactcgaatgtgtcacatctaactgaaatcttttatattttggtacggtggtagtagtattttgattaactctttcttataaacaaatcaatcatctatcaggtttcatccgcatccggtcttaaaaaaaacatgctttagccgaagctatttgtctaagatctacttccttcgactcgtattaagttaatatagtacgagatgtgacgttgcatattaccccaaatctagacaggatatgtcagatctcgtactagattaacttaatatggaatggaggaagtagcaagtgtggctataaagtttataaaaacccttaaaacttccatcaatttataatgccaatagaattaataatatttgaagcatttaggtagcaatatatatttaggtttccctttacaaactttcatttgatggtagtaggaaaatgaattttggtcacaccaaaattttggagacgtggcaagggttttttttttttttgtcacaccatggtgaatggggtggcactttgttgcacacgctgacaactcaccaacatatctactagctttttttttgttctaaatgtttaaattttaattttaccaaaatgcctcattttacaaaattgaatttgtccagagccagaggtacgcccatgtgagcagtcatttgtgtcctgctcagccaggctgtgaatggaccgagctggaggccctgccattatctttgacgtggttgaccctcattggttgcagcaattatggagtcatgatgcggtagtgattgagatggagaggaacaggaacgcagcaaaagctgatatctcgataaacgggagcatcacagctctccatgtactacgcattcaagactacagtacgggatggttggagtagttccgcatgggtctttctttttttttcccttcattttgtttaaaccgtctagagcaagtataatagtaagtacaatagtagagtattagccagctataaacatatttaaatgagataaaagatgagagagaagagtagcaggctacagatcggtagccagctgcagtacagactccaaaatgcaatatgtgtatgacatgtgagaccatatattaatagtatagtaagcaactatggtatgaattgtctattagattagctataaatgaattagagctagtagtgggctatactattaaacttgctcttatgtgatgatgcatgatgcacttgcagagttcaactaaagttgaacgagaaagaaaaatgctaatagcaacataaacataaaacagatggagaaaatagacaaaacaaaaattaagtttacattttatatggcgtatgaagcacaggaataaactgcctcaaaaacttagtacatgaatagacaaacaaagaagagtatggagaagatatccttacccctgcattccaaatgacagtataacatttatactacattcgttcctaattaagtactgcacttccataagtactgcacttccactattttaaaggcaaattaccggagcagaaaaataacttaaatgccatttattaaatgagcgatggttggaacggcggggatgattggtactaagatagaaagaaattaaaatgatgagtggttggattaaaaaaaattagaaatatagtactagtacacttgtgagtaaattgtaatagcggtatataaacttgtcagatgtgtgcaatctagtgcataaacttataaaatatttattttggtgcacgaacttatttggtgcatgcgatcaagaccaaaatcacttgacaaggataatcttgctgattttgttgttgatttgaatgctatgtaaacatgtgtctcagaaaaatatcacatagataaagatctgtttagcaatacatataattaggtatattgattgcataaagaaagttcggtcctgttcactttgatgtcatttttaaccttatcaaattttggtaaagttggcaaaaaaaaagtggctacatttagtttgctacaaaattttggtaactatatagaaaatcctgccaaaattttaataagttgccaaaattttcgcatttttgacattaccaaaatttggtaagattaaaaatagcatcaaagtgaacatgcacga

SEQ ID NO: 47125 - DNA, 685 bp, Oryza sativa
aacggcaccggccggccaccagctatgagcttaatagctatccatgcaaggtctttgactctttgacacaagcaagcgtcaggttaagaggtccagaagtttcagttcaaaagaactttcagatagtacagagggctgtaacttgcaaaatgggtgggcacttggtgttgttgagatgggtgaaacaaaaaaaaagaagttttgaataactgatcaggcaccagcggatacttctcttacatgtttcagtacatcccgttcaccaattaacgacctaatgcaagtttataaggtacatagccctgttcgtttctgctcgtagcagaggatgaaattttagattatcgtggcacgcttttcaaactgctaaacgatacgttttgtgtgaagattttctatataaaagttgctctaaaatatcagattaatccatttttcaagtttgtaataattaaaactcaattaatcacatgttattattacctcgttttgcgtgaaacacttgatctttattttcatcttcaggagattcaaacgccaccatagtctctatataccagatgtagatgtttgattaatttctttttctttgtacgaaaaaaggaattcgaaaattatttgtccttgcttacacactaggattggcatttggaggtttatttgcctgctagacgggccaaattgg

SEQ ID NO: 47126 - DNA, 2046 bp, Oryza sativa
ggacaatctgtatacatgttaagcctcactctcacatgttcaattcagcaacaccagcacattctactgtcagcaacaacaactgtctcaaatatttggcttaattcaatttacaatcacaatccatatcaatttatattctcctctcagcttctcgagcagttgctgtaagcctccttcagaaggcagaggtgatgatattagcctcctctagaaaatgcagcagccagtgccttcctcctgtcgtggtgtggcccatgatagtgctctgctgaggatgtggccgaagagttcgacgagggcgccgcctcccccgccgtcgtcgtcgaggcacgccggtagcagggtgactctcgtgcaggggaggccgcgggcaagagatgggaatgagggtggtgggctggtggtgaaaaggcttccctagatctatggtcgagctgaacccgccccaaggaaggcggcgagcttgcgagcaaaagcgagcagccggcggccatggagcaaggcgagaaaggagaggagaaaggtcgcatcgtcggtctttgattgttgactgtgcttctgtgggccggattttgttgtcatgggccgtgtgagccagttcattttttcacactcactgattgccgtctgatgcagatcgtgcgctccatcttgctgctacttccctctgacgtaacttcgactacgtcagacgatccgaatccctttgcttgtgttggagttggtcattgttgtggttatactcgtctgctcacatttttacagtgttcaacgatgtggattatctttgttctttcctgataggtctatttttctcgaacgctttcctgataggtctaatatttttttttccaaaacaaggttgtaatcagctcttatatttaatcaggcttgtttcggaaaaaaaagattaggtcaatttggaaccaagatggctgcaaacctgcaaattacacatgaagggtgtgtttagttttttgtgtaaagtttttgaagtatacggacgtatatttgaagtattaaacgtagactaataacaaaataaattacagattccgtctataaactgcgagacgaatttattaagcctaattaatccgtcattagcaaatatttactgtagcatcacattgtcaaattatagcgtaattaggctcaaaagattcgtctcgcaatttatatggaaactgtgtaattggttttttccccacatttagctaaaaacatttgatgtgatatttttagttaaacttttttggatctaaacaaggccgaagtgaacatggcacaaaccctccaagtatatgtctggcacatatatagactcccaaatcatatctagcataaacttcagattgttttttaggcaaccacagaaattttcttggcttcaaacccaacccctaatttcacgctcaaatcatacatttacacacacaataaataaataaataaataaataaataaataacaagggaatagaatccagtggactgaaactcgtcactttcacgaacaagtctttagtggcaagataaaattgcatccagtgccagtgaagtcctcggaaacacattagactgagacctcttgatttctaaaattccaatggatcatgccagctgatgtgctccagtaaaaagcttgctggaaaagacaggaaatactgcaggctgctgctttcggcgagctgctttggataagaaaacgcattgctatcgttggcactgttacgactcggtctgtggttctgacttccgatcatatccacaaatccacaattactccagtttgttttgtcaacagacaacagcataaagcatagatttttatttgaaggaaaacacgttgaggcaaaatatctagattacaaagtagttttatttcccagagaaaagcatccctcctaaaaagaccacaaacgatgtttttcttcaactaaaatgtactgtaataacaccaaaggagcattgtgaaaattgtcccgcccaaaatgtacagttgacacgagtaaagcattagtgttactcagatttacagtct

SEQ ID NO: 47127 - DNA, 1219 bp, Oryza sativa
  unsure (1)..(1219): unsure at all n locations
cacacactgtttagtagttcgaaaaaagtgcgcgcaaaaaacaaaagacgtgagttgggaacatgaagtgccaaactcagcatggacaattatgcatacacgcttttcaaactattaaacagtgtgtcttttacagaaattttaaaacgatgctattactacgacggcggtgcccctccccgtcgaccgcctccagatcgatgccgccgacgcgatggcgcccttgccctcccactacgtcacgagagagaaggtaaagagaaggggggagaaagagaagggatagggagggaggaggaagaagagaaagacagaggatgacatgtgggcccacatttttttcgagtaaatgacatatgggacctacgaatattttctaatgccacataaacgtcatgtgggatgaagccaacaacgccacgtcagcaaaaccgccctccaaaaccactgagggggatcaaattgcactggtttgaatagttcggngagtcgtcctatccggtttttgcgattgagggtcacggatcagattcaggttactttttaagggagccaaagtggacttattcctagtctgatagtaaccgactaaccgttgctttctgggccgtgttgtactggagcacaggttatgacgtgcggaggcccaaagagttttgggccgtgggggttgcttatcttgccatccttgacgcgcgctgagctggcccagacgcccccagttccccttttttgatgctttttttttaacgactcgcacgagacggtgcgaagttctaattacaagattataaccctggagggtcgtaaccaggaaaaagaaaaaaacaacaccacccacacaccgacatcgccaacacacaagcccaggagaaggctagcaccggaccggccgccgctaagcgtgaccagccgccactagactaacaaagggacacagctgagatcgctccctaggggatgccaaaacgacgtcttcaagaagagaagcgacggaaaaaccgccactgccgtccgtcgggactcaaaggagccaagactaggctttcgcccggcaatcgcccttgaggggtgagacctacggctgacacaccgatgctccaccaccacacaagctctgccgacatgtgggacccctgcaccggcgtcccctgccgaccagccttcgtgcgccgaagatcgcgccacacccaccagcagcttcttctcacacctaggt

SEQ ID NO: 47128 - DNA, 1189 bp, Oryza sativa
aacgtattcccagagtgatccagtcttattttttccagttcttatcacgcaggaaattacaggacacaatatctgctgcaatttgatggtgatgttgttgaattaaaatttaggaacattaattggtttgagttatctagctaggcagaaatttggggtcgacaaggacaactagtgatgatcattgcgttgatctttctgtcttccagagattaccaaagcatcgatcaatgtcaacgcatgtgctcgtcagtttcacgaacagagtcatcgattgctccaagtctgcatactgtacaccaaattgatctcatcaacgacatgaaccttggattctacctcaagtggaggcgctaagctagcatgcatccttctgaaaccatcataggcatcgacatttgacgtaccaatgttcatcattttactcgatcaagacaacatatgattagtagtactgctgcaattacatatctgaagatttttctgaaaatgcaatgtcagtatgcagcgcactagtaaactgcagtctgcagaagaacacacatggaacataaatcccagagagaaaacgatctggcgccttgaagtggtgcaacttgtggtagtagtttttcgccgtgtaaatggcatcgtcgatcaattcacagctgctgcgtgagcgaagtaatgaggctagctatagccgtgtccctgcttaaatgcgtcggcagttacgttcatgtcctccggtcctccccttgttctgactgtcagagtgacagtgctcacgtttactaccaccctgaacccagtgaatactagcattattgctacgtacagtactagcatagtaccacgatgcagtgcttcacaaatcacaatatgcatgcacgtacagtttctgaatttcatctccaagatctgcatgcatggctgttgatataagttttcagagaagaacacctgcagcaattaaatccgtgcaatgcatgggtgtgatatcattttcatgtaaacatagttaagaacttgatgagatcgagatttgatgccaatgcagaaatgcaaggtgttgaggtgcataaaactgcagggtagcagttgattcagagtcagtgagaactgagaaaatgagaagctcgcagcatgcgtttccccgcatgagcagcatgcctgacacacatatacactgctcactgtctacaaaaac

SEQ ID NO: 47129 - DNA, 714 bp, Oryza sativa
gcccgaagagattgaggaagcaaaatagacttattccatgaagaagcacgatggactatcgttccttcgaggcggcccgagtcttattgggtcgtgcctggaccattggtgcagcccgtgggcgagcatggcccagctcagcgtgtaggtcgggccgtgccggcctgactgatctcagctcgggcccggtcatggtcaagccgtgacaggccgggcggctcatttggccatctatgtgcataatgaaaatgctacgtttgggcctctatgcaccgaacactcgtgtttagattggaaaatgcacaatttgacttcctcaaatatatgtcgaatatgatttgtttcacttaaccttaaaatcgggtataccgatccattcaactagtaaaaccggtgtaaaacaactccttcagcagtattgacagtggttgtccacatgtcacattaacctaatcctcatctgatgcggcatctaagtggcattacaatcagaaatgaacaaaataaaatgtacgtgagacccaaaggtcagtgacaccacttctttatcctttatcctctcctctttcctcgtggtggaagcagtgcggcgtaaggggcctctattagcccaattagcgtgggggaagcagtacagcttgatggcatctattagcccaattagcccaactagaagtataagcgcggcgccacgccgcgcacagcaacgcacgc

SEQ ID NO: 47130 - DNA, 625 bp, Oryza sativa
acaaatactagatatggacctgtgtggttggttggatgcctaagcaaaataggagaggagaggaggattatttggatggagcaacttagctagaaacgattgattcttttggaaattcagaaaattatagattgaatgtgccacatccaacccgaatcccttatattttggaacggaggattataaacatacaaaatagcttagaaaaagtggttcaaattaatcattttattagaagcgtggcataaataatcttagtccaataatccatttggaacatggttatatgacaaacattttgattagtgccatacattcaccggttggcacaaaaactaagcccaatttgtatctgcatagttattccctccatcccaaaatataatcacttatcgagctttttcaaagattagggagagaggtgaaattaaattggaatggttgttggttgatactactaggaagtagtttgcaaaattaaatgagagatcattgccatttgctgagacgaggaagtaaatggagaagttgctatattcaagcatgcagtttaaatgctagaagttactatattttgatagggagtgagtacaaatttttgctaaacatgtgtatgtatgatttc

SEQ ID NO: 47131 - DNA, 1166 bp, Oryza sativa
  unsure (1)..(1166): unsure at all n locations
ggcctgggacatttttggaatggaaaggtattgtcattgctgataggttgccggttgggaatttttagtgcccccacggcaacaggggtgatcgggattgtttaatcatgcattcctggtcacaattcgcaatcacattcatgtggaataaaattgatgaacacgctttgctgagaaaaaggaagaagagtgaactaatacgtttttcaatttcggtgtatacattataagctttatattaccaaggggcaagggaaagtttagtaaattatcgcgtatggcacagccacggatcaaaaacaatgtgagctcaaatgctatgtctcggaaacatgtccacctctccatcttctatttgtgttccaatgcttatgtcaatcaatcagattttggtgatgcacgcatcagagagaatttttcccctagccgtgattttcctttctttctaacggttttgaaattgcaagtattggagtatatcatcattctactattatcttccaatgctacgaaatagagaaatcaagcagcgaagaaacaaaaagatgttacatgagatgacaaattaaagcccaattacctcgaatcatatatcaaattgaatgtcgcaaagatttcaacacacgcctacagcgttctgaaaagaaagcccaaatgctcatagtggctccaaatataaatcaggacagcatagtccttccagcatcacttccctccagaataatcttttatatcccataggccattgcaaagctcattaagataaaagtaaatgacgatttaataagaatatgcagcattttcaaacttgcaactcagataaaacatcaacaggaatgagatgcaaatgagcaaattgagcacatatttaggttcaaatccaacttattcataaagcatactgctgtcccacaggaaactgtttcataaaactaacatatcatacggactcgatggtccattaaaccagacacaagtagacatcagccccacaaatatttgatgaacataggctcgggccgaccaggcacatcggcagctccaccaaactggctgataactgaccaccccgaaggcggagcaccaggtggagggtgcactccttctggatgttgtnnnnnnnnnnnnnnnnnnnnnnngcacatcaacggaaactcaaccagggg

SEQ ID NO: 47132 - DNA, 860 bp, Oryza sativa
  unsure (1)..(860): unsure at all n locations
ccgcgttgatagaacngtnnnnnnnnnnnnnnnnnnnnnnnnnnnnnnncatatagcaagtatgatgaagaaaggtcttccataatggcatagtcccaatatcccatacatatactagcatttgctcagatatcttcaatggcgacttgtgaagaatcacaaaatgtttgaatcaccagtgagaataatacttccaatggaactagctgatgcaccataatcatataatgtgtgacccagtaattgcaaagccagctaatggcatgattgtatcacattgaatatattattggcaatcattcaatggaggcatcatccaagatcctcacaagttcaccttctggtacagcacaagcattatcgtcaacacaaatcgtcgaaataccaagtgaagaatttatgaaaaaggtcatgctatcctctggcagcagttgagtcaacatatctgcagagtctgctagtttgaatgataattaaatcaaaagacaaccagtaagaatgccacctaattctgcaacaagcttccacttgttagaattattttctatctgcagcaactggtggttgaattcaagcactcgtataagaaatacagtaaaaatcacaaacgcaatagaacaagacaaaaaagccagcaaactatcgcgcgaatcataaagaaggtttacagcaatgactggattctctcctaagtcctaactccttcatgggtatcgaatgtcctcttaaaaggcaacattccagcaatttccactttttatgacattcctttnttgcatggaagccaaacatcgcattcgggcttaccgccagtatgtcacgttcttcagaaccagncgcttagttcaaacttttcatgt

SEQ ID NO: 47133 - DNA, 1616 bp, Oryza sativa
tatgcacgcagccgcagcagcatcggtgagacggtgatccacgctccactatatgatctgcacagaaagtccgcacgccgcacgcaccaggtgcacttgcgcgaccggccttgacgggaacagccaacgagtgcactgtgcagcgtagtcatgtctactgaaaccgaggtcacgtgtaaagcggcaagctgtgttgtagcatggtgcaaacaccttttcctccaattcagtcaaaacactacgaggttttgcaagacctaagtatccagaagggaaaacactcattttgagtgggaactacctttccaagaggaagaacaccttcccaaagggaaaataccttcccagaggaagaacactcattcgaatagaaaatacctcttcgggtgaagaacacctttttagggacatcccataatcgctaatacaactacacatattttggacaagttacaatttcacaggtgttttccaaggatgaaagagaaggcaaaggggaattcgaattcccaggaggaagaagacggtccaggacggaaaaggcatttttcccaagagttcgaggaagagcactactcgaacaagagaagatgccaagggaagattccgtggggaccaccttcaaccactctcgccagctagcacctaaaagactaaaagacccctggagatgtactagaatgcccccacagacgctgatgtggcaggggcattagagtaaacttacaaagacccacaggggtaaaaatgtaatctcacgtgtacgaccactggttataaaagccagtcaaaaacctgtagcaggacaagacatcttgaatacaagagtaatcctcaaaagttgtgtttgctgttcgagctcgtttctaaggataggcgggaaaacacttctttccggcctatccccgatcttgttcgtgacctaaggtcacaacagtggcgccgtccgtggggacggaaagtctccattgaattgggctcaaacagtaaatgcgacgttctcaacgacagaagactgtgccagtacgctatacaggagcttttgcaagcgcgacagctgcactcgagagagagtgggaaaaggccgtggaagaaagtgacttggcaagagcaacggaaacacttgataagcagtgggcagagatggccaagacatccacagcagcaggaggtaatgaaacaactcaagaagaaggaattgctggcgcggtggtggaagaaacagggaaaacacccatgagtgatgtagagcttgctgaattggtccaagcgcaaggggctgtcatggtgagtaaaggacaatatgaggaattgcaaaaagagttacaaagattgcaaaccctacacaatcagacagtaggagcaggagggtcaagtgaccagtgtgcaataccaggggctagggaaaagcaatcagatcaggcaaaaggagatgcccagggggagaacaaagaaggagaaagtatcaaagccacccaagctcaagatctaccacgaacccaagctcccagtcaagtacaaaacccaccccaagctcaaattaccatccctactcagaacctagctcaaaccttgatcccttagccaaaaccaaattcctattcaaacgcacattt

SEQ ID NO: 47134 - DNA, 694 bp, Oryza sativa
  unsure (1)..(694): unsure at all n locations
aagaaagagacatggggtggaagagagagatcataccatggagaggtagcttgcctgtaagtcttgcccgggtccttcttcacctaacttctgtattaacctataaaaaatccccaattagaaaaatcttgaataaaccagataacttagggaatagcccagatattatagatctgggacaaaggagcttgtgggaaggaattgacctgaggagggcagcgcggcccctggccatcgtcgcgccggagcaactgccatgggtgaggtggcnnnnnnnnnnnnnnnnnnnnnnnnnnnnccggcagtctggtatccccattgctccggcgagtagggcaaaggagaggatgttgcggagggagggctagagctggagcagcaggaagagggggagagccgcaagtacggcggcagcaccgaagtggggaacatgacctccagacgtggcggcagggctcgtaagtggaatattcgggggagtatggagcaggtggcgctggatctagctgacccgcgtttgtcggcgtcagagccggtggatccgttgctccggcgaggagttcaaggggaggaggagcgggaggatttggacgcgccgacgcggagaaagggaaaagggatgtgtgaaaggtgttactctgggaggaggataaggttggagaggcgccctagtaagataaagatggggaaattg

SEQ ID NO: 47135 - DNA, 654 bp, Oryza sativa
gtgataattcgtcaaaaaactcctataaatatttaaaatatgtagcattagttcttgtcatatttcaattactgtatttaggaattcccgattctgtgaagcctgtgttggtttatgagtacattatatttttcggattagcttatttatttgctattcttcaagatttttttaatccaagtaaaaaaacagatctattattacgtgtagctatcatcatcagtttaattgtcttggctattacatctatctactataaagccacgttctcaattgctttttctgtaataatgtttattgcgttcagtttttcattatatgtaacaattaagctaaacaaaaaaaacaagcaaaaggattaataccttttgcttgttttttaaaattaatggtacgaatattttgtttgtgttgagtaagtaatattgttaccactcgcacctacatactccactaagtctgtagttgttaaaatgtgagtaccattacgcttcgcacaatcgtttaaaacggattgtaactggtttttattcggattttttaagaacattgcaacaaatccagttatcgtaataccaaagccaacaacttccaaaacttttgccatttttggtgcaatatatttagcaaaagccgttgctactaaggctacgc

SEQ ID NO: 47136 - DNA, 654 bp, Oryza sativa
ttgaggttattcaagcaacatatgaaaatctgggagtacaaattgcaatgcggaacgggatgctatatgacaaatcacaacgatggattgactataaaatcgatttatcagtaatgagcattaaatgctttaaggataacacttgaaaagctgatgatagaatgtttattagtctacagtctatatttattaaaagagattaggcatcttaaatttaaaaataaaggagcaggaatggtattcaagccaattcctgtttttgttttataataatattgttcgtgaactgagacattctttacttggtcctggttgtggggggaatttatggaaaggaatggctatgttacattagaaggtttattatttacaactcttgatataaagaaaataaatctgactcaagaaatccctatatttgaccagaccttcttagcccagcagggccattctaaaaaggatgagttagatttattcagctaaatagttagaaaccaattaattaagaaaataaatgatgaactctaatgaattaaatatcatagtattttataaaagtataaatctaatgtttggaaagctctattttgtaagatactagtcattcttatacagtgatataattgaatccataaagtcctctaaatagaagac

SEQ ID NO: 47137 - DNA, 1114 bp, Oryza sativa
gcactgaattttagtatggaactaattaaaaccaataaccattcagaaatatatataaaaatatcaaccctatctattgaaatttgaaaattttgtgcgatggttgtaagaaactgtaatacaaatggaatggatgtactgtacaaaagatgtacgctaggaattattagagaatggcaatagaatagctctattgccccattgtatgtatgatcaataattgtagctcctattaatctttgtcgtcataaatattgaagtgtttgtattagctaacactttttttactattcatgtgtaattttctgattatatatagctgttgaaatgaatgattaagttttgtattgattcaaccaatatctttaattattcatatttaattttatgcttatattcatttctgactttggctattttttgtgcttatataattagaagtgttaatatgccatcaaagagaaagcaagatccaataaaaatagcagaatatgataaatcagattgcaagaaaagaagatatatcagactacaaattctaagagagaaaaagcgaaaaagagaagaagaaaaaaaatatggtgcataataacaataaaaaatgtaagaaagatgaagaagaaacatcaaaaaatagtaatataagagatataatatatacagaaaagcaaaaaaatattaaaaataaaagaaaaatacaatataatttagattatctagaaaaaattgcaaaaaagaaatgtttagagatagaccatatatcttcatatttatcaactttacatggcatggtgtcctttaccccagaatacattaaatatctaaaagaatcatatgaaaacaaatcatttataggtatgccagagtataaatgtaaacattgcaatgctatattttggtttgaagaaagaaataaaagagagacaaagaaaagaaaaggtgaaattatatattcaaattgctgtaaaaataacaaaataaaaataccaccattccagaacccaccagaaacacttgctaggttacttaataataaagaagataatctatcaaaacattttatgcagaagattagacaatataatagtttattttcttttacttcaatgggtgg

SEQ ID NO: 47138 - DNA, 702 bp, Oryza sativa
aaaaatctcatcccactgaggaaggtggagggggtgggtgaaaagtgtccagacctgtgatgacatcagacagcctctgagctactgcagagaccccctatacctatggaccacttgatttggtgacattttcaaaatatatccaaaatctgactatttctcaccacccccagcactgccatgtgccccaggccaccacctcctctccccacagggctccccgctgctgctgtggcccctcccaggctattctccacatggtagccaaagtgaacttctatgaacttctacaaacagatcatgcaactcctcccccagaaacccccaagccttctcttcccactctgtgaaatggccaaagcctttaccacatggatgaagtcctctaagacctgggcctcgccgacttcactgacctcaccttgcaccactcccattgcctggaagcccctcaaagacacagagcacactcccttccgtgggatttgcacttgaagttccctctgcctggaacttgcctgtcttcctcctttgcttccttcaggtctctgctcacatgtcatgctattatcaaggacgtccctgacaccctgtatgacagcactgtcctgcagaaccatctatgatatggaaatgcgtcataacctgagctttcaatacagtagccactggctacacgtggctactgagcacttaaaatgc

SEQ ID NO: 47139 - DNA, 660 bp, Oryza sativa
gccgatctggctgaagtagtggagggcagggaaagggacgtgggggaggacagagactggaaggcatcatggaaacctttgacaaagctactcagccttataaacaattgctagatgctgagcaatgtcatttccacagaagcaattgtccctagcctgaactgatgctataggctcctaactactgttttaatgcccagccagttacccatcacccacgtgcccttcacaggacaggtcttatcaaagcgtaagtctgtgcctaccacgcctctgcataaaataccacaatggctcccgaagccctcagaatgaacgtctttctgtgatctagcctgtaacactatgtacagtctcatcccctgacacccacccctactaccatcttgggccatttttgttctcgtccatactaactggtttgtgggtgatctgtcatacatcctactgttctcatctctccaggcctctgctcaggctgtgccctctgcctggaacaccgtctgttcttcggtcactgcgagaactcctgctcatcctccacaggaattcattcattaagtcgctattcactgggctcttattgggtaccaggcactgttccaatttctaagggtgcagtggtgaagacagtcagtatggctcctgtcctcttagagt

SEQ ID NO: 47140 - DNA, 863 bp, Oryza sativa
gagagaagagcggagattgctacttagcacacatgtgtatctcttaaaacttttctccgaaaaccttaatttaaaaagtttctttctaaaaacttcatataaaaaacttccgcacgaagtgtacacccaaaacccatgttcgttagatagtaattttggagataaaaaatacactggtagcgagcttgcggcatactctgccgacttagagcagacacggtcgagacaaaaaactgtaagaagcgtaaactcgacgatcatgttctgcactgttctaatttgggattttggatgggccaccggccggctgggccatatcctacatgggctcgtaagctagatgtcctgcctggtccacaggaaacgcgttggggcagccaagtctgagctgtgctctgtatttcggcctgacctgccgtaacgccgttcactgggatgctctgtttgagtgtttctacaattctgctctgatcgaaacgcaagtaacagcagcaattgaggcatcatctccattagtctcctgcgtgtttcgatccaggctgttgagttttcattgccgatataattcagacccttctgacgtcataacgtcttacgaaacatgagcccgttttactcgtatgagttggcagaattgcaagcacgtaaagtcactacctcttcctctcttagcaagaaacagcttgggtgctcgagtcgatgtttcctgaagaaacggacgattccatacatcgacaaaccactctgcactccatgctctgtaggtgtacgtgcacgtatgatttcaatcggacgaactgctaaaaattgcaatgcaaacatattttttctttcacactccattctttaaatctttcgtgcat

SEQ ID NO: 47141 - DNA, 1631 bp, Oryza sativa
ttagtaatatactgtgatcaggatcctgattttctttatcaggaaaatgatgaaaaagaaagcactgactatggctgcattcaaacaaagggcaaaaagaagcgttctacctgataacttctccaatcaagacagcctacttttgctatctatagtccaagatggacacttttgttatcctctcatctactagccaaattacttttggtgtatctagctctgactaagaacctagactgatctactagccagttactctaatacaaagttgacatggagctttattaaaatctttcattatttaagctctagatcaaacctctataatatgtcaatactcttcaaatgtctgtcacaaatagccactgtgttttgttcagattatacagtctatatcacactatatgtcacaaaaatcttctaaattttgtagtctactacagcaatcatgattgtgcactatagtatcatgctataacttgcgcttttttttttgagataatacttgcattgttgttaaactgattattctgtctcattagggtcaaatagcatggcccatccagtattgcacgcggcaaagccgcgtgtttttttctagttttgtagctatagctaaaagaaattatggattggtatgtttttctgtccaaaatatttattcacgtttagcactcttatggcaaaattttcaaaaaatgtaaatcaacaccacaaaccgcaatcgagggaggagtagttatctaaagtagtgaaagaaataatcgttctcgtcactacaatgcgccacgtcatctgctcaatataaggagttggatgcaacaaaggctgtgtttaattccacactaaaattggaagtttgactgaaattgaaaatttaaagaaaaaagttggaagttgatgtgagtagaaaagttttgatgtgatggaagagttgaaagtttgaagaaaaagttgggaactaaacaaggccaaaaaattgagcccctactgttggatgtagtgtgtaaaagaggctcagtaaaaaagagtaaacagtagtatttttgcacactgtatgagttagaaaagcaggcagtacctgatttgtttgtgatggctgtatgtattctttcaggagaaaggataatgttctaataaatctaataaataaaccttctgtcatcacctacataatagaaaattactacccaaatgctttcaattggtatgaatagtaggggaaaaaaatcatattattaatatactgcagtgcatagtctgcatacaccatgaagaatttgatttactctttaccagccaatcagcaaataagaaagtcttagtccgtagcaggttataatttagctgatgacttaacaattcccttacaaatgctcaattcctacataccattatcaaaaggtgaacaaaaaaactgatgatatcctctctaccagaaattgtttattcattcaaataaattcgttcactcattttaattttaagttttggttacaaatttcagctagaagtcctcatctgaagtttggggacgagggggagtataatatcatgggcactgatcttcttggtccaagggtagatgactaaatcaactactgcaacagaaagttctcttttaaaacagt

SEQ ID NO: 47142 - DNA, 521 bp, Oryza sativa
ccacttctgtgatgctaacttacacaggcattcacatcacaaataccagcaattcttgggacatcatatattacaaaagaaatcccagttatcagctaggtgaacatcaagctgggttggttggttgagacccttcaaaccaatctgatagccttctaggagcagttcttggtggagcactggaagaagcaagaactctcctcttttggggtgttcgcttcttctttggagtttcatgtttcttcttatttggtgctgatgagctagcttcagcattcacattagatggcctcctcctgcaagtgaaaagaagaaacatgattcaacaatagttaaaagtactgaagtcatggatcaaatcagagatcaaaatggaagggttcagtacataccttttcctgggtgtttcttcagtagccatgtcatcttcacatagtggttcagccagtttgcatgttttctcaaagtgctcaaactggttgcatctcttgcatttcaccttttttcttccagctcaagac

SEQ ID NO: 47143 - DNA, 2211 bp, Oryza sativa
cggttgtaagggttgggttttgggagatcccggctatacgtcctttgttggcctagcgccggccggcctggtgctagccttctccggggtctgtgttggtgttgtcggtgtgtgggtagtggtaatgttttctttgttctcctgattacgacattccacacttgtaatcatgtattttttttcctgatttatcaatgtgaactttgcattgtctggtgcgagttgttaaaaaaatattcataattaaaagcttgcatgtgcttagaatttttaaaaatgggcctatagaatgatccaatgagaattggaaaccgtgcagctcgtatgctccacgtccgaagtattcgtccgagaagcacgcttattagctttttttattacacatgtgccctttcctagttcatattgctaccgattgttaaaaaaatagaagatgtttctgttataattttggtacgttatccgtgtttgaatcggttttaattttatgtttttgtcaaatcctttccttttttttcttacaccagagtgtccctcttatccgagacgcgtgcaaataatttggcccgcaccttttcacacgccttttgttgcatgcagcaattcggcccggcccttgactttgttttccacacatgcctttgtgcgccgctgcgattgggcccgcaacgccctcgtgcatgcaatttttcacatgcctgattgggtcacgacacccttgcgcatgcgatttgcccttcccgcatgcctgattgggactgcgtcgcccttcgtctgcgatttaaaaaataaaaaaggttttgtcaatactatggtatactatctgtatccaattcccatcacgcataacattcattgcgaagttacgactcacgagtgaactacgataaagagtctgtgtgatgtggataccaagcgaatgaaactcgcagagtccatgtggatatgatgtacattgttgcccagatcatctgattctatttgtattacacgacacaattcctgggacatgttagcatgatttcaagttagtctttacacatgctcgtacatactaccagtgataccgctacaataatccataagaatcagttttactttcgaaaagaacatacaaccgaaataaaggatgctcaaaatcgttgattccatccgtcttcaatttctatccgacttgagataaagctggaggacaaatcgagctcatgtttgaaggcctcatttttttggcttatgttattcctataagccaaaatttaaattttagaacttaattttgaattcgtttttttgattttttttatcatactttattttacaacatttgcttttaggtcgctaagaacatgtatataaaatatttacacaaaaatagtcttttattcagaaataagtaattcggataagcatatgaataaacgaaacaatgggctatgattatttatccaccgacacatatgtacaaattaaattggctctatccattgcaacctacgggcattttttctagtaaataataaattaaagatgtctctgaattgtgacgaagaaaatatcgatcaatgtttcattcatatttccaatcagtgcctatgaataattttgcattcagtgggaaggcatcatatagataaaaatatttggtttttgattgatgattacatactggtaaattttaacttaattttatagttattctgaaccatgcaattaaataaattcaacctatcaactgctctaattatattatcctaaataaaagggaatatggcacccttgattatcaatatgtatgaagggtgaagactaaagcatatcgggacaaaaattccatatttgttcgttaagaatatgtaacaccctgaaaattcgatcgacaaaatcaaaactataaaaatacggattttcaaaaactttttaaactaattgcatcatgccgatcttattcgtctattttatctggatttgatctcgaagattattaatcgtgagtaaagaatagttaattaggaataaaccttaaaaacaaattggtaaaataaatacaaattaaaataaagattaggtggggatagaaataaataaaatattatcgcaaccatatttggatcaattaaatttaaatacgatggaataagaattaaccctaattaaaactcaaataaattatataaaaataaaatatgagtaatattaatctagggtgaattc

SEQ ID NO: 47144 - DNA, 1851 bp, Oryza sativa
ccgtgcaccgccgccgtcgcagccaccgtgcgccgccgccattgccgtcgccgctggtaagccgtgccgccgccgcctttttcctttcctcagccggtcgcggtaggcaggacgagagagaggaggagaaggagccgaaagagaatagaggaagagaagggaagaaagaaaggagccgggaggagaaaagagaaggaaaaaagaaaaagaaaagagaggccggcagaaaagagaaagagaggagagaaaaaggagagaaaaagaaagagagggagagaaaagagagaaaaagaaagagaggagagaaaaagagggaaaatagaaaagaagaaacggagaaaatagaagggaaattgggggagaaattaggaggatttaggaaataaaaatggtcggggttaatcatagattattttcggaaattcctcgagcgtaatagtatttcggtcgaaattccgagttaattataaaaatatgtttcttaaacagattagattaaaattggtagtaatttagatataattaataactaaacaattagatgaattcttatagattattatagattatttttggtaatctctataagtcatcggttcacggtagaaattcggatttaattactaggaatcttagccgtgtattatatttaatcgtttagtcatagactgaattaaattgtataatatttctaggatttcgtccgatatttagctcgtaatagaaatttctaacctattatatggatataatgctcgggaagagtaaattaaaaacttatgacaacaaaataattatacccgcaaaatagtttaaatcgaaattgggtttgccgtagttcacagatagtaaagttaataaaaaggaatcgactttcgcatttgactttcatttggatttatttggatttttatttgaattctaaccgaattcaaatcaatttttgcacgtaaccatagagcccgagggagttgcggatccaagcgaaggccaagacccgcaagactttgagcaaggcaagtcatcactattccttgaacatgttgatcccaattgcaaaattgttttgtttacaaataaaattgcatgcaatgattatgccatgccttgattattgtttacccttaaaatccttgtaaccataattacgtatgagtccctagtcaattatgacaattgcttagaaatgccattctagaatcatgcatactcatatttatcaaatgctatatgcttggtcaattacctggaaggtaattgagatgcggcatgtggagacatgagcgccacattgccatgatgttgatgacatgatttgtgaaaggagaaataaaattaaacaattgttttcgactggggcggacggaggatttgggtggtatctgggaaaggctagtaccgtccccggtcaattaaggaccgagccataaagttaagcatgaaacgacccccgtacaaccgcacttctcatatgggtatagacctagcggattagatagccgaacggaggcagtatccctgcatagatggttcacccctgagtgaggcaggtgcgctacggtgggacagccgttgaggtagggccgagaggcgtgccctacatcggtgtcgccattggtaggactgccatgagtgtgtgaaagagagaacttaacttgaaccataatttaatatgtgtgtgagacttctctttcccgggagcgccagaactcctctcactgttagaaacatgaacgcctagagtgcatgaggatttaagttcatggagcgggtactaccaaaaaaaggtaatcgaaaagctttgccgtgacgcgtctcatgtgttgggacgaggctcatggggatcctcta

SEQ ID NO: 47145 - DNA, 985 bp, Oryza sativa
ccggctgccctagcaagaaagctggtcaattggaagtaggctaaatgaatgaatgttgctggggacgttgggccagccgcaagtggattggacaatttggacaagataacccttctctctctctctctgccttgtctcctctctactcctcagcatctatataagggccttgcaggcagtggctctcacaccaacgaaacaaggagagactcagagaggaggcgtgttggttagctcattggcagcagcacacacaaaccacatctcctatatatagctcatttttagcttttggaatttgagagaggttttgagagaaatggctagccaaggtgtagcctccatgttcgctctcgcattgctcctcggtgcctttgcctccattcctcaaagtgattacctttccctctctttccttttctttttctctctctatctctcttttgtgtttttttttttcgatttgttgcatgtttggaaaatcattaggtatatataagttttagtttagttcatgcactcgctcacgatgcagagtctggggtttaattttattctattaccaaaaaaaggttttgtttacgcacgtcatgcatggtgtgtggatagattgcaaaaagttaatgattaatttcttgggagacagagaaagatgaagagattataattggtagaaatgggctagctaaatagagatagctagctaacaaataatacacacagtggtcaagagtcacatagatatacatcaattttcatcaacaacgtcatgcggaaaagagagataacaactctcgttagcgagtcatctcgttaaacgcctcccctgcagtttcggtgcctgtcgctctcactgcgagtttaattattctcttccgctgcttaattgctgctgctgctgctgctgctgaaagaaggttaattaagctcgtctcgtgccgtctcattttgcccatcactcacacgcatcgtcgtcttcgtctat

SEQ ID NO: 47146 - DNA, 999 bp, Oryza sativa
gggctggcaacccgtggaatgagaaaatcactactggagaactgatatttgctcggatggcaaaatcacattagtcctggtttgattaggaatcgggactaaaaaagatatttagcatcggttcaaaagcccaacgacactttacaccaaccgagattaaagatcatttttagtcccgcttcaaaacgtgtcaggcctctatcttactagccgggactaaagattgatgcaccgtatataatcccccacacttgtcatctcctcctcacaaactcctccgtccgtcctcatcttttcctcctcctcccttttctcctctctctctcttccctgtcttatcctctccttttcgtacacgcagcagcagcaacagcagcgaggagggctaggggccgctgtgtggggggctggggcggagcgagcgagcaagccggtgagtgggcggcggtagcgccctcccctccgccggattcggctggagggcaagcaacaggtggtggcgcacgaggaggcggcgggccctcccctccgccggatccggtgggaggggaggcagcggcggcttgtgtggcagtggagtgacggcggcggcgcgagcgtgatcggcgaagcgtgatcggcgaagatcgcgtggccttgcggcagcagcgcgcgtcgtggcagccctggtacgatggactcggaggcgcgcggcgcggcagcgagcgaggcaaaaggtccgtgaagaaggaggcaagtaggagttatgtgaatttgttcatttgtgatgtctgtgaatttgttcattctatggatctgtgaatttgtgatgccaatttaagtatattcattcgatctgtgaatttgtgatgttggtgagtttggctcgaaatcaatatgtaaacagtaaaaaacaataaaaaagaaataaaaagacatttagtcctagttggcaccagaactaaaaaaaaggatatttaatcctagattggacgtctcggtttgctatccgcgactaaa

SEQ ID NO: 47147 - DNA, 658 bp, Oryza sativa
aaacatggctttacctgagttcacaataaaaacatggtaatttaatagatgacaccgtgtcggttatttcatcattttcaaattgtatggaagagaaatattttaaaataactagaatgcccttctcatccgtgtgaacgaggcaatacatctagtttgaaccggattatacccccacctagtctctccgctcttcaagttgagtggatattgtattttaataactacagcgtcctctagcaaattaccatattttagatgtctcatattttagatgtctccaagtaaagctacgttttgatggtgtccactagcaaagatcacaatatttaaatatagcctgttttttaggatggcaaattttatctttatccaattcattcctgcaatggcctgtagcccacagcacgcatagaccacaaaaagcacaacatttgtttttacaaaagaagcgtgcaagaagatactccctacacgatagacatatgttactgatcaaataggggacacagtggatgaactagccaatcgagacacaaagggtgcacgtgacatcggggtttaagtcttgtagcccaagcaaagctgcctttttccgtggttgctttactgtggcaaagtggaagcgggattctttttcgtccaaaatataaatagg

SEQ ID NO: 47148 - DNA, 1659 bp, Oryza sativa
taggtgggggtataatccggttcaaactagatgtattgcctcgttcacacggatgagaagggcattctagttattttaaaatatttctcttccatacaatttgaaaatgatgaaataaccgacacggtgtcatctattaaattaccatgtttttattgtgaactcaggtaaagccatgttttgcgcgtgtccaacaggaaagacaataatttttttatgtgccttggataaatacggcgaaattgaattgaatgagtacttttgcaagtcagatggtgttgagagaatacttaaaccatttagaaaatagatggaaatggtacctgttgcagcggtaaattcagttgtatgactagtatatttgctttgaagctggctggttcgatttcatgtgccttgtacaattcacatcttttggagataacccaaagaataaaattaataattgagattacgcaattccaaggtaaagttgcaagctctccgcatggaaaatatggtggtttattaatgcataattaattaagtattaaaaaacttaaaaaatagaataatatgatcttttaaagcaacttttgtatagaattttttttttaaaaaaaacatcgtttagtagtttgggaagcgtgcgtgtgaaaaatgaggatggtgagttgggaaaagagggggaagaacataacctaagatgatttagcataaatgctaggaataattgagaatacctgagatgatgtgtataactttatgagagaagagacggtttgtatcatggatcgatgatccaaaggctaaggatgattgagatgatgtggtttataagagaggagagaattggtattgcctatacttattagtagtgtcaaaaagtactaatacatgagtatattggatttgtgcaacccaaacatttgcaattggtagttggggcggcgaacattaggggttcgtaggaaaggtcggattggaaagcttaggtcaaaggttcatagattagtgaaatcttctggactacttcctccgtccaaaaatataagcagttttagacttcgatatagtctttgaaatactattttgaccaatagcatctataaaagttagatgttttaaattaaaagagttgcatattatgataatttatttaatgataaatctagtaatatcaattttacatgattgatctttttaatttctatgctattaatagttaaagttaaaagtgtttgacttggcactattctaaaatgcttatattttgggatggatggagtactccatatggtattatggttgatgaattcatggtgatagaagtatgtccggtttaactcctgctcccttaacaggaacgttctcaaaattatcatgtcaatgatgaactctcacgttcctagaccgaaaaaacaatgatccaaaattcccaaatggacagataggcaaatctttatttgacaggagcgcacatacgctctccgttatctgtcgaatttgcatcaaattaaggtccacacacagcaacggtgcagcttttgatcagtagggatcatttgcactgtagccactagtcagtgggattatttggtcggcctgcagataccatatctctccatccgttggccggcttatccgtgatctggttgtcgtgtaaagctgtgtgcgtgc

SEQ ID NO: 47149 - DNA, 517 bp, Oryza sativa
actcccttgtcaggttaattttttgagttgtgaatgaaggccttagttgcagacttgcagggtttcaaaacatgacgataatcgctcggttatcttggtgtggttatcagccttatcgagccggtttgcatttcaaaaccgctagataaatcacctaagttaaaacacacacacatgcaaactatgattatttgaaactcaccaattttcatagatagctagtcagctattgacaaaaccactcgggggcggttttcggtggccaattggttttgcaaaccctctgctgtgactttggttgggaaatctggcccgaaagtgttgttccaacgtccagaggggcctggtcacagcagatagagaggcaggctaggccaatggtgggctaacatgccgtgtgggggactcctgctggggactgcgggcagagcctactgataatcgacagcacggaaggaaacagcaaaggagcagctgaaagcatgcagtcagatgcggatcaatgtcacctttgcga

SEQ ID NO: 47150 - DNA, 634 bp, Oryza sativa
tttgcttcaccttatagtcacacatagcactgttacatattttgtggataacaccatatttttcgaatacaattcaaataattgtttaatatgtgtgtttggtttaattgtgcatgataagatagcatatatttattaggtatcgttacttgaatctattttcagaaaaaactttagtgaagtagagatgcaaattgtctaactacaccgatacccatattgtgcatgaaaataatattcatatattataacaatataccatgatccttagaaaaataaagcatgaattttatttttaataatataaggcatatataaatccacattatcatatattttatatatacttagagttgcacctaaccatttaaaactatgattttgtttgacgataaaactataaaacccgtgtcaaagacatgtggtgctaattagttataataatacctcttatctgaaattgatagtctaattacttaagcatcgggttaattattttaatatgcattcaaactattgcaagaaatttattccatattacttaggaacttaattaaacctcataaagaattacaaactcatattgcattatttctacgactacttgacaacgcactcaactgtcgccaccacg

SEQ ID NO: 47151 - DNA, 760 bp, Oryza sativa
cgtgttgtttttggtctcaacggcatttgcagcaatcagcaccggtagttagttgcatgaaaacccatatcgtaactgctgttggagagtaacaagccccaccacacgtgggccgtagcgtgtcgatcatttcactggaggaataagtttattataggtccctcaaccacgagcccctcgacatggctccgggtcgatcggacggtcgctgctccggcgcacggctccggcgacggcgggagggtgccgttgatgatggagctgcaggagtacgtaggcggaacgacagtggacgacggcgcggcggccggggacgcgcgccagcctgaggcgcggccgtggaggaccatgaggtcgaatagcatcggagaaggagcgcacggacaagggttgcaacgacgtcccttggcgccggcgaggtgtccgccgcggaggccgaggccgaagacgcggagcggaggaagggagcaccgcgcccgcggcggcgatgggagaggatgtgagaaaagaggaaagagatagagggagagggacgctgacatgtgggaccccacgatgactcagcagtgcggactaaatgaacgtgccatgtcagccaaaaccacttagggagttattttgcgccggttttaaaagttaaaagttttaggggttaaaatacctggtattagagttaaggatacaaattagattattactagccacctagtcatgcttcgcgtgacggtaagcattcgcataacctgcgtatagaagttga

SEQ ID NO: 47152 - DNA, 648 bp, Oryza sativa
ttaggcttaaaatattcgtctcataaagtagtcacaatctgtgcaattagttatttttagcctatatttaatacttcatgcatgtgttcaaacgtttgatatgatatggtgtaaaattttaaggtgggatctaaacagaccctttaatactaatatgcgtcctaatccctacattaaaaaaatcaaattattattcaacaaggtttagtaagtcatataaaaaaatcacaagggcaaaattatcctttcatgtgccttctaacagcaagcaagccatgtacatttttttgaattggggacaaatagagggagaggcaagtttgcgagggcaaataagagaatcagttaacatctggggacaaatataaaattctctcatgattagtatatagaactctcaagataattctgtttctgaatttgcattctttctcgccaaacttattcttgtgcatacttgtttattatatataaaagaagtgcacatccgcataagaaaatctcaccaaaccaaacatcttatctgaggcacgattcctatacacgtaaaatagagcgaatcaccagtgtatagttaattaagtatttactaatttttaaaatataaattaatatgaatttttaaaacaaaattcgtatagaattttt

SEQ ID NO: 47153 - DNA, 990 bp, Oryza sativa
catgtcaaccaagattggttgatgtcccactcccaaacaatgcattgtctgctgttcaagctacaacatccgaagtgtcaaaactgatcatcccaaccaaccaatccttgcagctccatgatccaccctctccaaacgaaaggaccaagaagacgctgctggacagtcaaaaaagctgtcgcatgcggcacatcccttgtgtaatgaggatggccaagttagcgcaccaggacttcaggggcagcacctagcactccagagagaacaaatggtgggcaccatggtgcaaggaggccttcaccagtaatcatcatcgtatccagaccaccgtgagcgggatccacttgatctatttgactgccacggacgagggttaaaacccctatcatactgtttggtgtaccgctgttcaggggacccgtgcatcctccctcccttggagactctttttgtagcattcttaaattctcttcgatatcatattcttggcgctgcaaaaggaaatcaggtgaactttgttttgcaggaaatttaaattaaaaaaacaatggtcattttataacaaaatgaaacttcatatttctgccatcaataagcactgtagcattgtagcaagcacatccaaattttccaaaatatggtaggtataggcttctccattactagtatgtacccagagtctgctcatagtggcattgcccattattattattatttagagagaatgtgcaggagcagtaaagattacagcatccacgcatctagatggtggatcaaccaaaaagaaaagggaagatatagagtaacagagctatattctcacaaagtatctggcgacctaaaagcatccttgcagaatgtttagttgaggcttaaattttgcaaatatgttaccaatgctatcttggaaacttccaggtatgaaaataatgaattggtcgagatttgatccattgaaaaaatctacgatgagtgggggatcctctagag

SEQ ID NO: 47154 - DNA, 4748 bp, Oryza sativa
atacttaatatcaatatcaaggaatgacttcctgtagtgctcttcttccttgagagcacacgcaataagctatcaaaagagtatacatcttttccaagaaaacgaaaggtagagatttttttatcaaacatatcaacacatgaccctatttgttgacttgaaaaggaggattggttatactttgggtttcttggtccttaagtgggaactgggatatgcaaactgacagctccttttctgtttgtggtgcagggaatgacagagaattgccactctctaacccaagaaatatcacacaagcctcaatagaaccacaggtatcgtgaagcaaatcactctcaaacattattgtttttttttattctgttctaattttatctggttaggaagtgggaactgtcgggtgctggaatattgctgcttcttttaagctcctttttttttctctgtcacaaaaactatttcgttgaagtaaatggatggttaaatcgaaatgtgcccatcttgacaaaaggagcctagcactaccctcacatggccatggtaggctgagtccagaatagagattagattccccaatccatgacatgcaattcgcaaaggtgacattgatccgcatctgactgcatgctttcagctgctcctttgctgtttccttccgtgctgtcgattatcagtaggctctgcccgcagtccccagcaggagtcccccacacggcatgttagcccaccattggcctagcctgcctctctatctgctgtgaccaggcccctctggacgttggaacaacactttcgggccagatttcccaaccaaagtcacagcagagggtttgcaaaaccaattggccaccgaaaaccgcccccgagtggttttgtcaatagctgactagctatctatgaaaattggtgagtttcaaataatcatagtttgcatgtgtgtgtgttttaacttaggtgatttatctagcggttttgaaatgcaaaccggctcgataaggctgataaccacaccaagataaccgagcgattatcgtcatgttttgaaaccctgcaagtctgcaactaaggccttcattcacaactcaaaaaattaacctgacaagggagtatggtctttatccttaaggccttgtttggctaataggttagggaaataatttcccacacaccaaaaggcatctttaaatcctaaccattcattcttcctatttcatttaattctaacccttcatttatttcccaatcccaatcttacacctcatttcccattatccaaacatagcctaagttgtaatcttccaaaatcaattttgagtcatattcttctaaaaccaatatccagtgcgaaaataagcctagcatgaccacatccacatacaccacatatgtgagtacgtgacacatacaattgcccaagcccactttccaccaatatccagatcagtgggcaggagagctagtggacagtaggttggttggagccaacaatgcccacttctggtatatgccaccttggacgcccaattgcccaaggctcaggctgctattcagccgtgatgccgcggtcaccagagacgtctacactacacttgcacttctgcttttgcttggaatgattctggagatcgagatagatcgagatagcttctgccaaagccgtgcaggatgacagggccatttcttttctttctttctgagttctggaatcatgcggtgcgtgcagcggttgtttgtcgggctatgttttgacagaatttttatagaaaaactctcgattccttaatgaacaagattgactttgaaatgctgtcactggcctaaatacgtctgcctgtctctattggccgctagcttgttgttggcctataagctgcagtccgaatttgaattctataactttaccttttagagttgattttggttttttttttcgttatttagcttgccttttggacctcaatcaaagaacagaagtataaaaaccttaccctaaagttatttttgatttgcttcatttatttttcttagcttataagccgtagctcagacttcaaaagtgtttaggaatttggactccagcttctattggagcaattgtggtcgcccctcgggctgtagcatgccacacggagccactgcctaggagcaacattacgcaagcaatggtcttatcgtggttgggtattggtaaaaaaaaactatcgcaagttttttgaaatgtaaaatctttgccattaagatgcgattgggttaacctcaaaccatcccaaaaaagtcctgaagtcatgcaaggaggggaaaaaatagaccttaaatcccaaacaagtccttaagctgagttcgggagtgagggttaggaactgtcatctcagcacgcaaaataaagtgatggttatcgcatgattaattaagtatgaactgttttttaaaaaatagattaatatgatttttgaaaacaacttttgtatatatatattttttaaaaaacacaccgtttagcagtttaaaaagtgcgtgcgtatggaaagtgagggagagtgagggaggtgcattgaaaaggaaagaaatggactcagccttaggtcacagcaacaagaggaagtccccaagtggaaagaaagttctagaagtgataaaccacccttatccttccaatttccaacgtgtagctactagctagtagtagcatttaaggctgcgttcgataggatgggttggggacctatctcctccgcacggaaaacggaatagtccattagtgcgtgattaattaagtgttagctaattttttttataaaaaatagattaatttgattttttaagtaactttcgtataaaaacttttttaaaaaaacacaccgttagtagtttgaattagtttgaaggttgggatccttcgtgttcgaacgcagcctttagcatattgtttatgtacatcttcctcagtgccaagggagttcatggtccctcagtcccagccatgcactgcaccaggggcatcgcatcggcgaccgaaaaggggaaggaatgctgccatgggcgcgatggtcgcctgtggcccggccttagaattgcagttaagtggacacggatgggcccacactttttcacgtggcccacttgacacatccttcggcttttttgggggcgtgggccttttggcttccgtgtcggttcctggaaatggaggcaggagccccaaactttgggggtttgcacagcatagatgcttttcaagtccttttagaacaggagacccggtcagtgaaccaaccctgtccactgctacgcactcccttcgtcttaaaatatactcccttcattttttaatatatgacgctgttgattttttaataaatttttagtatttaaaatttatcttaaaatataatatcttcatatgctctcttttatcaactaatcataataatattgtattaaattttagtttgcacctactctaaaccaatcataactatttcctatttaattctactaactttttaatctccgtgtaaaacctatttatattttgggacgaaaagaataccgcttccactttgcaacagtaaagcaaacaacggaaaaggcagcactgcttcggctacaagacttaaacctcgatgtcacgtgcaccctttgtgtctcgattggctagttcatccactgtgtcccctacttgatcagtaacatatgtctatcgtgtagggagtatcttcttgcacgcttcttttgtaaaaacaaatgttgtgctttttgtggtctatgcgtgctgtgggctacaggccattgcaggaatgaattggataaagataaaatttgccatcctaaaaaacaggctatatttaaatattgtgatctttgctagtggacaccatcaaaacgtagctttacttggagacatctaaaatatgagacatctaaaatatggtaatttgctagaggacgctgtagttattaaaatacaatatccactcaacttgaagagcggagagactaggtgggggtataatccggttcaaactagatgtattgcctcgttcacacggatgagaagggcattctagttattttaaaatatttctcttccatacaatttgaaaatgatgaaataaccgacacggtgtcatctattaaattaccatgtttttattgtgaactcaggtaaagccatgttttgcgcgtgtccaacaggaaagacaataatttttttatgtgccttggataaatacggcgaaattgaattgaatgagtacttttgcaagtcagatggtgttgagagaatacttaaaccatttagaaaatagatggaaatggtacctgttgcagcggtaaattcagttgtatgactagtatatttgctttgaagctggctggttcgatttcatgtgccttgtacaattcacatcttttggagataacccaaagaataaaattaataattgagattacgcaattccaaggtaaagttgcaagctctccgcatggaaaatatggtggtttattaatgcataattaattaagtattaaaaaacttaaaaaatagaataatatgatcttttaaagcaacttttgtatagaattttttttttaaaaaaaacatcgtttagtagtttgggaagcgtgcgtgtgaaaaatgaggatggtgaggtgggaaaagagggggaaggacataacctaagatgatttagcataaatgctaggaataattgagaatacctgagatgatgtggataactttatga

SEQ ID NO: 47155 - DNA, 1486 bp, Oryza sativa
attctaaaatgcttatattttgggatggatggagtactccatatggtattatggttgatgaattcatggtgatagaagtatgtccggtttaactcctgctcccttaacaggaacgttctcaaaattatcatgtcaatgatgaactctcacgttcctagaccgaaaaaacaatgatccaaaattcccaaatggacagataggcaaatctttatttgacaggagcgcacatacgctctccgttatctgtcgaatttgcatcaaattaaggtccacacacagcaacggtgcagcttttgatcagtagggatcatttgcactgtagccactagtcagtgggattatttggtcggcctgcagataccatatctctccatccgttggccggcttatccgtgatctggttgtcgtgtaaagctgtgtgcgtgcgaagaataatttgttgcttcaaattcgacagagtaatttgcactgaaaaatagaaaccagtagtacggtggtaaaaccgtggcgcatgacttttcattttgggagaatagtcaatgtatccttaaagtttcgctcgtttaccgaaatcgtcatatgaatataccatatcatcattcatatataaaatatatggtgaattgtctaatttacccttatacatataacaaaaaaaagaaaaaataaaaaaaagtaaggatgaattagatatatataccataggaaaaaagtacaacgcagaatattgtttcgagcgccgcacaacgctccctcccagtttttcccttttttaccaccccatctttatttcgcatcctacatctccttagttcgtttttttaccacccagttcgttttttttaccaccccaccattcgtgtttcttttttctcttttttatcttatccgtgctttattaaaggatccggtaaaaatattaaccatccaggattttcctttttagttccttctctctagtttttctgttttcatgttttagtaaaatatttactatctagtttttcttttcgagttttctgtttttccagtgtctccccacttttcaaaagtaacgccttttcaaaattaacgaatttactccgtggagtttttcatttactcccagcctcccatatctgcttcttaaaagtaacaaatttatctcgcatgaatgccccttcaaaagtaataaatttacatgcataaataccccacatcatacgacaccattcctagatggtcgtaaaagaattactaccggcttacaacgtagtaattcttttaccattgttataaatattggagtaaattgcattggtggtacacaaacttattaggtgggtgcaatttagtacataaatttataaaatactcgtttcagtacacgaacttgtctagttcgtgtgaacaaggaccaaaataacttggcaatgttaattttacaaaactgatgttgattagggatgtgacatgcatacgtgtagtgagtatgtataagacatgc

SEQ ID NO: 47156 - DNA, 2160 bp, Oryza sativa
ccacatcatacgacaccattcctagatggtagtaaaagaattactaccggcttacaacgtagtaattcttttaccattgttataaatattgaagtaaattgcatgggtggtacacaaacttattaggtgggtgcaatttagtacataaatttataaaatactcgtttcagtacacgaacttgtctagttcgtgtgaacaaggaccaaaataacttggcaatgttaattttacaaaactgatgttgattaggatgtgacatgcatacgtgtagtgagtatgtataagacatgcaatatttataattttggtcccaactgtcctttatcatggaaatgatgactttcgtatatttctaacccttatatcattgctcagttttttttaaaacttttttctactatcactatatcctattctatttttcattgaagaggtgtatgtctaatatcaaccttctcatatatatgtttacgtagtatcctaacagcccttaaatcaataagattagccatgtagtatccttttcgccttcttccgcacgcaccagacaagttcatataccaaaacgagcattttacaagtttcgtgcactgaattgcacccacctgacaagtttgtgtaccgtggtctgcgagtaaaacaattaccacattcctctcgatatagcccatgatctcgtagccactgtgtagtaatatgtttactaatgtgttcagtacacggtataagagtaaaaacttagacttcatggtctgcgagtaaaacaattaccatattcctctctatatagcccatgatttcgtagcaaccatgtagtaatatgtttactgatgtgttcaatagagtaaaaaactgatactaagaatattgttaatatgtatcacaaaatggtcgtacgaataaaaaaaaattacaggctcaatcacacacaagtgataaaaattactcataggtgaatcaaactagaaaagaaaaaaattgattcagccaaaatccatcataaaactaggatcctggtggctttgctagatcttgctataaggatggagatgctggtctgtatcttgtgacaggtagtggagtagggctgtcaacgagccgagctcgagcgagctcgtctgcctaggctcaagctcgatacaagcttgagccgagctcgagccgagcctataaaatattcgagccttccgataggcttggctcgagctcgactaccgagcttgatttttaagtaaaacaatatatatttcaaagataatctttaaaaaataattaatttctagttcatcatattaatagaagaggaaaaaagaataaaataaatatatgatgtcaataaaaggcatacaaataacatatttgatcttctaatttattaaataacaacaaaaaaaatcatatattattaggctcgttggaagctcgagctcggctcgacaaagctcgcgagcttagggagaggcttaggctcggctcgtctggagctcgagccgagctcgaatcgagcagctcgcgagcctcgagtttttttgacagccctatagtggagagagcaaccgggtggcaagtggtagtcgacgatggaaacatggaggggtgtagcgacgtggtatagagatgggttcgacgttgcgcagtagcaaccatccatcatctagcaagcatgaaaaaaatgaaaaaaaaacattctcgttcatgtcataaggacgacgagcaaaaaaaaaaaagcaaacaacctccatcaccagcggactataccctatcctctgcggctagcaatatggagcacgatgtgcaaatgtagggcctgtgcagcccatcaattcagatcaagtaatattggagattgcacgttaatttgatttgcaaaaagaaatggcaaaatttaccacagggcatcgaaaaaacgtgtaattagctcgtggacaccgcaagaacgagaatctgttgtcggacatcacaataaagtgtaattagctccagaacactcggggccttattttattatttcctgtgaatgtggagagagaaacattggtgagagtacgattttgcccctgccctcacaccagccagagcaccgccaccacctcctccgtgcggcggccggcgcggtgagtgcgctggggagagggggagaaaggcgagcccgctctgtg

SEQ ID NO: 47157 - DNA, 635 bp, Oryza sativa
cgactagggtttactacgatttttaattgtggcagctaaggtttcgagatgagttgtctcacttccaatccatcttctactcataagcgtcaactcctactatcgccctatgccataatctatcgccctatgccacaatctctatgtaccaaaataagttgattttttaaaggcaaaaattagttgatttctaaagttgaaagtttatcccaaaataaattaatttatagcctcttagctaccctggttcataaatagaacatttttacttcttccatattcttttacttacccacccactaatattactttcttattaatgagcggcacattgattttcttttctcacggttatttttttcttgagtaatcgatttattttggatagagggtgctacaaatgatgatcccaatccggtagcttccctttgtttttttggtcatctcttctcagttttgctccctctgcggattttggcactcaacgtttcacccatcacccatagaaggatttaaaaatgagaggcaatcttaattatttcatttttttccttagtactagaaatgcaataacattatgaggtatctccagataactgagcgataatcctttatttaacgtgttaagttaaaga

SEQ ID NO: 47158 - DNA, 626 bp, Oryza sativa
tgtcgaatctctgctagttaacgatcattgcttatactactcaactctataatgtttttcaacggtttgatcttcgtactgatcctctctctatatatgtgtgtatgatataacctggcataatattattattcttgtaaatcacgtggtggcgacagttgagtgcgttgtcaagtagtcgtagaaataatgcaatatgagtttgtaattctttatgaggtttaattaagttcctaagtaatatggaataaatttcttgcaatagtatgaatgcatattaaaataattaacccgatgcttaagtaattagactatcaatttcagataagaggtattattataactaattagcaccacatgtctttgacacgggttttatagttttatcgtcaaacaaaatcatagttttaaatggttaggtgcaactctaagtatatataaaatatatgataatgtggatttatatatgccttatattattaaaaataaaattcatgctttatttttctaaggatcatggtatatttgtataatatatgaatattattttcatgcacaatatgggtatcgttgtagttagacaatttgcatctctacttcactaaaagtttttctgaaaatagatt

SEQ ID NO: 47159 - DNA, 695 bp, Oryza sativa
tctttaatttgacctatgcggactgcggtagaattctcaggtgtccaatataatttggttggcgtgtctcatatggtatagatatataggctataacggtaaaaaaaaaaacatgcaggtatcccaaggacccctgttggaacttagtaggtacgcataggggcagatacagaacaagatttaagggagaactcatctccttctttcttcttcagtcccccctactatttattttttcactattcttctcctttcgtctcctcttctatcaatggtgatccagcggggtaggagggactcgagtcccccagcacccatgctggatccgcccctgggtacgtacgcccctggctatatcctatagctcccgaatggagaaagcgtttggattgtctagctagttgtaatttgccttgttaattttgagctcacctttttactgctacgatcgctttaagattcgtgtggcactcttaatttagcccgctccatagcctctttcccctccatgactcacttttgtgtaatcccggccgcccgtgtgctaccatcctctctccatggctagctccttcgctggcacctaattccacacctttaattatgttcgcaataagtgtgaccatacttactcatcatagacactcatatctctttagcagcaggcatgttatatttgtcacctccattatact

SEQ ID NO: 47160 - DNA, 923 bp, Oryza sativa
acatatgtgagtacgtgacacatacaattgcccaagcccactttccaccaatatccagatcagtgggcaggagagctagtggacagtaggttggttggagccaacaatgcccacttctggtatatgccaccttggacgcccaattgcccaaggctcaggctgctattcagccgttgatgccgcggtcaccagagacgtctacactacacttgcacttctgcttttgcttggaatgattctggagatcgagatagatcgagatagcttctgccaaagccgtgcaggatgacagggccatttcttttctttctttctgagttctggaatcatgcggtgcgtgcagcggttgtttgtcgggctatgttttgacagaatttttatagaaaaactctcgattccttaatgaacaagattgactttgaaatgctgtcactggcctaaatacgtctgcctgtctctattggccgttagctgcttgttggcctataagctgcagtccgaatttgaattctataactttaccttttagagttgattttggttttttttttcgttatttagcttgccttttggacctcaatcaaagaacagaagtataaaaaccttaccctaaagttatttttgatttgcttcatttatttttcttagcttataagccgtagctcagacttcaaaagtgtttaggaatttggactccagcttctattggagcaattgtggtcgcccctcgggctgtagcatgccacacggagccactgcctaggagcaacattacgcaagcaatggtcttatcgtggttgggtattggtaaaaaaaaactatcgcaagttttttgaaatgtaaaatctttgccattaagatgcgattgggttaacctcaaaccatcccaaaaaagtcctgaagtcatgcaaggaggggaaaaa

SEQ ID NO: 47161 - DNA, 507 bp, Oryza sativa
ctgccttgggacgaaagttgacatggttttgcaaattaagaaacgtgttatatatggtattgcagttcagggatgaattttaaactacgtcaaaatgagggaccaaaaacaaacttattcatcgagttctgaattgatggcctagcatgcgcaccaactttaaaattcctcgaatataaagatgctcctttcctttgctttgcttttctttctttttttcttgtggattttgatgaaaaaggcttttggttttatagcttggcaattgaacacatcaaactatttcatgtggcatttgtaataaagtttcttataaatgtctaggattctaaacaagcctttggtttgataaatgtgttcctatgtggagccatctgaattcgctcgacattggctactttggatgctattggtatttcttacgaccacagataatttgcaaacacacgaaataccactgtagcactttactttcgggtgaccccaaaaggataccgaactcaggga

SEQ ID NO: 47162 - DNA, 869 bp, Oryza sativa
ggcgaattcgagctcggtacccgacactgtcgcgtgtgccgaggttgagggttttgttttcttgttgaccggcaatttggatgatgtaccatatgctgagtgcctctcaatgggcaacaaagaaaacatgatgtataagtttatgcagattgcctgttgttgaatgcgtttttgttcttcgctacacttgttctggtcaaggaaagaagaaccatgctgaagtgttggtttgaactttgaagggcaatatccagcgtgcttattggaaccttttctgttagtactcgatttttttctaatgtcggagtatgaccttcagccttgacaccctcctccgtacttgcggatggtttaggattcagcaggaccttccgaatggcttgtgtgtatatactccctccgtttcacaacgtaagtcattctagcatttctcatatttatattgatgttaatgaattagatagatagaacataaatatgaatgtgggaaatgtttctagcatttgcatttctcatattcatattgatgttaatgaatctaacataaatatgaatgtgggaaatgttagaatgacttacattgtgaaacggaggaagtgctttgtacgagttaggaaaatggttgttcagacaccgtcactcagggttatacaagctagcagccatacaaaattcgatagaaaaaatgtggaataagtgaaaaacaaaagcgcaaaacaaaaatttgtaccacattaaagcaggaaatgttaaggtttgagatgccagtaggcagtaggtctaactcagaacaaatttgtacacaactttttcttttttgaaaataatttgtacacataactaataatccatgcgagttaaggatcatg

SEQ ID NO: 47163 - DNA, 649 bp, Oryza sativa
ctccaagtgtcaagctgcaacgatatgatgcaacaccacattgttaattaattagtaatgattaagttgtagcttgatcgagtacaattaagtttctcccttttgtagcatacacatatcttgttagctttaatatatatcctagctctgatatccttgctaatctacttgctagctcttacgtacgtggcctgtccatcgatcatatcgatatattgatcaagcagagacgatgatatgatcatatgacacgcaatgtatatatgcatgtaacacacactatttaattatatacacggcatatatatatcacaaaagctagacatatataggtcagctacaaatgtagcagtgcacaagcgatcgatcgatgattattatatatgcatgataactaatttaaatatctgtatttatatatgctaactattttgagattagaaaggctagtacacactataccatatactccctccttctctaaatgtttgacgccgttgactttttaaaatatgtttgaccgtttatcttattcaaaaattattgtgaaatgtgtaaaactatatgtatacgtaaaatgtatattcaacaataaatgaaatgatacgaaaagaattaataattacttaaatgttctaaataacacgaa

SEQ ID NO: 47164 - DNA, 597 bp, Oryza sativa
gtaggcaggccggcagggcggggcgaggcggggcgcgtcgaggccgtccggccacacgcccacacccgaagacgcacacgtgcgaggccgggcggagaaggggcggcggggggcaccacagccgcagcgtcagcctctgcctccacattcgccgccgctcccgacgacgcacaagcgcgaggccgggcggagaaggagcggcgggggggcaccacagccgcagcgtcagcctccgcctccacctacgccgctactcccgacgacgacgcagccagcgtcgtcaccgtcgttgtatctccaaagctcgcactgctgctagtgcccgtgtcggcgttctacctccgccgcggcgcgccgctgtttctcacgccgcgacgcgtgctgctggcgggcgtggggctcggcgtcttcaccggcgcagatgacttcgtctagaaacaaaaatcaaggctctattacactatttagctcatctatttgattggctccttttgttttctgcacaacacatgcatgcacagcatgctgtcaactatgtttagtatatgctgcaaggaccgaccctgccgttcgtcgagctcggctacaagcacgccg

SEQ ID NO: 47165 - DNA, 1133 bp, Oryza sativa
ctgcgcgccaccaccaccgcctcccgctccggtgtgcgatatcctccccggcggcgcccccttcgccgccgccgccgccgtcatggtcgcccgctccaccttgacgccacgtcgaagaactgagcacatcaagcatccaaccaaagatcaaaatcacctcaaccacacatagcaacatctatctatttcatcgatgtgtacctagagattgagtggcgtggtttctcgtgggggcggatctagggcttccggtgagaccgagagcgagagcgagagcgagagagagagtgccggggactcggctcggtggggatcgcgcggttgagagaaaacgtgggtcgatctggagcgttggatcgatgatttttatccgttgcatttgatgaatgaatgagcatccttcatccggaaatcctgttcggcgatcgatcgccctggggatggatcagcgatcgatcccctcccccctctctccctccacctggttttcttttttggcaccgcattactttcctattttggtaaatttatacacctaaagtttacacatctaatgtttagagaccaaaagtttataagtcaaaagtttatatatccgattcaaatttgaatttgaattcaaatatttttttacatatagtatttctatacatctaaagtttatacacctaaagtttataagccaaaagtttatatacccgtttcaaatttgaatttgaattatatctgattcaatttttgaatttgaattcaaatattttctatatatagtatttctatacatctaaagtttatacacctaaagtttatagatccaaagtttatagacctaaagtttatatacccgatacaaaattgaatttgaattatatccgattcaaatttgaatttgaattcaaatattttctatatatagtatttctatacatctaaagtttatacacctaaagtttatagacccaaagtttataagtcaaaagtttacatacccgattcaaatttgaatttgaattcaaattttttttatatatagtatttctatacataaatttttctaacttttgttttttttaaaaaattatgtgtcgtactgtagtagaaagagaagaaggggaggaggaagggggagaaga

SEQ ID NO: 47166 - DNA, 1417 bp, Oryza sativa
gggcttgcaaaccggaactaaagagggtatccccacaagtaaatgtaagtggtcgttttagttgtaactaggctctattgagaagagaggagaagagggagggggcaacatgcatggtttttgtagctatgtgtagctatgcgatcacacgtcacgcgtctagaaatgcacgatcggtcacgcatcaactcaacccattaatctccaccaagtcgatcgtgtcattattaacatgtactaatatttattccattatctaaacaaaatgtgttaacttgtggaccgtcctcgtataagctgatcatctcctccaacaatgttgtcggcccaaaagctaattagcacttgttaacaatgaaatttgacatcagattcagaaaaaaggaaggaaattgaagcagatttggtgttgaatcaagccgaacttggagtcggaccgcacatcgactggatgccatatcggctgaaacaaagtatgaagctggttgaagcttgatgaagccgatggccgatgcagccgatatgacgtgacttgggctcgacatgggcctagattgggataaccatcattgccaataagagatagagctcgattaaggcaattgtatctattaattaggatattgagttggtttgttagaaatttggtaagtgaccgccatatatagtcttgtttgtatcttaagtttagaaaggtttgagtcgtgtccacaataccacccttttacttttctcgttttctggcgagttctttgcaagaggtaacctgtgtcaaaggcccgcgctatcgggctaacatgtcgctttagacatgttaggctcaatatcacgagtcattgctatcatatgtcttagttaatctatttttagcttctcaatttagctctatcggtcgtggctcgctttagggtttatacttgtttcgattaaattgtcttgctagattagattagctaagacatctaccatcctgaaaaatgtctaatttcttgattgtctagactacatgttccttttcatactttgagatgcatcatccctagtcgtgcttagaaccatgcaaattagcctgcaattaggcattataagaatagtattggggtttcagccgatcttacccaatatgcatgtttcaccccccctgtttaatgtatattcgccacttatatagatagatcgttttatataagcatatcaagctttagtcagtatcggttagattcctaacttcatgcttaatttctatttgatatgtttatatggatcaatctgtctatataagtttgtactagagtattagctagtacgttatttctcttgctctaaatattgtcacatcggttactttcataatacttctgttactttcataatactgtcttaaatcaatctgttaaactctatagatactattaca

SEQ ID NO: 47167 - DNA, 1820 bp, Oryza sativa
gtggcgaataaataggcgagaggagagagagagagagagagagagagagagagagagaggggcgtgacgtggggatgacgtaggtggcaggagagggtcataaattaattcatttaatcaatttaggaattaggaggagtactgccaaaattaagaggccactggtatgatgtttaaattcttccaagtttgactaaaggaaagaaaagaaaataaaatcctccgtatgaaattcaccgggcagcaatgaatgtcttctatatttgtgtaattctgaaaaagaaatactagtagaaattgttttgatcttccataaatttgctgggatctcatccggattttttttccctgcagtgatgaaggaaagatattaattgtggtatcacgtaatgctatctctatctatctctctctacctacctatcctctgcaatctctgatgtatatcttcttgtaaggtaacaatggcagggcactaatgataccaaaacagaattgattcaaggagtgcatttgtgtttgatggaataaatgtgtatctcacaaaatttttcaattaatgcagatggaagatcacatctcgtttctaaagttgggtatcttttgaaattaatggaggaaatttagaggaattatgaaagaactgaactaaatcacacggaaaatctgtgaaatccttatgttctaaataagtgaaaatggtcatgaaaattcctgatcaaccgatacccgtttctgatttttacgggctaagtaatatggaaatatttaccgatgaaaacacagaaaaagatgtaaaaaatatgggaatagaaatggaaatgattttgctttaataaatgccccaatatttatggtccatttctttatctcactcaaaatttagaggcccatcaactcctcaaccaaatccctaggttaactacaaaagtcaaaagggtgatagattgtaatttacatagtgccatcttgaatttatttcatgatattacacagctacaaagttaaatgtgtgattttacaattcaatgtttccgatttttattacaggttttcaaccaatattgacttgtttccgtctgtatccgtatagtatcggttccggttttccaatattttttatactattatcattttttgctatactgtttccgattttgtttttgaaaaaaaaagagatatggttaagtaaatggttgagacgtttttttgttcgtttccgaccctttttagcccttgttcagttaatccctatgtgggagggattggaggggatttattaacacctattatggtgtagaattattctccctcaatcctctccaatttctttcaatcccctctaaactgaataagacctaagggatgcatttacaacttgaaattaaactctaaccatacagaattcctatgttctaaagaaccccttaactgtgtaattctcataggactcgaacttgagtttctacattatattctacacaagtacctggtacaacaatgtataaaaggcaaatagcttaaacataacagcataatatgattttttttcttttttggtttatgaaatctcttaggccttcgggttttggttgaaattttgtagatagtttatcttttgtagaaattgagattaggatttatcggaccttcccgagccaaaaacaagggatagttttcataaaaatcgctgactcccaataacattcggtcaaattttataaaaataataataataaaatggtctgaattttttaaacttggtcgggaactaagcagttcgcgttctcgagccagtccagtttttatggaaattgaca

SEQ ID NO: 47168 - DNA, 1629 bp, Oryza sativa
gatcacttggtgtgtcgttgcaacctctctaaattagtaaattataagcaagcttagctataactggtcatagctgattctattaatcatcagtttggagcatccaaatgtatctggccgttgatcttattataatgcaaaactgatgtgtggataggaaggaacatggtgttgctatcagtggagtgccgttatgcaactgctttctagtataactactaatgaagagataatattaggtgcaccaaatgtgttcatacaaaaactagcctgcagtgtctactctcttgtatagattaattacaatttcatatgtatacaatacgattaggacctttctatggatgaattaatcatttgatcaacatcttgtgcatgaactggtcaagttcattgtttgctatgggcatttggtagattataacatagatatacagagagaagtttcctgttggctgctaaattagcagcctcctagctttatgacatgtatatatatgctaaaaaaggtttaatttgacatgtgccttttggggactgtttaatataattgatcaaattatataggtaaaacaacacacattagggtgaggcgatgtttctcgatcgacacaattcgtcgttgttgtgttaacacaggtctttaattcattattcttatagattttgaaaagattgaaaagaagcacatgtatgcagttttcttgttgatgaaagatgaatgattttaaattttgctgcgggtaggtagttagttcttgctgtaaattatttcaagcatgtgcccaaacattgcctaagcaacttacaaggccacattaaaaaaaaaaaggtaatcagagagcacaactaggaacggttcattgcttttgacatgaaggggagaaaatgatggattaatatatgcagtgtttgacagtatatcgaacagagatgtcaaaagcatctccctttggcaaaccacaaaccgtcaatttggaaagggacgatggcatttgcatttgatccgaacatcatagctgacctctggccggctaaaaagtacaaaacatgtgacatacaaagcccaaaaattcaacctatagttttgtcctttcagtgtactgaatttcatcttaattggctatttttctcatcgtagcaggaacatgtcaccttctcggttgaattggttactcgttacatcgttttgaaattttttttttttactattctccgtacaaatcttcagttggttcgaagcaccgaaacacaagagagtcacacaaataaacataatgcatgctacacggagtttgattaattgtgccccttagcaatttctcttgtcccaatcaggttggttaccctgcgctttttggctcctacgtggacaccaggtcaccccttgtcctgttgctgctgtctctttgagtggatgggaggccgggtgcctagtcggatacatggaggccagaggggccacctggaaagttcactttatccatactcctgcttatgtggacataggagagccaacatgtcatgtcagcatttgtggcatagtggcgactcctcctattccattggatttgcatgtttcatgatgattttattaggcactatgtgcacacatggcctccatgcaaa

SEQ ID NO: 47169 - DNA, 733 bp, Oryza sativa
atatatatacatgtatatgtacgtacttaggaggtgtattttgtacgtacacagattgtaatactgtacatttgtacgccgtacgtcgaggtattttgcctcacgtaggcgtttgagaaaaaaaaagaaaaaatttaaaagattttactgctgcgtcaactgtgcctcgctaacgttgcatgcatggcccccatgtgcgtgtgtttctcgatgacgtggacagatgtgggccgtacacgtgtccccgccgggtggcccggatcggctgcggagaggcgcggccccgagagtgacgtgcgctggaaagcgccattttcttggaggccgcagacgatcctgtccacacgtattttgctcgagattttggggggttattttagattttaaaatttatttggccactaaattcggatggggccttatctctgtactacgtattcggcatcatccatccacttgaggatatggtccatccaaatcaaaatgctggatcttctacaccaagaattttttttaattaaagttctcttatatgatttacgaaagcataggtgagaatctgatgcccgaaaattaacctaaggtttttattaatttaattaccaattcacggagagtcagaacgtaattaatatatcaggcagaaagacagtatatagtcgatggacaaagcgtgcaaacgagggttctttgatttggcaatacattgctatcatgttgttcgatctttctg

SEQ ID NO: 47170 - DNA, 1718 bp, Oryza sativa
tctatatatatatgccattcgttttccttcagaaatacttgggcctcttattttctgaggccaggaaaataatcaaaaggcataagcatctttaacatacatgtatgttaatttctcttagaaagataaatgtatatacatgcatggttgtgcacaaaggaattaataatgcactccctccgtactcgtaaaggaagtcgtttaggataatgtttaagttaaacattgggaatataaatcatgaataactctcaagtttattgagtttgaaaacgtaaaaaatatatgaatagatttgtcttgaaaaatactttcataaaagtatacatatatcatttttcaataaatatttttatagaaataagaagtcaaaattgtgttttggagactgtgtcgctgtccaaaacaacttccttgacgagtacggagggagtactatatacccctctctacttaaccctgatgttggtagcattatacaataagttagcatgtgcaccaacttgctgatgtgtcagctagatgagcttggaaggaacacaaatattctttctcagctactgtttggctcatgactttggtgacggatggctaatgcttgtactcctatattctctataaattaacaagagcaagaagacatggaaaaacatcggactcatgtagaatcacagtccaagaagataaccacttcctagagccggccaaggcaaattaaagtaccaagagagaattccagcagcacaaaagctagaggtttattactagcaaagccagtatatatcaacggcctgtagcaatctgctgacaggacaaggtgtgttcttgcagtccacataagcagaaaccaagtaaggataaacataaaacgacgtcatttcgatcgattgagtatatatatacttctagctagtgatctctcttccttgtcacatatatttcgtctatgttatttatttacaggcccactactacacatcgtccttgtatgggcaaaaaaatattctctctgtcctagctggtcttgaggaaatatttctcgaactaaaaccaattattgaactcttttaaagttgacaaactagtaggatgttaattaaacaggtcacattttattttcagagcaaaaggctagctagctatatagttggaggttggagatagaagtcgatcatccatcaaccagttgctgcctccaattaattctcaaaattttgaagtccgcgtatatattgttgaaacaggaactcaatttaattcatcagcaattgacaggtgactagcaccatatagcatgcagctagccaataatccggaaaaagaaattaaaaggtagatccaagaatgaattagagctagagagacttatatttataaaacgtcctccaccatgacagtgaccagatgatataaatccatgcgtagtacacggatcgaagcaccacataagcaatctgatcatcatcatcatcctcgtcgtcgacctcgtatagctcacgagccagctttgcatggaggccatgtgtgcacatagtgcctaataaaatcatcatgaaacatgcaaatccaatggaataggaggagtcgccactatgccacaaatgctgacatgacatgttggctctcctatgtccacataagcaggagtatggataaagtgaactttccaggtgcccctctggcctccatgtatccgactaggcacccggcctcccatc

SEQ ID NO: 47171 - DNA, 1494 bp, Oryza sativa
taggaggctgctaatttagcagccaacaggaaacttctctctgtatatctatgttataatctaccaaatgcccatagcaaacaatgaacttgaccagttcatgcacaagatgttgatcaaatgattaattcatccatagaaaggtcctaatcgtattgtatacatatgaaattgtaattaatctatacaagagagtagacactgcaggctagtttttgtatgaacacatttggtgcacctaatattatctcttcattagtagttatactagaaagcagttgcataacggcactccactgatagcaacaccatgttcctccctatccacacatcagttttgcattataataagatcaacggccagatacatttggatgctccaaactgatgattaatagaatcagctatgaccagttatagctaagcttgcttataatttactaatttagagaggttgcaacgacacaccaagtgatcatgctatatgacaaggataaagctcatgtacctggggtacttagagaagaagttgtattgtgtctctctgtcacgacttagcctaacaaagggtaagtggagctggtctaaaaaaaagaagtgcaggcaaaaatatatataggagaccaataaatacctaatatgtaattaaagtggttcaagtaattatttggttcatgtaagaatttattaattaggtacaccaagaacactttttttctttttatatttgccagggaaagcaacaatttttacaattaattttgattatggtaagtcagctggttttttaaattaaatgctttaaaaggaaactagaagagaaagtactaagtcggatgactgatttctacgctttaggcagactatgacagtgcgtcaaaatatttttcgttccgtacatgactacacgatccattaaaaaaggacctatagaaaacaatgatgtcaatttcttcttaggtaagtcgtgtcggcttccgtatagcataaaccttgtcataaaaagaaccgacacgcgcgacgaatgttcttgagtaagacgtttaaattccttcgaagaccgaattacgtcggcaccaaagcgagagaaactaccgatcacggcgcgccgcatccttctctcgttgacctaaaaacttctctttcaccgaacatcacacgcgtgcggagatcatagtcatcatcatctaaatttaaacccatatttcttttttcaaaagttgtttggtgtggaactattattccctaacccccataccctcctctctctctctctctctctctatccatctctttctctctctcttacacaacaacctgtgtaccggataacttctggccaccagtcacaagccacgagaggagaggagacgggtgacgcatgcaacggccggccggctgccctagcaagaaagctggtcaattggaagtaggctaaatgaatgaatgttgctggggacgttgggccagccgcaagtggattggacaatttgg

SEQ ID NO: 47172 - DNA, 1364 bp, Oryza sativa
tagggcgaattcgagctcggtaccccatggtgtgtggatagattgcaaaaagttaatgattaatttcttgggagacagagaaagatgaagagattataattggtagaaatgggctagctaaatagagatagctagctaacaaataatacacacagtggtcaagagtcacatagatatacatcaattttcatcaacaacgtcatgcggaaaagagagataacaactctcgttagcgagtcatctcgttaaacgcctccccctgcagtttcggtgcctgtcgctctcactgcgagtttaattattctcttctgctgcttaattgctgctgctgctgctgctgctgaaagaaggttaattaagctcgtctcgtgccgtctcattctgcccatcactcacacgcatcgtcgtcttcgtctatgggaccagtaaaaacctcgcatcaatcactttcgttaaaagatcaggaaacctcaattttgactgatcttctctgatgactcacctctctgaatttttgcttatcgagagtcgttctctcaaagatatatctatcctttttgagtggtggcacctcaccaaaacaaaagtgcatatatatatatgtctgaagaatatagtataattgactgcagtttaattaacaagaaaaattactgcgagtagtaattaatttctgcaagcaagcatatatagtatcttgggagcatgccgaaagggatgtttctagctagctagcagctagcttttagaggcacatttcgtacacaaattaactaacaatcttgcagatgaagtctttgcatgtttggtgcatgcatgcatgtcatctcacagttgcttgcatcttttggaactttagaatgtttcaacacataacctagctttatatctttctttctttctatctctcatcagtagtcatgttaggctaagaattcagctactggagatagcctttttgtttttgacattcatgaaagttaattcaatttatcaagtgctatctctctcacaaatataagcttttctatctctctcttgatccctaccgcttcgtttgttcccttattgattcggttgcaacaactgcttaaccaccccctaacccaacaccacaccatatctcattatctgtcgtctttagttttctctctctagatatatatatatctatcgcttgacatttttcaaatgatgcatgatattgtacctgcccagtccaatggtcctccaggttgacacaaactcccatatcttgtaccaacactgttccattctttagtaagatatatgcatgttgtactagctagtaactaactcactcactcactaacaatatctaatgatggatatatactactaaa

SEQ ID NO: 47173 - DNA, 701 bp, Oryza sativa
tgaggattagaacaaaagtaatgcatacgaagaatatttttcagatatcatatgtattttaagattacaacttcataaacatttctaattttcaaaagcagacattttaatatggccacatgttcgatctacacagacagtcggccgtctgaatacgaagacctaattttcacaggtctttaatgacaggtggagagccgagccgcttacgtagatccattttgactgcacgtgaaaatgctttccatagatccattttgactgcacgtgaaaatgctttccgtgatattgtgttggacttactatataaactatataaaattttaatgattgttaagagaaatatactgtcaaacctgcataaaaaatgcataagatgctatgaatttcactagaagattgcatattgcatattggattactttttatcatcatagttcactttagaccatttttcctttcgcacattacagaatactctccatgttccttctcttacaccctcctttattcgtatctgctactctgggtctaggtatgagttaattaacatgaacgaagtacaagcacagggtgtactaggacaacgcttgattgtagaatcctcgttgtagttgtgaacccgagctccaccccacctactgcactaggtctaggtactttgcttccacaccacttaagctccgtccaccgtcagggtt

SEQ ID NO: 47174 - DNA, 1506 bp, Oryza sativa
ggtaatatagaaggaatcagaaggaatcataaaagaaatcatgtcacggagagatcctcaatagcggggaatcgtgagaccccccatttgtgagttcggccggggacggaggctcatctcttggaaatcactcgctcgtccctaggatcaccggcgagcttgcacgcaaacggattatacaggttcgggccgctatggagcgtaacaccctactcctgtgtttgggattatggatgagttttacaaaagatttcttgactctagcaagcgcactcgcttcctccctcctggagtttaggtttttttctctacccccccttctcagtgggcagggtcctccttttatagctcaaggagataccacatgcaccgcctctacctaccctctatcggagagggatcccactctacttttcctgggctttaaaccgtgccttctcccggaagctaagcaacaaccggttctcgagtggaaccaggcgccgccccccgcctgactcgggggacagccctgtcattccctcataaatgaacgatgacctgtgatagcccttcctcgagtgacgctcggacgtgacgggtcatacccacccccactccgccgggtacaagggcgacgtgaggacatggttgccctatccgtcggatgtgacggtgccaggccggtcacaaaccggtcacatccgttagacagaggttagctaggcgcgccgcacgtctgcccttaccgcattaaatgcggtgagggacagtgtgcgtccacattatggctgtttacctgtgcttcctctttccttcgcgcgtggaaaccgggtgagggccgcggggcgaagccgcgggatagcccgagggggtgacgccatgccccgagcccccccccccccccggtggcttccacgactcgcgtgacgcgcaaatggggctaacttgcagagtcacgtggccggagggaaagtaattcccctctacttcacatacccccgggtccatatctccgacaaatccgtttaaaaaaattcacatgctaacttgagacgatcggactcctaattgcagctcatgattttctaaaaatatatatatccaagcgaactcccaatttcattttaactaaaccatataacaataataagattaaaataaacttcacccgttgcaacacatgggcatttttttctagtaatcctaatttttattgacttttggtcctgcaatttgagttttattgatcaatcgtagcaaattaattaactagtaggttttccgcactatttgacgtgaaactagatataaattagaattatatttgattaaactattttccttatataaacaccaaggcaatagctaggaattaaaggaactggtgcgaaatacataatgggatctaaaatttgacagccaaatttttacaatcttgttatcgtgatggcctatcatgatgactcatagagcatgatcacacctagctctattcggtttagctttacctattcgatcggctta

SEQ ID NO: 47175 - DNA, 556 bp, Oryza sativa
tgacggttatggtcgttttcaccggtagaaaccgttatcagctggacacttgccaagaggagaagggagatgctttttggatgcttaagcatctccacattcccaaggcacctctaggcctataaatacccctcctctctctcatttacaacacacatggagctgaattacatgagcctctattatatcttttgtacattataaaataggtagagagtgaggggaagctctggaggagtacccgaaagtttggcactctctccaacttctaccttttctaggaggaattctggaggagtaccagagctgtcggtacactctgctccgggttcggagaaacttcttctattaagtaagcattcaggatctttttttatgttatttaatttcttagtctaagtgagataaattttcatctttacgggttcattgtttagtatccccgtactaagtgctctagtactaggactttggataaaaaaaggaagtcctgcgaagtatagagtataataataacttatacgtggtgtctacgttagagattacctttatttgt

SEQ ID NO: 47176 - DNA, 908 bp, Oryza sativa
  unsure (1)..(908): unsure at all n locations
tttctaggccatgagagcgaacgtggaggctcctttttctattccttaaattatatatttaattctgaatttctattttttcctaattgtatttctatatggattatatagtctacttctaatattccttatttttaattccgaatttcagttatttcctaattgtatttctatatggagtctatactctacttctaatatttcttatttttaattccgaatttcaggtattttctaattgtatttctatatggactctagtctcctcttctaatattccttattttttaattccgaatttcagctatttgtaaattgtatttctatatggactctagtcccctcttctaatattccttatttttaattccgaatttcagctatttgtaaattgtatttctatatggactctgctttttctttttctccgattaatgtgagaatttctaggccatgagagcgaacgtggtggctcctttttctattcctttaattatataatagatgttccagcacttagaaaaaaaatgttacagttcttaaaaaaaagtgaaacatagtgagatagttagatgaaacaatttaattcaatatatacaataaacgatttaagtcattgaaacacttaaaccttgtatacatcaaaacaaacccccgtgtatttgaaaatattaaacactatctaaaatcccacttcaaacatttgatacacacacccaaagaaacatcacaagtccactaactgaaacaccgtttttgaaccattgaaacatcaacaaaacctgtgtgtcgaaaatagaaatatagaacactatcgaaatatccactgacatttgatccaaacacaaaagaacatcacgagtatgggtncgaagtggggntatcaatnattcaaantcaaagtgccc

SEQ ID NO: 47177 - DNA, 679 bp, Oryza sativa
atagctggcagtacttggattatgtaagcacctactttggcgtttcagctatttattgaccatggcaattggccggcatgatgagtccccaacccacccttgtatcttgtacagtacttgccaaccgaaaatgctgtgccatataaatgcattcatcaatcattcgcagtgaaccagcaaggcgtcctcctttgtaagggaacatattctgtacatatacaaggtattttcagttagtgtgcagggccagtgcaccttgtgcgcacataatacactccccttttgtaaagcagtaataattcatttgttgacaattctgcagagagagagagagagagagagagagagagagacgttcaaggcttcaaggagaggtgcaattgatcaatatcaatgacagcgaaaatgccgtagttctagaatcagaagtccggaatccaacgtagatttttttctcgattacacgatagatttccgattacacgatagatgcacatgtacatagttacacacaacatcacattcacattcccgtgaatgcgttcctcgacacatgctaaagagaaaccagcaacatgccggcatatccctaatatcataatccaacacagattagggatatgccatgcccgttcatagtggataaattccacaggaacttagaaggtaaaggaaacat

SEQ ID NO: 47178 - DNA, 680 bp, Oryza sativa
tgtgaatataaattttcagcgactgtgaatcaagtaatcaggtatgaaattcgatttttatcctaaaaatttggaagtattagttagaaaaaaataaacatgaggcgataaacgaggggatcaatagcccaaattaaattcaattatgttttcctacaaacagacatatcgcccaaaaaatgtgagaaaaaaaattagaaaatgcaggagaaatgaggagaactttaaaatatgtggcaaaaatatagtacaaaattaggaaaagggatggggaaaggtggaaaattatgggaatgcgtagagaaatgtttaaaaatattaaaccaaatattaccagttccaaagtataaggaattttacataaacaactactttttgatgaaggtagtatcattttttgggggtggttggcagtatcattttttttattgaactgatttaattccacttgatatcaaactgtttataggatttaaaaaaacatatttctcatttttcgaaagggtagatttaccgtccttgataatgtaccgagaagtaccacattttttagtgtaaaatttggtacctctagctcctaagtatcatatgtcccaaaatttcatgtgtaaaattttggtttcctctaagtactaagtttcttatttttaatgtatccccaatttctagtggaaaatatt

SEQ ID NO: 47179 - DNA, 1524 bp, Oryza sativa
  unsure (1)..(1524): unsure at all n locations
cacacgcgtatgtggtgattaggcgtgtaagggataantcattataacgttaantgtttttatggtatataagggtaaccctaaaaaacaaacaccaaaaagggatgaattcgattcnccttcnnaccacggaaactaaaaagtgcagtctttacttccagacaatataagaatatgaattttcttaaggacacttaaaaaatgtggtaatttaccacagaacacaggtacattataatacaacatccacccaattgaagacagaaaaaccacgaaatatatcgatgttttctttatcttcttcgctctaatcttcctaaaatggataccatcatggtggagctatcgtgggcctctgcgtcatgaatcatgactaagtgcccttagtcggtgatgacgaagcacccaagacatagcagccaggagtcaccactacactgttgtggcccttgggattgcgacaaagtacttcgagcgcaacagttggcggtcatcaccataccatcataggcgatttggcctatccctcggccagatcagccatcatcggatccactgttacccattcttctcctaccaggatctagcatagttcatcctcctcatcgtcctccaatacacgtcatcgtcagcagtcgattgagtgagcttccctaaacccaggcagcttggtaacgactaacaacatatcatcttagctagttggttgtaattattctatttactatgcccttcatcccaaaataagtttatttttcacccataccatacatgccaatataaaaccaagaggactggaataccccaactttatcaaatctcaatgtacttattcctctctttatctattctcaatatatttattcctttactttcacaaactctgatgaagtgattgctaagggccattcgagacgcaggattgagaaaagataggaaaagaaaaacatatgaataggatgtcatactcattggattccaacaggattttgaaacacatgaaacttttaaaatattatttgaagagcacataggaaaacacatagtaattttagacatacgaagaggaaaacatgaggtgagacctcatgcttattttccttcaaacttgttctagaatgatccattccatagtaatttcaaaggaatgggtatgaaacaatcacttgtttcaaaagatttcataggattatttcccataggataaaatcctctagaatttatatgcttttctttgttttaaagagatcctaaaataatttattttcagacaaacaaagatgaaaaaattatcaatcgtttgttccagcttgctatgcttgttgagaaagagtcgcaggaataccaacaaaagaactagatcaatattggcaactccctcatgtcaagaacatcgaccacgactagacaagctaaggtgtcaacaagctttcataccgtgcatccaccagcgagcacacgacctttttgcaccgctggagcaatgctatcacccgcacctactacacgagttntttattctag

SEQ ID NO: 47180 - DNA, 2732 bp, Oryza sativa
  unsure (1)..(2732): unsure at all n locations
ctcctttttaagagggtaacctcctgttaaatttaggttttccaaggaaacctgaataaatttttctgttaaggtcaaaatttttttcaccacaaaagaaattacatgttttccacttttagtgtaaaaagtccagtatcacaaagattgtcattggctctctgtgtaagacatggccggttaccagttagtgcaacaagttcatccggcatcacaaggagcaaggctttttcccggttgagatgctttcacgcacttacacagagtttggatctaggaccacatttgaagattctgtgatgccaagttatatgnaaaagaaaaggcgcgcaaaagtaggctactcgtgctccatgcatgctcaaaaaagttaagttgagcaagcgtctacagtttctgaacatgaaaacaaagggtaataataatggtgctacattactcaaaggtatgcatagatatgatgcgccaaatatgtccactacttatactagattagagaaacccatatggaaataattactcaagacatgatgcagatatgaaaatagttaaatttttatgtgctaatgacattccatttaatgtattgagaagcccacaatttgctggaatggtcacagccattaacaaagcttctagtggatacaaaggtccatcctctgagaaggcaaggacaacttagctagatgcatgcaaaagaagcgtagaacatgatttggcaatagtcaaaagtacatggtaattttcagttgctaacctttttcatccttgtacaggtgcaaatttgttaaccttttaactgaatattgagttattgactatcacttctcttatttttgcatcaagcaggtgcacacaaggtgtttctgttgtgtctgatggatagactgatataaagaacaagccactgatcaatgtgattgcatctaatacccgaggttcatgctttctatatgcagaagatttctctagagttgaaaaaaacaggggaagctattgcagagttcttattgaaggctattgatgaaattggaccaagaaatgtccttcaagtaataacagacaatgtatctaacaaatataggaacacgatcctctagcatggtatactgtttgttggtatttcttaatgacattactagaaatataattctcagcaatagcgcaaaaatacttctgatatattatggttacagagttcatccgcaagcacacagatataccattgtagcatttcactcgagagtattccaagggtaccgtatttgcttaatcccgtgggaagattatgataaagagaatcgtactaataatttatatattacttgtaataaccaaagtctaggtagtggttaatataattcaaagggtagagtgacactaagcagaagcatttatactcattcataattatctaagctaagtggaaagaaaatagaaaaattatattcctatacttctagtacacataggtggtgtttgaatctcctgaagatgaagattaagtgtttcacgcaaaacgaagtggtaatagcgtgtgattaattgagttttaattattataaacttgaaaaatggattaatctgatattttagaacaattttcatatagaaaatttcgcacgaaacgaaccaattagcagtttgaaaagtgtgccactttaatccaaaatttaatcacactttccaagacattcgaatggggccaaatacaaacatcctagttatatgattacttagctaataccctctttccgatatcctcctggtgcttcgagaagccactcttgattgccgagttccttatgacaatccgtcatgaccattcaactggggctaaatacggaggagtaccctccccaggaaattaactttggactacatatacgcgcggaggaatacccgtactgagctatcaccatcagcggcccacctcgcttacgtagcatataaccccaaataatgatatccagtaatctaaacaccacgcttaaactaccgaatactactttaatatcatcatgatgacatagagtcatcgtaaatacgatcattatacccacaccattgcatctcccagataagctaacattataataaatataacctggatatataataaaggtggtatttgtatacttggaaagtatacatacccaagtngtttaaaggagaatttccaaataaagtcaagtcttacaaaagaaggaaagcttctagagccatacacgatttctccggggacttcgaggactgaagattctattctattttatttcactatactatagagactatactcaacctgggagatgaatgaagtttcttgctgagggtgtcttgaaaggagaatgacctcttttttagactctcataccgtttgaccgttggagggtcggaaaaccctccactggattggggggaatttaccccgccaggcaaagccttattaacgctgtgggggggatcgcccacaccagtttggggggggcgccctttgtgtccaatatccctgtgtgaaaattgccctaagggccggtaatttggaggttggggcttataaggaaaaatatcttccacttcgcccgaggaaggcccctttttgggggcctctctttaattgccctctccccggaggggtctctcgcgggggggtgttttattacaacacccttttctccgccctggtttttttttttttgttggggagggaaaaaccccaaaacacacca

SEQ ID NO: 47181 - DNA, 1456 bp, Oryza sativa
  unsure (1)..(1456): unsure at all n locations
cttgaatgtattataagatttggggtgaatttgtatngtgtgcatgnattagggtggttgatgccatactgcagccgcgcgctaatgatttaaatttttgttaagttgatttttgtgatgctcatgcttgggtgaatggaccgttgacgaagncgaaggcgaaggcgaacgaagcgttcgctccgtccgtcgtttttttttaaacttggttagtattttctctggcggctggtatagtgtaaccgccagcgaaaaaacattttcgctgccggccatcttaaaccagccgccagtgaaaatggatctttgctggcggctggcttaagacaaccaccaacgaaaatgttttttcgctagcggtcgataaccgctagtgaagatcttgattttcactggcctttgctttgtggcggctccaaattccgccagtgaaaacccaaaatggccgccacgaaagatggtttttgtagtagtggaggtgtggttataaggatggtgtcggtggggtcttcttcctcctctttgaagtccatggaggttgcggtgacgatgacatgcaagcagcgatggtggccgtagaggcggagctagcatggatactgtacctcaacagcaaccgctgcggctaggttgggtggaggtgcagtgatggcggcttctattgctccggcggtttcagggacgactagatgtggcattggctagatccaacatgatcctcctgcctagatctgctgtcactctgacgagggattagattggggggtcgcggtggcttgttgaacccttgggcagcggactatggcagtgacaatgtggcaatcatcgttgttggtggcaagtgggctatgccagcctggtgttggatgcacgaccataggcgtgggttgctcgatggcaagcgggtcgacaacgggcttggctggcctggcattcgatgacgctggtaggtgtgatcgcaacagcttgggtcgtagtggaggacacacaatggtgcgtcgccctatgctggagtagacaaagatggggttgacggtggcgccctggtaagggggtcgtggctttggccgacgggctgactcctgagatgacgacgatgatgatggtgtgcaaaggtgggcgttaggtggcatgaagcaaactcttctccagacacatgccctcttgaggcagcggctagccactacaagatggccacgttggcaggcttatactggagagagcggatccactcttctctctcaccctctacttctgcaactcaaagacgtggatgaagtggagcatatcggaatgtcgagctcctacctattggccgaccgataatgagcactggtgtggtggctacgcgttgaaggtgtttagatggtggtagctactagtgacatgcacaccttgataganaagataggagggtaccaagctcgaatatcaanttgtaattcaaggccacaca

SEQ ID NO: 47182 - DNA, 1273 bp, Oryza sativa
  unsure (1)..(1273): unsure at all n locations
actgagtgctnatcgccctgtaccctatcagnannaaccaaatataaaagaaccaaaagttaatgggattaatatttaatagatatgtacttccagtacacatttttcatactaattaaatttcagagaattagcaactctgtgactagccttagcagaccacaatcttgaaattcacagcaatcactattatgcatgaggtgaactatatctttaaataacaacataaagataattttccatccatgcactattagtcataacccacaattcacaattagtgtagtcccaagtaatacgctaatatccaagtccatatgactgtttattcaagttcagttcatcatagttaaattatttatatctgctttataccatgagtattgtgggtgctaaaacagtgtaggatgtttttacttcaacaaaaacgggacaagggagttattagccctgttattcttaaaaaataatgtttgttgtaaaaaaaagttgttaatgtaaaaaaaatggttacctggtatctgagctctctcttagcttcgtttgtggtttcttgatctttgaaccattctcgctaattgaactattgatgctttggacattgaactgccatagtgcatctgattctgaggaatcacttgttgcaatgtcaatgtcatcagaatcatcagtatttgtggaataaaatcttggtctttgctgctcaaactcatttccgtccttttttcttgagttatttctcaggtattgcttatctcttgtacctgaatgcgtacctttggtaaaagaagtaggtaangctggacttgtccctttcaattcacctactgagtaatgggtgtcactacaaccttatggggattcttagagtcaactgaggcatgcaacttgggtatttataaggcaccctaaaaggttggcgaataatgcataactgtttctgggggaaatggataccgtacaaatcacacaaattacaaccggagcaaaaagtaagaccgggggcctaaggggggactaatacaataatgggtggctcatggcggtttcaacggaaaacggtggccatgattaagaatcccacgcgcgggaagccgttggtatgccctttccttctctaacaaccctgccggngtgggggggggggttttctctctagagggatggtttccaaattggttaccgaaaaatttttcaagccccagggcccaccaaggggctgtttttttttattctccccccacaaaaaaaactcttgggggggaacccaaaa

SEQ ID NO: 47183 - DNA, 1346 bp, Oryza sativa
  unsure (1)..(1346): unsure at all n locations
cgagttgcatgtcactctgaccctagaggaatagatgattggtcgccttggcaggtattgctattaaaacagaaatctgttttcatgtcggggtctgggtgcaaaagaataatgagagtttcttccatctaggttagagacaactatggcatttcgtgatttcagtgaaggggcacaccaaggggaatcacagcagcttatgatttgccaaaatcatgccgtctcaaactgtcaaacagcgcccaaaaggcaattcatcacgacccagaataatttctttcctaccagtcaaattataagcaggcattaaaaatcgagttttttcagcaggcattgaacaaatcaaattcgacagaaatagaagtaacttgctgcatcgaatcataagatacatttttatgtcaactgctaataagttaataataccatcctgctgtttcaatcctaatattaatagctatattggggcttcttctcttttctttgagcaattgaagaaatgattaaatgaatttaaattacagcacctactcagccttgtagcccgtgcttgatgccagaacagcgagtaattaaactgacattactacaatcaaagtaaccaagagttgtgttgccatatatgcatttntcttagctcgacaatcaattctcatatgcagcctcttaatccaaaacgtggcttgaataccaatctaagatgcttaacgattgctcagacatttgagtgtcaatggntgcttaacagacacaaaatatgttagtgcacgaccattgatctcttgccccttggagaattcaaccgcttnacctcagtagagtggccggagccccttcttaatcacccggttcaatagaagagtgaattttaagtgatcttcagtgctcacaaaaagtacagtagatctttatacaccagggggccaatactgttggaaggaacataagaagcaactacctgaccgcctgtaagttctgcagggcaactattggtagaatttggaagtaatgaactaaacaaagaaggttttcataaaaaggaaaattggtatctctaaagtcgacccgcaggctgcaagctggatattctatacgcacctaaaagctggcgaatcatggcaaagcttgttctggngaattgtatccgtcacatnccacaaaatcgaccgaagcttaaaggtaagccgcgggccttatgaggacaaactaattatggntggcctcacggcgcttcaangggaaacctgtggccattattatgtattccacacccgcggagagcgttgctattggccttcccttttctaataaatctgggcgggggtggtgggaaaggtatacaaaaa

SEQ ID NO: 47184 - DNA, 875 bp, Oryza sativa
  unsure (1)..(875): unsure at all n locations
acagggaggggacagaatgaggacagaaaggataagggttatatcgcaacgcaagaatctgtaaaatggcagacatcgaacgttctcaattnnnctccccccccccaaaggccttgatgacgacccatgnacagccngcaggnnganaggagaggaaccccagcaacgaaagacacgangaggcccacnccaggacaaggaancnggacaacaactcattccatacaaagaaggtaaatcaggggagggaggtagtaaaatcaacgggaaaagaaaaagtcaaaatcttatcggacttagcaacatcgcagagagagaataacaagggaggaaaacaatccacataaaacagtgcaaaactttgtattgatataacaaaaaaaattacaagatcatactcccgagagactacgtaagggaaaaaaaaaagccaagccacgtcacgcgtctacaacaagacatcactgaagaggagcaagccacgacacccccccccccacaatcccataaccatccacgcctttgtgttgaaggggaaaacagggagagaaaagaaggaatcttctccccccggaccaccgcagctagcaagggcaacgagagactaaccagggggccaccggagagaagaaaaccgccgtagaaaaaagccttagaaagaaaaagggggaaccaaacaaagggcaccaggggaggttaagaaaacggaggatgccgacgggcaaccctccccgaaaaaataaggaaggaggtttgggccccgaaagaaacccatcagaaaagagaaggggagaaaaccacggaaaacaacacccaaaagggggggggacccccaagcagagcccgctgggggaccggcaccgaaaaaggcgggg

SEQ ID NO: 47185 - DNA, 814 bp, Oryza sativa
  unsure (1)..(814): unsure at all n locations
gactggctttgaatgctattcagctccnacccgacctactgatccaacatcaccgccttctgcaacggctaggacggctacatgggagccgtcccacttgatcccatcacccccaacctcgtcaatcccaacttcttcgacctcgtcatggccaagaagatgccgctcaccgtcgaccacctcatggggatggaccgaggacgtcatccggatcagctcgctaaacctcgaggagatgatgggctcctttgagccggccaacgaaaggccccttccatcgtctcgaagtccaggaaggtggcagcaggcggcgccatggaggaaagaatggcggccggtgaggcgaagacggttgctacggacactgagaggaagccaaccaggacggcgccgactgtgaggaggacaacgtcggctgaggagaagacccctcctagcgtctacaggtcggcaagctctgccctttttcctcgccggccactactcgtcctcccacccttccagccgccgccgcatggatcccggaggaggaggagatggggaggccaccgctgggtcgccgcattggggaggagacagcgagattggggaggaggactggaggagacgtgggtcccaccgtaaataatttatttttaatcgaacaatcacttgcatgggattgagtgagcttccctaaacccaggcagcttggtaacgactaacaacatatcatcttagctagttggttgtaattattctatttactatgcccttcatcccaaaataagtttatttttcacccataccatacatgccaatataaaaccaagag

SEQ ID NO: 47186 - DNA, 1213 bp, Oryza sativa
  unsure (1)..(1213): unsure at all n locations
agtgggtatgctaggatgaccttccatgccctgatcaactctagaatcaataactccacacttccgcatcatgtcttcgatgcatacactgtcatcttcaattctttgcataggagctagacaagcaaaagggtttttgagcaaatagtgaagatcaatttaacagaaatacatgttaaatataacaaaatttgtgtttaatgttaaaactatagtaaaacctataacaactgagagactagaattattgctcatagcagttgttacattcttgccatgaaaaccacaagggtataggcccctgcaataaattgctcccacagagttaaaagtctctagagaaagatcatatggacacataacgtcacttatcttcctttgagatggagttggaggcaaatgggtgtgctctacacccatttccccactcccgaaaacatgtttgttgtttgaaggatcttttgtaaaagaccaaggtattttgcatgcgtattcgtaggctacgtagattgatctcatgcactcatgtatataattattagaatggattataataataattttcatttggaacttataagatggtatagtatatttatttgaaagttgccaaacatgcggnagcacacatatatgtactatacaaacctattggggttcacactttcactaactaaattgtgcagttatgtaccagttcgtatttacacttgcatgagaacaaaagaattatgactacttgagatgcttccaaccgatgaattaacctttttttctaatcaatttggagaaattgggtcaatttgaagggcaaactgatgtcacccctggattcggtgcattaggttcttttcttttctgccattgaacttggaaaagaagattgcttttcgatttacacggttaaaccgtttatatcctacaaaaacaattggaattaccccagagtaccctggcaatattggccctctgcattggggcagggaccaccgaagggcggattattggtttcttagaacccaccattccctgttttataaataggcttttaggctttgggtgaacctggtaaaaacccctcttgttacccccattattctctcctctaaaaccatttgttaataggtttcccaactctacctcaaaattcgataggcccttttttgtttggggaatttcaaccttttattgaaagaaaacaacattttgggtt

SEQ ID NO: 47187 - DNA, 3527 bp, Oryza sativa
  unsure (1)..(3527): unsure at all n locations
aaaccaatgttggatgctcaacacttgtttgggcaatggctaaatgttattgacaaatctaccaggaatttggtggtaattgggtttgcagctgtcatatgggctatttggaagactcgaaatagagcttgttttgacaaaaaaactcccagatgaccctactgatttgatttttttggcatgtcactgggttgaaacctgggcaattctggagaaacagaaggcaaatcgaagaaacttgctgttgggtgccaagctcataaggcgggtgacaagtgaagtctaccaatcaagatttggatggaggatcaacaacaggaggcttgagaactgatctgcgaagactctgatggcgcgtctggatgtagtgttctgttctttcctctgtgtgttgatacatgcttaatccttttggaggacgcggtgcctctacttttgtaataacaatctggatggtcgttttttcttttttctggacctgtactctggtaatctcatttctggtaatggaaatggggggaaaccccttgctcaaaaaaaaaaagatgcaaaaacatcttggttgttctaggtattgttcaaataatcaagtgttcaaataatacacctcagaaaaaaatcctgatgaaacttgaaaccaaagtttcagtaatttgaagcgtgcaaactaatatcttcttggttgttctaggtatatccgttatatttgtgtcattatctaaaaaaaataaaatccgtatatgtgtgttgagtgcaaatcaatctgcactaattaatcatgtgcctgctctgtttggttgagggtctaatctgcaaaccaatctgaaccaaatcaatatgtaccacctctcgctcggtggacgtgttcgctgcaacagcaacatctcaacagcaattaaattaactagaaagatagtccgcacaaatgcacgggcttgtatcttagggtcggcttggaaggcttgtataccatcaaccagattattaatacaatatttcaaaattatgatatgtttgaaaaaccttcttaatcggtattgcttgggtaactttttctaagctattcgttgccgttagactatacaattcattcgtaagcaattatctatgagctggtttatcatccaaaagaaaagaaggtagacttagtttgatttggaaaataggtaagtgtaaattaaaagtaaagtgcttgtttattcaaacggaatgtttagaggctcactcttttttaacatcttttctaaaactgttattgctaataattatgttttagttgttccatgaagttaaccatccctcttactggttcatattgacataatttagatacttatctagaccctgcttcgttacaatgtgtgagacctatagattttttttcaaaaaaaacatagtcaacatcaagttcaataaaacttttaaaccaattatatatttctaccttagaaggttatatgtgcatgatgtagagaaactaataacaccaccatatgtgattgagtgaagggtattagaatctaagcactaaaaagtgtcgcaatgatacaatggttatggtaacaggtgttccagttttggtgaaaagaaagaaccaaatttttctaaaactttataataatttctctaattggtttgctttactccttattggcattttctatttctttttttattttatgcaagtattatttttaagttcaaatgtcgtgagatgataaataatgacagtgttacaccttaggtgtcaacttaaaaaaaaaatcaatcatcttttatgtaagcagccaagattgatatattttatcgttgtttattaatgaatagattgggcgtgggacgtaaggctacgctaaattcatggtctcttacagtgtgggaaacacccatttgggacccatttgggatcgattgaagcagcaaagcgagagcacaaatggctaaatataattaaagatgcatcattacttttgggatgtgatttttataacgcctccctaattcattcttcttgtttttattatttgatcatattttctgaggaaaatcacgaaccaattggattgtttggtctacctaaagaatcggatttttttttatgttatgctttgtgctattcatatttgagttaattctttattttccacatagtgagccccgcaccttggtgtaagaaaaacacaaaacctatgtgcacctgtcttgtaaccaatggtgaaactatatatgcatgtttgaagaatgatgtataataacataatatatgttgttaataagtatttaatttatttagatggcatacaaacttgcaaaatgcatcgtctataccacaataacatattgcttatatatagcaaaacattggatctaaaattgtcaattaattataaatagagcaacgttttagatagaatataaattagctgtgtacatttaaaattatggtcaacttaatactaaaattttagttttctctttttaatttgataacataaaataattaggaagagaaagagatggagatataaaagaattggaagaggaagagacagggagagcgtactgttcttatgtttttttctttttccggcccacggctgtacgaagtcacacgtatacgtatgttctttttttttctttttctggcccacagcagaggaagggattattttcttaaataatagatctaatccaatggtctaaaatatcggtctaccaatttaagtgaaaatcgacggtgagattatatagtgccatgtggcagtttaggagtgtttgtaggagtgacatgtggtggattgagagcgtttgtaggaagtttaatggacttaattatataactaggaaggtagctcgtgcgttgcgtaggcatctctatctttctgaatgttaaaattatgtatgatggttctttgtatgtattttggatatgaatactacttgctctactcttgaatagtatgataatacttcagaatcagtaacccgctatatctcattcttttaaaaaaatatttagcttgctttggataatattcaataactgtttgaaccattcactctatctccccctttccaacgattaaaattaaatatcaaaattaatgatataaatttgttatctgcttgagttcttgctaagtattattatttctaagatgggttaattgaatattctaacatgtagccttctagatataccaagttatgtatgcttcaagccaacgcgacttaaataaaattacatagatacttgatttaagagaagatttagtcataaaaaaatatttgtactggggttcccttgttgccttctcttaatggtggctcgatcaacaaaacacaaaaaatctcctatgggctctttttgtgatgcattggatggctggcaacctagtaaaactcaacgatagtcatccatacaacaaccctctaaaccatgcaacaggtcactacaacctcacctgacatggggatcctctagagtcgacctgcgggcntgcgacatgcngatnatcatttcaccg

SEQ ID NO: 47188 - DNA, 1882 bp, Oryza sativa
  unsure (1)..(1882): unsure at all n locations
gttataaagaacccccacttaaacaatagtttttataattaaaaaattgggtcaaaatttttggtggtagggccaaaagcggcctctttaaaatttaccgtaccattaagacccccaaacctttaaaagaagtggcccagagattctttaaaaggtatttggaggaaaaaccaatttttttttccctcccccccccttatttttctcccaagccagggggagtaaggtatcnccctttttaaaaaaccttgtcatgttgttcgggaaccaattgggcaagtttaaggaagtgggcaatgtttcctaaaaaacacacaaaaaagaccccggcggaaggttaagccttcacttgccccctggaggaaaaaccctccccaacggtgctcactcctcntcccctcaagagttgttaacccgccccccaaataagctcattgtttcaatcagatctgtccaccgcagtgaagcttgccaaccccatgttgccttttgccgcgtcaaccagcacgttacataacccgccatctttaccacctttcccctttggtgacaagctcgccacttccacaagaagtgatctcgtgcaccggttcatccccaaaagaaggaaggtagatggggtggagcatcaagcgccgctagatccagccccccctctcctccatcatggttagattcttgtcgccttccacttatttggaccagttggattcgccatgcccaactgccatcgccgttcgatttgtcgaaaaccgccacctgtaagaggagcacttccaaagctctggagcaacgcttgacactggtgagagggacactgagctctaccacagaaagagcccctcctcgtcgagagtaagaaaaagagagtgtgctcttgttgatcaaccgaggaagacaagaatgttaaggatcggatgaggatatttcataaaatatatgtaaaatatatatttgagttaatgaatacaatgacattgtttcaattaagcaaattgtagtggtatttttcaaagcaggcaaatccatttaaccattttctaatggtgtcatttattttttttgcgggatatgtaccagtacataagtacgtatgtacttaatctacgtatagttacgtgctttcttgtcactcctcttgtcgtctgcgagctaaacctcaagcttttgcttagaaaaataactgaaagcttaaattattgtacactggtggacaaaccttttttagtcccagttcacaaccccctatagtcccggttatgcaaccgagactacgaatccgggactaaaaatacccatttttagtcccggttgaaataaccgggactaaaaatggatctttagtcccggttgaagttactaaccgggactaaggatctagtcccggttagagttaccaaccgggactaatgttctttttttctttttctttaactgctgcttgcatgatttcgagctccacaaatcattcatattatccacaaatcattcgaacaccacagatcattcacaaaatccacaaatacatcaagctgcattttctttcttccaatccttccaaattatttcacaaattccaaattcttcccacaagggttccgagcctgcatattgcctataaggaggcggattacaataactgccggcgtttacacggcgggactgtgaaaacctgcgttacccacttaatcgctgtgagcaatctctctttgcagatgggtaatacgaaaagcccgaccgatgccctttcaacagtggcaacttgatgggataggaccgcctttacgggcttaaaccgggggtgtggggttaccccatggaccgttaattgtagcgctttagcccgtctttgtttttcttcttttttccagtggggtttccg

SEQ ID NO: 47189 - DNA, 743 bp, Oryza sativa
  unsure (1)..(743): unsure at all n locations
agctgaattgttatcngcttgccngcaggccgactttagaggatccccttcataagaggcctgcgagaagagatcagagataggatgtggcagcaaactcctgcttccgtggatgctgctgcccaatcggctctggtgcaagaggcgttgtataacttggaaatgcagagagctcagagggacccgtataaagaatgagatgccggcctctgtcgatttgctccggtgaactgtgggagtagtgctactgtgttgtttttatcatgtcgatggtctttggttcgattatgctgattagtttgaggaaggtccttgggaattttgggattcagttatttctagcatgtcgatggtctttggttcgattgtggtgctcagtctgaagaaggtccttaggatttttgggattcagttatgcgttgcttctgaagatcttggttagttggttagatgcgaattttcatttatctctttgaatggcaattctggggttgaagtattgctttttgcttaatgcccaactttaattaggtgaactttatgtttagctctcctggttctataggttttatatcgcaattatcttaggcaggtcggaacattatatattctatatttattttcatgcatggttctttgagctgtgcacattccttgggtgtagatgccggtattttaaaaaaaaaaagttcctttgagcggggcaggcctacttcccggaaacggtaaagatcatctgtttt

SEQ ID NO: 47190 - DNA, 1167 bp, Oryza sativa
attgaatacgccctcctccttgacaaccacctcggcaagcgcttgaccgccgaccgccggcgcgcggatgctcactcgtcgcctgcgcccgctcgtgtgccgctcctcccccgccgcctccgcttcgccggttgccgcgctctcgcctgcctgccgccaccgccactccactttgcttcaccgaccgccgcgctcgcacgccgcctccgtcggccgccgtggcggcgccgccctccgcctctcccgcttcgccccggccgccgcgttcgcacgctgcctccgtcctccggcttgtagagacagtgagagagagatgaggaagggagagaaaaggggaagggaggagaggaggctgacatgtggggcccacgtgggtcccacactgactcagctgccacgtgggataaaaccgggatcaaggtgaccggttttgtatagttaagggacctcgtatatctggttttgcggttcgaggacgttttttaatcacgctgacaagttgagggaccttcggtgtactttttccaatccacatttgcaacaatcacggtcacatgatgcgcgtgtgttacgagcatggcccatgtatgtgacaaagcccaagttcatcagtctcccactctctttgcacccagcccagtccgagcaatttcttttacgttgggccgagcccaccatctcctgctagctcagcccacttagctccgcccccaacccccctccacctcgtagacgtgctcagttccggccgttcaccgccgcctccatctccctcctagaagcgcctccgccgccgccgccgccgcaaagaagaggtgtgtgtcggcgagcccctcacctgactccaaccgccgccttcgatggggcgcgtgaggcctctccaccacgcggcgagaaggctgctgctgctgttcccgcggcagagggccttctcctccgccgccgctgccgcgccctcgcgcgagccgctccacgtttgcgtcgtcggcagcgggcccgccgggttctacacggccgacaaggtacgggctgctacctctcttcctatagggtcctttctccaatttccccactgtaatgtagttgtcagatgacctgaaatccacttctagtttgcttctgaagatacttgcttgtgaaattattttagtctgagagcgtgtagat

SEQ ID NO: 47191 - DNA, 983 bp, Oryza sativa
  unsure (1)..(983): unsure at all n locations
ttatgatgggaccctccgtagcagtagctggcggaggcgcttggtggtgatgccctcgacgatggcgatgtcggatgcggggagggacgctgtgcggctcgacacgctcccctacggccacgccaatgcaaccttgctgctgctatacggctctcacctttacctcatccgcatccaggtggcacacgtcatggcaaggtggggagcgccgagctgaagtcagtgcgtgggctacttggtgtaatgccattcttcatacaggcaacactgcagcaggcgatgagaaggccaactacgggggtggccgggcagcttttgaccaccatccaccagccccgctatctcgctcctaccgccccgaaccatcagctctgctatcgtttggtgggaatcgattcctggccagctagttgatcgagaacaccgttccatacacaggtagagaaaccctttttactctcggttggggaaccctttagtcccaggtttccaaccgggagtagcaatccggaactaaagatgggcatctttattcccggttgaaataactgggactaaagatttagtcccaattgttgttaccgaccgggactaaagaggatagccaggtttttttttccttttttattttctcctgaatctgggtgtattttcttctaaatatgggtggtttgcatatcccaaatcgaagtaagatcccaaatccacatcacaaattttaaagttctaaaaaattacatcacaaattttaaagttctaaaaaattacatcacaaaatcctaaaaaaaattacacacaaatcaaattncntcncnggtttctncnnnttcnttcncntatccttcncngttcnctcgcngggtggnagtagagtcttaataacacgggggggggggagaggnaggggagagacggacgccacaacatattatgtataaaacagataggggagaaaaattattgaatctagttacacggatcgg

SEQ ID NO: 47192 - DNA, 754 bp, Oryza sativa
  unsure (1)..(754): unsure at all n locations
ccggtgacatgaaatgctcatcccgcatgccngcaggncgactttagaggatccccgctcaagtaaaattcttctaactactggtgcaatatgttcattcaagcactattcaacctggggaacttggaccatcaattgagaagataaaatagtaggatggggctgtatagtctaggactctagtagcatacaactcaaatatgacatagtaacttaggctgcaacataaacgcaaactaacagaagtgatatttcattcttgaaggtcacaaaagttctggaactgcatgaagcaaagtagaagttacatgacttctgcattgaaagagaggttgtctccaaatcatatcaaccatatcaaggtatgccaatctatccttaccaagctagctactcaatcccttttgctttggtctaactacaatatcataaatatttatgcaatgcaacataataacaaaaaaaatgtttcaaaagttaattcgtcagcaatttccttatgtgccataagccacacaaaggaacaacagaaaccaaagaagtggcaatagcaacagggaggtcttagtatgagtacatattatcatgttgccaagcccacaagatataattgacaagccaggattctattgcattgagttcaactaatgagccacaatcgggagtggaaacacaccactaactaaagaaaattatgaagtattcatgtagttttactatactgttttttcatgaaaaaaaagccacaaatgat

SEQ ID NO: 47193 - DNA, 895 bp, Oryza sativa
  unsure (1)..(895): unsure at all n locations
actccaactatggtnactcggnggnttatntggtttaatatttccncnnctcgttcctntcttctaantttntctaccactcaaaggtggataatantgtctcttattatatcncnnncnntncnnnnnnncnnnaacgcgtgaaattgcanatccccatngccgcangccnngcagncgaanctagaggancccccaagaccaaaancccaactatggcatgaaaggagagaagggaaagacgaggaggaagattataaacatgggcttttacatagagggggcatggcattatttatttatgagtaaatttcagaaaactgcaactttagtgacaaaattatcagtttgttgtaacaatagcgtgggaaattatcacaaaactgtaacttttacgttatatgctgctacagtacatataggtgacaactgtagcagcatataatataaaagttgcagttttgtaataatttctcacgctattggtacaagaaactaaaacatgtcgctaatgttgcaacaaactgatagttttgtcactaaagttgtagctttctaaaatctactattcatttatttattatattgattgtaatgcaacccaagtgccacggaggtgccagatgataccagtgggaactgcataggaaggtaaaatgaagaattggtatcgaaaattgagggaggttggatacatgaattttcgattgcgaggaaaacccaaatgtaatatagactttcttttccaaaactaaccatgaaatctttgcccagattagtctagctacaaagcactggccaagagttcaaggccagaaactgggtcactaagcgttgggcccagttacataataatgggccaaagcccaaagagggcctttcggaacttaaaacc

SEQ ID NO: 47194 - DNA, 755 bp, Oryza sativa
  unsure (1)..(755): unsure at all n locations
cgcgtgaagggtgagcnccctgtcacangcccgcacgtcgactctagaggatcccctggaatttatagtaggaaaaaaagaataacgaattaaaaaaggaaaacaattttagtttcctctttttctaattaccaattgaggtggcgaagatttcactcggaatttcaccaaagccgaccgattttcataagtttatcggtaaactctagggattttgactcaaatatttgtttacgaaatttggccgaaatctaccggcttttcatgggatttcacgaaaaacgctattccggcatagcccgaaacggaaggccatttcggaaccgtaaacatgcgtagtacattatatttgagagaaacctggtccaatggatgttacatggttgaaaaataaaactactactgtttggcgctacttaccaacccaaactaaacaaaaggaaaaggcataataactgggcttctagaggagtaatttggcttacataccctgatgttcactttaatctttaaaaaaaacatcgttatggccatcgncatcacacaccagtgattagctcctcaaccgacaactccacctccggcagctacatcgncgaaactagtaccacgccactgacaggtgggtcagtgtcgacgcaatggcccacccgtcagcgacgcggaggaacaagcccgtttcgtttgagcgaagtggtgccacngccgttgatggggacgcgtgtttaaacgttggagaaaagtcaccgcgtaat

SEQ ID NO: 47195 - DNA, 2093 bp, Oryza sativa
  unsure (1)..(2093): unsure at all n locations
ctcctcacgtagatgaaaaaatttaacttctttcttcggtccgtcaaaataatatatattggctatgggttagacacattccccccccccccccagggccttgatgactacgctcgnacccacaatgggcccgggggtatgctaagcgagggagagttcccttcatttcctcacacgtggctctacagcctggtcctacccccgcacctcgtgagtcgcggccacggctagggggcctcggggtgccacgtcatgcccctcggggtgccatgtcaggcccctcgggccctcgagttgccacgacccaaggccctccccagctgccacgtggcgggcagagcgtgagggagggggggaaccctaggctgagcagccatcaatgcgcggtgccccaaccgtccctcaccgcgtttaatgcagtaagggcggacgtgcggtaccgcgccactggcccgtgtcaaatcgggtgtgaccggcctgtcgtcggtcatgtccggttgacgcgcggtcacgcccccacgtcgcctgtctccggtggagtgaaggtaggtacgtcccattacatcggagcgtcatccggagtcctctccacatgaggaggacggccactagtcttcgcccatttaagggcgaatgacatagttgtcccccgtgtcagatgaggtgcggcgctgggtcccattgaagggccaatcgcggcgtagcttccgggcgaaggcatagaccacggtctggtcaaggtagaatgggcccattctcataaaaaagtaggtagaggcgatgcatgtgatatccccttggactataaaaggaggaccgtgcctgccgtaaaaggagaggacactgagtagacttaaactctagaaagaaaaggcaggcgagctctcaggagtttaggagcctttgtaatacggatccataattccatacacatgagtagggtgttatgctcgccaccggcaagaacttgtataaccccggtgcccgagagtgctttagcaggattcagggcggctacacaatctctccaagcgagcctcttcccccggccgaactcacaaaaagggggtctcacgatctcccgctaaagagggtaacccctcgacacacgggaaaaaaggaaaaaggaggagagagataggaaaattttaaagtggttgggaggaggagataggaatatcccgtgtggttgggttagaacgcctgcacgggaaaatcgatttttccgtgcgggcgacaccccagcgtcggttctttatttttccgtgcggtttcactaacggaccgcatggaaacaaaaaggaggacgtccaggataatcaatgttgtagtagtgtcgcgcccgcatataaacggagcgaggaagcaggagaagggaactccaaaactcgggtaggagagtagggatctgttagagctgatttttggactaaaatccctcaaaatcaattttgggaatcatataggtagactgttggtaatgcttggcgccaattctcagaaaaaaggaaaaataaaaaaataaaacgtacgtggtggcgccgatcgaccaatgaccttactatctgtgttgtacacttgtacgtcgatctccggtcttcaccgctcatcatcgatcgaccgatagcgccatgatgggcgtgcgcacgcggtgtcgggcgcgcctacctcgctcgctcgttgaccatccatgtccatcaacggagacgcatatgatttgttgtcccgtaccggccgagctaaaagctagaaggagaagagcccaacaaaatgcaagattattcagatttccgatcctggctaatcgacgctggacaaaactataaaagggccccgacgcgtgcgtgcgtgcgtgcgtgctgcaataaagcgctgaaaacgaggcggggagatggatggatgggggatcctctagagtcgncctgcnggcntgcgagnatgacgatntggcatttcaaagccgcgggggggggggggtgagnnagnanaagatcatgagantcaatgtacgttagcgtgaacgagtaacaatcanggaagcgagggaagcgagaatgtaagaggtatatacatagcgagagcgaagatggcgg

SEQ ID NO: 47196 - DNA, 1232 bp, Oryza sativa
  unsure (1)..(1232): unsure at all n locations
ttagttgacgcaagacacttaaactgattggatgaaaaaaaaagatgttttatctttggtgtggtcaatttgaactaatttaccccctttatgtatgcaaaacacattaaactaaccgcacatatgtatttaatagtcaccctaattaattacttattggtatatatattcttgtctaaagcatcaagtaataaggaactggagggagtaagaatttaaatgtgtttgcatcatatgaatgtatactattttaaaggaatatgttaatcctagatgtgagaattaatcatttgctattttggacatatatatcatatacataagagatttcacattggattgacacgtaagtgacaaatgattagcggcaaatttaaaaagtgataaatagttaaatgtccctacgttaaaagttagtagctagtaataaggtgagtggtggatctgtcaccatcccttcaactccatatttctttcttttaaggagaataaataaataaaagtgtaggatcaaagaatccacctaccaacttataaaatatatgtggagattaagaggtgagatatgtaagtgatagaaaaatgagtttaagcacgaacaatatgctagttccatataaaagttttgtatcaaacaattaatatagtagtagcaagataaatttctactataagcgcatatttattttattgcaactttcaaccttaccaaattttaataggataacagactaaacacagtcgacatcctatcattaccagtttgctaccatattaaaatttagtaactatgaaagttttctcttccaaaaacttcaccaaaattcagtaatgttccaaaccaaacaaatacaacgctatagaaatttagcaacgtaaaaatatgccaaattttagtatttgtaatgttgattttgataataaaatgacctggccctaaaacttgtagatccactgctaagataggtgttattctcggcttctgctagtaactatccgtcccaaaataagttcatttttcacatatttcacacgtaccaatacaaaatcagactaccctcattttctaaaatggggatcctctagagtcgncctgcgggctgcgacgatgcgcaatcattcaacctgnnnnnngnnnngggnnaaagaaaaaccatacccctaatccgtcaaccgaaacacgtaacncagttaggatttacccnataccgccgtagaccanataaccagta

SEQ ID NO: 47197 - DNA, 1387 bp, Oryza sativa
taaaatcccaatataattatgtctctctttatttattctctatccatttatcttctgctttcacaaaatttgatgcaataattacttaaaacaaatttagtttagaacaaaggacttaattaagctgcatggcgtggcgggcccttgcgggccagcaactaacatatccatctccatccaacactgccgcgcgggggggccctcgcgagcgtcatgatgggcccggcccgctccggcctgtccagtggcccacgcacggctcgacgggcgactctgaattactctgatgattcatcagatttcagagcgagcgagagagagagagatgcagtgcaggcttttttggtatggagccagtagcagctctctctctttgatttctttctgtgccgctttcatttcttaaccgcatgccttttgacgttttcccaccgactatctagcgacccgcccgcagccacactcctctagtcggtctctacctgcatattttcagtgctggccctgccacgcagcaccacatgctactcctgtgtgtgtgtccaggtcggtctggtcaacgcagctactcattgctacgagtactgaccttcgattcatcgtacataccctgaatattatacatattttgtggaatgatagtatgtgaaaatcgatttgtcttatataactagagccctccaacttactatatacaattaagcggatctctttatacatgttgaaagaaaatgtgggttgctaaaactattttctaatgggttaattggatccatatatactgtcgtaaccgttttaaaagatgttattacagttcacctaattgaaatagtaccactataacactcttaaaatcgaatgtgtgccatgatgtacgtctttttatctaatgtattttcgtatggatcaaaataccatatcttctttattcatccttcctctccctccttcatctcttcttccctcgatgcaacaggtggagctaaggtcatcacgccttcttcactaacaccactgctcatgctggttccacggcgacccaactcgtgcacagtttcatggcgagatcggacgataggctcctataagaaaggcagcaagagaggagcgacggcggtagggttgaggcttgcacctgtaccgctgtagggacgaagccatccccaacgctgctcactcctcctcctcctcctagttgttgatgccgccgccgcgatgagctcattgtttctatcagatctgtccaccgcagtgcagcttgccaccaccacgttgccctctgccgcgtcaaacagcacgctacatgacccgccatctttgacacctttccaccttcgtgacaagctcgccacttccaccaggagtgatctcgtgcaccggttcatcg

SEQ ID NO: 47198 - DNA, 892 bp, Oryza sativa
  unsure (1)..(892): unsure at all n locations
tctccgtttatatatttttaatttttgctnnnctgttcccacctttggcttttttttttatnctttttatctatcntattttttncnnncnnnnnnncncgggtggattcaatcctcatccccgcagccngcaggncgactctagaggatcccccccgctgcgtcgatgaagctgtcgccatccacaacgcccaggggaaaaaggagagaggaagggagacgaggggaaagagagagtgtgcgctgatgcggcatcctgacatatggatgctgactcagctgttacataggataaaaccgggttaaaatcatcgaagtacctattttaacctattttgattagttaagagacgccggatatttgttcttggttgggggacgattttgtgactggatgacaagttgagggaccttcgttgtactttttcctcccagtattgctatctgggccaagttctctcggtcctgagaaggccgtgaattgggccactgcgtgagtagaatttatctctccggttatgcgtgagtagaattttgccacgataaaaccatttggattagcacgcgtgattctctagaaatcatattgcaaggaagcagactatcatatcgagacgacccggcgagaacgagaccccgagaaatcatggccatatacttactgattggaaaccccgagtgagctggaagccattctctcaatcctgtgcaatgatggcatcgcccactgattcttacattaagatccccttaaattaggtagcctggtcatgtttaattttgcattaacttatcggagcgctggttgatcataacccgtgccaatcagtgaagtaatttatacatccaagaacactttccattggattttcatttcgtttcccctgccttt

SEQ ID NO: 47199 - DNA, 1602 bp, Oryza sativa
  unsure (1)..(1602): unsure at all n locations
agtggtganttagnagactcactcgngcaagccngcaggtcgactctagaggatcccctgagggacacaactaattttagaatcgacgataaattgaaggacctcaagtgaactaacttcgtggataaatccacatggaaaaagttcacccaaggtccctcaacttgttattgggataaaaaacgtcctcaaaccgtaaaaccagataccgcgagttccttaactatacaaaaccggtcacaataggttccttggtggtttgatcccgggttactcctaccgttgctgagtcagcgtggaacccacgtgggtcccacatatcaggaggtcaacgtatatctctttcctctcttctcttttccttcctcccctttttgctctctctctctcaggttgggccgacggtgagcggggctgagtggcgagaccatgacggtgctcgtgcacaccactcccacctcaccgatgccgcatgaggcccgatgccccgagcgcgttgtcccccaacaccaggctcgccgtctcattgcccgcgacgacctcgccgaggccacgcgcctcgtcgaccgctcacgcggggaggcacccggcgccgccgtcgctgccttgaagacaaacgccaacgtgccccctgtgctgcgccgacgtgccggttccggcgaggccgacgagctcgacgatggcgaaggggaagcagcagcaaaccgcggacagcgccttcctcctcatacagccttgccgccggcctctccgcctttttttttcttagtgccctccgccgctggcctattccggcgccggttgcagccggtcccatacactgtcaccgccaaccggtgggagagtgcatcccctcacccgtcaacgtccgactgactagtgcccggaaccttatttctctttgtacctgtagccgttgacgaacgaccatgggcttatcggatacggatgatctgtggcggccggatttttccctattccgaaggcccgtgctctgcccggccgtcccgcaacgggttttttatttcacgcgcgcaacgtccgtctcgttgtatcggggacctatatgggccgtgataaagctgtttctctcaccccacacgcgggtatggcgcgtttgttatatttctatctcatattgactatctgtatgtctgatgcatgatcttcgtccgtcgcgttctcgttctttcagatcttcgctttattcatacttctgcgattaactcacatacgtgtctcttcttcctcctctgattcatcttcttaatcttttaatctctctcttactcttatactactgttctttactatatattagtctctacactctctacacgttctcccggtatatgtctcttatctcttcgtatacgacctgaacacgatgtcatccaatactactgctcgtcatgatctcatactactcatcgatgacgtgtccatgtctcctcgatctctatgttatcctccttccttctcacctttacttgctgatgcgttaatcattactcatcatatctatacatattctcgtacctgtcttcactatgcttcgactacactcgtggcaacatctgattactacttcctcttcctccg

SEQ ID NO: 47200 - DNA, 696 bp, Oryza sativa
  unsure (1)..(696): unsure at all n locations
caaaaaaaatcgttcgtggcagctttgcaaccctagagcgacaggttatggcgttgtctaagccagctgtagtgcagattgcagaagcctactgtctttgaattctccatcctttttttctcttcttctatgattctatccgtagcacaattcaatgcccccgtagatacaagtatacaacacggaaagacaatctagcacgtcgcagcagagagagagaggaatcaatcaatgaacaaaaagctcaccctgtggacacgtgtcgggctctggaggcccccaagcgtccgcgtcaccaatctcgaggcggccaccgcggagcccatgcttacagcctggcaccggtagtgacgccagccaccagcgcagcgcgcgccgctcgctcgctctgcggcgcaatctgtgaccccacctggcagtgacacggcgcctccgcgaaacgcaacggctaaaacgtggaaggccgcggcggcgtcgcgcgcgcgcgcacgttgggacgtcggggagggaagcggccaaagccatagacgtcgtcgtgggcagcaagctgtgaaaaaaaaaatggccttcaaaattcgaagcggcgacgttatcgctctctcgtcgtgagcggngcgtcgtcggctccggtggatagtcaacggtcgacgcgaggatagttcaagagcggataatgttaaagaaatcgttgagatt

SEQ ID NO: 47201 - DNA, 9528 bp, Oryza sativa
  unsure (1)..(9528): unsure at all n locations
cgggagatgataagagataatcgttgagagaagttacagacataagtcatcgatagagtatatagatagagtgataaaagaatgagactatagtatatagtaatttaatatatataaagtgagagatagatagtgtactatcatgcgagaatatacaaatgtaatacgattntgttatacnccgcgcgcgcagactaacaaagaagaattgtgtgtggcgcggcggcgtatatattttatatagaaagaaaaatatttctcttcgtgcgggagagaaaataatcatattattgtggacgagagagaatataataatttttgtgtcgccgcgttcctaattagaagaggggtgtatgttttgttttaggccccaacacaaatatgtgctctcttccgcgggtgtaggaggcagggaaaaatttatgaggcgcgggtttgtttaatatatccggtttgtacccagggattatcctttaaattaaagcaaaaaatataaaattttgtgaaaaataacacttaacaaaaactgttgttgttaaaacaaaggaattaaaagtttttttttaaaaaaaaactttttttcgaagtgtatagcaaataacccggtgaataaaatacagtatatctgatatatactccgttttgtcttaacatttatcatcaggacaaacaactcaaaagcaaaaaggcaaactatatattccatttgtttgttcaaaacagcgactagaggtagtatatatattgtgaatatcattcgatcgatcaaagtgtacgttagtttcttcgggttgttgtcattcaattacatcccgatcgatgaatcgatctcgctcatcggttcatgacctgggacgaacatatgcatgcacgggggacaggccagctgaggaggactagtttgaatctcaaagagaagaaccagactttggccttcattttccctatttctgtcttgcaagcaacgctcttagttgcaaggagtaccactgtcgatctgccagtgtgcgcaaatacaggcagtagcagcttgctattaatataataatctggtctggtttggtctggtcaacttactaatgattaactccaattgattgtgcccgtactccaattcagcttactatgacagtaaggccttgtttacttccaaaagaaaaacttttcacccatcacatggaatgtttagatacatgtatggagtattaaatgtgaaaaaaaaaattaattacacagtttgcgtttaaattgcaagacgaatcttttaagcctaattgtgccatgatttgacaatgtggtgctacagtaaacatttgctaatgacagattaattagacttaataaattcgtctcgcagtttcctggcggaatctataatttggtttgttattagattaccgttaatacttcaaataggtgtccgtatatccgatttgactaccaaacctaattttttttctcaactaaacaaggcctaagtactgacatatatagtagtaaatatgtaggcccgttttgagttggagtacaaaacataccctaccataatttaggtaatttgaatagcaaatgtgctagtttagattgaaaccaaatactaattagtagtgcccatgcttaatattcatgaagacactactataaaaaaggcgggccaaatccatctttttaggtggaccggcgttccgcctataagcaaacgactgtgaaaatagataattttcgcaggcacctacgaaaatcaatttttgcaggcggacggcatcttcgcaggcggcagattcacctgcctgcaaagcaaatttcagcgaataaaaaaaagacgccccaccgcctccgccggcctctccctccggccgacgattgctctcctcctccgtccgctgccgtccccacaggggttgccgccgtcgtcgcatcatcgtcgtcgtcgtcgtcgtcgtcatctcaacgtcgttggcgccgccgtcgtcgtcgtcgaggaggaggaagccggcgatggaggcggagccgacggcgaggaggggaaccggcggcggaaccagggaggaggggagccggtggatccgccgcttcacggtgccgcgaaggtcgtcgtcgtcgcggccgaggggagccgacggctcgcggaggcggcgtcgtggtcatcatcgtaatcgaggagggctaccagcggcggaggcggggaggagttgagccggtagatccgccgcttcacggcgccgcgaaggttgttgtcgtcacggccgaggggagccgacggctcgtagagacggcgtcgcggtcgtcgtcgttcatcgaggagggagctggcggcaaaggcggggaggagggcagccgatgacggaggcggaaagaaggggagccggtggatccgccgcttcacggtgccgcgaaggttatcgtctcgcggccgaggggagccgacggcgaacgaaggcggcgtcccggtcgtcgtcgtcgaggagggcagccgccggcgtaggcggggagaagggcacccgccgccgaaggtggggaggaggtgagccaatgggggatattttttttgctaagtgtgtgagggagaaggagagagagagagaaggggagggaaattagtggtggagaggagaagataaggatggtggaggagaggataacgatgactgatttttttttggaggcatgatttttataggcggaccacataaggttccgcctgcaaaaatcatatttttccaggcggaccacttaagaggtccgcctgcgaaaataaaggtatttttgcagaggtccgcctggaaaaaatgattttcgcaggtggatggtgagctccaccccgatttacatttttctaggcggccatttagctctgagggtcatacccgcctggaaaaataaaaggccaacgttgctaaaaaccatttttcctagtagtgagatgaagctagatatgaatttttttaggtaaatctgtatatgaatcttgatagaactgaatacactttcttaatgttcttcccagttaaatgcagaaaatatatggatacatacacacgtttgttgacgttttgataatagagataaactgaccggtgtgaaaaccagtatcattctatagattaccataggactttggggaacataatattgtcagatgtacatgtccccttctccttttccacaacggcttcatgcatgcatatggtccctagctatctacctgcagtgcaatgttctgcgtgttgctgcatatttggatgcgtacgtggaccaatatatgcagacagtgtgcacacatatattgtacgttcagcacttcagctagctatatagacaccaattcgattgatcactgtgatctgatgagccaatttgccactgtgcatgcagctcaaggcgcagaagatcccattaatctctgatgacttaagcttgacgattgcatgacgtggttacagccattcccgctaataataagcaccaaggtttggagctaaaatttgactttgttagagtgttcgtcatcataagcgccgacgaccagtgattagtagattcttgggaacaaaatgataaggcttgcagctagctatgcattactagctgttaagctacaacaacgcaagtagtagggtacaatctctagcttaattcgataataaattaggcattcactattcataagctagctatccatgtactcctacaccttttacaaattatgtctagtttagttttgtccataacggaagccatgtagcatgtcaactgcagaagggccagcatatgatctaggggttgcagtgacctgagtagcatcccaaggttcttaattcaaatctttataggaacgaattttagactaggttatttgagggagtaagttctcaatttaaaaggctgcatatatccgtatggtaacatggaaaatattatctccatcttaaaatgtagctatttctaatacaatatcttgtcccaaaataaaattatttctctacctacctccttctctcaactaatcacaatcattctccttcacctactttctttttaaccaatcacacactttctctaatcattcttacatattttcttaatacccgtaccaacctagcttgaaaatgtttatattttgggacgacgtaagtatattgaaagtttctaagttcacattttgcagtatttttcctaaaaaaacttatggaataactaacattttttctctaattttgagatagctatcccaaaattaagcaggggccttagaacctgggcatgcttaactaagtactatataattaattagttaacagccggattattatatacagtctacatactgtaatattcaaattagataattatttgtttggtgaatagcccacatgaatcacatggactacagctaatttctccttgaacaattatttttgtactttaggtgggtactatatctttgtgcggtcactctccggccctaacgcaacatcacataggacagaaaataatttggtgatctccgaaaaccccatcagagacaaaactataaatgcatcctcctgtatgtctgacagactaacaggacaaaataactgcattgcgatgtgttcatgaacacaatataatcatagaaaacgaaagttaggaagtatatattgagaggtttgacaaattaactcacaaacatgaggagctagtagctataagcctataaatatgtatgcattgtccgtagctgttttttttccttaataacctttacatagacttttaataatctcctacatttatctgatgtgagacacacacctatacatatgccatctttaatttgattgatgactcatgcacactagtagcactttacacatatgattctttccatgctagggcaaggacagtactggtagtactatactactatgctacacctatccagaagagtttgtaatatgaaggacaaggcaggctagacaaagatttggtactgtctcgatctcattcatcatcatcatcaacaacaaagatatgtgttaattccatccctaaaatccgcaagaaattggctcggtgtttgaggcctttagtttatgcatccctaagctgcagaaaagagaggaatgctaggaagaaagcacaaagccatataaagaacagttgtgcatgaaagacgagaaaagatgataagttcaggccgtctgaactctgtagagctagctagttagctaggaatggacatgtcagccaggttaaacttagccttaaagaaacttcggagtaatttaatcacaaggggaacttcagagtactacaatttagacatgggttaaacgggtgccgatcgaactgccgatttcagagtaatacatatagaatatagtagtagtacgtatatcgagtgtgattctagctaggatttaggtcaattttgttcccatgcatggacatatatactgcccagattaattttaaaaaccatacaaaaatgctggaattcttaaagcttcattattagatgtgttgtaaagcttgagtaatatatttatttttatgagcagaaaaatctgaggcatatattaaggtgtgttaggtatagtccacatcaatagctaattttttagagcacaacttaaaaggtaagaatgtccctccctagctagtctttttttttttgaatcgttggtccgtggactaaacatgaggctttttagatacactaacataatttcacaagaagatatatcataagaacaagatgaggaccgaactttgtgtgtcaaaagaaattgatatcaaattttatgtttttctctactatcttaaaaacacattcgttctcctctttccatcctaatcccacatataaaaaacccgctccaaaaaatggtgtaaaaaaactgaccaaccaaggcctgtgtctagttttaagaaatcacaaactttatgttagatgcagtactcatacagtaaggccctgtttagatcctccaaaatggtaaaagttttgctattttgtagcactttttgccattttggatctaaacactagtagcaaaagctggcaatttggcatttggcatttgctagtccatagtagcaaattgtgtcaaaaagtgttttgggaccactccctctcactttagtgctagaatggcaaaattttaacatgcatctaaataccaactagtacttttgcaatgccaaaacttttgccatttgccatttaccattccaaatggatctaaacaggccctaacttatgagcaagaattcctctatcaatcagaccttgttggcccatccatgtatatatattgcttattagtgcagcctttgttatagtactctctccaatcaaaaaccaaaagcttaaaccctccatatcttcctttagttaaggctattctttaaagcctggatgcaattccacacctttcactgacccatttcttcacaaaagcaaaagtaggcccaaaaaaacaaaagggatgccagggagagcagcagaaaaaaaaagggcagccaaggaaaagataactagtaaaggtggagatggagagggagggaggcaaaataaaacacatgacttctttcaagcttcttccactcctccactaataagttcttatgcccatgagagattcccttccctccaaaggctcatatgctttctccctcccccccctctctctctctctctctaaaggttgacctcaaggtgtaaaaggagatcactagctagctgagagagagagcctgtggagagagtgagcaaaagctatagagagagagtgagtgagagaaagagagatcaagtgagtgctaccttgttgcttggttgctagtatagctagcttgcttgggtggaagatcatatcagcatatcaagggagagggaatatggataggggagtcctccacaaatcatcagctctagtgggggagatgggggaaggccatggatggtggagtgtgaataatttgaggcccccctttgttgagcagcttcacaatccggcttctcttttcttgccatcctccaccaccacctccactactccctcttcttcctcctctcccctccattccttctcctccctgctgctctcgaatcactatcctcttccttctactgcgacgacaagcaccgccgccgcgccttggcacgacaccggcagccgccacggccaacatctccaggactcatggaaccatatcttactgtaattcacacacacacattctctctttttttatttatatgtttgtaattgattaacttgatattattcttggaaatggtctgtttctagaattcttctgaacagctacatgaaataatattgtgctaaaaacctcatctctccctctttacatggtcatatatattgtgatcatccagtggtggattggctagtggtgaagaggggtacaacaagaactgggaaggccaggtgctgttcccaactacaccagctgcagctgctgcagaagctgatcatgggagcaacagctacaacaacatttacagaccaccacgactagccatgggagcagcacgagtgatgatgcttcccaattggcagtggctgcaaggccgtcgtcttctccatggggtggcatccatggccatcacccccaccacaacgccttgcagcagcaagcttcctcccctaggtcttcttgcatcacctctaccacctcccttggaagcaacggcgtgctggagttctcaaacaacactttaccacgtgaggtagggacaatcatcattcaagataatcagtctggtaatttttgtttgtgtgtagattattttaggtgcttatcatttactgaggagtgagggtgggtgaaaaagtctttctttgaggaagctcatcatcaccttttggatggttagaaagagagattcaatactaatagctttgtgtgggtagataaccatgcatgaaagtttcactcctcctggaagcagttaagatagggagccatgttgataattaattagttatgtatgaaagttttgtaactttgctctccatccttttgtgtttctcctagtgcatcagcacagcatctggagcagctttcaagaaggccaggacccaagaaccctctccggctcaagctacagttaaggaactctctctctctctctctctctctctctctctctctctctctctctctctagatctctcaatgagcatggcccaatcaatcagagcaatctaagctagcactgaagcaatagtttgcttgctgaaacggacaggcatggaatcattgtaggttaagagataaggtgagatggggttggagatggaaatgatggcgttcttaattagtatgttttgcttgtgctttttcttcaggtgaggaaggagaagctaggtgatagaataactgcccttcaccagcttgtctccccatttgggaaggtacatatatatcactacatgcatgttattagtctttagcttttagatttcaacaatgggaagagaataattgtcactaggctagtagaatataacaactgagttcgttgatctggtaaagtttcttaattatacaaatgctaagtgttcaacgaacagatggttatttctgtaaggaatatatacaagaaaaaccagttggaaagacaatggataagacaatattataaggtgctatgaccacatatatacaatgtcaagtagttcctcatttagcctcttctgagatgagctgtaattttccggagaatgattagaccttgtacctaatggatatgaaaacggaaagagtacgtatgtgcccatgagtatggcacaccggcttaattattactatagtccaatacatcaatgtatatataaatttagattaatgtaaattattcttatttctaagtagtaagatctgttcctacatatataattaagtctcatttattttgttcataaaattacaaatatatatttcagtgaaacaaaaggaaaagacaaaatagaagttaatgaaatttgaggggaaactctacttgagattatctgatgcggtgatgatcatatatactccctaataaggtatctttagctactctaccggaggaagaaagtatatatattcatatatatagggggatgaatgaaactctcctagaaaaaggagaatcttgtggtgaaagaagtacttttggatccttggttttaaaccctgatgggggtgaaccgtcctgttttttaaaaaaggatccattttcacagaaaatcccaaaaaagacccggcaggggtacacccttttttatccaacgaactggggttggtctcttgaagcctggggccacaaattctcacgggcaatgggggccaccttttttccctcaattnttcaaaaaattttttcttcaaggagggggcctaccgcgaaggaaggcttataaagaggctcccttttcacagagggggattccctcccccttacgggtgagaatcgcacatatttttttggttccacctcttggggggagagcacactccttgggaggg

SEQ ID NO: 47202 - DNA, 3533 bp, Oryza sativa
  unsure (1)..(3533): unsure at all n locations
agtttgttgttctctagagagaagaaagtgagttataataatccccctcaacggtttcccccttgtggaggtaatatacccccagagcgtaattattttcatctttgtattacacaaggaagagaaaatgtcgccgcacataaaaaatacaacatggcgtcgtgacgagaagattttttaaaaacaacgactagttgtctacgacagaaggtgtttttctctagagtaaacacatgaacaccatgtggaaacgccatggtatccccatattataaggtctagtgacacataaataacaaggcaaatgtgtcccctcataacctctttttaaaataaagagatatattcacgagaagaaattaaacccttatccacttgtggtttttaaacaggaaaaatgtctgtttgtgtcccattaataatggccccccgttctattttttttatatggcacatccgccaaggatatataaatttaaattaatgtgaattattcctatctataagaagaaaatttggtccccaaacaaaaaatagagttcaatttatgtggtcaaaaaattcacaatatatatttacgttaacccaaaggaaaagcccaaaatagaggttaattaaatttgaggaaaacctctcttgaaaatattttaatgcgttatgatcataaaaactcccaatttagttatccgtaagctactttaccaagaaaggaggttatataattcaatataattagaggaatgaatgaaactctctatagaataggagtatcttgtggtgatagtagaacttttgtatctttgtttttaacccctgatgggtgatgaccagtcatgtagtagtaaaagaagatccaatattccagagaaaaatacaaaaaagagatcctgacatgggctaacctctcttttatgccagactgacactgcgtctgtactccttgaagccattgggtacatcagattcctacacggtcaaattgaggtccagctctttctctccctctcatttctctccatcatctctctctctcctccatgcatgcgtgcccatacctgcagagcagctagctctatcaaataatgctactccctctctttcacaatgtaagtcattctaccatttcccacatttatactgatgttaatgaatctagacatatatatttatttagattcattaacattattatgaatgtagaaaatgctagaataacttacattgtgaaacggaggaagcagaatccatgaatcataaagtgtttgtttcttggttattgtcattcgtacatgcggcaggtcgttgttcacttttgacacaacatatatacatactttctggagacagctccattaattgcaagtatacatactttgacataataacatcttaattgaaacatttcatagctagggttacaagcatgcagagattagcttagcttagcttagctccatgaaatgatgcatagtagattgatagagtaaataatattatacagtgatttgatgtgccaaagaaggagctagacaggttgaaacaaaaagaggcagggctctactatgcaccaatgcatgctctctcttgcatattacagatactaaagctgcatatgtagtatatgtgcctgcgttgccatagctagacctatataatcccggtcgatccgtgcatgtgtgtttatgtttatactggcttgtcgatctgatcgatgcagcagcatatgcatgcatgcagatggtcagagagagagagagagagagagagagagagagagagagagagagagagccaggatgcaatctttttagcctgcctgctgctcatctcatgtaaacagtgcttgctctcgcttgctttgccttttcgcaaaagcagccacacgttgtcctcccctgtgctgccacaagccatcacacaccttttcttttcttttttttcttttttttgcccctcttaattagcttcagtacgatactccctccgtcttaaaaaaaaatcaacctagtactaaaatctttatgtctagattcgttgtattagtagaatgcgtcacatcgtaatacgaggtcaagttttttttagaacggaggaggggagtaccacctaatactactaccatataactacacacttacattaaacctaattaacgaaatttctcactctagttaatatatataatctccgacgacccatctcatggtcatggatctccaggctctgagctcgccgtaccttggcaatggcggcagcagcagcaatggtggaggtggtggtggaggtggctccaacagcaagctccagcatcagccagaagccagcagggtgagtatatagctatacaatatctactgtagcttatatccactgtgcatgcatgcctgcactgcaaacgcccccccacgcgcgagagatcgatgtgcacaattcccgacgttggctgcagcagcaggggttttttttttctctcatcatcaccgtgcgtgccatatccatctgcacgccttccatccgcggttcgcatcgcatcacatcgcatcgcatctgtatccttttgcgtttggaatggctttgaattggcagctagctgggtcaacaagggtgaaagggagcgtaagtattggcagaaaatatccaggcttaatttgcattgggtcgtcgttgcatctgctgctgctgctgcaaatctgcaatagcagcagcctggtcttttttaccgtgggcaaggcatgcagatgcagatgcaggcagcttcattattgggtggcggctgatagataggagtaagtagatcatcggaatgaatggtcgttggtcgttgttgttactttgttggcgtggtccaaacgtaaccacggtccatatatataggaaaaccgttttcgtccttacttagttgttgtagcattattttctggctcatatatatatcgatatatatggttgttggtacgttggggggtcgtcgatcgaactcagatcgatcacgcttcaaattaagcccaaacacattattttaccatatggtgcaatctatcgtttgtttcttgttgtttttaaatcatatcatttcaatggtttttaaataattatcgtgtgaaaaatagacacattcaaattaagccggcacacatacaatgcatggggagtagggaatgcataatgatgggggggggggggggtaaaacacataaaatgtcattggagactactatagtagaatattgagttgcatgcacccttacgcgaggcctcctcaagccctttagcatgaaatagagcgctaaccaagatttgatctcgagatctttggatctgattgcatattaagttgtgccccaatcaattcaaactaaaagccccaactgattagaaaaagcagacaattcactttatattcgaaaaaaaaacacactctctatatatattggttattaacactagccactttgtagaggattaacaaaaacattggggatcctctagagtcgncctgcggcnatgcaagagtgagttcctaccgtgcacgc

SEQ ID NO: 47203 - DNA, 692 bp, Oryza sativa
  unsure (1)..(692): unsure at all n locations
cgcgtcacnttanagacaactcagtcngcacgcctgcaggtcgactctagaggatccccgtactagtgtactgctacatgacgggtcataccagcgtactactaccacagtccacagctcagctcttagcaagatgctgctatccatccaggacaaaaggcaggcgctgtagcacacgtagaccacgccgggtttcagggttgcacatgtgtagagtaggtttgacccccggactcgccgtttcaccatgagctactcctccagcactgtagcgcaggacattgttcaagcttggggattgaacgcggacaggcatcacaggccaggagaacaatcaaaaccttaaaccaaggcttaatagcgcgcattgaagaaacacacctaatgcaagaatagcattgaaagggcaacaacagatcggcgaagcatcatgcaggccatgcattatttggaattgaagcacttgccgttgggaccagacagtccctccagcttgagctttggaggaggaaggggaccaatggaccattggtcgcgcagcctgggatggttgccacagcttccagtttcagtttcatctcctcttgttgctgctcccattatttggaccacaaaaaggggaaaaaaacatgcaggtgctagaagtatacgtatgtatgtacatctatgctgcacaagtagcataaaaaaca

SEQ ID NO: 47204 - DNA, 1193 bp, Oryza sativa
  unsure (1)..(1193): unsure at all n locations
aatgtttgatgcatatatgcaggtttgaaaaacgtccatgtcttcatcaaggaggctgatcttgtgaccttgcctgcagatgaagtttgtacaatgacatgaggtgtttcatgttgctactggacctgtaactgttcttttcgatattccattcctggactagagaacctcaatttcctaatatttaaacttcatanacgaaatataaacttactcatctcatgtttggtagctactacaagtgaccttgctgtcaacattgatgccaattttggtgtttcggaattgttccatcccaccttcttctcttaagggtatctttgctttgtgattggngataggagcaaaagcacatctgtattgcaaggaggaagattatggaatatgtagaattaaaaagagagggtgtaccgaactacttatctaaaagcttgcaattgcgcataaaaggaaagaatatataatggccaacaaggagcttcacttttgtgtttttaagagacctaccaaattttctccatcaaaaaatggtgtgacagttggtgccgcgcaacttgaaaagacttgtttaaaaggtcagatgttagaaaccaaataccatatctttgcagactttttttaacattattctgttggttatatagatgatggtgtggctggaaagcaagttccacactggaacctggggaggttgaagaatctaaaatgtggggaaagagttttgctcaatactctcctgagttttttgtaccagccacgtcttttggggttccctagaattatttaataggattttggggcttcttagaccggattttggaaaagtattgattacaatccctgggggggcggagaaaaatataataatatttcttttttttataaaaggcctttaacaaattttgttccaaaaactaataatatatttctttcttaggaggtgctttaaaagagaatatttggggatataaacaaaaaataaaaatttttttctccacaataatggggagaaaaagagagggtttnttttttctttgggcttcctccacccacctctctttttttcttttgggtggccgaaaaaaagggaaganataaccttgggttataccaaggagcgtgttgggttgggttatcataaaactttctacaaaaaatgtgaaatacagacgggccccaaccccttttttttt

SEQ ID NO: 47205 - DNA, 1141 bp, Oryza sativa
  unsure (1)..(1141): unsure at all n locations
tcaaaaaaaaaagaaaaagtaaagctactatactgtagtcattctgtctaaagctcagatatatgttggacagtaaaattgtaaaacatgtcactgcaatgtattagatggtatgcaccacagctacaacagacatgattctgcatggtcacttacaggaatgaatgaagtggtatgtacaatccaacgagcacttccagaacttaagcaaaaggcaagacttcaggaccatcacctctgcagcaaaaacatgtttccaggtttccaggatgatcagcagcacaagtttggctagcagtgtcactgtatgacacgatagctgacataaatcaatatcaatgtacaagaacatgaacatgaacttcatggagcgtggacccgtggaagagaattccaaccaaagcaaaagctgtccttgttagaatactggagaataataaacgaaggacattggaaagaacctttatcaaaagataaaagcgttcaaagagagaaattatgcacccgcttttgatcaaccatttctctttcttttctcttcattatatatattatgaacaatacacaaagatttagccagaacttaacatagcctgataggccaaataaaaaaaaaggttaatggcctcacacaccagttgttgagatcacaactcaccacactgagacaatcaattgggtttattgtcactcattgctgtactcgaaaaaaacctcgcaatctctcatgacaaacactgaaagaaagccaagaaaaaaaaaagcccatgaatcatgtgggaggcctcatttgttccacatggtttccatttgttgagaggcctttggttttgttccaactaaaggtggcgcccaaactatttcattgaggggttttttcaacaaacggatttgtaaaaaagagggggggggggggctctctcctttgggaggtataaaaaaaaacaaaccttgtggggaaaaagaaaccaactctcggtggttngcaaaaaaaaaaaaaataaataaaactactcctcttttcttccanacgcttttggggaaaagaatatttttgcagaagttttatggtttaatttcaataatatatatttctctttaaataaaattttgtgtccgccccctttttataaccccacac

SEQ ID NO: 47206 - DNA, 2228 bp, Oryza sativa
tacatgtatcgttctaagggatgaggactcacttgatcaggctgtcctctctttttcacggcattgtcatgtaggagctgctcgtacaatggaaccacacataaagagggtgttgtattagttattaagtgattaatcaaagctaagtttgcagtgatagttattaaaggtgtaaagctagagacaaagtactggccccatgattaactttccagaatgcttttatggaccaattaaagcaaagctttagacaaactaaaagcccctttgggaacaaaaggatcatcttttgtgctttacttaactgatcagctgggtatagatcccataaaggaaaaatgactaattgatcgaataattcattagttacttaatacctggccagggtcttctggaaatatgctgttcctttctccttgcacctataaaattaaacagcaattaaagggaatcaaacagctagcttttttatcgaccagcatatatatactcatttggttcgtcaggcataaagtttctgtcaatacttttatcgaaagatctcacagagatacgatgctctgaataaaatcataagcacaagctttttattcttgattattgtgtgcaaagtttgttctgccattacgtaacctaatctaaactaatctagctaacccatgcatatggtagttttgttgttctttttgcagtgtgcaaagatcagtgcatgtgtcaatccatggatcggaagaatagtctattgagaccagtacaataaaattgcaatgattagattaattaataatagcaagtgtactccctgttctgcagtgtgcagactcaaatgcatgtgtcaatgtggatcagaataatattatattgagcagtacatgaagaagtaacgtaaccctccaattaacaaaatgtactgacgcaacacctgtgcaggcaacatagtttggaataaagccataattttagataaaatatttcaagtgtatgtgctacatgaaaatagttgtgaggttgaagttgtgggcacattttataaacttatactagctaaaatttgtgaggttgaagtttggtctaaaaatttgtgtatgaccgtctaatgtagccttttcctaaaagagaattcttgttggaaaaaaaaaaggttttatgcgtggtgtgtggttatttaattacaaaacaacctactatatgtacgaatatgttttttctatcagtatatatttttcccaacaacttagcctagctgccaaaaacatacaacaaatatgtgcgcaccactgtactatagttgacatatgaacagatagatgcatgctagatagtaattgacaacgtacttggaacacaatcacttgacattaccctttgtctttattgtggacaagctctgtgaggggatttcaatattatttgtgtgtactacgggtcatgcttcctaaataaagttaactagaataaattgcagtagtactgatagaattatattttgtgcacataaaaaaggtagagatactttattaatcgtgaggtggttgcaggaaaccaacaatttttcatcggtttcaacccgaccaaatcattggtgtgtttctgtcatgacacaaagcctttatgacccttactgttgcccatagcttggggactaaattgttttgggtattcccctcccaagggggtccccggttaaaacccatatttattgggagcgggtccctttttttatattaaaggaacggagggttttcttattagaggggcgtttatttgaattggtggcccccacttattttccaatgatcccaaggcctccgaacaaatttctggtttggcgttttttttgtttaggggcttgaggggcctttcttaggggccttgccctcatattttctcttatgggggctccaaggcactttttttttgttcccccccccccaccccactatgacttccttcctccaccaccttttgggcgcgcgctctattgagatggcatttctcccccattctcttgttacccctcttatagtttcatctgaggccccgcccatctcatcctctatggagttttactctaacgcgtcgccttctaaccatgagaaggaaaaaccgcgtgctcaatattttctttgtcgcaattctcttatccacgtggttatactaatgcaccgctatccttcccacaagatcacccttgtcgtgcgtccctctgtcttctattcctcacgtct

SEQ ID NO: 47207 - DNA, 1291 bp, Oryza sativa
  unsure (1)..(1291): unsure at all n locations
agtcattgtgacatttgaancnncatccgcangcccgcaggtcgactctagaggatcccctaacatgtgatatatttctctacaaacatgtaacataaaatccaacttttacatatcacaatgaaaaaacaaagttgattgtgaatatacgttaactaactatggtaaatttagttctacaaaatgaattaagttgtagttttctaaaatcatcagctattgttataaatttttaaatgacttgtttaaattgtgctaaccggtaattaacaaatacaatcatagttttttttaaagaaaggcccagagagcccagctttttactgaaagcgtaaggtttggttcgatacaaagcgttggggactccagctttcgaacacggtaacaccgcacacaactctcaacagggactcatgggaataattaactatttgtcacttttgaatgggtaattaaaaatttgttactatactcacatattatagatacatgagggattatgaattgcaaatagttaaatgtcccggactcaggccgcaggccaaacaaacaagcatactaccctaaatccaacaacacacacaaaacaatcataatttttataaaatttgctctggttaatttagacatgcaaaataatttagaatgtactgcaaaataattttaaaagttaatttgaatgcaataaatggattagacgacaaggaaacatcatttgtatcttgtatcagtatgaaaaacaatttttccttctaactagtaactagtacagcagtatactattagaattttaaaagataaagttagtacctagtaagaaaggtttatttcttcttgtctgtatttgcatgccatataaatcatatttttttaaaaaaaatacccggaagaacaatatatgatttattccctttatgaaggggtaaggttaaaattacattacgttccttaccaaaattaataaattttctactcttgaatttttttccgggacagttgaaggagggatatcaattcattagggttgcagaagacctaacttacaatttaggccgtgatatccaaatttattctcttaataaacatttaaagtggaaggcctcctttttctgaggaaaaaaacaccctccttaggggcttctcttaaggtaaaaagggggcacaataattaggtacggcccatattcccttttagagggttaaaattatggccgttttacaaaagattatgaaaactgtgtttcacatataagtctaagataattctcttcatgtgttataataagacccc

SEQ ID NO: 47208 - DNA, 720 bp, Oryza sativa
cgtatgtatgcaatgtccacccatcacgatctttctgtcctcctgaattcttcccgaagaacccaatccttctctcttttgcacattcacctttgcctgcagtgccaatgaaatggacttccccttgttgttctttgaaaagccagggttattaatctcataagaatcagatgaagtcctaaagatcactatgtcatcttcgctattccagctcctgttcatttgctgccccctggaaaatctcacatcaggcagctcaagattggtccgagatgactgcagctgccgagacactgccctctgagaagctgggatattctcccgtgtctcagaaatcctcaaaggaatccgcgcaggactgtatgagcagattttctccctagaactgacctgtggccttggctcaagaatcttggctgctgcctccatgatttgagccgcatttcttgctgaactaaatcccggattcttgattggagataacaatctgtgatgggacattggtaagggtttggctgaccttggcggcaatgtttctatctggaacctctcaatcgggctgctcggcatcttctgagctctcagatccaatggcttcctcatgtagccatcaactcttcgtggcacataactgaactggtcactcccggagtactctgggcttctctttaggctctggctgtccctaaacgaccgtgtgtcacggaatggtgtgcagta

SEQ ID NO: 47209 - DNA, 2802 bp, Oryza sativa
  unsure (1)..(2802): unsure at all n locations
tgtaggtttttggagcagggcgcccccccccaccgctgggcgcccgtggtatttcaaaggtccgtcttttacacgaaagattctcgccgcgttttctttaggcgggcgcctttttggcccctatttgtttcgagaggcatccctccctctagctcgcggctgtagaaaaaaaaaactcccgggtgtttttattaagtggggaaaaaaatagggccgcttttttgcccaaaaaaaaagggttgacctttatcttgggaaaaaccctaaagggagagcggaccttattggtcccttccctccggtattaaaacccccggaagatggccttcccgtgcctcgcctgtttttttaacancccttggtgtattccgcctatgtttgagagtttgtaacccacttaatattttaaaattcccggctgttcggaaattatgatatgctcctataattttcccatagatttataacaaaaactgcaagaaaacctacgccgttttttattttcgtctcaaagttataccgagatgattatatcagttatatcatcatatataacttcataaacatggataacaaaaaatatatctatgattattcgaagtaaatatttcgttcattatgaaactgtgataagttacaataacattagagtcatgataacattatcagattgtcaaataaactactttcatgtattcatatttttaatttttattgtgaatatattgcaagaaagaccagatacaaagctcttactatggtactacctgcatatgttatacgtagataacttaaaggtatcaagcatatgtcccattaatcttgaatgtgtgtccaacccacttacaaattattatccaccaaacatcgagctacaattactaacaaggtatttgtgcatcatatcaaatatctaagataagatatgatgaacatgtgtaccattagacgcacaatagagataaagggcattttataagggacattcgctcatttaacccttttctaaagcttaacatcaatttaatcattttaaaaaaaagtttgcttatttgaccatgtttttcaaaatcgaagttgtcgtctgactctactttcactacatcctgagtttttcatttagagaaaaagaataacatgtatttacaagcccaaatgtctaaaataacactgagtacatcaaccttatcctcaaccactcatttgctcattccttatccccatctctcctctctctctctccaaagcgtgaagggcaggaggagcggtggcggtggcataacgacagctgcggagggcccccggctgctttgcggagggtaggagcggtggcagagaggcaacattaacttgccgacaaggaggaccgctggcggtggcggaaggggcagagacaactcggcagaggggaagcagcagctccatgaagggtaggaggggtggcgtcggctcaccgacgtggaggaccgccggcggtggcgaacgggaggcggtggctgtgaaggagcggtagcaaccacggatatggtaggaggagcggaggcagagggatggtgtcggctcggtgatgagcagatattgaagttgtaaccagattcagtgatgaggaggatagccagtgacggtggaggggccgcggcacggtgacgaggaggaccaccggcgcccatgcgcatctccgccattagcttgctacctgcggtttcttccgcataaaattggaccaaaggagaaaaattaactttggaaaaatatggtcaaataagtaaggatagaagtggtatttggagcttttgttaacaccgatgaaccgatgaatgcccttaagagaagagggtcagagtgtagcttcggttttgaaaaggagggtcaaatgagcaaagtgaccaaaacagggtcaaatcggtagttggaccttcaaattgggtcaaatgtgcaattgctccattttataatatagattatatcattttgtatcattttatatacatacatagccaaagacacgtgtgatgtactttaatctatctaaaaaaaacatgtctacgataataagaatcatagaaatttaaaagacaaactcaagagcatataccctaataatacactaatagtaaataaaaatatcaatggctaatccctaggacatataaaattataaagtattattttatcggtttattaaactccctaaagaaccctcctacaacgtctattaaagtctttaacaaataagaggaaactttaaatttcttttgtaacagataaagcatctaaaacttaatcctcattaatttaattctcccattaattttggctattgggtcatttcaatgggtatgtgtatacacacattatttaataaaaaaattattcatccaagcatgttatctagcagaaaattatttgagatgtcaggtgaggttgtagtgacctgttgcatggtttagagggttgttgtaaggatgactagcgttgagttttactaggttgccagccatccaatgcatcacaaaaagagcccataggagattttttgtgttttgttgatcgagccaccattaagagaaggcaacaagggaaccccagtacaaatatttttttatgactaaatcttctcttaaatcaagtatctatgtaattttatttaagtcgcgttggcttaagcatacataacttggtatatctagaaggctacatgttagaatattcaattaacccatcttagaaataataatacttagcaagaactcaagcagataacaaatttatatcattaattttgatatttaattttaatcg

SEQ ID NO: 47210 - DNA, 1364 bp, Oryza sativa
atggggcttcagttccagaacttcgcatagttcatatctttggcgtcaacctcatagaagttaccacttcatgtcatgcgtcaacactagcttgtcattactaagatactatgcttgtcatcatgagaataccatgcttgtcgtcatgagaataccatgcttgtcacttacttctaacttgccaccaactgcctcatattaactttcctgctctccgggtgctagctacttctgctattcgatgcaagggtcgataactttgcctttgaattatgtttctcaactgaaccaacttctcccatttgacatgctttgacgtcttcccaaatggctttactgctggacttcttattgtttaatcgtatcctgccaaatctgaagcttcgttgtctgacctctgtagactatcttcgaacatatcacttggttcataactgggaatagctctcacgaacaagcaactcggattcactttctttacatttggttcacttcccactattctcttcatgttgtcctcagttagcattcaacgtattcctttacacctttgaccttgatgtgttctttcccgatttctcttatcaatcacctttcgacctacttctttgcctggtaaaaaacatctttttcgatatcttctatcaatcatcttttgacctttgtcaactaagtactcttcactccgagagttgtggatgcttctggtgacgatgtggtacttgagcctgctgcctttcagagaaaccttcaagtggtttgtcaaaagctagactggcggttgttgcctttgttccaaagaggacacatctgaaactctcagtccaaacaaaagtctctttggctttttaatccaacacagtttaattggttttcttttccatcaacaggttggttattaactcgagattagtatatgattcctctgaaatgagaccctaggtctcctttatcagtaagcaattatacacataatcacatatccgcatcttccaaaagaatcctagtagaacttgtctgtattacacatttctcccttattacatgaatactaagcactgcctaaaaggaaaggtgcttagcatcggtacattgtttctgctatgggttctgattaacacgaggcctcacgggtacagcgtttgctccagtgaccacaatacgattgggatgtctgcttcgtgtaaattggcggtaatgtggaggtcgactttgccttggttgcaggcagtccctcgagtaatgccctggttctttgcaattgtagcaaatcaacgtcttctttgctgagctatccgtctggggacggtcattctgacttggagttggaattggtggctggaaatccttgctaacattggcat

SEQ ID NO: 47211 - DNA, 883 bp, Oryza sativa
gggactttgggccagacttggcccaaaggaggaagggggattacttttaggtttttctttttaataaaatttgataattgtttttgttgcttaataaatatttacggtgctctgaaaattcaagtaaaatttgagggctcattttagaccaaggagaatttaacaaaaattctccgggccacattcgaatttttcttgtatgtattttagtgttaactaatttcttttcgaattttaattaattctattattccttttggagaatgatttttattttgggatgaatttatcaggacgtgacaaatccaccccccttacaggaatctcgtccccgagattcgaggaggctagcaagaagataggttgggcggtcttctcttcttgtctgacttcttctgttgcgtcttcacaaacttccagcaaaacttcaccactcggaactgcttggcttgacctcctattgcggatggaatcttctcttcacctgactcgaaccagggtgcaccttttaggttacttagactaggttgcggtagtttaatgatgcttccgttccagaacttctcatgattcatatcttcggcgtcaacctcacacaagttatcaacttcatgtcatgtgtcgacacctgcttgtcattactaggataccatgcttgtcatcatgagaataccatgcttggcgtttccttctagcttaccaccaaatgcattcgactatgatatcccacttaccaagggtaccaagattgacaacttgccactaactgcctcattttagctttactggtctccgagtgctacatacttctgctattcgctgcgagggtcgaccattctaactttgaattatgtttcttaagagaaccaacttatcccactcg

SEQ ID NO: 47212 - DNA, 822 bp, Oryza sativa
gaaatcctctctgccttctgcccacattagctttgtgtcttggattgaaccgaagaaagagataatcacacacgttcccttggattcgatacccttggaatactctgtaaggaaagtgctacatcggtatatctgtgcgcttgtggattctatctgtgatcgtaagaaataccaacaagcatttctggtgccgttgctagggaacggttgctgtttatttccgaaccttgttcatccttatcctttttacctttttattcaacctctacccctgctatcccatagaagtattcctgttcaatccttctcgaccatggagcaacctctcttcgagttgtgcgctcctcgggacgaattttacgagccacctccttcatcggagccaattttaacacctagctatgaaattcgtatcgaattcatcagtatggttagggagaaatctttctctggtttaggccaggaaaaccccttccaccatcttcaggaattcgaaaagctttgctcgtgccttaagattcgagacatgaagcaagaaactgttcgttggaaattgtttccgttctctcttcatgagagagcgaaacaatggtatacatctaccgttgggtgtgtaaacggtgactaggagaaattgtgagacatgttctgcctcacattcttccctataacccgtattactactcttcatgtagaaattctgagtttccagcagataaataaagaatcgattggtgcagcctggttcagattcactaatttagttcagtctggtccaaccctgtctatacccaattacgtgctattacagcattttcatgc

SEQ ID NO: 47213 - DNA, 706 bp, Oryza sativa
atgctaattaggaactaaccaagaataattctcacgaagtaaatcttaattactcagaatgatatttctattaaagcagaataattaacaaagtacaagaaatagaagaggattaccgaaaactccgaaattcctctgacttcttctattttactatctccctaatttagtatacaatatagtacaatgagcctcttatatttcagctcaagcttggagtgtgtgtgagtgaagtgagaatgggagctctatttatagtcaggtaatggcggttataactatgtgaattgtcggaattgcccggcaaccgccatcaagagagcatctggagcgtccataccaaaacctggatccaatggtgatcaccagggctgaacctggattgggccagatggctcctagatttggtctgggcctctttctcactctgccttatccatttctcctgtagttgggcccattttctgatgttttgatggagtttaagagcccaactcttgtatggatagaattcttattcactttagtctaaatttcctcccaactttagtggtttagtacctgcatccaaatatgcaccaacactcgtggaatatgtcagaattaagccctaccactatgttggatgtatcattatctaagtattatgcaggtattggcggcataaaactagcatttaatagctgccaagacagagcaaccgctg

SEQ ID NO: 47214 - DNA, 727 bp, Oryza sativa
  unsure (1)..(727): unsure at all n locations
tagcaaccagcgtatttataatagggatcaatgaaggtgaagatatccaggtgttagataaatacaatagttctcttgttaattaaatgtagaagctggtgatgggattacaatttcccgcagnatttgcggatttctattgggatctgggtgggtgtccggtacttttgtacttacgtttcatgttgcgctcttcctcttcattgggcacgggcacatccaaggctacatccgtatctgaaagatggagggaatacaaatagagaataagatgatgctgggcgataaggtacgactttaaatggaatttagatagcaacaaatgcttcaaagcaaccgaaccgccgccagccattcaccatccatccagccagccatccagccagccatccagccagccaaccaactatccatccacaatttgtggacacaattccggcattcaaccaaaattccagttgaatgggtgaatggtgaatggctgaatggacgaatgccaggggatcatcatgaatggcaatgcaactatcaggtagagatcccacctccgaactaagaccttccatttccacctctcgcttccacccaggtggcattcattaatcgtgcataaattgagggcaggtagaaggtagagtttctcgaacgggaagtctaacctacatctaactagggaagtgctttgtatttgaggatgtgcggactctggggttctgaattcatgggt

SEQ ID NO: 47215 - DNA, 1143 bp, Oryza sativa
gccccccctcgagggttttttttttttttttttttttttttttttttttttttttttttaccagggattcattgggtatttaacaacataggcatgcaatctggcaaatttgaaaaacttttaacatacaccccaaatccctgcccaaatttaagaactaggggggacacagggcgtttttccatgtcgcattttctgtgatggggctaccatacgtgggagcaaaaaatggggagggtggagcgcatgccaaatgaggatctattagcaatgggacggggcctccactttagcatttccaccctgctcctttaagaggaccgcctttcattgcattcagctgtgatggtagcacgaacacaggtgcaccgaggacgaggagagcaggagccttgtgctctctctgcatttgaggcaggacagcacagggtacggagcagtctgcagagaggccagctcatcagggaagcacttgtcttccaccttgggctttgactgagcactgggcaattggcctctggggatcaacgaaataatcctaaacagagttactctatgtcacactatggaatgttccaagtaggtggccgtgttttcaaaagatgtattttctccttttgttgttgccatttcataggtttaggattgggtgtgtgtttctcctctctgaatggcactcgaatgtttgctgactcctactctgtgtgactggggtgtacagctatggactgatgcatcccatcccatcatctttcatgatcaaagcagtctcttcttttttgacagctgaagaagcatcggtagggaatccagaaggagcgttcatgaaggtgttacaagcccggaagaactacacaagcactgagctgattgttgagccagaggagccctcagacagcagtggcatcaacttgtcaggctttgggagtgagcagctagacaccaatgacgagagtgattttatcagtacactaagttacatcttgccttatttctcagcggtaaacctagatgtgaaatcactgttactaccgttaattaaactgccaacctcgtgccgaattcctgcagcccgggggatccactagttctagagcggccgccaccgcggtggagctccagcttttgttccctttagtgagg

SEQ ID NO: 47216 - DNA, 795 bp, Oryza sativa
tcagttgggaaccatgataatctcaggtctaaggattcaacaccaacactaaatgagataactgatgacacaacacatatggctcttgcagtgtctcatgttgggtctatccaacaacatgttcactaacatgtgtccacattattaatttggtatctctataccatgatccatgagacatgatcatcaattaatacatgtgttgatcatctaaacatatttgttccacatatgatatttgatcagggatcctttagaaatagcaacacataacataaaaagtcttatgaaagaatcacatattcattaaccaataatgagtttatctatttcaaggaacaaaatcggaaaaatatgtaaacatagtatgtgatacaatcatctctatgattgcctctagggcatatcactaacagcggcagcataatgcagaagaccgccggtagcagcttccatggcatgagcactgagagctacaatagagagcaattagccgacaacaaggtggacacgtagactaaggtcccctttgatttataggaaaagtgtagaaaatttgaaggatttcaatcctatggaaaaaattcctataaaagcctttgaaacaaaggattgaatcctatactatcctttaaaattcctatgaaatggctaatcctatagtgattttagaggaaagttagcaagaggtctaacctcttgaaaaaattcctttgagtctatctatctcatccgattcctacgttttttctgtggtccaatcaaacggtcattcctgttttttactgtattttc

SEQ ID NO: 47217 - DNA, 920 bp, Oryza sativa
ccggttacaataggtccttcggtggttttgacaccagttttgtcctacgtgacggctgatttagcatgggacccacgtgggtcctacatgtcaggctgagtccgctgagtcatctatcttccccttcttctcttccttggttcctcctctctctctgcgcctgtaggtcggtcggcggagcgaggggggaaaggaggagcgcggcgccgcaatggcggccgccggcggcggccacagtggggatgcccgacggtagcccggcggagctccacgacgcgggcgtgcagcgaccttgcgcaggcgtcgacagggaggcgcgggcgtgtgcaggcgtcgcgggcagctggaaggcgcgaacaacgcgggcatcgacggggcaaggcgggagagaaggaggacggcggcgcaacggcggccggcggtggccggtgggcggtgggcacggaggtcaagctcccagccctcaaccgagctcgagcagaagggaggtggtgctcaccgacgctagttcatggtgctgctcgttttctcagctcgatactctcccgctcgtcaagctccaccacttgaccgaacaaatcgcggccacgctgactcaaaacagagcgagcagaaaaccatgggaggagggaaaatagctaacaaactaacagaaagtaaataagagtataagatcaaatcccaactgacagaagttcatttatttaacacataccaccttccccggcaccacggcagcatcatgatgggccagatcaccccacggcgatggcggcagcgccgctttccgccgctgacattccaatggacggtgcaccccatcgagctgtggagctggttcggcgtctccggcggtgagcagctgagcttggcgtccgctacaccaaggtcaagctggtcggcgagttcctccagcgaag

SEQ ID NO: 47218 - DNA, 1509 bp, Oryza sativa
tttgataaaaatggacatatgagatttagccatatcattaagagtacattttttactaatgatttaatctgtgagtaaaatttttcattggctgcaccctcatacacaggaaccatatattgataaaaaaagtaaatttcagccacatcaatgcctcagaaaatttgacattttgatccaatctcaacttacactatagatggtaagtcatccagccgcaagtttccagcagtgatagataggggtggaaacgagcctagccaagcctagctcggctcggcttgcagtggctcgcaacaaactaggcttggcttggctcggcttggttagggaaacaagcttaaaacttgagctcggctcggctcgtttcctggctcgagccagctcgagctggcttgtaagacttcctgttaaaacacatcttcatatatattttgtaattattaaaaaaagcaagaacaaattattaacatgtaaaattaaaataaatttatggtaaatttgaagttgacaaataataacgccatataaaatgaaataatcgatataaacacaaaatggcctaggctcgcgagccaaaataagcggctcgcgagctagctcggtttggctcattttagcaacgagctgaaaaggaggcttgggcttggctcgtttggcttacaagccgagccaagccaaccaagctcgacccaagcccgagctgagctcacgagcctgagctttttttccacgactagtgatagatatttggtttggtatgtactctaacattgtaagcgactagtaatttcgttgagctctaatggtcttagcagctaattactctctacactaatatgaccagagcaggattatacttttttaatttatttctgcttttggcttaagatggaaaaactaccccctataatccgctggatcagattatctcgcgacaacgtcaattcagtaaccacaccctcctttctttctgaacacacttgctgtcgataaccatccaagacccaactttatttagcccatctcaatcagcaacacaaatgaccctgacccacgatccactcacaagccattgctcgagatttgagcttgaactcttcttggcgggacccaaacagtgcacgaatttcagacgcattgcataatcaaacccccaaaaaggaaaaagccgtcgcctttcaccaagttcgaattatttttcgcctttggagacggcacaaaaggcaagaaaacggaggaggaaaactaggccacgcattgacaggatcttctcccttgtgttcttgctgcttttctgctccatgtcctgctcttggagatggccatggctctggctctgagctgtggcaggaggcagagagggaagaaaggcggcggcggcggcggcgactgcggcggccgccatttccatgtccactaccatcttcctcgccgggtctgcgcctcctcgtttgttcccaatttgctgcctcgttttttctcgctgctgtcagcttgcgtgcttga

SEQ ID NO: 47219 - DNA, 3409 bp, Oryza sativa
ctatcccagcgtagcatcccattataatatcggtattgaagatgacaaatgtgaggatcatactgacaacaacatagaggaggcatcaagtatcgcatctacaaattgtggttctgctgataagcatcagactatacaggtgttgcctgtttgtttagcaaatggagataacattgatgatgttgcttcattggggagttcaatttgtgaagacgttgaagataaagacaacaaaagtaatgctaattgtatttcagaggtgagtacaaaaggaagtttcgcttaatttctgaaaattgtggctgttagcttgttatatatttctgaattttactgctattgtatgtttcaaatgaatttgaaagggagctccacatggaaacggaatgccacttgttaggtccccagcatcatggtggaatttatgtggagttattgatgtgtttgctggatgtaaagattgaattgaggtgagaagatagttcattccaattttcacaccgtgacatcgtttgaattttgaactgagggtactccttttaaaacaaaacaaaaggaatccagctgcatggccaattattttgttgatcatcatctgctgcaccgtgggttcgcacaattgttacttatttattttcttgtcaatattgtctaacacaagagagatttttcttcggtggtttttactaagtatgatactacagtaaaaaaactaaattgttgatttattggggtataatggtattttttttcctctctatatgatttgggttttttatttccctttttttccccaagagactggcgttactcgtgtggaccaccagcctatctcacttaaaacgaaatataccaattttactggaattttgccatcctgcaagtatcatttccttttctcacccaaccccgacatagttcttagatgattgcttgattacaaagaatgatctgtaattttattatcgtcaactctcttcgcagtatttggacatgacacattttctgttgtatgcagatgttggcaggtcatgggtggaactttgggacaacagaaaactttagatgctcatcctaatcctgtgttgacaatgaagaagtatttgacagtttggattgaagtattgaattgtttatagtgaggctgtttgtcttggtggatgtatatatttttttggtagattgcctgattaatttttgacatgttgtggttcattggctttttctttaaaagctgagtgctattctttctcaagaaagaaagcttcaacttactgtaattgattttgaaagggaaatggaactggaaatgcttgttgacttgttgtatagtgtatactatatgctttgagaaatatgtcttctacagttgtctggatgtacagaaatctgcctgctacattaaagcctacgtatttttaacaagaaaaaataaggcattttctatcccaaaactaatttactggatcacttaacccccctgaattatttaaaaaacaagaagaatttaaaaaaatgttgagatgtaagttacaatgcatataccattctacccaaaaaaaagagagagaaatagcgtcagggagtaaagtaaaatttttttagtagttgggagtgtaaaattagcaaaaacaactaatttaggggttgatgtgtctgaaatagttcctggcgagtaaaatgaactttgtttttctttttaacaagaactaggaaacctgccagatcaatattaatcgacggctgtttcgctgtaagaaaatgattattctatcttagtctaacaacataggcaacttgttctggagatgaataatttaataaccacagtaaaacttcacttatcgtttattggcatgtggtaaagtcaaaagaataaaatgagaaaaactgtagaatgcaagtatgcaacaattaatagtagcattgcatcgtatgtgtcagtagaaatattccccgaagtgattaatcctaaccctatatctgtaaagcaaattaacaacaacaatcatatctctactacttaaaataaaaaataagaggtgcttccatcatccataaaaaaaactggacgataaaaaccaaatataccaaatatgtccgtaaaaaaaaccgcgtggaaaaaaaaaggaaaaaaaccaaacctgtccaataaaaaagggcgaaaaaacgaaaaaccgggcgaaaaagccaaatatatccgatctagaaaaaatatctgtaaaacaaattaacaccaccaattatatccctactacttaaaaaataagaggtgcttccatcgtccgtcaaaaaaactggcccgaaaaaccaaatatgtccgtaaaaaaaaccaggcggaaaaaaaaggaaaaaaaaccaaacctgtccgattaaaagggcgaaaaaacgaaaaaccgggcgaaaaaaccaaatctatcggatccagaaaaaaccgggtgaaaaaaaaacctaaacctatccgatcccaaaaaaaaaaggggtgaaagaaaagggaaaaaaaaaccggatctgtccatcaagaaaaacgaatccgactctgggtaaaaagaaggacggaaaaaaattaaaaaaaaaaagaatcaatccgattctctatctctaaacgaaaaaaatccaactctatatccgattcctccttaaaaacgaaaaataaaaggcacctctcctctagaaggattggagatctgtttgcaaaaacataacttacatgttaagagcataatatttttatatgttttaatttttgggtatgtacttttgcatttgagtccctgtaatttttatatttatatttaagtccctataatcttgcaataaggtatttgaggtcgttttttaaaaaaaataataaaagggagataacaaaggcagaaaggtgcatcaaaagaaaaagaaaagccgcaaaaaaaataaaggaaaaaagaaaaccaacaacaacaacaaaagtctgtttccctaagtggcaaaaaaaccatagatccgaaccaaaaaaatcctattcctataaaggcaaacaaaaagtggtgaaaaaaagctagatccaattcctttcaaaacgaaaaaaaaagtctgattcctataaaggcgaaaaaaatctgaaaaaaacatctaaaaaagttcgtccgactctctaagaaagtggcaaaaaaaatggtttgtaaaaaataaaaagctggttcgtataaattaaaaaatgaacgcgagaaaaaaatagaatgggtgaaacaaagtctcagtatatatctcttctctatttctaatctaatctaactatttaaaaagagaaaatgcatgagaaaataaaaacggttcaaaaaaacgcgtgagaaaaaagtgagaaaaaagcgaaaaaaacactctaaaaaggttttccatcttccataaaaaataaaaaaacatgtgagaa

SEQ ID NO: 47220 - DNA, 741 bp, Oryza sativa
tactgtgctaccatattagtatagatattaaaaagttacaatatttagttctctctctgagctcaatgaaattaacatgcctatcactttgcgattttggccattatcattatgaccttaccctctaggttagtcccagatttatattgttatattcatgcaatatattctgttggtcacaggtttaccgcatccacctcgatgtgttgctgccaagtcgcgtaaaaaacgcaaggtagctatgatttgcaggagagaagaaagtaagaaaagacattctacactaataaccttatagacaaatttgttttgttagatttgtgatcatttggctgttgttccagggttatatgctgatactctctccctttcatctcggtctgttcggcggcgcaaaatcccaaatgataatattgtacaccaaccacaccatacacaactacgtcaacataacccaacctcagctgctcagccaggtggcgatggtacctaatttatttcttttcaattttcaataatgtattgtgatgacaagaaatccttaattcttctggtctatctttttcttgcaccagatcataggcagccattccccggtcgacaccgccgtaagttctattactttttttcaatcttactgttggcatattcattaactatttcttagcatatgagaaacatgcacgctatgtgtgtttcgaatatgcctaggagatatatctcctcatattgcctcagact

SEQ ID NO: 47221 - DNA, 780 bp, Oryza sativa
catcatgcctgagtgcagtccaatattatcgcaatctgcgtgctgagaggaatgatatcttgaactaattatgtgataattgcaagatgtaatacatctcaacatattgtacataatgtcttcttaaatttatactgtttgcacgaagaaatgatgtgcttatgtatttgttaggtctacacataagaaagtcagtggtctacattgcaaatggaaagctaatctttagaatcagccatatcatttattgagttcctatcaatacattagtagcttatatatggaattatttatcattgttgattcccgttctacactgtatttggtgtttatcatgcttcgctttgtcagttggcgacttgacatgattggaaatatttttgccttttgatttctctgtggatagaatgacattatttgtttatctgtttcttcaggaatcaagatttggcttaaatgggggaacgatataaattctttagtggaagtttcagctctaacactgacttggtatgatgttgctgtacttatctatttccctcgaagatcttccctggtcgcagcaagatccgcccaaatcccccaatctgtacaaggtatttggaagaaaattggactataagactcaacataaacttccaggtttaacaaattagttatgcctgttgttttttatcatggattataaaatgtagccgttctttcagattgctctgtacgtatgatgaggttggcatttaggattgttcttttatttgcttaatatactaacctcctaat

SEQ ID NO: 47222 - DNA, 591 bp, Oryza sativa
ctcatggaaacaagatagaatttattaaataaaaaggaattattgagacgacatgtccttctttggtttggcaaagccacatgcactcaattgttccagcttatctgttctgttactacttaccagacaggtggaaacggccagtacacatgtcagatgatatccaatgaaacaataacttttgatgttgacacgttgatacatcttagattggccttgacacctttgcggaaatgaatgctataagctcaacaagtaggaaaaagtaaatgtttggtttccttcctggtcaaatgaagaaaaagaaacatgatttaactgcaaacccacttattgatgctaacttggagtatgttttaaaatttactactactgtttcacaaattttgccggtttacatacccaagagatttaatattttattaacatttttaatagaattaaaccataatatatgctaagtgtagcattttctctatctgtaatcatagttcaattccgttgcacattacgtgaattttgcatttcatgtatacttttgccagcatccactaggaccactagtcatcctagaatagtaactagtcagag

SEQ ID NO: 47223 - DNA, 634 bp, Oryza sativa
ttgatcctcttattcggtttattagtgagacatggaagaacaaactgaatgttgtgttccctataaggcctgaactctgaagtcaggtgaattggctttgggtggtggtggggctggattcaaattcctgatattgttagttggagtgataacatacatatttgggtttggttgggttgatttctggtaaacttgggtattcaaggtcccacaaaaaaaggttgaacatactccaatgcctgtttttggtttaattaacgattggtatggactcaggcaagaaataagtgccataatatggttattcttgtgctaaaatatattggtggagattttaacttttagattgattgaatgttgacattttttctgttcttttgcaggatactctctgtttcttgggttaattattgaccggctacatcactatatcagggagttacggaccatgaagaaaaacatggaggctgtaacaaagcagagcaggaccttagaagaagcaaaacatgggagtgtagaggagattcaacaatatcagaaagagatttccaggttgaatgagcaagtgcaagaattcaagcgtctgtcagaaacgaaaactgaggaactaaaaacagctgaagcgaataccttg

SEQ ID NO: 47224 - DNA, 593 bp, Oryza sativa
ccactcgaccaaacaaaagtggatctattgccccctcaattccctacaaggaaaagcaagaacaatatatggcagaactcccaatccctctcttttgttttgcggtggcagcacaaaacctaggagaagaacaagagcaaatttttacaaatacatgggttagaaactaactagaaatcaaatacaacacaatatggaaacctctctacaacactgttaatttcttttggctcgtgtagtggaaccagaaggagtttgtttctgttggcccctccgtcacttgggtcatgaagttagctttccaacaagtgcacacacgtccaaaacagactccagacaagagagaaacaagcattttagtccaggtatgtccaagctagcccaaaccgagttcaaactgaatcttttctttcttatcttcaaacttcttgttttggaaggcttcaattcgtagggaacctgtaaatagactccataccaacccaagatgggccttgggataatagaaccccatccaaacatgttgtacaaggctcacatccaactttgatgccgctgcttgtgcaacatgtctttaacttacaattactggt

SEQ ID NO: 47225 - DNA, 689 bp, Oryza sativa
tatttctaataatataattacttagataccgtatgaacccgcagaagggatccacggtacccagcccattgatctgctaggcttcatcagtcatggtactgccaccagacctggccaccatcagaggcatggggcagcaagtttttttttcttcgaacgatcaggccgttgccgacgttttacataaagaagaagttgttttattttaaagagaaaacgagaccaaagcttacagtgcatagttaattagggaaaactatgcgaaaaccacaactattccctgttataattatgagcgcaaccagtgggattataagttatgtgattaatagtactaactataaaagtaaattacaactatcgacggggaatacccgtagaccggatatagagggtactggggtacgctggtacgaggatctacgtagtacgacatcaagcagacaaaaaaacaaagattatactggttcaggccccttgataggtaatagccctaatgtcacgtcctgataaattcatcccgaattaaaaatcattctctaaaaggaataatagaattaattaaaattcgaaaagaaattggcaaacactaaaatacgtacaagaaaattcaatgtgacccggagaaattttgtaaaatctccttggtctaaaaggagccctcaaatttaaatggaatttcagagcac

SEQ ID NO: 47226 - DNA, 1016 bp, Oryza sativa
gtgtaccttgtgtagacgcatgctcgagaccagaagatactcccgagaatgacacaactacttttcctagtcgctagctgctgcatgaaggaaaaattaagatacaacgccatcaatattgaaatcggcatttggctcggattacatgtgccccggactgatcgatctatcatcaggtaattacttcaatcctactagagcctctgggattcaattggatgatacgtggatgcggacggaccgcaatttttttcctttctcgttaattaaagtcggaacgtccgcgtccgctccgtgaggatttgataacagacgatcgacagcctcatgctggtttatttttcttcaatgttttcaacgtaaagactttgaaaaaacgtatactacttccatatggtgtacatcaatatcatctagcacaagtgtccggatgtcgacgtagcgccctcaaacaaacaagtgagaaagataggggtgagaaatcccaagcttaagctataactattttttattacaccgaataaatagacattaaaaattttattctctatatatgacaagatctagattctagaactaggaggtggatgtgatagccaaaaataaaaaaaagagaatttatgttaccacatttaaccaatacaattagaggcatcaagtattacacatacatttaacatccatatatcaaaagaaattaaatttaaaaacatggaggttttcctttacaattttggatggattaatccattacaaattaggttttaaaggttaaaaaagttggaaacctagtgtggaaatgagtagattttaggtccgtaagaaaatcccccgaagatttgaagttcaaaacctcccccctatatttaagtcactttaggagagagaaacttcggggagaatgaacagggctcggagaggaagaagactatataggagcatcttttcaggcgggccatataagcgtcgcctgcgaagattgatcttcgcaggtggaccatataagcgtcgcctgc

SEQ ID NO: 47227 - DNA, 934 bp, Oryza sativa
gaatggacatcttcatgttaaaaagtttacaacatcatatctatattatactattaatgcaatggtcgtagcaatgaatattacaaaatagtcctacacatttatatttttacactacttccctcatgtagtttgatattacaacatagtcctacatgtggtttaatgttatttcatctctaaaatacaaatttgtcatgcaaagacatctacagggaccaaatgttctgaaaacctcaattaatttatccaaacaatgcttgcacgtgtataattcatgagggcctatgagcatcacacttaggccctgtatagatgggactaaaacttttaagtccctatcacatcggatatttagaaattaattataaatattaaacgtagactattaataaaacccatccataatcttggactaattcgcgagacgaatctattgagcctaattaatccatgattagcctatgtgatgctacagtaaacgttctctaattatggattaattaggcttaaaaaaattatctcgtgaattagctttcatttatgtaattagttttataagtagtctatatttaatactataaattagtttctaaatatagggactaaagttaagtccctggatccaaacaccacctaagccgttgtagcctatagtagaccttgtccaatggcagtgccgcagaggacgaggtcactatcacagcttccataaaccccagcaagttctacactggcacaaccaccaacccaagatcgagggcctctgcaccatgaagcgtgaccgggacgaaaagttcaccgctattgacctgagaacaaagggctcaccacaaagaacaaggtcagggacgggcgacactcttggatggcagtaggatgccctgaatgagcgatgggagagggtaagaatagggcgctgtgcatcaaggaa

SEQ ID NO: 47228 - DNA, 2388 bp, Oryza sativa
cctatgagcatcacacttaggccctgtatagatgggactaaaacttttaagtccctatcacatcggatatttagaaattaattataaatattaaacgtagactattaataaaacccatccataatcttggactaattcgcgagacgaatctattgagcctaattaatccatgattagccatgtgatgctacagtaaacgttctctaattatggattaattaggcttaaaaaaattatctcgtgaattagctttcatttatgtaattagttttataagtagtctatatttaatactataaattagtttctaaatatagggactaaagttaagtccctggatccaaacaccacctaagccgttgtagcctatagtagaccttgtccaatggcagtgccgcagaggacgaggtcactatcacagcttccataaaccccagcaagttctacactggcacaaccaccaacccaagatcgagggcctctgcaccatgaagcgtgaccgggacgaaaagttcaccgctattgacctgagaacaaagggctcaccacaaagaacaaggtcagggacgggcgacactcttggatggcagtaggatgccatgaatgagcgatgggagaggttaggaatagggcgctgtgcatcagggatgcccgctagagcatgaggcagtcctggtggggcagcaataagcagtgagaggttgatctccgcacaatgagaggctggcccagagctggtggtgggaggatggctggatgggaacggcgacactcggggacaggcgatggagggcagggaagttgtcgggatgccgagacggtagggcggaggcggtggtgggaggatagggtgggattggttcatccattagggatgttggatcaagttggagcacccaaaacccaaataatgacagtttcttttagtaccgaagattcttattgacaatcggcaggagatgttctaagcctttgtattccgggggtaatttcgaactctaaaagtatttatattttgggatggagtatacttacttattatacttcccttattaacaggttaggtttgttgttaatggcacttgcaataagatgttttctttccttactatgaggttttacctctaacaaggtaatagattatagagataatccaagaaatgccattgacaagcgtccaaatccaaaaaatgtcatcgacaagtgtaagttcaaagaaatgctatcgtacaaattattttgtcccaaaaatgctatcactgttaggaattgacagtgttcttacggcgcggaatggacggaaccctaacgatgatggcatgtttaggacaaagtcatttgtacgaagacatttcttggaactcacacttatcgggtagcatttcttggatttggacgcttgtcaatagcatttcttatattatctctagattatatcacccattggatcaaacaccaatgaactgttcaaatatacttggagctccttaagaagtccttatattttggccccatttgatagggctccaaactccaactcctagctctaaactacaatttcagtgagagctagcttctgttagagtttggctaggtttcagctccagatctgaagataaaaaagaaaaaaaactaaaaataaagaaaacaagccgccggccgttcgctgtcccaggcgcgccgcccgtcgtcgtctcgggcgccgtcgcccgtcgccaccagacgccgctgtcgcccaccgcttcccgcagacgccgacgatgccgccgccgcccgctgacaaagatgctgccatcactcgccgcttcccgccgccgttgtcgcccactgccgtcgacgctgccgccccgctcgccgacacagatgttgccgtcgcccgccgcttcccgccgctacccgctgccgtcaccacagacgcccatcaggaagaagatgtgaggatgagaggaggtgtggaggggtagttgagtagcattttcatgtaaatagactaaaaacttaaagggtagtgggtcttttggggtggagtggagctgtggagcagcaaaaacctagctccacccccgtagttcattttctaggaatagttctgctaactccgctccagaaaacggaagatctggaccgtttggcacagctccggctctaggtaagctagagctgtgccaaacggggcctttatttagaattttcaatgttatcatttgatgatctccatggtcagggatgcttatggtacagcttcatcaagaagagccttcatggcatatgtgtctgaagggttaggcaacctacaagactggaatcaggtaatggcgtatcaaaggaagaatggatcgattttcaactcgccttctgcaactgctgctacaataatccatggccaca

SEQ ID NO: 47229 - DNA, 1121 bp, Oryza sativa
cctccgccgtgcaggaagctcttctggctcatgagcaaggttttacactttgtctacatggaaaaggataggtatttcacggcagaggggatgatggcctcggcaaatgcggtgattcttgatcccctgcaagtgacacttcctccatctgattcgggaacactgtgaccacaaacaaaacctgaattgtgtactgtgttaagcagcctgcgcaggtgtttattgcccgcgtagctctcctgcaaattataactaggtcgaaataagttgcttgtaatgtctattactcaataattcttggtctagaatgcatatagtgtattcaaacatttgactttttaagtatgaaataagttgtttgtaatgtatacaactactctttcagtcctgcaaaacagagtgaagcgaataaagcatacacacatataagaggaaatacacttccagtgattcaggggaaacagattaagatcatatatgaactgcttttttcttacgaagttgtaaaacatgcagctccaaagaaatcaaaaggtacaatattcagccataccaaatataatttttcaattcgacatttgcgtgctaatatgccacgtctgaaaggaaattctaacactttacttcctccatcttcttatataataaagttagttagttaaaaaaaataaactaaccaacgtaaagtaaaagacaaattgtgttcttactcctatttatgttgcagttatgatttttttctgatttctttaggttgcatatttgaacttacttttttcaaacgaggcttcagtatgcccttgttctggatgacagtaaggtggacttcagatttgtgagataacataaaaggaaaaaaatatttacaaaatgcaaaaggacttttttaccctggcagacataacttacccacccccatacccaactagctagcccaacacaatgttcgttaagccattccgtccaaatcccgtgctaggctcaagcaatcatttggccatgcacgtggtggggaaatggagaggcggtgacaaatccacttccaagctgatcgtgcaacagctcggaaaaatcaggcaatcaaagcgccccgggcctgccgctacaagctgtcaatgcat

SEQ ID NO: 47230 - DNA, 673 bp, Oryza sativa
aacaaacaagatgctaaaaatatagatctttgtcaaaatatacaatgatataatactctgaagattgtcacagtttgtttagctatatatatttttagtgattaacttcactcatttctaaatattacattatatttgtaccataaaaaattaagcagttttgattaacaccataaacaaaattttgtctaaacaaaacataaagaaactatattttatattttataggaagaactaaagaactatttgcatcatatccatcttctctttgttcccctagagggcaccgagcatggataccacaagtatagcatggagcacatatatggttgagttgaggcaggcccaatggaggccaccattgataatagtgctcaacttcctacttactaatggaattatctctgagggtgccgatagtgaactaggattaattaaaattgtgctccacactggtcgtgagactgtgagaggcatgactatgttgacccatgcttgaaggaatcttgatggttccacccattagaggggcatgtctatttttttaacggtgctatgctaataaccaatagaagcgttagttttagaatatttattcgtagatttagaaataagtgttgacataaacatttaggtacatagttgaaagaatgtttatgcattaatgatgtat

SEQ ID NO: 47231 - DNA, 1146 bp, Oryza sativa
  unsure (1)..(1146): unsure at all n locations
atatatatatatatatatatatatatatatatatatatatataatggatatattttttaaataatcataattttacaaaacaaagaatctaccatcatataacaaagaatcttcctttcaaataatgcactattttaaaataaattatgttgatatgtacctattaaataaacaatatctatattaataaatttatacatgcacataaattgatggccccattacataaatcatcagatctacttttcattaccttggtctattattcactgtttcaaaataaggtctacaccactatattgtgtacccattaaattaacaatttaaaatctatattaactaatttaacttacactagaactggtggacttattattataatcatcggatctattgtttgctaataaatcagcgtncgaaattctctttttgcccactgcacaatacacgtatgcacctttgcctttcgcatgtgtgacaaagtgtagtgtctgagacatataaggtgatcacaaccgctgtagagctaccactttgccacaaatcaaatcatatatggagatgattaattttgttaataacatgaaaagaaaattaatgtgtgatgcagtgagagaataattaagtaccatgaattgtgcttttctcaccactaataagcttggtttaagttgaaaccaagagttgataccattnnnttttaaggaattggggtaaggtaatattaaaatttggaacaattggttggaaaaggtgaaatgattcataaggtaataaatgtaaggccataattgacgaaaatgaaaagaattttaattagaccaagggtaataaaggaagtttaaggccttttttttttttccgattccaatatttgggaatttggttggaagcctttcaaggtttttaaaaaggtttttttttaaattaaaacaattttactttttaaaaagccaattaattatttaaaccctccaaaaaaaattccaataattaaaataattaacccattccaaaaaaaaaaattccaataaataaaataattcaccaatttcagctatggtaacccttaagaacaccattttttttttcatgcaagtcatggtgataaattattaaagtcgtaagatgaatatgtaagagtta

SEQ ID NO: 47232 - DNA, 711 bp, Oryza sativa
tccccagatggtatacccgagcaatgatgagagggagtaatatagatagctgaatattgtggtgacttggtcttatcttattattattttttcaacatatataaacccatgttgcatgtaactcaaaaccatgctgtgtagtatctttacagggcagtcgtgaatgatgcttcctatgagttcagcatgctcaggaggacaattccccggagcttcacctcatgggataataccaaagcagttcagcagagcgcctcgtattcgtgtcagtataagaggtatgaggtacctcccaagtgctacaaaagatctcttaatatatggtatacctctttgctactccctccgtttataataagttttatattataagtcgcttgattttttttctagtcaaactttattaagtttgaccaagtttattgaaaaatttagcaacatctaaaatattaagttagttctattaaatctaataaaaattaatatattttgtataatgtatttgttttgggttgaaaatactactatatttttctataaatttggttaaacttaaaagaaatttgactaggaaaaaagtcaaatgacttataatataaaacggaggaagtatttgagagtacagttgtcgaagctgttatactagacagataaattttattgtctatcacaatcctttctattgcaaagagatatctcacacatttcctt

SEQ ID NO: 47233 - DNA, 1562 bp, Oryza sativa
ccggcgcccccgacagctccgccactgctcatacaggaaacaacctcgtctgacatagtgtcaaccttttgctattaagacttatattacttgtttctcgtcctttattctatttctttgcacagacttcattgcacaatcaaatcaacttatattacttggaagatacccccttggttccacaaaggcttcatttttgggtcatgtgtccaacatttgaccgtccatcttatttgaaaaatttataaaaaaacaaatttaaaagtagtcacgcataaaatattcataatttatcatctaataaaaataaaaatataaattatagaaactttttgaataagatgaagagtcaaacgttgcatccaaaaactgaaaaatggagtctttgtgggatggagggagtagaatagcacaagtacactgttaatatttcatacgaatagaataacccatcatctgtcccgtaggcttagaaatggcacatgtaagaaatgaagtccacataaagtttagtttgcaagatttgatatatcaagatagctcagtcctaaaccacataaaagagggtacgagcggtttaagtgttcgaattaaatagatgagtggtctattttgtttgctttcatagttgaggacttgagggggccaattgtacttttgtaatagttgagatggtaaaccggagcaatgatgagagggagtaatatagatagctgaatattgtggtgacttggtcttatcttattattattttttcaacatatataaacccatgttgcatgtaactcaaaaccatgctgtgtagtatctttacagggcagtcgtgaatgatgcttcctatgagttcagcatgctcaggaggacaattccccggagcttcacctcatgggataataccaaagcagttcagcagagcgcctcgtattcgtgtcagtataagaggtatgaggtacctcccaagtgctacaaaagatctcttaatatatggtatacctctttgctactccctccgtttataataagttttatattataagtcgcttgattttttttctagtcaaactttattaagtttgaccaagtttattgaaaaatttagcaacatctaaaatattaagttagttctattaaatctaataaaaattaatatattttgtataatgtatttgttttgggttgaaaatactactatatttttctataaatttggttaaacttaaaagaaatttgactaggaaaaaagtcaaatgacttataatataaaacggaggaagtatttgagagtacagttgtcgaagctgttatactagacagataaattttattgtctatcacaatcctttctattgcaaagagatatctcacacatttcctttgctttccccaggagcagcaggtgttgagaagagcctgggattagggaggaatgcgggaagccagcaaggcatggtacatggcccatttttttagggagtatctaaaaaaccccccaagttttttaagggaaaaactttcaaatctaactatagtataattgttatataattcccctataactatta

SEQ ID NO: 47234 - DNA, 678 bp, Oryza sativa
agttttaaatccaacaacattttttcattaatttcatgtccatttttttttgagatttatgttttatgaatcatccttgatatgctttgatcttgcaaattgggatgaaaatagaagtgcatataaccttgcacagggtaaaggcatatgtttaaattttctctcgtgtattgaagtaatgatcatagattcatagtatttttagtgaattctcactaaactgaagtctcttataacaaatagaaatttctagattgttctacgttaaattcaagaatttacaatgtactatagcaagttttaccaaaaagaaaaacatggacaatgttaagagaaattaattaagttggtagaaagtcgttagatgtctaacaggatataagtaataggtggagatccatttgtggtttttctttgacatatagataatttcaattttaattgtcagggagataaaaaaacagagagtaaaggaatggtgcatgccacacacgggcagggagggaggaaggtttggcatgtttttctaaatgattaatctaacgacctaaatgatttgtcatatgtttaatcgaaatcgatggttggaagttttcttttcttgtcagaatttggaggatattgtctcacttaaaagagcaatgtaacagcttaaagagtgcttataagatgtataat

SEQ ID NO: 47235 - DNA, 952 bp, Oryza sativa
  unsure (1)..(952): unsure at all n locations
ttaattagctagctagccccaactcagcccctgcattaaaaaggttgttcccgcaattaattaggccagatcggtcagtcccatcgttcggtatactcgagaaaaaacgaaacggtatatttacaagtagaaaataaccctcggtcccaaaatgtaagcatttttagctgtgaatctggatgtatggagtattttataaccatctaaactacgacaaaaaatttctaaaatcaactttaaatttaaggttaaaaatttagattttagctaacaaattaaacataaatatagcgaaaagatgggtcacacacacggcacactctccttgatgtaaaatatggcaccccgtgcccatcttattgtactcttaggcctggtttagatccaaaaaattttagccaaaaacgtcacatcaaatatttgaacacatgcatagagtattaaatgtgggaaaaaaaatcaattgcacagtttgcatgtaaattgcgagacgaatcttttgagtctaattacgccatgatttaacaatatgatgctacagtaaatatttgctaatgatgggttaattaggtttaataaattcgtcccgtagcttatatgcggaatatgtaatttgttttgttattaatgaacgtaaactaaatacaaccnnnnnnnnnnnnnnnnnnnnagctcaacgtctcaacgatgtggcatcagcgagaagctgactatccagccgggcagatcggcatagaaggagccaagaaggtgacaaaaccaggccacgtgatgatgcggcgactgatggaaagtttgcttgagctggactggggcggggcgccacggtcaatttggacgcctcgactgtggcacgaacgaaggatgcgccactccggcgggcgtgcgtctgtgagactgtgaccagtgcgcggggccaccggtcagctagcccgaaattccttccacctgc

SEQ ID NO: 47236 - DNA, 651 bp, Oryza sativa
acagatgttgccgtcgcccgccgtttcccgccgatacccgttgcggtcaccacagacgcccatcagaaagaagatgtgaggataagagaaggtgtggaggggtagttgagtagcattttcatgtaaatagactaaaaacttaaagggtagtgggtcttttggggtggagtggagctgtggagcagcaaaaacctagctccacccccgtagttcattttctaggaatagttctgctaactccgctccagaaaacggaagatatggaccgtttggcacagctccggttctaggtaagctagagctgtgccaaacggggcctttatttagaattttcaatgttatcatttgatgatctccatggtcagggatgcttatggtacagcttcatcaagaagagccttcatggcatatgtgtttgaagggttaggcaacctacaagactggaatcaggtaatggcgtatcaaaggaagaatggatcgattttcaactcgccttctgcaactgctgctacaataatccatggccacaactatagcggcctcgcttacttggattttgttacaagcaagtttggtggcccaggtgtgccccccccctccccccgggtactatatgtattttgcccaagcaagtgaccaagaatgtcaact

SEQ ID NO: 47237 - DNA, 656 bp, Oryza sativa
attggttttgcagtatgcactgaatagattgcggaaagcgtggagtttgatgagagccctgcactggcaccatggccacccatgcagtgtcgtatgaagatggttgtaattggacatccctaagctgcttccttatcttgtcatgcagttcattcttatgctgcatatcccatcggaataataaactcaaccatggatatgtttcacaaagcaatgcatgaggtttagttataatactcagctgcgacatggtatgagcacgctgctgtttgatctaccctaaatctgttgatagtcacaactaatcgagtctggttttttaaagctttaataggatgcaatcgttggtgccttggtggccaacgtttatctatcccttgttaaaggtgttgtattgaaattgttgtggtgaaaacctaactttttgataggacaatattggtaaacatatatatgatgttttctttgggagggtactatcgcagtctcttggagagtgcctcatttgcatagatggccttcatgtattcttttttcatatatctttcaaaatgcattttcatcttttggcatgttgttggggtttttctactaattttggcagtatttttggttgggcacatttttggcttaatactagtcagtaccgaggccaa

SEQ ID NO: 47238 - DNA, 733 bp, Oryza sativa
taaaaatgcttacattttgggaccgagggttattttctacttgtaaatataccgtttcgttttttctcgagtataccgaacgatgggactgaccgatctggcctaattaattgcgggaacaacctttttaatgcaggggctgagttggggctagctagctaattaagataagccctttaatttgttctctcagtgattgggaacagcattaggaaacagtaaactgctactaaaatttcctgagcatgatgggaccggtatgtgacatggccagtacaatgatcatataatccgctgagatcgatcgctggaggttctgggtctcaggtcactcagccgaaacagtggaggaatcgattcctcaggataaccccgatcggcccggaacgaaaagggttcacgccctcacgactttccatcaggaattcaggatagcaccttttcggcacacgtcgtattcttaccagttgaaatctaagcttaggcagttgttccagttccagtaggagctccactgtggacttcggacttcaagtgcggatgcggatcccgtgagaagtgaagtgtttgccgtcagataatgctccaaatatgtaatactaacacactatttatggaaaatgaaggatacaatgcatacaatcattttagtgttaaccacaacaccatgccatgccggtagacgttgacagggatcgacgattatttgaacctaggtgattaccgggcaaag

SEQ ID NO: 47239 - DNA, 666 bp, Oryza sativa
caattccactccaggcccaactccaagagttaaatttaggagttggagctataccaaacaggcccttaaataaaggaattggatctggagtggagttgtggagctgactaaacccagttccactcactctatgagagagccctacttagctttgcttctattttaaatggaactgaaactatttggctgagctctatgaaaggtggagttggagatgtgctaaacaaaccttaagtataagacggtcaaatattttagttgatcacaataaaacattatgctatatatagtgaaataaaataaacagtcaatgaaacatttattttttttaaacattatgttcgtctataaaatattgagtattaacggtttgaaatatttgtttttatttcatcggaatataatcatatgatatattgttttaaagatttaattataattaatacaactatgtgatcaggtcgtagatcggatatagtttaagagaaaaaatattttaaagctcgctaatgcatgcatgtacaaataaaacatgattaaaaaattggtgtactaccaaagttattgtgcgcatagcgcattacaacaaggaaaagttcctagtggaaattagtgagatcaaagtattttatcattgatttctttgtgaacatgatgagtatgata

SEQ ID NO: 47240 - DNA, 700 bp, Oryza sativa
acaaaagagaagagaagagctattagagccatacccgaactcttccgaaggcttccagactcctgatttatactctattcctattccaccaactagatactactaaactaaacttgagagaaatgagagcccctgagcccctgattcatatttaatacatcgtaaaatctaattcgagagccatctcgttttagcgttatcgcacgacgctgggagagtcgtcctattgcgcgcgtcatcgtggagtccatctgcgtgggcctcgcagtcacatgcgtggctttctggataaggatcgagattaaaccactccaaccgcacatcacacgtaattcttgcttcaaagagagtcagagagagagagaggatggccactggcttctgcgttggccggtggtgatggcaatgaggacggcgacgacgtatccaccaagcggagaagggcgacagtgagcacgggggtctccgtcgttgccgtcgtcaaggttgaggtaggaacgagtgggggtgatgatgatgacgagtgcgaggcggagcggtgaggcgcactgtgtaagcgatgtactcgcatctcagcatattgtaagagaggggtgaggcaaggtgaccccctctcgcctctgctctttgtactaggagctgagcttcttcaggttattgtcaatagagctcatgtcaatagagctcatgttatggttac

SEQ ID NO: 47241 - DNA, 2427 bp, Oryza sativa
gtctctatctgtctgctttacttagttcagattgtactcctgttaaatgaactaggaaggtggcccgcgcgtatgcacgggcacttatattattgaaaggtaagattattgtttgttcagaaattttgtcttatagattaagggcaaactaaagtttagataatattattttataataatttaagggttctatttttcttaacgtatcttaaaaaaccattcacaaacttaagtaggagatggattaagtacttacgatttttgaatcatgtttcttttttctcgaataaataaaaaactattgctagttaattatcatataatccatctatacacataccgtgtagtacgaccacaaatgaaaaatgcgagtgcaagatactcaaaattcttttgattaaatcgtctcatgaaggcgcatgatatagtaataaagagagggaagcatatgcatgggaaaaaaaggaagaaggagaaaaaatgaaaaagggaggggaagcgtacgtacccatgcacgtaggtccgtacctatgccgcgggaggagagatgggacctcgtactatttagtttgttctaagatcaatttaatctaacggtttgtaatattggaccaaccgatttaagtgaaaatcaagaaatagatactttgtttttttcttagaatttctaatatttgccctaatttattagagcaccacgtcgcagcttgagagcattttaaggaattttaaatgacttaacacatgtaattagaatattaactgtgcaatatatatgtatgggacatatggtaatatttgttccagtttcgtccatgtttatatacatgtagagtgaaattaattttgtggcttgcaagcctctaattaatagcaattaattttgacacctatttacaattgttcaaagtaactcttacatattcatcttacgactttaataatttatcaccatgactcgcatgaaaaaaaaaatgtagtacttaaggtttacgatagctgaaattgatgaattatataatttatgtgatatattttttttgaaaatggatgaattatataatttatgtgatatttttttgagggtataaatgaatgaattgacttctaaaaagttagaatgtttttaatttaaagaagacactatttagaaacttggaaagcatgcaaacaaaattccaaaatatggaatcgggaaaaaaagagagggccttaaactccctttatcacccttgtcgtagtaagagttctatcaatattcgtcaatattgcgctcacatttataacataatgattcatttcacctatacgaacaaatagtacaaaatctaaatatgacataacacagatacattataattattatgtaatcaactctcggtttcaacttaaacaaagctaattagtgttgagaaaagcacaatccatggtacttaattattctctcactgcatcacacatttaattttcttttcatgttattaacaaaattaatcatctccatatatgatttgatttgtggcaaagtggtagctctacagcggttgtgatcaccttatatgtctcagacactacactttgtcacacatgcgaaaggcaaaggtgcatacgtgtattgtgcagtgggcaaaaagagaatttcggacgctttatttattagcaaacaatagatccgatgattataataataagtccaccagttctagtgtaagttaaattagttaatatagattttaaattgttaatttaatgggtacacaatatagtggtgtagaccttattttgaaacagtgaataatagaccaaggtaatgaaaagtagatctgatgatttatgtaatggggccatcaatttatgtgcatgtataaattaattaatatagatattgtttatttaataggtacatatcaacataatttattttaaaatagtgcattatttgaaaggaagattctttgttatatgatggtagattctttgttttgtaaaattatgattatttaaaaaatatatccattatatatatatatatatatatatatatatatatatatatatatatatatatatgtaaaaaggaaaaaaaggaaaagaaaggaagcatacatacatgtacgtacgtatatactccacctgccacctgccaacgcgcgggaggaggataggtgggacccatgatatttagtttgttttaagatcgatttatctaacggtgtataatattggactcaccaatttaagtaaaaatcaaggggtagatgtttttttttcttagaatttctaggattttctctattttattagagcatcacttggcggcttgagtgcgtttaataggtaaatgtgtaaaatttattttaaaatagtgcaatatttgaaaggaagtttctttgttatatgatggtagattctttattttgtaaaatt

SEQ ID NO: 47242 - DNA, 2155 bp, Oryza sativa
ggggtagatgtttttttttcttaaatttctaggattttctctattttattagagcatcactgggcggcttgaatgcgtttaattaggtaatgtgtaaaatttattttaaaatagtgcaatatttgaaagagagtttctttgttatatgattggagattctttattttgtaaaattatgattatttaaaaaaatatccattatatatatatacatatatatatacatatatatatatatatgtatatatacatatatatatatatatgtatacatatatatatatatatatgtatacatatatatatatatatacatatacatatatatatatatacatatacatatatatatatatatacatatatatatatggaaaaaagaaaaaaaaggaaaaaaaaggaaaagaaaggaaggaagcatacgtacatgtacgtatgaacctgccacctgccaacgcacaggaggaggataggtgggatccatagtatttagtttgttttaagatcaattttatctaatggtgtataatataggacccaccaatttaagtgaaaatcaaggggtagattttttgcttttttcttagaatttctaggattttctctattttattagagcgccatttggcggcttaagagcgtttgtaggaagtctcatggacttttagtatataatagatagatagatagatagatagatagatagatagaagatagatagatagatagatagatagatagatagatagccagattttgtttggttactggtagtacttagtacctcgagaggtacaacaaacctcactatcacgagttgttggatcaaaccataacatggatattgtgtagctcaacgtcccaccactagacgttgttgtgtaaagtatccatggctggccggacaccctactaaatagcgtccttcctaattttctaattccctccctcgatttacttatttttattcatgcatcattgattactacaaataaaaactcagttttccttagaaattgcaagaaaaaacacaaaaatatattagagaacgactcaaaggaaaatatccattacgttatacctctttctaacttttcttcagtatctacatgaatttagtcattcctaaggaattaatttgataggatttgaaaatatccaaccctttgcttttaagtagcaaattatttttttgaatagaagggcaggatgactcactacaagaaatatgaccttctgtgatgaattcctcatgacatcggagctactcatcattagcacattccattttatgacgattagtatgagatggggtggcttagtgacgaaaaaaaggtgttcgtcgttaaataccaactagaaatcgtcattgtgacaaatattaatttgtcataaggggcaaaaagcaaacgttacggatttatatatgcatttctagaattaataaaaaaactaaaattttcctttaaaagtcatggccggaaatatttttgtaatattctatgtggtctaaattattctctaaaatttttcgtgaattttcgaagctcaataactagttttaattccccaaatttcatttaacctactaaaataaatgaaaaataaattaaaatccctctctctatccttgggcctttttcggcccatgtgtcactctatccctccctcagcccacagtctctctctccctcctcgggccggcttcaccttcccctcctcccactttgggccaccggcccagcccttttgctcctccctcgctgagaaatctattttgcctccctcctcgcaattcaaataatttttcaggtagtaaatgatttttaatgaaaaagttgtgaacaacaaagttgtataacttatcaggatctacaacttttgttttggtcattttgctatatgactttgtttcaataatttgaatttgaatttcaaattatgacaacttcaaacaatattttcaaatactaaatgatttcaactcaaaaagtcatcaacaacaaagttgtatgactcacaatatctacaacttttgttttggccattttgctatatgactttgtttcaataatttgaatttgaatttcaaattatgacaacttcaaacaacataacattgttcacaaaatttacatctggttttatgtaaatt

SEQ ID NO: 47243 - DNA, 1263 bp, Oryza sativa
gatgggttatacaactttgttgttgatgacatttttagttgaaatcatttagtatttgaaaatattgtttgaagttgtcatgatttgaaattcaaattcgaattatttaaaacaaagtcatatcaaaatgaccaaaacaaaagttgtagatattgatgagttatacaactttgttgttgatgacttttttagttgaaatcatttagtatttgaaaatgttgtttgaagttatcaaaatttgaaattcaaattcaaattattgaaacaaagtcatatagcaaaatgaccaaaacaaaagttgtagatcttgatatgttattcaactttgttgttgacatttttttcatttgaaatcatttactacccgaaaaattatttgaatttcttgtattttaaaattcaaattttatatagatcaatcaaactcagatagagaaataaccaaaataaaagttgtagatctcaataagttatacaacttttccacataagttaatttagtatgataaaattcgattcgaagttttaatattttgaaatttccaggttaaatgaccattttgtgcaagtaacttgtataataggtttccagatagcaaggttattctggtaaaatcgcatcaaaattggtacttccctcaaccctagccgattccaaatctgagtccagatctcgttcctcttctttccccaaaccagcgcctctcctcctcctcttcccgcaccgccgcctgattcgacgagacccccgcctcgtccttcctcttgttcgccgacgacggcgctgtcgctggggttaggggccatggcgcgtcgcggttcccctctcctcttctctcacctcgcctcccatggcggccgcgctcctccgccgcacgctccacctccacctccgccgcgtgctcccctcccctccccgcaccggcgccctcctcctccatcgccgctcgccgtgccgtcttactcccacctaaccgcttaccgcgctggcctccgtctccgctaccgccacgctcgggagcggcggttctgccgccgacggcactcctgggcctagggcagccagatcacgtggcggtagtccccgggcgtctcgacgatggcgtgtggctgcatgatgcattgacagcttgtagcggcagccccggggcgctttgattgcctgatttttccgagctgttgcacgatcagcttggaagtggattcgtcaccgcctctccatttccccaccacgtgcatggccaaatgattgcgtgagcctaa

SEQ ID NO: 47244 - DNA, 673 bp, Oryza sativa
tcataggtgggataagcctcatcaacaagagttctatactctgaagatgtaaaactactgtttcaggctctctatactacagtaaacgagattggcgcaaggcttctgcattacaaggccatgatattaccaagtacttgctagaaacagtgagtctccaatgtgcgatttcttgaattcttttgttgcaatgttgttgctattaacaagttgatgttcaaattgcagtggctagatatattgagatgctactttgtaataattagttgtaactctttttgagtagaggccgggatattatattttattattaaaaaaagatatattgaggtgtatgatagactgaggcagaatggcagaggagccaatatgtgccaaagttcgaagaatacatggagtgtggtgtgacctcactcacgcatggagctacagtgatctcgggaatgttttttatcggagtaaagctcacggacgacataatcaaacatcaagaatacaacgaaatatttaggctggtgggcacttgcggccgtctcctgaatgacattcgaggcattgaggtactttctctcatatttttcaaaattttattagaagatagagtacattctcatctaataaactgcatctttttttataaataacagcaagcaattttatcagaaaaatacat

SEQ ID NO: 47245 - DNA, 575 bp, Oryza sativa
aacaaattaaagggtatctatgataattacaccctaattacactacatttacagcctacttacataatgtaagtaggctgtaactatagtgtaattactaaagtaaaattggaatgaatacccatggtcttttatattgatgtgcacgccaactaatgcttcacagtgataggggaagccttactagtggaaaaaaaattgactaatttttagtctaaaatgtgtctgacatttagatagatactcccttttaaattgatgtgcacattaatggttcactgtgataggttaagcctaactactaccgtagtggaaaaaaaaactgaataatttttagtctaaaatgtgtctgacattttactccccaaaacaatactactattcgacttcacgatccctttgccggtaccacctcgcttaaccgaaacccccatggtactgctcagtactaccaattctgagccgtctgatctacaccaacagacgatcgggattaatttggaacctagccctgctccatcataatagcgtatggacacaggactgatgagcatcgtctttctaccgccacccgc

SEQ ID NO: 47246 - DNA, 685 bp, Oryza sativa
ctcctactttaacttagatttggtacatcatttaataaggagtatcatagtacttcttttcaaatattaacatatgctaaacaatctaattaaaattataactattttgagacagaagtagtaactttttttcccccacccctaccacccacacctttgagaccaaaagacagtgagagtgcttctgccagtcatccggggtactggatcgggctatacaggatttgttcaatctcaccgtcacgcgcgttgtcgagagaatttgtacttggttatagtttcttcttcacacttatacattgagcgcatcacagcggatttgatttgcatgtactgataacgattccttcttttgatctggaatatcttttaaaaaagaacagagtatattatccaaattatataatcccatgagtgtcaatgccgttgggttttgggggcaataggggcacacataggccccgcacggtgctgcccaatccaatcatttgaccattcgtacagacccataccatggacatactttcctcgtaataaaaaaaatcaattatctacgtatatagttaggattaattttttagacgaagatagtaaatacacacgtgaggtggcggtaggtctcagcaagcaaacaacggtgagggtggactccactactccaacgtcccatccacggcgagagcgg

SEQ ID NO: 47247 - DNA, 732 bp, Oryza sativa
agtcattcacacaataaaaaagtgtggagcccactattatcctctctatctccatccttcttcctcctcccgctctcgcttctctctttctctctcccattttctcttcaccttggccggacttctggagcaacgacgacacgtcctgtgggtggtgcggctgaagaggtcttcgccctctcggcgtctcgcctctgcagctggaggaggagcttgtccttggcgtcgacggtgaggttggctcgccccttcgccttccggactccctcatggaggccgacacttgcccatctcctctctcttttagctcttctcgctgccgacgaaagacgcgccgaggtgccaccgctcgcacagcaagaccagacgacgatcctaaaataccaggaggcgcgcggcgggaggtttgagaagaaagaggcggtggtggtggagaggcgtgcgcgggctacgcctatgcggcggatcagtcggagatcggtgaggtgagtggctccgtgaggaggatcacccgcggcgagttcttggccgccgagttttcacgaggttgtcgccgccgcctcatccgccgccgttctcatttcggagatgccacgcacgtgtctctaccgctcgccgcggtctccgcctcgtcaaccgcgtctctgatgctttcttcgccatcgccgctacggtcgccgccctcgcttgcctgccacggccgtagaggaataagaagaggagaggaaagaa

SEQ ID NO: 47248 - DNA, 627 bp, Oryza sativa
ttagcgccattatctaaaactaatttagtcggttagatttaactgctcctgaaaggcgagttgccagcgcgcacgcgcgcagtagcttttcgggagaaagaaccgatgaggcaaatcgttgaagcgattagaaaattcaaacaacgatttcaaaatgcaacggttctgccgtcggtggcatcgtggtagcggcaggacgaatttgaaggctgcgccccacgggcctcatcgtcatcggtaagcaaggtgggactaaaaatgtgcagtacagtggctgcacaattataacaaatagacaggttcataaatctgctcgccacagccacgagatttcaccgggaaagcgtgctcggagctggaaagggggaagtaaaggaagttggaactgagcaggagtaacacaacatgtgtaatctaagatacagaaacagcccttgcaggcacaagagatgatcaattgtgtttgtaacagaacggcaaaaaaaaaaaaatcaaaaactagcatccagctagctttttcaaaccggacacgagtgttgctggcaaatctcgacgaccaaaagctatgcttccttgggtttggtgagtggctgcgttccgttctccaacaaaaaatgaaattttgga

SEQ ID NO: 47249 - DNA, 1683 bp, Oryza sativa
tcactgatagctggtcacgtatatattttttaattcttttagttaattgtaatgctgcataaacgtcatgttcagcaaaaatcaccttcagtgccacttgaggctcccaacctcactccctaatttatcgcgtgcacgctttccaaatactaaatggtgtagtttttttttaaaaaaaattctatagaaaagttgctgtagaaaattatattaatctattttttcaagttttcttttggctaatacttaattaatcatgttttaaatcatcgcactgtgtttccatgtggagaggaagggttcctaacccctccaaaagatcacagcctaaaggagtaattttgcatcggttttcatagttgaggggttaaaatatctagtattgctaagagcgagtataataagatgatgtaagtaggctatacaggctgccacatcatatttatgcttatgtggataagagagaagattagagagaaaagaagcggagtacataatagattattagtagccggctgcagcatgggtttcaacatactatgtgagataggtagatttaatacttcctccgtttcacaatgtaagtcattctagcattttccatattcatattgatattaatgaatctagataaatatatatgtctagattcattaacattagtatgaatgtggaaaatgctagaataacttacattgtgaaacggagggggtattaattatgcattatatatctataactaactattataactattatatgagcaggctattaggttggttattgatgatgttttaatttttaagaactagtggttggttatattattaaacttatatttaaggggttggaatcagattgaacagaaagtcaaatgcacttattccgtagaaaaaaaagagggcgcaatggggaatttcttatttttacatctttttattaaaatattttttaaaaaatttgttttgaaaatttacaattctagtggcctctcgctctttgggagggcgttttttaaaaatcgcccttcctgataagggacctaaatataaattttttatttgtgttcaaaccctttccaccggtgttaatcgtttaaaaactaataatgcttattcgacactccaaataattttaaatggaaaagtgataaacaacaaagttgtagatctcatcaagatgtacaatttttatataaaatttatctccatccgatgtcgtttgaaatgtatatctgagatttttaaaatagttttatattgtgtaacgaatatatggatatctaaaagatcttaaatgaaaacattgttaactacaaagttgtagatctcctcgatctctacaattttgatataaagttttatttcatatgactttatataatataattttaaattgtaaaattatagagctaataagctgtgttgaaaaatttgcatttaggtcccttatcgctctctggaagggcgatttttcccagaaggccagagacgactagaattgtaaattttcgaaaaaatattttttaaatattttaataagaaaatgtaaaaataataaaattcaatggggaggtcgattgcgacagtctctaaactctggcgggcctctccgaattggacgatagaaagcccaataccgttaacagcccatcactccgtacaccctagtcgatccgatcct

SEQ ID NO: 47250 - DNA, 2470 bp, Oryza sativa
ggacggtgccctcccctctgccggatccagcaggaggagaggtagcggtggcctggcatccttgcggcgacggtggcaccctccccttccggcgtcggtgtttttgtgcttgtgatgttcttgtgttgtcgttgttgttgatgaaatatgttcttgtgatcttgtagtagtattttctctaggattttatgatgattccgatttgtatttggattgagattgatattttgtttttgggttggattggatgtgggatttggagaggaggtgcgcatgaggttacgaagggacgaaaaatcggtgtgatgattggaaaaatacgaatatttatattagttatagatatatacgtatgtataaactttgtatatgtgtatataaagtttatacgtatgtatatgtagtatatatgtacgtgtgtagatatatataattttttatgtatacacttttaatttataaaaaatatatatacgtctataaagtatgtgagcgtacgtagaaaaaacccaaaaaaaatacacgtaatataaactttgtatacgtttatacaaagtttgtatacatatgtataaaaacccctaaaagtacatgtatacaacttttgtatatacgtgtatacaaagtttatttatgtgtataaaaagtttgtatgtgtacgtatacacacatacatacttattaaaaaaccgaaaaaaactaaaaagatacaaaagaaaaaaataagaaaccaaaagatatggacgaaaaaaacaaaaaaaaaagaaactgtatgaagaaacagtagaaaaaaaaaacgcgttttgcgccaccctcctctctgcgcgcgacaagtgtccagtcgcgcgaggcacccatgctactgtcgcgaaatggcgatctcggcacgcgatagcatcgcacccatattggcttcaatgcacccatatcggcttcaatggtacactcttttttttttccggaacgatgactagttccatcccgtgcgaacttttttttttctgcgtcaacccaattcttgtctcgtgggctacatatattattggctgccctttaggtccatgtattgctagccatttttcttatgagatgtattgcgaaaactcttattatcgtacatccgatacaagacgaaactacataaggtcctataagataggacccagttgaaacttatcctcattcctcctcgtccccaaccttatcctcattccggcgtccccatgctgcacgcgtggctgtggcgtcatcaggtggcggtggcggcagcgccgccgtctacggtggcgctgccgtcgcgggtagctggattccggctattcatccacgccccacgagtcactggaggtgttattttgggcgtcgccggggtaggaggagttcctcggggcacggtggcccgtgttccgagcggcactggcaatggaggcatcgggccgcgtcgacggcaacggccgcacgccgttgttcttcaccttctcccctggcatggtggtggtgtacggacgaaagagagggaggaagcatggggtggtgctcgtcgccgacgaggactaccatgcgtttgtgcagcagccagtgcagcagtttaggcggcgggatgcagtgagcacgggcaaccacattggcggcaatagggcagtaagacgaaaaagcttgagacgccatcatctgagagggctctgagctcggcagcgaaggtgaggaggcttgtggcaacgtcaaactagttagagaggattgttgcacaccacatgtttttttttttgcacatattatgtttgtgatattgcaatccgtcttttcggaatgtttcttaaatcagtaccggatgttgcatatattgggtttttgttgttgcagacaatgttcttgagtgttgcatttgattgaaacatcttcgataaagtggtaaaacattcttcaatgaaaactgaaacatcaagaaacaattcatattgaaatatttttttcgagcaatgaaacattgcaatattcattcaacatacagtgaaacatcgttcggagatttcacgttaaaatattttttttcgagcgatggaacattgcaacattcattcaacatacagtgaaacatcgtcctatttgcaaatctccagacatccgatgcatagctctttccgaagtattgctagtctttcggtccatatgctagaaatatttggtatatgaattttttattttttatacatagtatataaactttatacgtgcaaatatttcgtaggtaaacttcttacatgtaaactttgtacatataaactttgtgtagaaaaactttgtatatttaaattagatgtatagctttgaaatgaactcataatcctgttagcatgaacaaaaaatatatctatgcgtaagagcttttctacatagatattttgtagatatgtatataaaaactttttattataatttttttacatgtaacaaattttggaaataattg

SEQ ID NO: 47251 - DNA, 745 bp, Oryza sativa
ccgtcttgatttggatgagtttgtaccaattttatcgaaatgttttaaagttaattgagatcagcatatacctataccagttgcccttccaccgccaccacctccaatcctcccatcaacctatccaatggagctcctcacaaccagaagaaattggtcatgcatatgctttgttcttatactagatatatgcatgtagagtttttaattagctctgagtatggttgatttgcacttgtgcaccagcactaaaggaggcctgggggtgtggcgcgatccgtagggaagtagctttcttactgacagaattaataaagctagtcatgaaaaaatattgtaataacctcttttctggacgccattttcataacagcgatggtgaggctgtgactgaataatccacaaagtaagcacgatgattgctgcagttatcagttcacaatagtacgtacagaaggcggaggaagggcaggcaggggtggatttatagtataaggaccggtgtcaggcgacaccgacgactttcggtaaaatctataacgaaactacttatccatatattataacaccataatctaagcataattagtatcctataacaccgatagacacatcatgacaccgatgaaaagattttctggatccaccgagggcagggcatgtagcggtacatgcaggcgcacgaagctgtggccctcagtgaggtagggacttcatctagtggccgtcgcgtcgacgcccagct

SEQ ID NO: 47252 - DNA, 648 bp, Oryza sativa
aaaattttcaatgattggcagaagacatttcttagaagttgaaatgctatataaatctatgcacatatagatgcaagatgaataaaaattaatttagtatacgtactagataaaccataaacctagtgatcataataaaattttaggtcatataccctgctgccttgctggtgtgtgcagggcagctagcttgccgcttgtggtcgctgccatatcgccgaggagggcgcccaaaggcgttgctcgctggttgccgccttgccgctttactgcggcacgtcagcagacgtgcagacggcgagcgacgagggccaagagccaagcgacgaccgtgcgatgagcggccgagcatcgagcaggacagcgagacggcgagtgcgagagcggcgcggcgtatgggttggggcagacggacgggtggacgctcgaattgacacacgtgccgaaaacaaatcgacgtgctcgctcagcctccgtttccaactgcacatttcaactaatttattctattgggctaatggtcctgtgacacgtactaagatatttggggccctgtgcggtcacgcttgtggcactcccacaggaacggccctaacttcgtggacgcggagcgacttcagcgccgcggtgccgtaccttctttagctc

SEQ ID NO: 47253 - DNA, 1081 bp, Oryza sativa
aaacatggtagtttattaatctataattaattaagtattagtaaaaaatagattaatatgttttctaaaacaactttcgtatagatgattcttgcgaaaaatgcaccgtttagtagtcttagagcaagtataatagtaggctataagccggctaaatgctgatgtggaggagagaagagaggagagaggagaagcgggctgtaaacttacagccggctcggacacaagaaccaagaaactctgtgaaagagacaagtggaccctatattaattgtaaagagctaactattatatgggtaggctgagagaaggctataaagaaccttatagccaacaagtcggctgtattattaaccttgctcttaaaaagaaataacagccttaagggacctaaacttaacttattccgttcggagcatacatgcggcccatgagacgacccaattgtgtggcggcctgggaatcgcggcccgacgcgggagcagccacagccgtccgatctgatcaatgctccagattgttccaaacctatataaaagttcagtagctaaaccctaaccctaaaatcattttttctcccctctctctcaaaaagacgccgtcgcctctctccctccgccgtggcggcgccgctccccctccccctcccacggtgacgccgtcgcctctcccttccgccacggtggcgccgttccccctcccccacccacggtggctggctgcggccagcggcaggaggggaggcggcgggcaggggcggcgccctcccctccgcaggatctagcgggagggcaggcagcggcggcgcggcgtctctgctgtggcggcgccgctccccttcccccaccggcggcagcgccggtcccactccccctcccacgatggcaggcggatgcagcgtcctcccctccgccggatccagcgggaagggaggctccccctcccccactggggggggcgtcgttacccctccccctcccacgggggcaggcagggacggtgccctcccctccgccggatccagcaggagaagaggtagcggtggcccggcatccctgcggcggacggtgggcaccctccc

SEQ ID NO: 47254 - DNA, 703 bp, Oryza sativa
tcctatctattagggtctaatgcaactaaaatcactcaccgagcaaagagagacagaatcaagagatatggcaatgccgcctctttcgccaccaggttgccaaaaaccgagttcatacaagttcatcacgagttcttatatgtggctcatcgcctcgcctctacacgccacacacgccagctgtcaaccagctgttaccacggacagacttacacggcccactgtggcccatgatacatagggttgggtttgacaggccttgatgagcaatgcttcttgagcttgaagtcctcctctcctctttgctctgcttcttgctcagcttcagcactcagctctgttggcgcctcctcctcagcagcttcagtcttctcaccaacatcttcctggttgacgtcagataagggtctaacactatctcctctgctcattcccttcctagcatctgacctccggcaatcgagtggcgacgtgaaggcaaacaacaagggccgctcggaggggtgttacatccggcgccggagtgcaagtgcggcgaacggcggcaggcgttgtggctgcatgtgggcagccagacaagctgcaaggaagagcaggtgtttagtgattagccaattagctataggtcttgtagatgatttattctttttaattttcagtattgactcctctcatctcagagttctgtcacggtataagcttg

SEQ ID NO: 47255 - DNA, 552 bp, Oryza sativa
atagctggctagctaggaaaattaacacatcttctaccatcaacctaatagtcccacctagcctataatatatatactacatccgctccatcactatatttctcaaatctagaaaaatctatttttaataggcaaatttcaatccaacaatctatcatcttaataactttctcagatttaatgtatgactctccattcttccacacaagattggttgcatggacatccagaaatgtcaatattaatgaatcgcttgtttacgaggaatgactagtagcatgtttaaatagatgataagtagaatcacttattattggtctatgtgtcaagatgaaatatgactatcaaaagtagatggagggagtacatcattaactcttagacacaacttatagaggcttatgccttatggtgcagttaggtataaattagtaatctactactcttctctctcttatttcttatactctcttctccatcttagcacaaatctgatgtgacaattcttacatcccacccatatatcatctcattgttagtcgggcacctcca

SEQ ID NO: 47256 - DNA, 1116 bp, Oryza sativa
acgctcctaagtcgccatgtggcactcctacaaacgctcctaaaccgccacatggcgttatctaatcccaccgtcgattttcacttaaattggtggacctattattttacaccattggattagatctattatttaaaaaattataattttctcctctttatacgatacaagcgctactactatcatgtacgatgcgatccatacagacgctactaagttcttctcccctacgtacttacgtacaccaatgaaaacaaaagaatagcttacctgttgtttgcccgaaagaaaaggaaaaactatacgcacgttcatatataaaaaggacagcagaaaaatacatcagtaaaaattgatgaattataaaatatgattttctaaaatatattgcttcacaaaaataaatatatatagttaaactaagctatataataataatataaaatatccaatcattgttctgtataccttcttctaaattatttttttaaattagatatccaattagttattccattgtatttcgtttagttaaattacaaaagttatattgtagtcctaaatacatcacaacacatagggctaacatataatggttagttgtttgatttttttttaaagttcacaacatattttagggtgtgaatatcacttcataaatatagaacactaatttagatctatatataaaaaaataaaaacaacccaatttagttgtgttttttcaaatagatctaattaaattataattggtttgagattaagattctcagagtttttttttgacatttttagaattatttgattggtatttgagtagtgaccagcatacatagtgcatatatagatatgaaaaaaaataaaaaatatctccagccaatgatctttgctataattcaatccttcatccatcatgagatttatggtcattcttctttgccaaatagttttgacacaaatgaacaatgaaacaatatacgcaataaactactcatgatatactttcttatacttaaggaacttcaatatgtcagacacaattgatggatatatgtcataatcttcacagacgtgactataagtgtactacagtggattatttattgtaaataagtt

SEQ ID NO: 47257 - DNA, 625 bp, Oryza sativa
ttggaatgtggctaactcagcctaactgtgctcctggcaagctattgtgcgatcaatcgcgtgtggcgcgatctgttcagtgctttcttccatccaggagaatttttgtcagattgtcttgtttttatttttatatgtaggtatgtcctgtcaacatggcttcatggcttaactcgtttcacaatttctgttggttttttaggctcatagcccataagaccatatgtatactttttctcaattatttccaaaatttgttacatgtaaaaaaattataataaaaagtttttatatacatatctacaaaatatctatgtagaaaagctcttacgcatagatatattttttgttcatgctaacaggattatgagttcatttcaaagctatacatctaatttaaatatacaaagtttttctacacaaagtttatatgtacaaagtttacatgtaagaagtttacctacgaaatatttgcacgtataaagtttatatactatgtataaaaaataaaaaattcatataccaaatatttctagcatatggaccgaaagactagcaatacttcggaaagagctatgcatcggatgtctggagatttgcaaataggacgatgtttcactgtatg

SEQ ID NO: 47258 - DNA, 504 bp, Oryza sativa
aaaattatgtctagatattgtttacaaattcaaaagtatagcttgctagctttaaaaattaacacatcttctaccatcaacctaatagcccacctaggtatagatatatactactccctccatctcatatttccaaatctgaaaaatctatttttgataggcaaatttcaatccaacaatctatcatcttaataactttctcggatttaatgtatgactctccattcttccacacaagaatggttgcatggacatcgagaaatgtaaatattaatgaatcgcttgtttacgaggaatgactagtagcatggttaaatagatgataagtagaatcacttattattggtctatgtgtcaagatgaaatatgactatcaaaagtagatggggggaggacatcattaactctcagacacaacttataaaggcttatgccttatggggcaggtagctataaattaagaaaccggtactcttctctttcttatttcctataccctcttct

SEQ ID NO: 47259 - DNA, 2466 bp, Oryza sativa
  unsure (1)..(2466): unsure at all n locations
tgctctatgatttaacaatgtggtgctacagtaaatatttgctaatgacgaattaattaggcttaataaattcgtctcgcagtttactaacggattctcgcggtttgattagccctaagtgctatagtaacccatatgtgctaatgacggattaattagacttaataaatctgtttcacggtttccagacaagtttgaaattagttttttcattcgtatctgaaaaccccttccgacatctggtcactactggagaaaccatctttgcttggttgaccaaaaactacactagtctcggtagagaaggcggagacgttggcgagcggcgggagctcaacggcggcggcgacatcctgtcggcgacggagcacttcaacgatgcgtactccatcggcaaggggagcttcgggaccgtgtacagcgccgacctcggcggcgggcgcaccgacctcggcatgaagcggctagacgcatcagagaccggcgacgcgtgctgcggtannnnnnnnnnnnnnnnnnnnnnnnnnngaacgtcggcaccgaggggatgcgacgcatcggtgtgaacgagaagccaaacgctgtgttgctgctgttgggcgtgccgagggcgataaaaagcatcgtgttgctgtcgaagaagatcatagaaagagaggaagaagaacagagaaagagagatagacaagtggacccatgggcaaacttgtctttaaccaaagtttctctccccgttttcattgaaaaataataaaataatagaagaagtgtctagcagctaattaccactttttacagtatccatgagcaaatacacgatcttcgggtgtctcacagcaaagaccacaatctttgagtgtcctgtaccaaattttgcctaaataaataagttctgaatgactatatacctattaatgaataaaaatatattttattatacaattgattgctcggttcacaccatcatattcaccgattattaatactaactgtccattaaacttcctataaactctcttaagttgtcacgtggcatcctcacaaacgctcttaggctgccatgtgacgctctaataaattatagaaaattctaaaaaaacaaaatatctaacccttaatattcacttaaattagtgtgtccaatattacataactactattaggagtgtattcgagcgctaaacatacatcagcccaggcccaccccaccccacgtaccgtcatcccacttctaccgttgtcggagtaaacaatttactcctatcgggcgcctctacctcccatctttactcgagtaaacgatttacttcaataataaaaacaactttctgcttccgatcccacaccacgtccatatcgtgctcccaccattatcggagtaaatgatttacttcgataaaaacaacttctctgcttccggtatatattctatttttcccgtacccaaccaaccactctcgaccccacttcattttttttctttttttcggatctgaatcgatccaccatctcagtccacagatcagtgacacaccatggaggaggacgatgacaccgtggcggttgatggcggtggccggtggtggttgaggcgacggcactacttcgggcctcgctgtcggacgctgggcagcaccttaaccaagaaggaggtattcacctggaccaatagcaacaaccaacagctgctccacgtcagcgatattgatagaacaagcaagtaaggaaatgatactctgatttgcatctacatactctccttcaacttcgtgcatgaagccccaatatttttttttgcaaatcaaattaacgtgcaatctccaatattacctgatctcaattgatgggctgcacaattcatacatttgcacatcgtgctccatgtggctggctgcagaggatagggtagagtccgccggtgatggaaattgtttgctatttttcttttgctcgtcatctccattgacatgaaggagaatgttttttgcatttttttcatgcttactagatgatggatggctactagtgcgcaacgtcgagctcatctctagaccataccgctacatccttccatgatttcataatcgactactgctcgctacctggttgccatctccactaccagtcacaagacacagacaatcctcttcatccttatggcaagatccagcaaagccactagatggatttttgactaaatcttcttttttttttctaatttgattcacctgtgagtatttttatctcttgcgtgtgattgagcctgtaattttttcattcatacgactattttgtgatatagatcaacaatattcttagtactaatttttactcttatattgtatattgaacacattagtaaacatattactacacggtggctacgagatcatggctatatcgagaggaaagtggtaactgttttactcgcagaccacggaatgtcttttgtttactcttatactg

SEQ ID NO: 47260 - DNA, 1539 bp, Oryza sativa
ttcgccgtcgatgaggtcatcttcaaacagagcattcatggaggactcaagggtcaaggccaggagaagggaagccatggagcggatcgggctggctccgcgtcttcctcgacatgcttcttgttcttgttcttggagcctctcgccatggccgtcgaacgatgggttctttgagcagctcgtgaacgcggcgaagctagacgagggtgtagtagccggcgacagcgccaggtgactccggcaagctcctcttgtctcccgattggccggtgagagagaacacacggtggtgtgcctcggaagtcgtggccgttgttgagttatgagcagaaggggtcgagggggaggagggggagaagcgaagtagccgaagagatataaatgggcgagtccacgtggatcgtcagatcaagtattttttttttaagaagaggaagaataagtttgggcttttcatgtatgagatgaagaatgttcaggatctttttgtcacacattgccatttatttaccgctaaaacattgtcaggtactagaacacattcagagtatcagattagctgcaccaatgcagtatacatggagaaaaggaagaacttaaaacacattctgaagatgatgaattcaagtagatgaacatgagcatttgtttcaagtcatcagtccaatgcagcatcggaaaggggtttgatttgttattcaggatgaaattgtgccagaacccggaaacatgccatatagcacaaaaaaaagtgtgatatatgtttcagggaaaaaaaagtttcagaatcatcgctcatgctcaaacatcaatcccaatctcaatcaatcctaataaaatccaattcaatttctctcaaaccaaatcttgaaggatcttgaatcaaatctaaatgcatatattattgtatctctatccttcacctttttattcaattcaagaaatctaagttaacatggacattgagtttccaatcttgttaatccattacattaaaaaactttttaatacgaaattatccaaaattttaaactcactgttctttttactgggactggtcttttccctgtagcgtttattctgattcctcattttaacatcgagtttgattttcgtccctaaaccataataccagatataacgcgttcctcaaattacaataccgtgcacccgagatcgtaagcagtatagtgtccgattttgactgtcatggcaagttgattcggctgagtcaatatggaccccacgtgtctgcagcctactcttcttcctcctctttctcccactcctctctattccccatatctcactcggcctcctagcgcgtccaaggacgagttcgctgttaattaactaccctgacgagttactgtaactgccgttgattaattagtgcgtgcttgctaaaatttgcagccatgggagatgtacacgctggacactacgattgacctgaaaatcagcaccacgagccgaaggtcacctactggaccgtcaaggcgttgtgcgtgcccactgacatcttcttccatcgttaat

SEQ ID NO: 47261 - DNA, 538 bp, Oryza sativa
cgtcggcccagatgcccgatgagaagcattctcgctgaaattccatctaaaactcgagaatgctagttctcggtcgatcggcgcgggtgcgttaaatcggacgctcgcccgtgtctcccccatggggcacacccacatgtctcccctgcccccacctgccacttccacacacacaactccattgtaacaaatcacccacatattttagaaaccctatattaggggcatttggtttatttttttccaccaaaaatgttacacctagttactcacaatatttcactatgtgtacatctaacgttgcagtgaacgaaacattccattgcaaccaaaaaaacccgcatattttggaaaccccctattaagggaatttggtttatttttttttccaccgaaaaatgtttcacctaccgacttatatgtttactatatataaatcaaatgttacagtgaactgaaacattttttactatttactgaacattattttatataagctaaaacaacacccgattaaacgagtgaaacattttcggtt

SEQ ID NO: 47262 - DNA, 1851 bp, Oryza sativa
aggggcttgtgcgcccttgcgcagttgcgcgcacacggtgggggggagaagaagaaggggatcggatgtgggccgttggatctggcttggacggtggatagatgggtggtgcacacgtctgactttttctcgggtttttacactgatttgatcttggagttcaaaccgcctaaaccactataaaccctcgattatttttttcttgaagcgtaaaacctttgattataagtaagtccatttgaactagaggaaaaaactaaacttgatttttgatgtttaggataaaatccggttaaggtttcaacttttgaccaaatctcgtagtacggatatacagaatacagcgtaaaccgacaaaactgatgaaagatctagtacattattggactacatctaaacagaaggtaatgatagattgatcaatgttgatatgtgatgtctcaattaaatcaagaggaaagtgcatgaggtggtctctaaaattgtgtgggtgtgtcaccgaggtccttttaactttcgaaatgaatttttggatccctcaacttgtctcgggtgtcatatagatccaaacgggtttcaacccgctccatgtgctgacgtggcatgtcatgatgacgcctacgtgtcagtagaacacatatgccagcacatatagaaaaaattaagaatataatttttctcctctcttttttcatttattttttcaaaattaaaaacaccattttctcccctcccccgttcccctctctttttaaatttaattatctcctatatgactgacatgtgaatctcacttacatgtaagtgttactgtggcatgccacgttatctcatgaagcaggttggaatccgtttggacctatatgatacatatgacaagtttgaggatccaaaaaattttgagagtttagagatataaatgaaacatccatgtaagtttagggagtacgaaggaaggaggagctagtcttacagaaatagagccgttttcatattctattagacttagaaatctggccccaagcaagagaaaatataaccaattttcgatagtcgtcggccaaattaacatttgtctctgatcagaccggccaataaagcacaattagatcatctaatatccaataggaccgtaacatgaatagtggtcttgccgatctttacacagcggctacgatctttcctaagttcaaaataaatttattttgaatttaatctcgtgccaatttttatcgtcaatactgagctaaaaatatatatagtcttcttgcgtttagcttgttcatttgctggtgcaggtaccactaaccaatggttccctggcatggacttgaacagagcatgacgtgttgccaaggatcatcctagcggagtagataccacgataatattcagtactccccctccgtttcaaaatataaacatttttagcataatgacaagttaaatattttcaactttgactattaatagcaaaaaatataaatcatgtaaaattgatattaacattaaacaacctatcataatatgtaactcattttatttaaaaatcttatttttatagatattgttggccaaagtagcatttcggagacgtatcagaatctaaaaatgcttatattttggtacgaatggagtatatatacatatgtttgatgtttcctcgtagattgttaccgggttactttacagccctgttcattattgtcggtggctaatgatatatgagaataagttgtgttggttttgtgatttcacttgtacttgcatctgcacaagcccttttgttaggtgtgtgtttacctttgctaccactaaacactgatcctatcaagatgcatgtaccttcag

SEQ ID NO: 47263 - DNA, 4955 bp, Oryza sativa
ccctatgctctctgttctccccgattctgatcgcttgcgcctctgtgccacctgattctgatctgtccctgttcttcccctatgctgctctctgttctcctcgattctattctgatctgtcccttcccctatgctctctgttctccccgattctgatcgcttgcgcctatgtgccacccgattctgatctgtccctgttcttcccctatgttgctctctgttctcctcgattctatgattctgatcgcttgcgcccgttcttcccctatgctctctgttctccccgattctgatcgcttgcgcctctgtgccacccgattctgatctgtccctgttcttcccctatgctgctctctgttctcctcgattctatgattctgatcgcttgagcctctgtgctgctctctgttctccccgattctgatcgctagtgctgtccctgttcttcccctatgctctctgttctccccgattctgatcgcttgcgcctctgtgccacccgattctgatctgtccctgttcttcccctatgctgctctctgttctcctcgattctatgattctgatcgcttgcgcctctgtgctgctctctgttctccccgattctgatcgctttcgcctctgttcaccccgattctgatcgcttgcgcctctgtgccacccgatgattctgatcgcttgcgcctctgtgctgctctctgttctccccgattctgatcgctttcggctctgttcaccccgattctgatcgcttgcgcctctgtgccacccgattgtgctgctctctgtgtgccacccgattgtggctgctctctgttctccccgattctgatcgcttgcgcctctgtgccacccgattctgatcgcttgcgcctctgtgccagacaatctacccagtgctgtctgatcgcttgcgcctctgtgccacccgattgtgctgctctctgttctccccgattctgatcgcttgcgcctctgtgccacccgatgattctgatcgcttgctgctctctgttctccctgattctgatcgcttgcgcctctgtgccacccgattcttttgatcgcttgcgcctctgtgccacccctgtgctgctctctgttctccccgattctgatcgcttgcgcctctgtgccacccgattcttctgatcgcttgcgcctctgtgccacccgattctgattgcttgcgcctctgtgccagacaatctccccagtgctgtccctattcttcccctgtgctctctgttctccccagtgttgtccctgttcttcccttgtgttctccccagtgctgtccctgttcttcccctgtgctgctctctgttctccccgattctgatcgcttgcgcctctgttcttcccctgtgctgctctctgttctccccgattctgatcgcttgcgcctctgtgccagacaatctcccctgtgctgctctctgttctccctagtgctgtccttgttcttcccctgtgttgctctctgttctccctgattctgatcgcttgtccctgttcttcccctgtgctgctctctgttcttcccgattctgatcgcttgcgcctctgtgccagtgttgtccctgttctttccctgtgctgctctctgttctccccgattctgatcgcttgtgcctctgtgccagtgctgtccctgttctccccctgtgctgctctctattctccccagtgcttatcgcttgcgcctctgtgccgttctccccctgtgctgctctctgttctccccgattctgatcgcttgcgcctctgtgccagtgctgtccctgttctccccctgtgctgctctctgttctgccagtgatgtccctgttctccccctgtgctgctctctgttctccccgattctgatcgcttgcgcctctgtgctagtgctgctctctgttctccccggttctgatcgcttgcgcgcacaagtcattgggacgagcagggcctctgaaaccacaccctcaaaccacaccctcgcctgagatctgcacgggataggcggggcgggtgattagttctgatcgcttgcgcgcacaagtgtccctggttctgatcgcttgcgcctctgtgccagtgctgctctctgttctccccggttctgatcgcttgcacgcacaagtcattgggacgagcagggccttcgaaaccacaccctcaaaccacacccttgcctgagatctgcacgggataggcgggtgatcagttctgatcgcttgcgcgcacaagtcattgggacgagcagggcctccgaaaccacaccctcgccaccctcgcctgagatctgcacgggataggcgggtgatcaggtttttcattgggatgagcagggcctccaaaaccacaccctcgcctgagatctcctacacgaacaatctccattgctggttaaccatctctctgtgcctgtgctgctctctgttctccccggttctgatcgcttgcgcgcacaagtcattgggacgagcagggcctccgaaaccacaccctcaaaccacaccctcgcctgagatctgcacgggataggcgggtgatcaggtttttcattgggacaagcagggcctccgagaccacaccctcgcctgagatctgcacgggataggcgggtgatcaggtttttggggagtgctttcgcatgactgctctcttctccgtctttgtcgtcgttcggttccatctgcatcgcgcaatgtctactggtggcggttctgatcgcttgcgcgcacaagtcattgggacgagcaaggccttcgaaaccacaccctcgcctgagatctgcacgggataggcgggtgatcaggtttttggggagtgctttcgcatgactgctctcttctccgtctttgtcgtcgttcggttccatctgcatcgcgcaatgtctactggtggcggttctgatcgcttgcgcgcacaagtcattgggacgagcaaggccttcgaaaccacaccctcgcctgagatctgcacgggataggcgggtgatcaggttattggggagtgctttcgcacgactgctctcttctccgtcttcgtcgtcgttcggttccatctgcatcgtgcaatgtctactggtggtggtgattccggagactgatctcttctccgtcttcgtcgtcgttcggttccatctgcatcgcgcaatgtctactggtggtggtgcttccggagcggcaggaggtggtgcgccaggaactggaggcgcaccaatcgacaacaccaacggaggcaattctgcctcacaatccagcggagagactttcacagggtataacatccttctgctacctttcattttgttaaatctgtcagtcgcaatgttattgcgttgtctcattgatgatgcttattttaccttaagcatgtccataaccatggttatgtttagttttatcactagatcatttcacactgtgtatgccatgtttattgtcttaatattttggaataaaaaataccaatttatgaccatattttcaacaatagctatagtttaaaccttgtaaagaactgcatttgtaattattggaactataattcatcaacgagcatagacggatccaacatgagtatcagcctatcaggggctcgaggccttgctggatccgcatgaagcgcatgaagagatggggaggggggaagaggtagagaaaaaaagagaggttgagacttgagaaatgatgctaaaatctcagaaataattatcctacattcaaattatgcagcaaccctacatccaaatgtcccacggtttagccacgataaatcattactcatttcggtctcacaacacagccaaaagccttgcaaatggaaataaaaaggaatccttaattatattatgaattatagcacggaaaataaaaaaacttgagtttgtattaggagttaagcttgtaattaaggggcaatgtggaacctatgaatttttaggaacgatcttaatttccaaaacaattgttatatgttagatattattctaaagcgaaattgtatttactatattgttcttgtgtctgttttcgaaaaaaaggtatatttttcccttatagaatgtattaaccctcaaaatattcaatcaatttgcatcgttataatccggaccctccaaggtcaacatgacaacatgtagttgttcttgctctaataatgtgcacaaagttttggaccttcagtgtgggtactttttttttcactttgttgggataaccatagatagatatgatccatcatcaatccaagaatttgctaaaatttttgggtaaaatacaattttggacgaatggaaaaaaatattcggctaccttcagaacataagatttttttaaattagattataaagaaaccaaacttcttcgtgtaatttgtaagataacgccatattcgcacttttatcaaattcaaacactaaattcctatacgccaatatcaaaattgaaatcttaaaacttagggcacgttcttttcagcttttgattttggctttttagctgcacgcaaaataaaaaaaacataattagcatatgattaactgagtgttaattattaaaaactaaaaaaacgatttatttaaattttaaagcaaaatttctcacaaaatacaatgtttagaagtttaaaaaacatgttaacgaaatatgagaaatagctaagctcaattagcctttttagaatgtgttcttaattttgaacttgattttttttttcatcatagtctctttttaaccgttgatgtttaagtatcgaaaaacacgtgtttttaaccatagattattctcttattgctaatataatgtgcctacactgtttgggcgtatgattagcaaattaccgtctgatagcagactattttcttcgtcgcgaaaaaaccaaactagctcgatgggggaaaacttttaggtttagttgttagatcagatatatacatatatttaaatattaaatatggccta

SEQ ID NO: 47264 - DNA, 656 bp, Oryza sativa
catgggtaattctcctctctgaacgcgcagagatgtaccctagaggggggtttaataggcttcctgaaattttctcaacaatcgcagcggttaaattaacagtgcccggaacctgctggagaaaaacaccgaaacttgctggcagagatgagcagcccggaacttccggagttcttgagccatgaactttcgggcaacagagaaaatcaaaatttggggaagcaaaacaggtcctagctatagacaatcaggcacaaggttgcacaagatgtaaatcacaagataccagcagattcaaacacagatcatgcacaagagagacaaaggcgattttttcccgaagttcggatcacacggatcctactctctgttgaggtgctcaaagagccgggtctcgattaaccccttgcctcacttatgcaaagatcccagaataagtccacagccttcaactcaacacttataggtcattttctagaattgagtgaccaccaagatccaactcacaattccttctagaaaagaccacaagtgcaagttgctctacctaggacaacctctgaaaactcagcacaagaatctttactcacttacctcgtttccttgcggaggtgaggaaaaccttcacaaactttcccgggacatccacaaaatct

SEQ ID NO: 47265 - DNA, 1034 bp, Oryza sativa
acgcagcggcgccgcgcgggaggcggggatcctcgtcgatccttccaccgcgcaccgcctcgtcgccgtcgcgatcttcgtgggcgccaagtttggtgggcccatcgacaggctcccgacgaggtggactgtggtgttcgagaccagctcggatgcggcgatccgcgcgagggagatggccggcctcgaacggcgcttcctcattgccatcgattaccgcctgttcgtccgtgctgacgagttcgactggttctgccgtgtcctggagcgagggccacgtccaagcgggaaatgcggcggcggcggtggtggcaggaaaaggacggcggcggaagctgtggagggagaagcggaggacgaccaccgccgcgtccgggcctccctgccgccgccatctgtcgtcgccaactaggtccacgatttatgcatccacaggttcaattatatttacttaatgtattttcttttgctgcttcttgtctatcagttgtttgcaggtggctagggtggagaagatgcagttggcgttggaagagttcgatcagactaggcaagggtggagaagatgcagccggcgttggaagagttcgatcagcggccatcgtcggagtagagtgaaaaaaaaaaccagttttaatcgtaggatgtttagcaactgttaactcttgtcaaattctatcaatccttgtgtcttggatttccatcttattggaagtagataaagaaatgttaatgaagtccctttttctacctttctggtgtatgaaatctatatcaatctggaagttaataaagaagtctttttctgcctttgtggtgtatgaaatatgtatcaatctggattctgaagtggaagcctctggtgtatgaaatttgtatcaatctagaattgaaacgtctcttgctgtggctttgctctcttgctgtggctttgcgatgtgatgtgtttgatggagcctcttgagaatgaaactctacttctgtcatcataaaaaatttctgatgatgcttattcctttttactggttgatgcc

SEQ ID NO: 47266 - DNA, 949 bp, Oryza sativa
  unsure (1)..(949): unsure at all n locations
cacctggctttgattgatctncttcgtctgcaagtagttcatcacgcgacagtatggaatgcagatggagaattctgtgcaaattaaaaccttgataactttgccttctggtcatggaatcgagctaggttttttttgacggtttcagaaccacgggcctgacagaagagagactggatttggagagttggacccccagagatttttctagaaattacttaccattggccacgaagcagcggttgtttcggcgaaacgtcgaatatctgagggtccacaactggttctcaacgaggtggttagtatagggatggcacataggacgttagggtgtataggatcgacgatgtcggtgtcaagcgcgtcgactaaccgcgccgttaagttaagctggcgggcgcgacactgtggaatgcagatggagaattctgtgcaaattaaaaccttgataactttgccttccggtcatggaatcgagctaggtttttttttacggctgcagaatcacgggcctcaccatagagagactggatttggagagttggacccccagagatttttctagaaattacttaccataggccacgaagcagcggttgcttcggcgaaacgtcgaatatctgagggtccacaactggttttcaacgaggtggttagtatagggaaggcacataggacgttaaggtggatagcttagacgatgtcggtgtcaagcgcgtcgactaaccgcgccgttaaggtaggctggcgggcgcgacactggaatgcagatggagaattctgtgcaaattaaccccttgataactttgccttccggtcatggaatcgagctaggtttttttttacggctgcagaatcacaggcctcaccctagagagcctggatttggagagttggacccctgatgaactnctgtaccagtgatagcgatcaacaaannnncccaccg

SEQ ID NO: 47267 - DNA, 896 bp, Oryza sativa
  unsure (1)..(896): unsure at all n locations
aaccgctgcttcttgccctatggtnggtanttcaaagaaaaatctctgggggtccaactctcgaaatccagtctctcttgggtgaggcccgtgattctgaagccgtcaaaaaaaacctagctcgattccatgaccggaaggcaaagttatcaaggttttaatttgcacagaattctccatctgcattccacagtgtcgcacccgccagcctaacttaacggcgcggttagtcgacgtgcttgacaccgacatcgtctaagctatcgaccctaacgtcctatgtgccatctctatactaaccaccgcgttgaaaaccagttgtggagcctcagatattcgacgtttcgccgaataaacagctgcttcctggcctatggtaagtaatttctagaaaaatctctgggggtccaactctcaaaatctagtctctcttgggtgaggcccgtgattctgcggccatcaaaaaaaacctagctcgattcaatgaccggaaggcaaagttatcaaggttttaatttgcacagaattctccatctgcattccacagtgtcgcgcccgccagcctaccttaacggcgcggttagtcgacgcgcttgacaccgacatcgtctatgctatccaccctaacgtcctatgtgccatctctatactaaccacctcgttgaaaacccgttgtggaccctcagatattcgacatttcgccaaataaaccgctgcttcctcgcctatggtaagtaatttctagaaaaatcaatgggggtccaactctcaaaatctagtctctctagggtgaggcccgtgaatctgcagccgtcaaaaaaaacctagctcgattacatgaccggaaggcaaagttatcaaggtttaatttgcacagaattctccatctggattca

SEQ ID NO: 47268 - DNA, 1621 bp, Oryza sativa
ctgaaaccagatgaagattctgggcaaattaaaacattaatactttgcctcccgttcatgaaacaagctaggttttttttacggcttcaaaatcacagccctcccgaaagagagaatgaatttgaagagttgaacccccagagattttcttagaaattacttaccataggccacgaagcagcggttgtttcggcgaaacgtcgaatatctgagggtccacaactggttttcaacgaggtggttagtatagtgatggcacataggacgttagggtggatagctaagacgatgtcggtgtcaagcgcgtcgactaaccgcgccgttaagttaggctggcgggcgcgacactgtggaatgcagatggagaattctgtgcaaattaaaacattgataactttgcctttcggtcatggaatcgagctaggttttttttgatggctgcagaatcacaggcctcaccgaagagagaatggatttggagagttggacccccagagatttttctagaaattacttaccataggccatgaagcagcggttgtttcggtgaaacgtcaaaaatctgagggtccacaactggttttcaacgaggtggttagtatagggatggcacataggacgttagggtggatagcttagacgatgtcggtgtcaagcgcgtcgactaaccgcgccgttaagttaggctggcgggcgcgacacggtggaatgcatatggagaattctgtgcaaattaaaaccttgataactttgccttccggtcatggaatcgagctaggttttttttgacggcttcagaatcacgggcctcaccaaagagagacaggatttggagagttggacccccagagatttctctagaaattacttaccataggccacgaagcagcggttgtttcgaggaaacgtcgaatatctgagggtccacaactggttttcaacgaggtggttagtatagggatggcacataggacgttagggtggatagcttagacgatgtgggtgtcaaccgcgtcgactaaccgtgccgttaagttaggctggcgggcgcgacagtgtggaatgcagatggagaattctgtgcaaattaaaaccttgataattttgccttctggtcatggaatcgagctaggttttttttgacggcttcagaatcacgggcctcaccgtagagagactggatttggagagttggacccccagatatttttctagaaattacttaccataggccaggaagcagccgtttattcggcaaaacgtcgattatctgagggtccacaacgggttttcaacgaggtggttagtatagggatggcacataggacgttaaggtggatagcttagacgatgtcggtgtcaagcgcgtcgactaaccgcgccgttaaggtaggctggcgggcgcgacactgtggaatgcagatggagaattctgtgcaaattaaaaccttgataactttgccttccggtcatggaatcgagctaggtttttttttatggctgcagaatcacaggcctcaccctagagagactggatttgggagagttggaccccagagatttttctagaaatgacttacccattgccacgaaacagcggttgtttccgcgaaacgtctaa

SEQ ID NO: 47269 - DNA, 723 bp, Oryza sativa
tttcggcgaaacgtcgaatatctgagggtccacaactggatttcaacgaggtggttagtatagtgatggcacataggacgttagggtggatagcttagacgatgtcggtgtcaagcgcatcgactaaccgcgccgttaagttaggctggcgggcgcgacactgtggaatgcagatggagaattctgtgcaaattaaaacattgataactttgccttccggtcatggaatcgagctaggttttttttgatggctgcagacccacaggcctcaccatagagagaatggatttggagagttggacccccagagatttttctagaaattacttaccataggccacgaagcagcggttgtttcggcgaaacgtcgaatatctgagggtccacaactggttttcaacgaggtgtttagtattgggatggcacataggacgttagggtgtatagcttagacgatgtcggtgtcaagcgcgtcgactaaccgcgccgttaagttaggctggcgggcgcgacactgtggaatgcagatggagaattctgtgcaaattaaaaccttgataactttgccttccggtcatggaatcgagctaggtttttttttacggctgcagaatcacaggcctcaccctagagagactggatttggagagttggaccccagagatttttctagaaatgacttaccattggccacgaagcagcggttgtttcggcgaaacgtcg

SEQ ID NO: 47270 - DNA, 1143 bp, Oryza sativa
atttctcaaaaatctctgggggtcaacttttcaaaatccagtctctctagggtgaggcccgcgattctgaagcggtcaaaaaaaacctagctcgattccatgaccgaaaggcaaagttatcaaggttttaatttgcacagaattctccatttgcattccacggtgtcgcgcccgccagcctaccttaacggcgtggttagtcgacgcgcttgaccccgacatcatctatgctatccaccctaacgtcctatgtgccatctctatactaaccacctcgttgaaaacccgttgtggaccctcagatattcgacgtttcgccgaataaaccgttgcttcctggcctatggtaagtaatttctacaaaaatctctgggggtctaactctcaaaatctagtctctctagggtgaggcccatgattctgcagccgtcaaaaaaaacctagctcgattccatgaccggaaggcaaagttatcaaggttttaatttgcacggaattctccatttgcattccacagtgtcgcgcccgccagcctaccttaacggcgtggttagtcgacgcgcttgaccccgacatcatctatgctatccaccctaacgtcctatgtgccatctctatactaaccacctcgttgaaaacccgttgtggaccctcagatattcgacgtttcgccgaataaaccgttgcttcctggcctatggtaagtaatttctacaaaaatctctgggggtctaactctcaaaatctagtctctctagggtgaggcccatgattctgcagccgtcaaaaaaaacctagctcgattccatgaccggaaggcaaagttatcaaggttttaatttgcacggaattctccatttgcattccacagtgtcgcgcccgccagcctaccttaacggcgcggttagtcgacgcgcttgacaccgacatcgtctaagctatccatcctaacgtcctatgtgccatccctatgctaaccacctcgttgaaaacccgttatggaccctcagatattcgacgtttcgccgaataaaccggtggttcctggcctatggtaagtaatttctagaaaaatctctgggggtccaactctccaaatccagtctctctattgtgaggcccgtgattcttgcaccgtaaaaa

SEQ ID NO: 47271 - DNA, 770 bp, Oryza sativa
gcgtttcgccggaataaacccgcggtttccgggcctatggtaagtatttcttagaaaaaattctgggggtccaactctcaaaatctagtctctctagggtgaggcccgtgattaagcagccgtcaaaaaaaccctagctcgattccatgaccggaaggcaaagttatcaaggttttaatttgcacagaattctccatctgcattcaagtgtcgcgcccgccagcctaccttaacggcgcggttagtcgacgcgcttgacaccgacatcgtctaagctatccaccttaacgtcctatgtgccatccctatactaaccacctcgttgaaaaccagttgtggaccctcagatattcgacgtttcgctgaaacaaccgctgctttgtggcctatggtaagtaatttctagaaaaatctctgggggtccaactctccaaatccagtctctcttctgtgaggcccgtgattctgaagccgtcaaaaaaaacctagctcgattccatgaccggaaggcaaagttatcaaggttttaatttgcacagaattctccatctgcattccacagtgtcgcgcccgccagcttaacttaacggcgcggttagttgacgcgcttgacaccgacatcgtcgatcctatacaccctaacgtcctatgtgccatccctatactaaccacctcgttgagaaccagttgtggaccctcagatattcgacgtttcgccgaaacaaccgctgcttcgtggtgatgaactacttgcagtaagcgaccatcgg

SEQ ID NO: 47272 - DNA, 728 bp, Oryza sativa
  unsure (1)..(728): unsure at all n locations
gatgtgacctccgactcagtaagagcgaatcaaagctggcgaccgggggatgctttagagtctgcctgcaggcgtgcatgctagctaaacttttcttcatcacagcggattgtgctgagagagcaccttatgctgtgtgcaactacccaccaattcgcacaggcaaaatacttcatctctctctatctgacatagacgatggtcaaatgatgataaggaccatcatcaccatccttttcgctattaccaccactggaaaaccggggatgtgatgcatggtgattaagtctggtcacgccatactttatgaaatcacgaggtagctaacgcactcctcggaaggtatttcttcctctctgacgcttgggtatccttgctgcgtcttcaggagtaaattctgaaccggtgatgatcatggtcctgccattatccatcttccatatcactgtcctgttcgctccagagttgggctgcaaagtaccatccttcttgtcggtagactgacttggagcttggttactccctgggcactacttctcgtctttttcaggtgacctggcgaacaccttccatggacagttccttacataatgaccttgctcaccacagtcataacaggtagcacttactggncttttgtctgacgttgacttggctgtcgttatcttccgggatctggactgcattttgacaggggtctttcgtgctgatattgggaactcctgact

SEQ ID NO: 47273 - DNA, 745 bp, Oryza sativa
  unsure (1)..(745): unsure at all n locations
gttatccaccctacggtctattgtgccatctctatactaaccacctcgttaaaaccccgttgtggaccctcatatattcgacgtttcgccgaataaaccgctgcttcctggcctatggtaagtaatttctagaaaaatctctaggggtccaactctcaaaatctagtctctctagggtgaggcccgtgaatctgcagccgtaaaaaaaaacctagctcgattacatgaccggaaggatagtccgattacatcggatagtctgatttgacttagagaaaaaaatcactcaagaggaataaaaagcaattcaacacagagagtgaagttctgagaaatttcagatagtccgatgtatcagacaatctgaccttatatcggatagtccaatatttttgagccaacacccagaccaaagacagagagcaaagttttgagaaatttcggatagtctgagcatcggatagtctgatcaggatcggatagtccgacaggagaagaacaagaacacttcaaaaacaggatttcgagcactagtgttctaccaattataagcatgtggtatccctcttaatagtatgacatcctaatactaaagaacacaagatatacatggattagaagacaattaccacaaaagatgccacaatacttttaaactcaagttccactcctttttatccttgcatccatctcaacaaatgatgaactacttgcagtaanagggaattcatnngnaatcacatcg

SEQ ID NO: 47274 - DNA, 1331 bp, Oryza sativa
aattctgtgcaaattaaaaccttgataactttgcctcccggtcatggaatcgagttaggttttttttgacggctgcagaatcatgggcctcaccctagagagactagattttgagagttagacccccagagatttttgtagaaattacttaccataggccaggaagcaacggtttattcggcgaaacgtcgaatatctgagggtccacaacgggttttcaacgaggtggttagtatagagatggcacataggacgttagggtggatagcatagatgatgtcggggtcaagcgcgtcgactaaccacgccgttaaggtaggctggcgggcgcgacaccgtggaatgcagacggagaattctgtgcaaattaaaaccttgataactttgccttccggtcatggaatcgagctaggttttttttgacggcttcagaatcgcgggcctcaccgaagagagactggatttcgaaagttggacccccagagatttttgtagaaattacttaccataggccacgaagcagcggttgttttggcgaaatgtcgaatatctgagggtccacaactggttttcaacgaggtggttagtatagggatggcacataggacgttagggtggatagcttagaagatgtcggtgtcaagcgcgtcgactaaccgcgccgttaaggtaggctggcgggcgcgacactgtggaatgcagatggagaattctgtgcaaattaaaaccttgataactttgccttccggtcatggaatcgagctaggttttttttgacggccgcagaatcacgggcctcaccctagagagactagattttgagagttggacccccagagatttttctagaaattacttaccataagccaggaagcagcggttgattcagcgaaacgtcgaatatctgagggtccacaactggttttcaacgaggtggttagtatagagatggcacataagacgttagggtggatagcacagacgatgtcggtgtcaaagcgcgtcgactaaccgcgccgttaaagtaggctggcgggcgcgacactggggaatgcagatggagaattctgtgcaaattaaaacttgataactttgccttccgtcatggaatcgagctaggatttttttgatggctgcagaatcatgggcctcaccctagagagactggatttggagagttggacccccagagatttttctagaattacttaccataggccacgaagcagcggttgtttcggcgaaacgtcgaatatctgagggtccacaactggttttcaaggaggaggttagtataaggatggcacataagacgttagggtggatagctt

SEQ ID NO: 47275 - DNA, 1086 bp, Oryza sativa
cgtggttagtatagggatggcacatagaacgttagggtgtataggttagacgatgtcggtgtcaagcgcgtcgactaaccgcgccgttaaggtatgctggcgggcgcgacagtgtggaatgcagatggagaattctgtgcaaattaaaaccttgataacattgccttccggtcatggaatcgagctaggttttttttgatggctgtagaatcacgggcctcaccgaagagagactggatttggagagttggacccccagagatttttctagcaattacttacgataggccacgaagcagcggttgtttgggcgaaacgtcaaatatctgagggtccacaactggttttcaacgaggtgtttagtattcggatggcacataggacgttagggtggatagcttaaacgatgtcggtgtcaagcgcgttgactaaccgcgccgttaagttaggctggcgggcgcgacactgtggaatgcagatggagaattctttgcaaattaaaaggttgataactgtgccttccggtcatggaatcgagctaggttttttttgatggcttcagacccacgggcctcaccctagagagactggatttggagagttggacccccagagatttttctagaaattacttaccataggccaggaagcagcggtttattcggcgaaacgtcgaatatctgagggtccacaacgggttttcaacgaggtggttagtatagagatggcacataggacgttagggtggatagcatagacgatgtcggtgtcaagcgcgtcgactaaccgcgccgttaaggtaggctggcgggcgcgacactgtggaatgcagatggagaattctgtgcaaattaaaaccttgataactttgccttccggtcatgtaatcgagctaggtttttttttacggctgcagattcacgggcctcaccctagagagactagattttgagagttggacccctagagatttttctagaaattacttaccataggccaggaagcagcggtttattcggcgaaacgtcgaatatatgagggtccactgatgaactacttgcagagaacgcaaatcaaaggtagcgg

SEQ ID NO: 47276 - DNA, 711 bp, Oryza sativa
  unsure (1)..(711): unsure at all n locations
tggcgcnncnttggatggcttgccgatcgcacaggagctcatcatgcattccacactgtcgcgcccgccagcataccttaacggcgcggttagtcgacgcgcttgacaccgacatcgtctaacctatacaccctaacgggctatgtgccatccctatactaaccacctgttgaaaaccagttctggaccgtcagatattcaatgtttcgtcgtaccgaccgctgcttcgtggcctatggtaagtcatttctagaaaaatctctaggggtccacctctccaaatacagtctctcaagggtgaagcccgtgattctgcagccgtaaaaaaaaacctagctcgattcaatgaccggaaggcaaagttatcaaggttttaatttgcacagaattctccatctgcattccatagtgtcgcgcccgccagcctaccttaacagcacggttagtcgacgcgcttgacaccgacatcgtctaagctatccaccctaacgtcctatgtgccatccctatactaaccacctcgttgaaaaccagttgtggaccctcagatattcgacgtttcgtcgaaacaaccgctgtagatctactcgatcagctgtagatgtcaacgatacataatctatccattgaacacacttagatcgggtgattgggatagatcgggcgttatgccgagacagtataaatcactcaacaactaagtgtgcccca

SEQ ID NO: 47277 - DNA, 887 bp, Oryza sativa
  unsure (1)..(887): unsure at all n locations
gatgtcncngagtagagctntcactgcaagtagttcatcatagtattgggatggcacataggacgttagggtggatagcttagacgatgtcggtgtcaagcgcgtcgactaaccgcgccgttaagttaggctggcgggcgcgacactttggaatgcagatggagaattctgtgcaaattaaaaccttgataactttgcctttcggtcatggaatcgagctaggttttttttgacgtctgcagaatcacgggcctcaccgaagagagactggatttggagagttgggcccccagagatttttctagaaattacttaccataggccacgaagccgcggttgtttcggcgaaacgtcgaatatctgagggtccacaactggatttcaacgaggtggttagtatagtgatggcacataggacgttagggtggatagcttagacgatgtcggtgtcaagcgcatcgactaaccgcgccgttaagttaggctggcgggcgcgacactgtggaatgcagatggagaattctgtgcaaattaaaacattgataactttgccttccggtcatggaatcgagctaggttttttttgacggctgcagaatcacaggcctcaccgaagagagaatggatttggagagttggacccccagagatttttctagaaattacttaccataggccacgaagcagcggttgtttcggcgaaacgtcgaatatctgaaggtccacaactgtttttaacgacgtgggtaatatatggattgcacataggacgttagggtggatagcttaaaccaagtcgggggtaaacgccgtgactaaccgcgccgttaagttaggctggcgggcccaacacggggaatgcattggaggattctttggaaaataaa

SEQ ID NO: 47278 - DNA, 781 bp, Oryza sativa
  unsure (1)..(781): unsure at all n locations
aagttctaatagaaacgnttatctcaaanccntannangtaaggaaaagatcaaggttttaatttgcacaaaattctccatctgcattccacactgtcgcgcccgccagcctaccttaacggcgcggttagtcgacgcgcttgacaccgacatcgtctatgctatccaccctaacgtcctatgtgccatctatatactaaccacctcgttgaatacccgttgtggaccctcagatattcgacgtttcgccgaataaaccgctgcttcgtggcctatggtaagtaatttctagaaaaatctttgggggtccaactctccaaatccagtctctcttcggtgaggcctgtgattctgaagccgtcaaaaaaaacctagctcgattccatgaccagaaggcaaaattatcaaggttttaatttgcacagaattctccatctgcattccacactgtcgcgcccgccagcctaacttaacggcacggttagtcgacgcggttgacacccacatcgtctaagctatccaccctaacgtcctatgtgccatccctatactaaccacctcgttgaaaaccagttgtggaccctcagatattcgacgtttcctcgaaacaaccgctgcttcgtggcctatggtaagtaatttctagagaaatctctggggtccaactcttcaaattctgtctctctttggtgaggcccgtgattctgaagccgtcaaaaaaacctagctcgattcatgaccggaaggcaaagtatcaaggtttaattttgcacagaattct

SEQ ID NO: 47279 - DNA, 1228 bp, Oryza sativa
  unsure (1)..(1228): unsure at all n locations
agacgggcttgaaccggacatcgtttaacttatccaccttaacgtcctatgtgccatcactatactaaccacctcgttgaaaaccagttgtggaccctcagatatttgacgttttgccgaaacaaccgctgcttcgtggcctatggtaagtaatttctagaataatctctaggggtccaactctgcaaatccagtctctcttcggtgaggcccgtgattctaaagccgtcaaaaaaaaccttgctcgattccatgaccggaaggcaaagttatcaaggttttaatttgcacagaattctccatctgcattccgcagtgtcgcgcccgccagcctaacataacggcgcggttactcgacgcgctggacacgacatcgtctaagctatccaccctattgtcctatgtgccatccctatactaaccacctcgttaaaaaaccagttgtggaccctcagatattcgacgtttcgccgaaacaaccgctgcatggtggcctatggtaagtaatttctagaataatatctgggggggggtccaactctccaaatctagtctctctagggtgaggcctgtggttctgaaaccgtaaaaaaaacctagctcgattccatgaccggaaggcaaagttatcaaggttttaatttgcacagaattctccatctgcattccaaagtgtcgcgcccgccagcctaacttaacggcgcggttagtcgacgcgcttgacaccgacatcgtctaagctatccaccctaacgtcctatgtgccatcccaatactaaccacctcgttgaaaaccagttgcggaccctcagatattcgacgtttcgccgaaacaaccgcggcttcgtggcctatggtaagtaatttctagaaaaatctctgggggtccaactctccaaatccagtctctcttcggtgaggcccgtgattctgcagccatcaaaaaaaacctagctcgatttcatgaccggaaggcaaagttatcaaggttttaatttgcacagaattctccatctgtattccagtgtcgtgcccgccagccttccttaacggcgcggttagtcgacgcgcttgataccgacatcgtctaagctatccaccctaacgtcatatgtgccatcactatactaaccacctcgttgaaaaccagttgtggaccctcagatatttgacgttttgccgaaacaacataataactatngcaacggcgacagcacntcacttcttt

SEQ ID NO: 47280 - DNA, 843 bp, Oryza sativa
cacaaaccacaaaggggggttgtttcttctcacaagggccaaaaaacagtagttgtttttgcaaaccgtcaaatatcggagggtccacagcgggttttcaacaggtgggttagtataggaggggcacatagcacatgggggtggatagcttacacgtgggggtgtaaaaggcatggactaccggccccttaaggaggcgctggcgggcgcgacattgtaaatgcagatggagaattctgtgcaaaataaaaccttgataactttcctttccggttaaagaatcgagctaggttttttttgacggctgcagaatcacgggcctcacccttgagagactgtatttggagaggtggaacaccagagatttttctagaaccgacttaccataggccacgaagtagcggttggttcggcgaaacatcgaatatctgatggtccacaactggttttcaacgaggtggttagtatagggatggcacataggacattagggtggatagcttagacgatgtcggtgtcaagcgcgtcgactaaccgcgccgttaaggtaggctggcgggcccgacactgtggaatacagatggagaattctgtgcaaattaaaaccttgataactttaccttccggtcatggaatcgagctaggttttttttatggctgcagaatcacgggcctcaccctagagagactggatttggagagttggacccccagagatttttctagaaattacttaccataggccacgaagcagcggttgtttcggcgaaacgtcgaatatctgagggtccacaactggttttcaactgatgtgctacagtgcgattagtaagcccattcgcc

SEQ ID NO: 47281 - DNA, 1178 bp, Oryza sativa
ggcctatggaagtaattttctaaaaattctcgggggttcaacttctaaaaatctagtctctctagggtgagggccgtgattaagcagccgtcaaaaaaaacctagctcgattacatgaccggaaggcaaagttatcaaggttttaatttgcacagaattctccatctgcattccagtgtcgcgcccgcaagcctaccttaacggcgtggttagtcaacgcgcttgacaccgacatcgtctaagctatccaccttaacgtcctatgtgccatccctatagtaaccacctcgttgaaaaccagttgtggaccctcagatattcgacgtttcgccgaaacaaccgctgcttcgtggcctatggtaagtaatttctagaaaaatctctgggggtccaactctccaaatccagtctctcaagggtgaggcccgtgattctgcagccgtcaaaaaaaaacctagctcgattccttgaccggaaggcaaagttatcaaggttttaatttgcacagaattctccatctgcattccacagtttcacgcccgccagcctaccttaacggtgcggttagtcgacgcgcttgacaccgacatcgtctaagctatccaccttaacgtcctatgtgccatccctatactaaccacctcgttgaaaacccgttgtggaccctcagatattcgacgtttcgccgaataaaccgctgcttcgtggcctatggtaagtaatttcaagaaaaatctctgggggtccaactctcgaaatccagtctctcttgggtgaggcccgtgattctgaagccgtcaaaaaaaacctagctcgattccatgaccggaaggcaaagttatcaaggttttaatttgcacagaattcttcatctgcattccacagtgtcgcacctgccagcctaacttaacggcgcggttagtcgacgtgcttgacaccgacatcgtctaagctatccaccctaatgtcctattgccatctctatactaaccacctcgttgaaaaccaggtgtggaccctcagatattcgacgtttcgccgaaacaaccgctgcttcgtggcctatggtaagtaatttctagaaaaatctctgggggtccaactctccaaatccagtctctcttctgtgaggcccgtggttcttgagccgtcaaaaaaaacctagctcgattccatga

SEQ ID NO: 47282 - DNA, 1838 bp, Oryza sativa
agttgtgaaccccaaataatcgaggtttcccgaaacacccgttgtttggtggccaatggtaagtaattctaaaaaaatcttgggggtcaacttctcaaaatccagtcttctttgtgtaaggcccgtggttctaaaccggtcaaaaaaacatagctcgattccatgaccagaaggcaaagtaatcaaggttttaatttgcacagaattctcaatcagcattccatactgtcgcgcccgccagcctaacttaacggcgcggttagtcgatgcgcttaacaccgacatcgtctaagcaatccaccctaacatcctatgtgccatccctatactaaccacctcgttgaaaaccagttgtggaccttcagatattcgacgtttcgccgaaacaaccgctgcttcgtggccaatggtaagtcatttctagaaaaatctctggggtccaactctccaaatccagtctctctagggtgaggcctgtgattctgcagccgtaaaaaaaaacctagctcgattccatgaccggaaggcaaagttatcaaggttttaatttgcacagaattctccatctgcattccagtgtcgcgcccgccagcctaccttaacggcgcggttagtcgacgcgcttgacaccgacatcgtctaagctatccaccttaacgtcctatgtgccttccctatactaaccacctcgttgaaaaccagttgtggaccctcagatattcgacgtttcgccgaagcaaccgctgcttcgtggcctatggtaagtaatttctagaaaaatctctgggggtccaactctccaaatccagtctctctatggtgaggcccgtgattctgcagccgtaaaaaaaaacctagctcgattccatgaccggaaggcaaagttatcaaggttttaatttgcacagaattctccatctgcattccacagtgtcgcgcccgccagcttaacttaacggcgcggttagtcgacgcgcttgacaccgacatcgtcgatcctatacaccctaacgtcctatgtgccatccctatactaaccacctcgttgaaaaccagttgtggaccctcagatattcgatgtttcgccgaaacaaccgctgcttcgtggcctatggtaagtaatttcaagaaaaatctctgggggtccaactctcgaaatccagtctctctttggtgaggcccgtgattctgaagccgtcaaaaaaaacctagctcgattccatgaccggaaggcaaagttatcaaggttttaatttgcacagaattcttcatctgcattccacagtgtcgcacccgccagcctaacttaacggcgcggttagtcgacgtgcttgacaccgacatcgtctaagctatccaccctaatgtcctattgccatctctatactaaccacctcgttgaaaaccagttgtggaccctcagatattcgacgtttcgccgaaacaaccgctgcttcgtggcctatggtaagtaatttctagaaaaatctctgggggtccaactctccaaatccagtctctcttctgtcaggcccgtggttctgaagccgtcaaaaaaaacctagctcgattccatgaccagaaggcaaagttatcaaggttttaatttgcacagaattctccatctgcattccatactgtcgcgcccgccagcctaacttaacggcgcggttagtcgatgcgcttaacaccgacatcgtctaagcaatccaccctaacatcctatgtgccatccctatactaaccacctcgttgaaaaccagttggggaccttcagatattcgacgcatgtgggtcccggaggtcaaaaatttaattattgaggttttataatcccc

SEQ ID NO: 47283 - DNA, 846 bp, Oryza sativa
  unsure (1)..(846): unsure at all n locations
ccctatactaacacctcgttgaaaaacagtggtggacctcagatattcgacgtttcgccgaaacacccgctgcttcgtggccaatggtaagtcatttctagaaaaatctctggggtccaactctccaaatccagtctctctatggtgaggcccgtgattctgcagccgtaaaaaaaaacctagctcgattccatgaccggaaggcaaagttatcaaggttttaatttgcacagaattctccatctgcgttccacagtttcgcacccgccagcctaccttaacggcgcggttagtcgacgcgcttgacaccgacatcgtctaagctatccaccctaacgtcctatgtgccatccctatactaaccacctcgttgaaaaccagttgtggaccctcagatattcgatgtttcgccgaaacaaccgctgcttcgtggcctatggtaagtaatttcaagaaaaatctctgggggtccaactctcgaaatccagtctctctttggtgaggcccgtgattctgaagccgtcaaaaaaaacctagctcgattccatgaccggaaggcaaagttatcaaggttttaatttgcacagaattcttcatctgcattccacagtgtcgcacccgccagcctaacttaacggcgcggttagtcgacgtgcttgacaccgacatcgtctaagctatccaccctaatgtcctattgccatctctatactaaccacctcgttgaaaaccagttgtggaccctcagatattcgacgtttcgccgaaacaaccgctgcttcgtggcctatggtaagtgatgaactgctgtaccacagatgatgcgccaactnnnnnacacatcct

SEQ ID NO: 47284 - DNA, 773 bp, Oryza sativa
  unsure (1)..(773): unsure at all n locations
ccgttnnnangatgaagtaccacnttatggaacagcncatcattagcagcgtctacacgaccaacagaaaagaaaaggcttttactctaataaactccatataacaagcagcaacaaagcacattaatgggttcttgacttcttaccataggccacgaaacagcagttgtttctgcgaaacgtcaaatatctgagggtccacaactggttttcaacaaggtggttagtataggaatggcacataggacattagggtggatagcttagacgatgtcggtgtcaaatgcatcgactaaccgcgccattaaggtaggctggcgggcgcgacactgtgaaatgcagatggagaattctgtgcaaaataaaaaccttgataactttaccttccggttaaggaatcgagctaggttttttttgacggctgcagaatcacgggcctcacccttgagagactgtatttggagaggtggaacaccagagatttttctagaaacgacttaccataggccacgaagtagcggttggttcggcgaaacatcgaatatctgatggtccacaactggttttcaacgaggtggttagtatagggatggcacatatgacattagggtggatagcttagacgatgtcggtgtcaagcgcgttgactaaccgcgccggtaaggtaggctggcgggcccgacactggggaatacaaatggagaattctgtgcaaataaaaaccttgtaactttaccttccgggcatggaatcaagttagttttttttatggt

SEQ ID NO: 47285 - DNA, 818 bp, Oryza sativa
  unsure (1)..(818): unsure at all n locations
agggccatctctatactaaccacntgttgaaaacccgttgtggaccntcagatattcgacgtttcgctgaataaaccgttgcttcccggcctatggtaagtaatttctagaaaaatctctgggggtccaactctcaaaatctagtgtctctagggtgaggcccgtgattaagcagccgtcaaaaaaaacctagctcgattccatgaccggaaggcaaagttatcaaggttttaatttgcacagaattctccatctgcattccacagtgtcgtgcccgccagcctaccttaacggcgcggttagtcgacgcgcttgataccgacatcatctaagctatccaccctaacgtcctatgtgccatccctatactaaccacctcgttgaaaaccagttgtggaccctcagatattcgacgtttcgccgaaacaaccgctgcttcgtggcctatggtaagtaatttctagaaaaatctctgggggtccaactctccaaatccagtctctcttgggtgaggcccgtgattctgcagccgtcaaaagaaacctagcttgattccatgaccggaaggcaaagttatcaaggtataatttgcactgaattctccatctgcactccacagtgtcgcgcccgctagcctaccttaacggcgcggttagtccaggggcttgacacggacatggtttaagctatccaccccaacgtcctatgtgccatccctatactaacctcctcgttgaaaacaattgtggacccctaaatatttgacgtttcggcgaaactacccctgctttcgggcctattggaaggaaagtctagaa

SEQ ID NO: 47286 - DNA, 1743 bp, Oryza sativa
aacgtcatatgtgccttccctatactaaccacctcgttgaaacccagttgtggaccctcagatattcgacgtttcgccgaaacaaccgctgcttcgtggcctatggtaagtaatttttagaaaaatctttgggggtccaactctccaaatccagtctttctatggtgaggcccgtgattctgcagccgtcaaaaaaaaacctagctcgattccatgaccgaaagccaaagttatcaaggttttaatttgcacagaattctccatctgcattccacagtgtcgcgcccgccagcctaccttaacggcgcggttagtcgacgcgcttgacaccgacatcgtctatgctatccaccctaacgtcctatgtgccatctctatactaaccacctcgttgaaaacccgttgtggaccctcagatattcgacatttcgccgaataaaccgctgcttcctggcctatggtaagtaatttctagaaaaatcaatgggggtccaactctcaaaatctagtctctctagggtgaggcccgtgaatctgcagccgtcaaaaaaaacctagctcgattacatgaccggaaggcaaagttatcaaggttttaatttgcacagaattctccatctgcattccacagtgtcgcgcccgccagcctaccttaacggcgcggttagtcgacgcgcttgacaacgacatcgtctatgctatccaccctaacgtcctatgtgccatctctatactaaccacctcgttgaaaacccgttgtggaccctcagatattcgacgtttcgccgaataaaccgctgcttcctggcctatggtaagtaatttctagaaaaaactctgggggtccaactctcaaaatctagtctctctagggtgaggcccgtgattaagcagccgtcaaaaaaaacctagctcgattccatgaccggaaggcaaagttatcaaggttttaatttgcacagaattctccatctgcattccagtgtcgcgcccgccagcctaccataacggcgcggttagtcgacgcgcttgacaccgacatcgtctaagctatccaccttaacgtcctatgtgccttccctatactaaccacctcgttgaaaaccagttgtggaccctcagatattcgacgtttcgccgaaacaaccgctgcttcgtggcctatggtaagtaatttctagaaaaatctctaggggtccaactctccaaatccagtctctctatggtgaggcccgtgattctgcagccgtcaaaaaaaaacctagctcgattccatgaccggaaggcaaagttatcaaggttttaatttgcacagaattctccatctgcattccacagtgtcgcgcccgccagcctaccttaacggcgcggttagtcgacgcgcttgacaccgacatcgtctaagctatccaccttaacatccaatgtgccatccctatactaaccacctcgttgaaaacccgttgtggaccctcagatattcgacgtttcgccgaataaacggctgcttcctggcctaaggtaagtaatttttagaaaaatctctgggggtccaactctcaaaatctagtctctcttgggtgaggcccgtgattctgcggccatcaaaaaaaacctaactcgattcaatgaccggaaggcacagttatcaaggttttaatttgcacaagattttccatctgcattccacagtgtcgcgcccgtccacatacactaacggcgcggttagtccacgcccttgaa

SEQ ID NO: 47287 - DNA, 1947 bp, Oryza sativa
  unsure (1)..(1947): unsure at all n locations
ccttttgcatcccggtcaaggaatcgagctaggtttttttttgacggttgcagaatcacgggcctcacccaagagagactggatttggagagttgcccccccagagatttttctagaaattccttcccatgggccccgaagcagcggttgtttcggcgaaacgtcgaatatctgagggtccacaactggttttcaacgaggtggttagtatagggatggcacataggacgttaaggtggatagctaagacgatgtcggtgtcaagcgcgtcgactaaccgcgccgttaaggtaggctggcgggcgcgacactggaatgcagatggagaattctgtgcaaattaaaaccttgataactttgccttccggtcatggaatcgagctaggttttttttgacggctgcttaatcacaggcctcaccctagagagactagatttttagagttggacccccagagatttttctagaaattacttaccataggccgggaagcagcggtttattcagcgaaacgtcgaatatctgagggtccacaacgggttttcaacgaggtggttagtatagagatggcacataggacgttagggtggatagcacagacgatgtcggtgtcaagcgcgtcgactaaccgcgccgttaaggtaggctggcgggcgcgacactgtggaatgcagatggagaattctgtgcaaattaaaaccttgataactttgccttccggtcatggaatcgagctaggatttttttgatggctgcagaatcatgggcctcaccctagagagactggatttggagagttggacccccagagatttttctagaaattacttaccataggccacgaagcagaggtagtttcggcgaaacgtcgaatatctgagggtccacaactggttttcaaggaggaggttagtatagggatggcacataggacgttagggtggatagcttagacgatgtcggtgtcaagcgcgtggactaaccgcgccgttaaggtaggctagcgggcgcgacactgtggaatgcagatggagaattcagtgcaaattataccttgataactttgccttccggtcatggaatcaagctaggtttcttttgacggctgcagaatcacgggccccacccaagagagactggatttggagagttggacccccagagatttttctagaaattacttaccataggccacgaagcagcggttgtttcggcgaaacgtcgaatatctgagggtccacaactggttttcaacgaggtggttagtatagggatggcacataggacgttagggtggatagcttagatgatgtcggtatcaagcgcgtcgactaaccgcgccgttaaggtaggctggcgggcgcgacactgtggaatgcagatggagaattctatgcaaattaaaaccttgataactttgccttccggtcatggaagtgagctaggttttttttgacggctgcagaatcacgggcctcaccatagagagactggatttggagagttggacccccagagatttttctagaaattacttaccataggccaggaagcagcggtttattcggcgaaacgtcgaatatctgagggtccataacgggttttcaacgaggtggttagcatagggatggcacataggacgttaggatggatagcttagacgatgtcggtgtcaagcgcgtcgactaacccgcgccgtaaggtaggcctgcgggcgcgacactgtggaatgcanatggagaattccgtgcaaataaaaccctgataactttgctttccgtcatggaatcgagctagggtttttttgacggctgcagaatcatgggcctcaccctagagagactagattttgagaggtagacccccagagatttttgtagaaattacttaccatagcccaggaggcaacggtttatttcggcgaaacggtcgatatctgaagggcc

SEQ ID NO: 47288 - DNA, 4466 bp, Oryza sativa
  unsure (1)..(4466): unsure at all n locations
caagtgaggcctaaaggagtatgtgggcgggatcttcgggatcggcaaccaggcgggaattgggcgacaaacctctccgtggcgcttcaaaaattatgaaggtgggcctcccgtgggtctaggtcgcttgtcaggtgcaaatcctccgacgaacgtccaggattctcatgttgttctcgaccatgccancgggcagcatntgatggaactcgatacgagccgagtcgtacgcctccaccacgcgcgccaggtgcatcatggtagcgtcatcctccgagctagcatcccagaaggtggagtagtcgcgggttcgtccgaacagagggtggtagcggtagttgtaatatacttanttttntgggcatgcccgcttggtaggagtaggcagataaagaagaaaagagaagtagaaaaaataaaataaagaggtacaaatagttttctgaaattatgagtatgatatactacaggttaagctgtagattgaagcaagtacggtaactacacagacatcctgtatgtctataaaatacgcctaaaaacaaaaaatagaaaaattaaatgtcttcgatcgaacttcttaagcctcggaaatctttttcagaacttatattccactaatactacaaatttggaaggtttatttgcaaaatttttgtgtcttatgaattcgctgcagttttgagaaaacatatctttgtttctccctaatggcatataatcatttgccaaagttaaacacacatccataactcaacaaaattattcacaaatataaattactatgctactttgatccatctcaacattgcaaaaatatttaaaatacattataaggtcttgtggaaattaaactttttctatattatgtacgggctataaataaccggcacgcctaaaggtgcgctgattttctaagacattaagaattaggtcaatatttattgattatataccatcaacctttgctgtattgcatgatcagtgtgtggatgggctttgcgctttggctattgttatttatggttaagtgctaaaatatcctttgtttgaccaaataaccaagttgctaggtttatgcactctacatctactgtggatagaagtaagtgtctgaaaaagtttgatctttgtttttgtagctttatttgattagccagctttaccattttgttattatcaggatacgtttcataatgtcattctagtttctgttgcttcctatctttggttgtgataagcattcaggccccgtttggctaatgggaaagggaaatcatttcccacccactaaaagacatctttaaatcctaaccattcattctccctcttccatttaatcctaaccctttattcatttcccaatcccaatctcaccccagggttaagatatcttattttccctgcatcagatactcaaattaaagcattatttttagtgggtaaccatgtttttcagaaccactcgctctgatgacaatttgttactgctatccacgctcatttttcatatcaagttcagaaactgaaacttccgccccatatagcctgctgccttttccactctattgattatttaatgtattatacaaaacaacctaatcgttgagggatctaattagtctgatgtgttttgcaccctcttgaagtatggtgaatgactgctaatttttgtgacacaagaaatgggaaaatacatgctaagtggactagtttaggagtctgggcggctgggcctgatgaaagttctgtgcgtctcctttgcagaacttagaatctattccgcgagaacactatattttcaaacggagtattaattttggtacaagggctggctaacaatgcagggagagggagcacgtgcatcagtatacacagatgaatgtgcctctgattttagctttcttgctataagttgccctcctgttgtaaattgggcataagtaaattttttctattttgttttgcaaaactattatagtaagcttaagcaccccaatccctttcctgatgcagtgttgatggttttgcttgcaggggcgagggacattgtttggagaagaggtgcgccgcggcaatgaagctagcctattccgttctattcacctatcaatgacgagaagaaatgttggattttttcccccttccttaattgtggcatggatttactattgctggttttggggtcctctggtggtgtagagaattttctatgggggcccttttcttggtgacatggacatagactggtggtgaaaaaaaagaaaggatggtggtggggatgttatacattttaagtactatatgttacttgtcatatatacatatctgggagatctgaaagctttcctctgattgctggcgttggcgagctaaacaaccagtgcacgatgagcgtcctcttttttaatagcgatcggatcgcgtacgtgctctcttcgacgcatcaacttttgtactggtagttctctcaatttggtctaagctcccgtcggagggctcatacaacttggattcggggtttgggtaatggggataagaccttggacgctgatttggttatactcagaaaaccattctctcgtccttggcgctagtttggcatggagcgctggaatcaatcaagaaagaagtcgatctttggccaagtccaagtgcagcgagcgttcatttgctcattcgttttagtgccttggtttgatgcaatgtggactttacaaaaattaacgggcctttacaattgaatgaacctttttacatgtttctaattttaaagaatgaatcaatgttaaatggattataatgtgtttagtatttaatttcaaaatatgaacttgtataaagaaattaaaaatgacagtggattatttagatgatgaatgataatggatttgaatttatgtttcacttgtaagttactttgatttaactaaaaaggcaatttattttaaaagaggtagaacgtattttatttataaaagatctgtcattatctttttagctgaactaatttttcgatgtgctataatttcttttatgaacatgtaattttaacgttgctactcctttcatcccataaaaaactaatctaatactggatgtgacatatctagtactataaatctggacatacctttgtctagattcattgtactataatgtgtcacatctagttttagattcgtttttttttggacggagagagtactagctagtgattgtggggctggctggcccaagcattggggcgcacaaataaatagcgccatggtgcgagagagagaacgacaagggtatatctatactttctatatagttggtacccactaaattattagaagctaaagcttaacatgcaagcatgccacatcatcacccactagcaattactattctagcctattttaatcccatgcaagcatgatacatcatctacaatattatattatagagatcaacaagtatatgtcaaatcatcttcctcacattattttctcaacatttcaactatcatcatttctacaatatttaacatatatttatccgtgaatcccgcagcaaagcgcggggtatcacctagttatacaaaaatcaaacccgatcgagtctcgctttctcctcgcgtccgatgtttctccgtctccagtcatatatatttgaagggaaggggccgaacaactcttccttggtttttgtctttagtttttttttctccgtagatattcggaatttatttgcgaagttagggatgccacgtgctcctggcctaacgggcagctttagaaaagtattctatatatttcatattacttaaaaaactgcccatgcctggcaacgatgagagctattttaatcctattattgttactagaaaaatgcccatgcgttgcaacggacgaagtctattttaatcttattattcttatatgatttagttaagatgaaattcactgtgagagttcgcttggatatatatatatttttagaaaatcataagctgcagttaggagtccaatcgtcttaagttagcatgcgagtttttttaaagagatttcttatatgatttcttctgtattaccaaaagtgaacaatcttaaaaaccgactcaaaaacggatatgtatttccaaaagcaaacgaacttaaaaaccaactcatacacggatgacgtaccaaaataccggcaaaaacatcttcaatgtttataatactagagataagtcgttgtttttttcataatcaagtttatagggtttaatatttcaaccaaaataaatatattatcatatatatatatatatatatatatatatatatatatatatatatatatatatatatatatatatatttaatgctaggtttaataaaattaattctataaactcgagtcataatacaatttgaataattagtagcattctttaacaagacggggtgtagctcatatggtagagcgctcgcttc

SEQ ID NO: 47289 - DNA, 994 bp, Oryza sativa
atgcagaattctgtgcaaattaaacccttgatactattgccttccggtcatggaatcgagctaggttttttttgatggctgtaaaatcacgggcctcaccgaagagagactggatttggagagttggacccccagagatttttctagcaattacttaccataggccacgaagcagcggttgtttgggcgaaacgtcgaatatctgagggtccacaactggttttcaacgaggtgtttagtattcggatggcacataggacgttagggtggatagcttagacgatgtcggtgtcaagcgcgtcgactaaccgcgccgttaagttaggctggcgggcgcgacactgtggaatgcagatggagaattctttgcaaattaaaacgttgataactatgccttccggtcatggaatcgagctaggttttttttgatggcttcagacccacgggcctcaccatggagagactggatttggagagttggacccccagagatttttctagaaattacttacaataggacacgaagcagcggttgtttcggcgaaacgtcgaatatctgagggtccacaactggttttcaacgaggtgtttagtattgggatggcacataggacgttagggtgtatagcttagacgatgtcggtgtcaagcgcgtcgactaaccgcgccgttaaggtaggctggcgggcgcgacactgtggaatgcagatggagaattctgtgtttttcctatttatatgatttggaaatcctgtgaaccaaagaggcccagaatgtatgctcaactgtttgaatggttgaatagtggaattatttgagtgtacatatgacctaatctttatactattatgaaattgaaacatatattgaaaaaagtattataagatattcacatatagtttgtaaaaatcatatcttttaggagctagtaaagagtgtttatttaatccaattattagaaaagtgatgaactacttgcagtgagcggaaatcg

SEQ ID NO: 47290 - DNA, 1170 bp, Oryza sativa
  unsure (1)..(1170): unsure at all n locations
tcgatttccgacgcgggcaaggcatgtataaatatggtattttgatcttgaactgaggtcctccaaggaggtattgacggcggcggaaattgaatccatcgaacatgtcgaggcggaaattgaatccatcgaacatgtcgagactgatcttcccggctagattggatccgagtcgaagagcaagagcatgttgaagtggtcggcgaaaaaaactcccgaagcgaagatgaattcggtgactcatgaagttgattccatcgcacttgtcgacaggtaactcgacgcaacccctacctggcgcgtcaactgtcgaaacaaattttcggcaatatgaaaagggggtagagcacgagacctaaaagtggatggatgtggagacaaaggatttagacaggttcaggccctctcgatgagaggtaataccctactcctgtttggggatttgaatccgccgggtgtatattgatctgacgatcagtttgtgtcatgtcccctagagggcttcctgcccaccttatataggatggggggcaagattacaagatagaaaccttaaccaatacggtatcggtttcctaaatctattttacaatattatcaaatcaggactttaggccgctccataatataaaaggaaacgtaatacccaagtcatgatcagttacatattccatagatataagctatcccctatgactaatcggataaccatgccgtgtgggtatggggtacccataatctccacagtagcccctgagaccttcacagtcgtaaagataatcttttcttgaactagattacttcaaagccgagtgcttcaatcatctccgccatgatctcccgagtgcttttaccaaatatgaagactgtggagggctaaaaaataaagtcaggtgcatcgaatagatgtacctaatagatgcaccaactgagtggttttgataattgtagtcaaccaagcgacttgatattaatatgtagcatatgcggtgtgaatccttgaacgacatgatccgagtgatataccgactgctttgtaaaatatgatgagtgtaacctaaagttggctacattattgaaaattcacatagcaaaacagctataaagaagcttgaatgccgtgaatatgatgagctncttgcagagngcgccagtcaatcaaggggcgcg

SEQ ID NO: 47291 - DNA, 739 bp, Oryza sativa
  unsure (1)..(739): unsure at all n locations
tgctgtagaatcacgggcctcacccaagagagactagattttgagagttggacccccagagatttttctagaaattacttaccataggccaggaagcagctgtttattcggcgaaacgtcgaatatctgagggtccacaactggttttcaacgaggtggttagtatagagatggcacataggatgttagggtggatagcttagacgatgtcggtgtcaagcacgtcgactaaaccgcgccgttaagttaggctggcaggtgcgacactgtggaatgcagatggagaattctgtgcaaattaaaaccttgataactttgccttccggtcatggaatcgagctaggttttttttgacggcttcagaatcacgggcctcacccaagagagactggatttcgagagttggacccccagagatttttcttgaaattacttaccataggccacgaagcagcggtttattcggcgaaacgtcgaatatctgagggtccacaacgggttttcaacgaggtggttagtatagggatggcacataggacgttaaggtggatagcttagacgatgtcggtgtcaagcgcgtcgactaaccgcaccgttaaggtaggctggcgggcgtgaaactgtggaatgcagatggagaattctgtgcaaattaaaaccttgataactttgccttncggtcaaggaatcgagctaggtttttttttgacggctgcagaatcacgggcctcacccttga

SEQ ID NO: 47292 - DNA, 666 bp, Oryza sativa
  unsure (1)..(666): unsure at all n locations
agaatatttgagggtacacaacaggtttcaactatgggggtcttatatggacggcacatctgacattcggggggttagcatagaccatgtccgcgttaagcgcgtcaactaaccgtgtttttaaagattgctggcgggctcgacactgtggaatgcatatggcgaatcttgtgcaaattaaaaccttgataactttacattccggacatggaatgtagctcggatttttttgaccgctgaagaatcacaggcctcaccctagacagactgtatttgcacaggtgtacccatagatatcattttaccaatgacttaccatatgccactaaccagctgatggttgggccaaacatcctatatctgatgatccacaactgattgttaacgaggaggttagtataggaatggcacataggacattataatgggtatctgagactatgtatgcgtcaaacgcgctcactaaccgagccgttcaggttggttggaaagctcgacactgtcttatgcaaatggataatagtgtgcaaattaaaacgttgataactaagactttcggtcatggaagtcgatctttgatatttacgacaggttcataatcacgggcctcactacttnatatacctgcaattgtagagaaagaacccgcagagcattttgttagaa

SEQ ID NO: 47293 - DNA, 739 bp, Oryza sativa
catggcggagatgattgaagcactcggctttgaagtaatctagttcaagaaaagattatctttacgactgtgaaggtctcaggggctactgtgagattatgggtaccccatacccacacggcatggttatccgattagtcataggggatagcttatatctatggaatatgtaaccgatcatgacttgggtattacgtttccttttatattatggagcggcctaaagtcctgatttgataatattgtaaaatagatttaggaaaccgataccgtattggttaaggtttctatcttgtaatcccgcccccatcctatataaggtgggcaggaagccctctagggggcatgagacaactagatcgtcagatctatacatactcgacggattcaaatccccaaacaggagtagggtattacctctcattgagagggcctgaacctgtcttaatcctttgtctccgcatccatccacttttaggtctcgtgcgctacccctttttaagacttacggcttgcgtcttgttccctcacccgcatgagcctcaaatgctgacgggctaacctggatactcatcatatacaaaaagttaattatttcatggagtatgatagaagtaaattatatatcataaataagaaaggagcgcaccactcggttgcagtgattacagtagattctttgatccttgatatacccatcaactttcctctgtgatgaactactgcaggaacgcacacc

SEQ ID NO: 47294 - DNA, 869 bp, Oryza sativa
  unsure (1)..(869): unsure at all n locations
tcgtctgtatgtagggagtattcagattattgggttgtttnctatcacctcctatcactccgacctttcttatattagtgagatttcgcggactcttatataaatccnntnttccnnnnnnnnnnaagagttagattttgcattgcagtaccacntctcactataccgcgaattcgagctcggtacccaaatagtacttgcggtaaataataccgcgctgcgtgcacataacacaaggttgttgttctgtctatattggctgattgcataaagaaacataaatctggctgaggtgaataattgatcattcggagccctctatatttattgatattgaagccacaaccatctaataactggctggtataggtgaagattatcgcctggaatgtatatttacatagggaatcacatatacccagataacaggttaggacctaatattggcataacatctaattgctttagtcttttatcctgaaaattgaacacttgttcttactgaaaacagaactttgatggatgtctttattgcagaacacttgctcgaccaagttcctccacgaagccagaagaagctctgcatggatgacaggctaagtgaccttcctgatacaattctacaccatattatgtctctcttatcagcacaggaggttgcacgtacgtgtatcctgtccaagagaaggaaagaaccttttgcctcagcaccatgccttgatatctgggtacataaacttggaatggacagggtgcggttcagggagtttgcagcacaattggctgctattccgggctcctaaatcacttaatacatttcgtcattactttttttaaaatcaaccatgcccactcttggatcaaccgtg

SEQ ID NO: 47295 - DNA, 725 bp, Oryza sativa
atcgaaccactttggtctattgtgacaacatcattgcagttcagcaccagcacatcaagcacgtcgagattgatctccattttgtccatggttgtgtgactactcgcactattcaagttctacatgtgtgaactacatcccagtatgctgatatattcacaaaagggttgccgactgatgtcttctttgagtttcggtctagtctcaatgtccagcctgttgacgttgcgattgccgggggtgttagcatatctcatgtatatcgcatgttttctttcttttggccagtcctcccaatatccctcccaggcatgtttctataaactggttgagtaggatactaggataaggatgattatgtgcctatatgtactcggcgttgtgatcaatcgatattgtgttgagtccatcaatctaagagtctgttgggccactcctctcaggctctcacgatgcctgcgcctgcacacgctcttgcacttgacgtggccgatctcacatcagtcatggaacaccaatctatggagcttgcatgattgtgacgacacctgatctctatctgcaactctgtgtctccattttctcatcctggatccaatgggtggcggtgagaacattggggatattatggaataagttcaccggaggtccctcaatttaacaccaagattttttgagatcccttaaccacaaaacaagaaatgtgcacccctaaacttatataa

SEQ ID NO: 47296 - DNA, 924 bp, Oryza sativa
atgggcccttgaaattgcaatacaaaactcagcttgcagcctgatgtcgactctagaggatcccctatatatatatatatatatatgagatatatatatatacatatatacatacatatgtgtatgtatatacatatatgtgtatatatttatataacacaagaaaaaaaaaatatatatatatatgtatatggatatgtatatatatatacatacatatacatatacatatatatacatatacatatacatatacatatacatatatatatatacatatatacatatatatatacatatatatatatatatatatacatatatacatatatatatatatatatatatatatatatatgtatgtatatatatatatatatatatatatatatatacatatatatatatatatatatatatatatatattcaaacaaatgcgagaatgtttgggactaaaagatgttagggtgattgtattatatgtaagacatagatgactactgaaaaaaaaaataaatgggccatacgaggtggagagggactaaaggaaggctcggtggcatatggaccagaagatgaagataagagaagcgaggtattccctggaaaaaattggggaaacaatgaatgcgaaaagtatttacacaaaagcgaaggggagaatatttgggaataagatggatggggggaaacgtcggatattttatatatatgcgtacgggaaacaaaaaggaatggggtattttacctacagggggatggaaggaagttttgggtaatacggaagtgaaggaaagaggagccgaggaaaggattccatgggggaatatttgtttgagaggggacgggaaaaggactttaaacagagtaaagggggggaaaatttggatttggggatagcgcgttttaaaaaagggcaatg

SEQ ID NO: 47297 - DNA, 756 bp, Oryza sativa
cacgcccattgataacgtcatgatacccttcctccgctcgcagagtcttttcgtttttcatatctaccatgtatcctcccataggagtggttttgctggtctcctcttcaccattactttcatatgacaccgagacttcctttagtccccctacagcccatatggccaatttattttatttacaatatacatttatatgagacatacaatacattacactaacatcctttagttcgaaaaaatcttatcttcggttgggaatatatatttcttatggtctggggggaactaattggttagtttcaattttgggccatatgagactgagacttctctgagttcctctacaggtcatgggccatgtagaaacaatttatttagtttttccgaatatgtcaacaacctagagaaaaatacaaaatacataatgcactccaaaatattggaccttcgtctacatctgaagacttcttgcattccttatctaacatataccctactttagagaattgtttccttggctcctcttcaccatcacttccatatgtcacggagactttctttaatccagctgcaactcatatggcccattttataatttcaaatatacatgtttataacatatacacacaatatacgtaacatgagcaaccactaggtctaatgtaccctccgcttgttaatatatatatctgatgtgcataccctgtgggaacaaattggttagttcacatttgagcctatgacactggactt

SEQ ID NO: 47298 - DNA, 984 bp, Oryza sativa
  unsure (1)..(984): unsure at all n locations
gcggccnggtagattgactanctcgnacccnacacatatacatatatatattttttttcttgtgttgtgtgggaaacaaattgtttagttttacatctggaccatatgcaatgaaatttcattgagttcctctaaagttggcagctcatgtcgaaacaatttatttggttttctatattatgtcaacaatatataaaaaatacaattcatgaattgtgtgtatactacttattctcacctttctctccttgtagggacatttcgcattccttatctgccatgaatcctcccatagcaaaggttttgcttgtctcctcttcgccattacttccatatgacaccgagacttcctttagtccatctgcagctcgtaaggctcatttgtttttattttcaatagacatttatatgagacatgcaatacattacactaatctcctttagttccaaataatatcatcttcgtttatgtatatttatttcttatgttctggggggaactaattgtgtagtttcacttttgggccatatgacacccagactattccgagttcccctacagttcatggtccatgtagaaataatttatgtagtttttccaaatatgtcaacaacatagagaaaacacagaacacataatgcactctcaaatattgtaccttcatctacatctgaagacttcttgcgttccttatctaacatataccctacttgagagaatgttttccttggctcctcttcaccatcacttccatatgtcatggagacttcctttagtcccgctgcaactcatatgcccccattttataattccaaatatacatgtatgcaacatatatacactacatgtaacatgaacatccacaagttctaatgtaacctccgcttgttagtatatatttctgatgtgcatacctgttgggaacaannatgctagtttcacgtttgagtcatatgacactgagacttctctgaggtcctcta

SEQ ID NO: 47299 - DNA, 1491 bp, Oryza sativa
  unsure (1)..(1491): unsure at all n locations
tgaacgcacaccagggagtagatttgttaacatgacagaaatagaagtgggggtgccccccgccaggaagattatcntcccgacggcggggaaaataacggcaggcggggacagancattatttgccaagaaaaaggagagtacgccccacacgcaccggataggaccacgcggaattccagccagagcgagtagatatcaggacgccgagaaaggacgaggacagacatttcatataagcaccgcaagagacaacagaagcgatgcaaaaggtagaccctcggcgatacatagaaaaagccggaaagaaaaaaacttaccgcagaggaataaacacaagggaaaggcaagagacattaaagcgcatttttttgttaaaagatgaacaatttgtgacccagggcgaaaagaaagctgcgtacataataaaagaaccccggtcgaatctgggtactttcccattaggcttccgccaccgacatcaaaataggattccaaacgacgacacgatcaagagacactgttttgcacaaataaatggnggtgnnngggtcntcaacaacaaagttgtataactcatcaatatgtacaacttttgttttggtcattttgctagatgactttgtttcaataatttgaatttgaatttcaaattatgacaacttcgaacaacatttacaagtactaaattatttcaaatggaaaactcatcaacaacaaagtggtatagctcatcaagatctataatttttattttggtcatctcttacaaatcgctttgtcagatgaagaaatgatccaaataaaaattatagatcttgatgtgttataccactttgttgttgatgactttttgagttgaaatcatttagtacttgtaaatgttgtttgaagttgtcataatttgaatttcaaattcatactattcaaacaaatacatatagaaaagtgaccaaaacaaaagttgtaaatcttgataagttatacaactttgttattgatgactttttcagttgaaatcatttagtatttgaaaatgttgtttgaagttgtctaaatttgaaattcaaattcaaattattgaaacaaagtcatatggtgaaatgacaaaaacaaaagttgtagatattgatgatttatacaactttgttgttgatgactttttcatttgaaatcatttagtatttaaaaatattgtttgaagttgtcataatttgaaattcaaattttatatagttcaatcaaactcggatgaagaaatgaccaaaaaaaatggtagatctaaatgagttctacaactttgttttttacaactttttcatacgagctgatttagtggcataaaattcgattcaaaatttgcaataaaaattttgccttctcaccactttaaaatatttcatctttccctcacctcttcctcccctaatattttcccttctttcagtgccggcgggagaaagacctaaatttcaacatgaaatgaccatt

SEQ ID NO: 47300 - DNA, 2157 bp, Oryza sativa
  unsure (1)..(2157): unsure at all n locations
cgccgaagactttccgtccgatttgtgtacggaccccccccccttttttgaattttctgtttattggaaagagtacagggggtatgaataaacgncagtagcagggaagaacaggggagagcagtagcaagggaattggttctaagaaaaggaagagaggggatgatccaatcttatctaaatatctgtctgggacttaaccgatgtgggagagaaatatttactcccggttgataactccacccgagactaaagatagatttttagtcctggttggtagtaccaaccgggactaaagatctaaatgatctttagtcccggttggtagccccctgacatacctctgacagggatgaaccaggactaaaatcatctttagtcctggttggagatcaaaatttttttaaccggaactaaaaatcgtttttagtcccggtttttaatgaaaccgggactattgtggaatttggtcgaccgaccaaagatggtttctccaccagtgttcttatacattttcttaacattgatttttattttaactgcattttaagttgatcttaaaatcggaccatatgatttacttactctgaatagcttattttctggatgttcttcaggaatttggatgcaactgcactaggaattcatctggatttttttggttggttgtgataactgcagcaaaacatctcaagaggataaaccttcactgtcattgaaataaaaaatacacttattaattgaataacgtatttttaatccattctgaacagtgcagaactttctgaattatctatcggtgtttagcggttgattgttgttttattgaggggtattattaaatatcaaagtagatagatgcagataaagaatcaagttttatgacttggttttagttatacatatttttcttcaaagtgcaaaaataaaaattgtactccctccgtcccatgatataagggattttgagtttttgcttgcactgtttgaccactcgtcttatttaaaaaaattgtgatggtgactcatacatatattgtcattactaaatatcaccatagcattagcacgggcacaataatgttttatagtcaattaatgacttgtttctttttagtatcgctaagcagctcacctaaaaaagttagaacaaaaccatacacaggggccaaaaaaagcagggtgagtggcggccaaggatcaaagtgtcaagggggcatttgcccccgctcactgcaaaattgagtggtgttgatgaaaaacacgaggcctgggagatctgcttaactccagtgcaggtccaaaactcgccttcgggtatgctagcgtaccataccaaatttggtcgttaacaggtgggggcaaaggtccccacttgtaatactctagatctgcacatgaccatacatccctagctccctgccaaatctatgctccctgtagttggtcggcttgtagtagacttgtgacgtacaagtgtaaagaaaaatctatgcactccatcgttataaaaggaaacgctctctcactcccttctcatcacttcgctcactcactctcactcatttcctcccattagtcttcccactcacgtctcactcctctcactcacttctcactcgaatgagtcagcagccaccctgttgtgggcacgcattctaaggggctgccaaggcaaccagggcgggaagggtagtcggggtcagctaggatgaaaaggagaaccaggtggcgacggtggcttgagcgtacacggtggcgcaagcggcgacggtggtggtctaggttaccatggcgctagaggaggatgaggacaagatagcagaaatggtggccgcgggtcaacggcagtgggcgcataaggtctagggcgaggtggtaagccatgatgcggttatgatcgttaggttggtttagtcattctttttacaacttgcctcgatccttactgcaaatggcaaattcatgcaagaaagagtgtagctaataggtggaggataactagtgcaggtgaagacaaacatgctcagtgcggaattatctggccagtacttgcaactaacttccagggtttattggccacaggttacagacatttggtcaaactgagcccaatcttgtgtccctgtagggatnggtcgaggcaagtgagcaaat

SEQ ID NO: 47301 - DNA, 682 bp, Oryza sativa
  unsure (1)..(682): unsure at all n locations
ctaatcttgctagttagatctagagacaatgatgaaattcgtaccacttaatgtgttgctatgaagaccagaggagctgttaagtactctagttaatttggccacagcctaatttgccattagtgtcacattcacaaactgctgatcacaactgtactaaattttggcgactgtctgggcatataacatacagacaagtggtgtaataaaatgtttggcttgattcagttgtaaaattgaaccaaacagttcctgaataaattgtgcagctaaccaacaaacaagcccctcaagcttcaacatcattttgttaggtagcagttatgtttcgtttggatggtctcttgtgtgttctggttggaggagtttttggcagctgtagttttcttgaagtcaaaagcttgtctaaacaatatagcttttcatccagattcttagaagatgtagttatagaatccagaaaataaactagattctcaccagctgaatttctactaatagcttcatagaatctaaagctacctaaacatgcccttagatgatgccaccagtgggagctattctattatcccttttagctagatgtgccatgactatgggttttgttagccaatctttaggttttagctagacgatgaaatctgtttgntgaataattttctatgtaagatgtttggttttt

SEQ ID NO: 47302 - DNA, 734 bp, Oryza sativa
ttatacacttaaaaaaaaaactaaaacacaactaaaccacccactacaatatcacttgtaggctacacgggccaatttcacaccacactgcaggttgcaaacaggcatgggtattacgaatctcccccaaagattctaccataggataacccaattcccgccacctaccagcttggcaaggaacaatcaaggcatcgttcaacacacatgtgaactatgaaagtatatatagcctgtgataatttgtgacatatacacaaacatcatatcgtgtagagtgtgattcaaaaaagtaaattattccttgcaaaaaggaaaagaagaaaaaatatatcgtgagtgggtgaaaaagcatggatgtaagagctcaacttaatggagacaacacttacaagaataaatgagaggagtgacaaaagagtactcattgcttagtctcagataattttagcattggctgcttatagttcttgctcaatttggtcaggactagcacaagaggtatttataggctagcatcgctatcacgatcacgtacaatcatctgctaaaaaacaaagaaattgagaaatggtggcaggatctaaaaattaattctgaattaattttccatgctggggcgcacatgctttttttacactgtatatgtattaaattcaaataaaggaataccctgtgaaaacagtgtaaatccactgcaaactttaaaaggtattaccaaagtaacttttcat

SEQ ID NO: 47303 - DNA, 853 bp, Oryza sativa
  unsure (1)..(853): unsure at all n locations
acatcatggaaaatgcgtggcgcttggggggtgaccaggtcaggtagtgttggtcgcaaccccgtagccacagagcaagtacgcacagcagggaggataggctgcggtggtggctataggtgcagncggcgacaatgacacatgcgaggtgaggaaaccacattgccgcaagggaagaagggtgcccctatcatacccccgatgattgaacggtcagatttcatttgatacatgcttgtacaaagtacctggaggtactaactgctggaccggaacaaaacacattttagatggaggtagtaaatttcaagcacccaagtttaatcccaaaattagtgcacttttaaattactactctctccatcctaaaattagcaacatagtatgcaatgagacatcctagtattatagatgtggacatagcagtatctcatcttatctcatctcatacaaagttgctatattttgagatggaaggagtatatgccccatcagttgaagcatgggtactggtcggcgttgctctcagtccgcacgggtggcaatgccactcaccatgccgtgcctcccttcctcccctccgtcgctgtccaagctagcaatcggatatctgtgcagcggcaaggtcaaaggcggtgggggctgcttaccagctccgcaatggttgaaggcaagcagtagctatcagatctgggtctccgctcctaggtctagatgtgtggtggagtggtgacagggatcctctccggttcatcaacaatgatgcccctggcttgcggatggtgccgatatgggggctttccccagttcgtggatggcggtgcaattagggcttctccccggtttgctgatg

SEQ ID NO: 47304 - DNA, 716 bp, Oryza sativa
  unsure (1)..(716): unsure at all n locations
ctggtaagcagcccccaccgcctttgaccttgccgctgcacagatatccgattgctagcttggacagcgacggaggggaggaagggaggcacggcatggtgagtggcattgccacccgtgcggactgagagcaacgccgaccagtacccatgcttcaactgatggggcatatactccttccatctcaaaatatagcaactttgtatgagatgagataagatgagatactgctatgtccacatctataatactaggatgtctcattgcatactatgttgctaattttaggatggagagagtagtaatttaaaagtgcactaattttgggattaaacttgggtgcttgaaatttactacctccatctaaaatgtgttttgttccggtccagcagttagtacctccaggtactttgtacaagcatgtatcaaatgaaatctgaccgttcaatcatcgggggtatgataggggcaccctccttcccttgcggcaatgtggtttcctcacctcgcatgtgtcattgtcgccgcctgcacctatagccaccacccgagcctatcctccctgctgtgcgtacttgctctgtggctaccggggtgcgaccaacactaccgaacctgtccaccccccaagccccacgccattttccatgatgcgcgtgactgtgtcgctgctgccgcagtctcctcccccatcgcgtnttgggctctcggcacct

SEQ ID NO: 47305 - DNA, 800 bp, Oryza sativa
tctaatttttagggatatgatcaagttttttgtttaatttgtaaggtggatgggaatgatttagtttcttacttggttagattgatgtggatgaataactggaaatatgaaagtttttattaataacataatatattctatattagcggtagttatcattaacttctccatattatacacaaattaacaacaaaatgactcattatctctaatcaacacaaaccttgacaattaattactatttaacaacaaaatatattaattatcattattgtcaagattagaaaaggtggatggtctcatccggccaatatttccgaaatagctcatccagcatctgcatgaaatattctctcttataacggtctcattcatgattcgtccttcctatcaaccaaacatagttaagttggatggtcatatccatgtagggatttcctttcaaccaaacacatccccctagcatcttcatatggaaaaagtgcacatggtctaagtccctgcatactagtatattgtgccacatgccaatagctgattttactttgttggtctggatggactcatttgtttgtagaagttggtccgggctggtctggcatttaaataactagcaaaaatacatgtgcattgcaacaggtgaaaataattttcacgattaataaaactcgatcaatttaaacaacaaaccgaaattaaacaaacaaatcaatagcaaaacaaagtcagaaaccatatatagcattcaaccgggttgtgcgtgcttcatgtgtcatcacacgaagaatcacttatgtacg

SEQ ID NO: 47306 - DNA, 692 bp, Oryza sativa
atgacaccgagacttcctttagtccccctacagcccatatggccaatttattttatttacaatatacatttatatgagacatacaatacattacactaacatcctttagttcgaaataatcttatcttcgtttgtgtatatatatttcttatgttctggggggaactaattgtttagtttcaattttgggccatatgagactgagacttctctgagttcctctacagttcatggtccatgtagaaacaatttatttagtttttccgaatatgtcaacaacctagagaaaaatacaaaatacataatgcactccaaaatattgtaccttcgtctacatctgaagacttcttgcattccttatctaacatataccctactttagagaatgttttccttggctcctcttcaccatcacttccatatgtcacggagacttcctttagtccagctgcaactcatatggcccattttataatttcaaatatacatgtatataacatatacacacaatatacgtaacatgagcatccactagttctaatgttacctccgcttgttaatatatatttctgatgtgcataccctggtgggaacaaattgcttagtttcacatttgagccatatgacactgagacttctttgaggtcctctacaatttacgggcaatacagaaaatatttttatattatcta

SEQ ID NO: 47307 - DNA, 691 bp, Oryza sativa
  unsure (1)..(691): unsure at all n locations
aactagagggactaccgagatggttgtttcttctgtgcaaaattcgtaaggtgttatattcaagctcagtcaaacaggggctgagcatgataacaagctgaacacatttctagctcatgggagtttggcctactcagtaaccaacaattatctaatggaaagtatcaatttatgtactcaagctgcctttttgatttccaaagttcatctcagcaactgcaagctagaggaacaatggtgaatgtttttttgtattttggacatcccgaagaattctcagaactaaaggtgccatgggatctaggagtttattgcattggcttggagacaagccaaaaattaagggaacgggttgttaggagccgatgggcttcctaaggtgcagccgccccacactattgatgcagcccaagaccatgttccatgtaaagcctaagggcctgttcggctgctttgtaccgccgctgtggtgccacagccgaaagaaacaacacactgtgctggttggctgcagcacaataaaaataatggcagccgaacagagccttagaagaagagaatattaaagcagcagttctaccgcaaggaggagagggagagaatcccaaaaccgaagcttgggcctgacngtgcgggcgaatggcngcagtggccgcgacttaagtctatgcttggattctcgtcgagtacc

SEQ ID NO: 47308 - DNA, 580 bp, Oryza sativa
atacacttagtttaaaaatgtaaaaatggtgcttgtaaatttgtattgaaaaatactttcaacctcttataaactcctcgtgctttagaagatgataccccaatataaaactggaccaatgtcaatccttcatatccatatcaaaaagtcaaacatcaagtagaatttttaccgaatgaaatgttagtctatatttctttacccaactcttgaagctccggattcttcctttacaaattgcacggaagaacatcgccagagttatttatccaattggaaatattgtgcaataatatgaacaggtcttggctggtttgaaatgttaaatggagtatatctacactaaccaaacaacgatggcgacacttatacataagtgcatgtttatacgcattgaaaagcttatcctttttgccattttgtgccactagccgcgtttgccagttcaaatggcggttgccagactgtataaagagtatatatagtagtgaaaaatccgatgacgattgcctgaaatattggccaaatcaaataccggatgcttgtacccataatcgatcttattacctactaccttcat

SEQ ID NO: 47309 - DNA, 823 bp, Oryza sativa
ttctcaatatataacatagttttatatagcatatttaatatgctgtcattctagtaattaaaagtcaattaaattgtattatttagaaaattttgtattttggtttaaattgtagaaggtgaagaaacaaatccaaactagtggtgcaaattgaatgagtaacataatttttatagattaaatgcaagattgtaaggtaatatctgcataactggtatatgatggcatataaacatcatgaaaaaactcatctagcatttctgaactaaaacaacacacatctagccaaattgttgcacaaaaatgctaaattgtcaagtttcttttactagaacgtacccatttgccaagttgatgcacttagatgttcaattctcactttcttgtactactagatcatactcgcatgtcaagttgttgttccaagtttatactattttactgggattcaggtcttcttttagttgtgaatgtagaaatggctagtttttgtagcattctaattgcaatacggaatttgagagtactgttattgttaatgggtatttttgtaaagtctggactttgtaataaatggattagccaaagcttgttttgttttgggctatcatttaacaggcttattgatgagtcttggtgatttctataatatcttgtggaagcgtacataacatagtgtgttaatgcacctttctaatatccgagagaaatcccagttccagaaacactagaacaaaacatggttgctttctactattatttaacattttcatttctaagaaatatcaaaggtgaaaaaagtatacaatgtgtactatcatgt

SEQ ID NO: 47310 - DNA, 553 bp, Oryza sativa
ctacatgagaaagacttctctttatctcatttctttaaccttattggttcatcatccttaataagctcctattgtacgaggaccctaactcatttctttgaaaatggtgtacatctgtgcagcttttatgttaaatccttccatatagaatccgtgcacggaccctttaaacctatgtcaatacttagtatcctgcagcagcacgcagggtatcatctagttgctaagaaatcacaagcgtacatccctaacaagagcattttaaatatctgatgtgttgtactgttgtgccttatggttaatggaaggtccgaatcggtgctagggaggacaaggaaagaatgtgggtgggaagcgaatagtcagtccattatagcattactcatatgctccgatgacacgagtattccaacaacatcctccaaaacatcatgtatttattcaatcttgtcacaaaaaaaaaaagccgcacagcattacataggtgtatccccgttatcttcaaagatgaagatctctctcatcctcatccgatcgagagcagataactaac

SEQ ID NO: 47311 - DNA, 595 bp, Oryza sativa
actatagggcgaattcgagctcggtacccaagaatatttgatgatgaatcaagttacaataaaataaatgataattatataattttttttaataagatgaatggtcaaacgttgaataaaaagacaacagcgtcatatattaaaatatggaggtagtagtaattaagatcgatgatgcgtacaagcatccggtatttgatttggccattatttcaggcaatcgtcactcgatttttcactactatatatactctttatacagtctggcaaccgccatttgaactggcaaacgcggctagtggcacaaaatggcaaaaaggataagcttttcaatgcgtataaacatgcacttatgtataagtgttgccatcgttgtttggttagtgtagatatactccatttaacatttcaaaccagccaagacctgttcatattattgcacaaatatttccaattggataaataactctggcgatgttcttccgtgcaatttgtaaaggaagaatccggagcttcaagagttgggtaaagaaatatagactaacatttcattcggtaaaaattctacttgatgtttgactttttgatatggata

SEQ ID NO: 47312 - DNA, 2094 bp, Oryza sativa
attgcagcccttgccgcggtagccgtcgccgtcccagccttgccatattaaccgtcgtcgagccattcgctgccagatctagcgccggtcgccagccccctttgctgctatcgccgctggtggcctcatctccttcggacagatctaggagagggaggggagaggagtaggaaagccagcaccgttgctccctctgttgccgctgcggccatcgtccttgatccccgccagccaaatccgggagagagatgggaggcggcttcatcgctgtcgctccatccatcgatgctccccttcctccacctctccatccctcccctttgccgctgttggtatttcttaacgacattactagaaatataattcccagcaatggcacaaaaatattactggtatattacgattacagatatggtctgcaagcgcacggatatactattatagcatttcacccagaagactatactaataatttatatgttacttgtataaatcagagtgtaagcaggggttaattaattcaagggtagagtgacacgaagaagaagaactaagttactctcattaaataaatccttggctaagtggagaaagaataagaaaagaattcatcctaatacttctagtatacaagtatctttaatttaagctctatagtatacaatcatgcagccaatacccctctatgccttcctggtatttcaagagaccacccctgattgccgagtttcttacgacaacccgtcatggccgtccaaccggaaatgaatacggaggaataccaattaacttaggactatatactaacgtggatgaatacccgtactgagctgtcaccatcagtggcccaactctattgtcccgcagcatataaccccaaataatgatatttaataatctaagcaccatgcttacattatcaaatactactctatatctactagcatgacatagagcaatcatttgcatgaacattatatccacaccattacatatctttggtaagctagctacacaattatatcaagataaatataaagtaaagtcggtactcagataataagaatgaagtaaaataccaaaactgaataaagaagaatatttaattaattgtacaagtattacaaaagagagagaagctactagagccatacccgaattctcctgaagacttgaggactaagaaaactattctatttcttacttcactagcactagaatactaactaaacttaagagagagcttttgatattcttgcttgagtgtgtggagaagtgagtgaggtgagcttcttttataggctgagtatgatggttggaaaggtcggaaacgccctccaaccggaattggagtgaatcctgaacgtccacgctaaacctagcctcaacggctgagatgggggttcggccgaaccctggactggcccaatcggcccaaatcttggcaagcctcctccccgttgattccttagtccactgacgtggtgtttataggccttttgagattatctttggatttataggcccatctatccacaaatctacctctcgacggcttccgattgattgttcatctgttttcctctcgacggcttccgattgattgttcgtctgttttccatcgattcatcttctctttatgtagcaatctctaaaatcaaatagaatccaagtacaagtggaaatagattattctaaaacaaatatgcattgcaagcatagctagttctccgttattttgagtatattgatggttgaaattggtctataatgaccatcaacagccacccctacccctttgctttcaccggacaccgccgtgacccttcgccgctgctggccctgctacctttgtcacttgggccaaccaccgtcgaattaagaaagagagatgggagggaggatgtgaggaattgagagagacggagagaggggtgcggtgggaaaaggaagaaggagagagagatcgatgtgcgatgggataagggaagaaggacctgtcccacattgaacccgacccgttttcacccctacacctcagttcaaagtgacatttaactatttgccgcttttaagatgtggcaattaagaatt

SEQ ID NO: 47313 - DNA, 518 bp, Oryza sativa
  unsure (1)..(518): unsure at all n locations
ggaaaacactccataaacatggtaatttaccaatggacaccgcgtcgataaaataataatttccggttaaagaggagagagaaatcgcgtgaaagttctaaaatacccgtgggcccacttgtcatatcttccatctctcttcaacggaaagcgtcgtcgtccgtggagtggagcgccaggagcatcggcagtcttgtgtgtgcatgatcagctgttttaacatagctgatcatgaacacacaaactatacttgttaaatcacattcgtttgttgaaaatggggtacaattgtattgtcgacgggctatacctgtctacggtatttgttcaggtattggctaactctggattccaagtgtagtttgtgagagggagacgatcatacagagatagagatagagacggcgagaccgaaatagaagcgatgagttgggtaaatccctatgaatgttccatacaaatacgtgtcatccggggggacatacctncgcacggacagagaggccattcgacaccag

SEQ ID NO: 47314 - DNA, 611 bp, Oryza sativa
ctggccagccgcgttgccgcaggcccgcagccattgccgtccctcccttcgcgcgtcgatcggcgccgccgctcctccgtacgtagcagccgccgttatccccttcaagcgtcgctgctgccaccgctcctccacgcggagcagctgccaccgtcccttccaagcgccaccgctcctctctgcgccggccggtcgcgtcgccgatttatatgtttggatagggttcgtataaccataggtattttggtcagttcacgctagcaatttggtcagacggcggtttcaattttgaaaaacgtggttaaatgagaaaacaaaaaaaaaaggtaaattaattattagatctcaaaacagagtcaaataagtaattgccaccaaaatttatcctcatacttatacaggatcgtgctgctttgctgctttgcatccacgcactttttgcgactaagctgaggaacaaaaaggattctctaccaatgatgaaccaaaatgtaacaagatctgcatatctaccatgcaaagagttgttcacaaagatcgtacgagacagagatgggaatgctctcacgccttaacaagaaggataccggagtctcgacgatcaccatgcc

SEQ ID NO: 47315 - DNA, 965 bp, Oryza sativa
ccttcatgtacctcgcctattgcaaccttggcttgatcggcactcaaacatttaagcaacactccatcaatcgtccgataatgcaactcatcatccaacaaggtgtacttcaaagccttacagcgcaatttctgagaagccgattgagatggattctgcaaataatgatacacatcatacctccaatcatcggctgttatcgtggcaacttctattttgacatccttcatcatcgggttgtaacccaatgccccttgagccaagtcattagctttgatattttgttcttgaaatacatgcttcaaagtcaccagctgaaatcctttcattaactctcggcacttctcattgtagacgatcaatgtatcattcttgcactcatattcccctgccaattggctaatcacctacaaggaatcgcccataatcttgatagcatcggcttcaacttccttaagtaattgcaaccctttgagaaccgcttcgtactcaacctgattattggttgcatagggcttaattgtcgtaggctctccggaccttccattatatttgagagatgaagtgaataattcaagtcatcaaacaagcataatgaaacatccgacacctcgagagaggaatattggagacattgctgggcccttagcctgccagtcaacttcagcctgagatgtgcccgtcaaaccactcgaaggcggcgaccagatgtgttacacattcaggagacttgacaaaaatggctaaagatctacaacctctcaaatattcctaactcatactcatgtgaatctagttcccaggatgtgcactagattcacactttcatcttaagcatgattatacatagcaaacacaactaagatgaaagaaacttaagacttacaacaacttaataattacataggccgaccggccaaatagacttattagagaacaacggaagcttgactacccaatcacaa

SEQ ID NO: 47316 - DNA, 891 bp, Oryza sativa
gggtttcttgatttcttgattaggtgaatttctgatggttgacagcgggtgtcctaggtgaactcggttcttgatttctagggatttttctctcttaccaatttcgtaacttaaaacttataatacgattgaacaccctgagtttatggggtctgctggaccatacttgtttgttggtcgccaccgccgccgccgcaagcagcaccgccaccactagcaacggcagcatccggtggcacatcatctctaatggcagatcgatcgatctgagctctaagctgagctgagctccttgtcttgaagatgaaggggacctcacctcacctcaccctgctctgtcactctggttgtctctgctctgtgtttgtctgcaatgataggagctgtatgtatatatactccatatctcttgagatctcatctcagctaaagcctcagcatcagtaaaaggcagtaacttcactgtcaaaggttggatggccagctgccgctggtagatttacagctttgttgttgaaaattttgtacacatatgcaaacagccatactttgtctgaagaatagaatgagacaaattcactgcctatttttattcgggggtaattaacttcagtttggtgatgatgtacagtgagacaaatgcactggttttttatcaggggggtaaattatcttcagtttcatgatgctgctactcatttgtaactgtattagttatcaattatcatagcttgcatcaaagaattgctttaatcacaaaaagttgctctgctaatgcatttctgaaactaggctgactcacatggagagatgccctctatcagtttattttcatattatcatgcttcaataataagtactacctccgttttttaatagatgacgccattg

SEQ ID NO: 47317 - DNA, 625 bp, Oryza sativa
ccatgtgtgtagatgtgaaaacacgaggcctggaagatctgcttaacttcagtgcaggtccaaaaatcttgcctttaggttcgtgagcgtgcagttgatttgatcctccaatcaccaagaaataaagccaaagaacccgcggttaaatccataaacgatagccgatcggctagttgccgatgatatatcatttatctccaagccgatgtcatatgtgaattgatcggcaatcatgaataaaatgaaaaagaactaaatctactctatcggctgtagatattaacaatatgtagtccttatgtcgatatatacttaaatcaaatgattgggatatatcggtcgccacgccgagacagtataaatcactcagatcgaaatatatactaacaatgagactatatatgttcatagcatagccgatcagatagatccagtatgtatcggctaatactccgataccactctatattaagatattaaagcaagtaaaatatatcaaacagaagcgtaatatatctagatgtaacaagatcataacataaagggcagatctagcatatcaattaagtacatgaaatataaggctaaatcagataagatcgcctgaaactctgatactactata

SEQ ID NO: 47318 - DNA, 763 bp, Oryza sativa
tttactgaggtaaatgattacacctagattccattttctttggttgcactcaaaaataatgggtggactgctcacagaattaaacaaagatgggctattagaaagctggattgaatttttaggaggattaaacagagaaggaaaattctagaaaaattatatttattcatgataactaatctagtatttgaataaattatttcccatgttcacttatgtgcagttaaatgttcttttggatgaaatatggttttagccgattaaatttaatttgatttcttttagttgtctgcttcgaccgattaatttgagatttcaacttgagtgttaacatgttaccaaaattacagaggataagtttgtgctaatcactgtccacataaatttttccatgattttatcttgcacaaaatattttagagaattaggatgacctttgtttgtatatgtgttcccacttcataatttcatctaatattattatagggattacattaaacttcttttggactgagaagatgatatttgagtttaatattaagtccacatgttatcacccaagattaactataggtttgtttagtgaaataattcttttagattatgctcatgggacctattatggaatgcaagaccaaaactccaaatgcacaaagaactcgagcctaggcatgcattatgtacatgtatgcttgatgacatttctagtctaatgttgggaatgaaaagattttattttgttctcaaattttaatcatgcaat

SEQ ID NO: 47319 - DNA, 766 bp, Oryza sativa
  unsure (1)..(766): unsure at all n locations
ttcacttgagacagcatcaatcagtgttgtaaatatcctttgacagccaaagcatctcaatgacaatcaagcccatgttgaccacgcgacagctcgcacgtgcaaaaggtaggaggaataaccgtgcatgctctccctccaatgcaaaagtcacctctgcctaatttacctttccttcaaagctacaagttaccggcttactctcactttctaccatcagtcacaaaacctaggtccaattgtagctttgtttattagctaatgtattattagtactaatactttgttccaaaacagaagtcaccggtttacctttttaccatcagtaacaaagccctaggactaaccacattcccattcttagttttcgccccccgagtgatttcttagtttactattacctaaatgtaggttaaatagtagtaatacaaattagtcttggttctccttggaagtggtaaagagcaagtaaaggtcaattcaagtatttgcagtttgtttccaatcaacatgaatttagatggcatgtgagaaacagttaatcaagcatggtgacagcctgatggactagttttggaacaatcttatttggctctattgcagatcatacccagaagatgcagaaaaggactaatcttcagagaagggttgattcacaaccctgatgtactggtacagnggagtactgctactttatagacatatatgtctcaatgtactcctccaaataccatngtcttagctcaacaaaatcttctacccttct

SEQ ID NO: 47320 - DNA, 602 bp, Oryza sativa
ttgagctataagatcaatcttgtgggcttcaagccgatctatgttcgactgaatcgccccaacagagagttgatcaagcttggctttctcctcatgcacaagttgccgattggcttggatagtggcttcaatatcttttcgcacctgctgatcggcaatccgttgcttagccttctccagcttgaattgatgttgctcgagtgacacagctggagtaatggtatttgccagatcatccgggattaaggcttggatttcagcaaaccgtgcccggatggaaccgcagtcggccaccaagttgtctaatgatgactctagccgaagggatatatcttcgagtgttttcttgacattttcatccagaggggctagagccttgcttgggattcttcttctacttctttatcaaagtaatctttgatgtcaaaggagaatagatcggctaaggtctggaaaagagaaatttaaagatagttaaatatcaaacagtgtcagccgatctaagatcttatgtcaatgaaagactttctaggatggcaggagccgctgtttgtcctcttcttcaacatgatgacttcctgtagccgatgggtacggtcaat

SEQ ID NO: 47321 - DNA, 763 bp, Oryza sativa
  unsure (1)..(763): unsure at all n locations
aaaactagggtttggaggagcgcgaggctacatcccctcctcatttctcaggtgagctcgtagctccggtgagcaacccgtcggccgtcgtccccttgctgtgaactactcatgtttgtttcatactactgtttctacatgtcccactgtgtttgttatgactgtttcagtattttcttccattatgttgcaccattttacttagactaacctcagcacaattaattttaatgttttagcacagtctttgtagatgtttcagttggctatccatgcttgtttcattatattaataaaacttgtttcaccacatttttgcatgtttgttgtgaactactcatgatttggttcatactactgtttctacatgccccactgtgtttgttatgactggttcagtatgttcattcattatgttgcaccattttacttagactaacctcagcataattaattttaatgtttcagcacggtctttgtagatgttccagttggctattcatgcttggttcattatattaataaaacttggttcaccaaataacaggctactagacccatccttggagatgtaggcttccatgtttcacttaagtacttctgagctgccatgaaccaaggngagaaatgagccatgaagtacttgcttggttgatagaaatgttnaatggagagtgtagagaagatagcacaatgcaatcaaacataaaaaaatattttttatatgtcttctctccaatcatatcggaatttttttaatcta

SEQ ID NO: 47322 - DNA, 596 bp, Oryza sativa
attcggaatttaaaataaggaatattagaagtggagtatagagtccatatagaaatacaatcaggaaataattgaaattcggaattaaaaataagaaatattagaagtggagtatagagtccatatagaaacacaatcaggaaataattgaaattcggaattaaaaataagaaatattagaagtggagtatagagtccatatagaaatacaatcaggaaataactgaaattcggaattaaaaataaggaatattagaagtggagtatagagtccatatagaaatacaattagaaaaaaaaaataaattcggaattaaaaaaaaggaatattagaagtagagtatagagtccatataagaatttaaaactaactaaaatttggaataaacataataaaattaaaagtagagttttgagtccgtataaaaactaaaagtataaaaatataatttacaaataactaaaattcgaaattaagaaaacatgggaagaagagtttaaagtcaatataggaatacaatttagaagtaactaaaattcgaaattaaaaattaaaggatattggaagaaaagtttagagtccacatacgaatata

SEQ ID NO: 47323 - DNA, 655 bp, Oryza sativa
cttcaacgatctagatgaaaatacaccctaaacagatctgttttaactggggaaattgaattatgaactggccactaaaacgtgaccatgcatgctgtcaggccttggaatgggtggcgcgacgggcaccgtggcctgggcctctagccccgaagggctgttttggtttaaaaccagaacttgtgttaccaaatcattgatgtttttgaatagtacttttgaaatgattcttcactgacatatcgaccaatgtcgtcaaaatattagcaatgtcaaaaattgtctaggttttgacattataaatattttaatataatagcaaatcaaactggaagccactacgaatcgggcacccgatctgggagaaaaaaaatcgggcgcccgtccgagccgtccgatccagcaccctaatctcgtccgtctgcgtgcattaaacaggagtttcaatcagtcggcgcctactgcaacaaatcgcggggcttgttccacggcgctgtccaggcgcgagccaccgccggcgcacgtgaggggagagttccgccggagcagccaccaccgccaccgctgatctcctccgaagatgctcctcccggccgtgctgggcgtcgccgccgtgcctcagatctccaatgacaattggcgccgccgcaagccg

SEQ ID NO: 47324 - DNA, 646 bp, Oryza sativa
ttttgcattatggtaatccagtccttcagcctagggggtagtatcatgttcaactaattgcagtttgcttactgccctgtttgtcggattcctgacatcttacctttttttgagtatcgctttattcatcagaacggactagacattatgattaagggtaagtaaagttgggtttaattaagtgacctaatcaatgtcctgaaaaacaaaagatggagatataaccgaggataaagatagccatgctttttatccctccttttgagctttcttttcctttggaaagcaaaatggattggtgccgctgttgctccatactccgtagcctaacctatgagagagatgtatttcttccattttgtcatatatgtctgatttccggtatcaacaggaaattttgtgctatcaaatgaaatgaggaacctttagaaatgggaaaaaaagacgtggacattaacctttggagagtgaccagctatctaccggcttcactagtcactatacagtcgtgagaaaatcatgggattggtatatatagtaaaattaatatatgtggtgcaccttttgatcacaatcaacatcatgaaatgttgttccccacctcattatgggttttaattggtccggtaccagaaaatcacctcaa

SEQ ID NO: 47325 - DNA, 505 bp, Oryza sativa
attttttatgcaaatataaaaatatttatgtcatgtttaaagaacatttgatgacgaatcaagtcataataaaataaatgataattacgtaaattttttaaataagatgaatggtcaaacgttggacaaaaagtcaacggtgtcatacattaaaatatggaggtagtatatagttattttttctgcaaaagcatgtgtgtgtatatgtgtgtatatacatatacatatatatactctctccatcaaaacaacctaacctaatcgaggatgtgatacaatctatgataggataacgaatctgttcctatggtgtcttatcatcacatagctttagttttttctttacggtagtaggttggaggttatttggacggagtgagtattattcagtcatttttgcataatttttatataggaaatgtgatgcccacctagattgaaaacgccacccaggaaaatgatttcatcgtgagaaagattcggtgggagcagagtgaaataaatt

SEQ ID NO: 47326 - DNA, 918 bp, Oryza sativa
acatgtggaagtacggtagtgctttcaacaaaggcccgaagaccggtctttatatggccgaggtgctactatcaaaaccatgcaccccgagcccaagcctaaaaccattttgaggattttgaatagagggggaggtgtgaatccaattccataataatccaaccattccatagtgtccacctaatgttgcctaattaaccagcgaagcatctacctaaaatcatactagtggtaccatgagtagagtgtccactagttggggttttgtttattctagggtgaacaaggtaataataacaataacaataataaggtcataacacaggtacataggcatggctagataaaacagtgataacgcgggaatttaaataaagcgataatgcaataatttaaatcaaaataactttataaactgggattcaatatgttcaaggatgatgtgacttgccttgctcgctttcccaaacgtcggcttcaacttccacgaagagcggatcttccgaagctgcagcgtctacacgaccaacggaaaagaaaaggcttttactctaataaactccatataacaagcaggaacaaagcacaaaaatgggttcttgacttcttaaggaaaaattagagacttgaacggtccaattccgagttcaaatggccaagttatggtcatttgaagtttatatgctctttaaatgaatatttgcgaatttctttatttaaattttaatttaaaaatggatttattgcgtcagccgagaggagggggcgcgcggaccgggtccacgggagtggggcccacgcggcagcctcacggtccacggtggaccgggcgcacccgggctcgcaccggccggtgccgtgggtcccacgcgtcagccgcacccgagggcgcgggcggctgacggccgggccccacgc

SEQ ID NO: 47327 - DNA, 623 bp, Oryza sativa
ttcgatgcaagggtcggtaactttgcctttgaattatgtttctaaaaaaatcttttttatcccacttgacatgctttgacgtcttcccaaatggctttactgctggacttcttattgtctgatcgttatcctgccaaatctgaagcttcggtgttagatgtgggtttaatccgacccctggagactatctttgaacatatcacttgggtcataactgggaatagctctcatgaacaagcaactcggattcactttctttatgttcagtttactttccactattctcttcatgttgtcatcatttagcattcaaagtattcccttacacattcaaccctgatgtgttattttcagatttctcttatcttcgacctacttctttgaccggtaataaacacccttgctgttatcttctatcaatcacctttttgactttgtcaaccaaatactcttcactccgaaagttgtggatgcttctggtgacgatgtggtcctttggtctgcttgccttcaatgaaacctcgaagtgtttcgccaaaagctgtactgacccgttttgccttttatccgaaaaaaacacatctgaaactctcagtctaaacaaaaggctcttttgcttttta

SEQ ID NO: 47328 - DNA, 806 bp, Oryza sativa
aacggatggagtacttcattaagcatgcgctatagtttatctcgttaaacatgtcaccaaaaatcccaacccccaccccttctcgaaagaagtattaacctatcgtggtgcccacaaggctttttaacgaagttttcttcggtcctgttgtacatatagatatttaaagtgttaaagaattgttcaattttgtcgttggttatacccatatcatagaatccatatctataccagtttgtttggaagacgtacggattggctagtatgaggaagcaacagaatccatatctatcggtttgttttggaggacatagggataggctagtatgagaaagtaaacgaatcagtaaaagaaagcaagagagacatgtattgttatacaggttcatgtcctgatggtaatagggtactagatcttccgttaggcgaatataactatcgatttgatggaaacttaacacaaacaatccggttttttattaacacaatccgaaccctgcaattacagcattctgtctcctttatatatcaaccgtgctgaagtatgattggccacgtcaagaatgctaatccttacgtgtgaatcgaaaaacacaatcaagaacaagaaaaacaacaactcaattgcagacgaatgattaaccaagaactcgaagttagggttccatgaaccaataaacaacaaaactataatgacaaaaataatctaatcagaagagcttattccctctacatgatgtacctttacaatttctactactatctcaaattaacataaaaatacggggcttttaactatttgccac

SEQ ID NO: 47329 - DNA, 2340 bp, Oryza sativa
tattgttaagcaagttagtttagtatccgatcagtataggtttcttttctcccatgcctgcatcgactctagaggatccccgtatccataaagcagacagtagggatggcaatttcccttgcggggacccgacccaacgggggcgggggcgggggccatttctgacccgcggatgagtcaggggatgggccccgcatttgggcggggaggggacgggggagacattgaacccgcgtggccccaggggatatattaccccttcaaatgtagcccatagaagacctaacaagcccaacttaataaaatattgagatatataagcaaaaactgaacagtctaaccctaccttatcctctcccctctggcctcccgtcctctccaggctccctttccctcttgtctccctgcggcgcagcgtaggacgacacacgggcggcacgcggggaggctcacaggcgggcgctgtgaggggcacagctcggcacacaggcacggtggccggcgatgggacaggcgtggcgagcgggtgtcaccgggtggcacaggtgacaggcgcggtgaaacgcactgagaggtatttcactattttggtgaaatgtttttgtgtattgaatgaatttgtgtgtcaaagtagttgtgaactttgtggtcatgcatgcattcagatcatggacgaaatgatggatcatgaaagaatttgtgttcttgctgaattctatatgattggcttgaattttttttcctgattggatggggatactacccaatacggggcatcggaggggtcgggggcggggcctaatagatccccccgcatctctactcgggggcgggggcgggttgaaaaatcgggggtcgggggcactactatgaaaaccatttttcgtgacggccattttgggttttcgctagcggaatttagagccggcacaaagcaaaggccagtgaagatcaagatcttcgctagcagttatcgaccgccagcgataattcattttcgctggcggtcatcttaaactagtcgccagcaaagatccgttttcgctggcggttggcttaagacggcctgttttttcgctggcagattacaatgtactagccgccagtgttaatactggccaagtttaaaaaaaatgacggacggagcgactccgctccgtctgccttcttcaacactccaccattcaaaaatttcacagaaatttacccaagcattcaaaaatccacagaaatttacatcaacaatctacagtcaactgctttcattcacccaagcattcaagcatcacaaaaatcaacacagaggagggagccgggcaacacggtcgatggcgtcgaggtcggtgctgcccttcccgcggtccggtgggggcagtctgacgtccccgcggcccggtggcaaatgatccggcctccctgcccgcgcccgagctccgccgaccgcgcccgcttggtctggcatgtcatcgtcggtgtcagctccgccaccagccccctgccatcgctgccacggtggccgccgccccctccctctggctagatctagaagagggagagggaggggaggggagggaagggaagagaggtgagggcctcgtcgctcacgcccgtcgtggacgccgtcgtcaccgtcgccgacaggacaaggaggagggctgggggctccgggaggaggggagagaggtgggggaggaggaggaggtgggtggagaggagaaagaggtagaggagagatgaatgcatgggtgggtgggtgaaaatcggttttaaatgcgtgggtgggtgaaggaatctcgcgtgcatggttttaaatgccgcgaaaattttttagtgaggctttgctttccgctggtggatctatttttttgctggcagatctctttagcagctgccagccggtttttgctagcaaacatttaagaggtttgcctaaaaaatatagtattttttatggcggacctcttaatgtggcgctggcgggccgtgaccccccgattttctacgccggcgtttttttctcgtagccgccataaaaaatattttctaaacgccattaaaaatcgtttttctagcagtgagatggggccgttccagtacaacccgtcccgacccgccctgttgccatccctaccgggtcagtcgcccgacctgcctgggaggtgaatccgccgctgcgaattaggtgagcctacacgcgttctttgaacattcctatggtacatcagtgcatatgtacctggtgtatatatataagtcattgggataggcttgatcacactagctatcttctgcaaagagcacgcagagcgacccctgcctactgccttgcctacaaggggc

SEQ ID NO: 47330 - DNA, 1570 bp, Oryza sativa
ctaataaagacaatcgactgatgataatataacaaaacaacaaatacaatccagtagaaaccaatcggccaacaatgatgtgaccgaacaagtgttgatccgaaggttaaagtatacatcggctagaggaccgatgtcataaaatccaaacgattaggtaaatagtgaaatctttgttgcgatcgactaaatccaacatgtatgcaatccttgtaaaccgatgcaatgtctaaataactcattggttgaaaccccgatgaaacccttattggcaattaggaagcaggctagaggttatggttctaagcacgactagggctgatgcagtgcaaagtacgaaaataaacataatataatatctagacaatcaagcccttgtctaattttcaggatggtagaaaccttagctaatctaatctggtaaagcaatttagccgatactggcataaaccctaaaacgaatcttagccgatacaagtaattaaactaccaaactagattaactaagatatatgatagatagatgcttacattgacaagatcagagtgtcgaatcactagctccgccgatgcaaacaaccatgacaagtataaactcgtcgaaaaagtagaaaagtagaaagtggtggcgctgcactgaatttgtattgatcgtggagatagtttacaatgaccctgagcgtatatatttatacctatgggtacatactagtccttcttgaacaagaaagaaacttttctaaagataaaaaaaaaacataaagttcttatcgaacactaaacacacattccaaaagataaaagaaaactaatagactcttcctaattaatagatacatcgccaagccgcatgctccttgaactcggtctcttctgcataaacttgctttaattgattaatttttttaatcaaatatagcaagaatccaactattggcgacttgataattcccatcggctgattacagaattgtgaagccgatactgactccaggccgatgatgaattcagggcttaccaaatttcactgttaacaacactatactaaaaatgtttatattttggaacggatggagtacttcattaagcatgcgctaatagtttatctcgtttaacatgtcaccaaaaatccaacccccaccccttctcgaaagaagtattaacctatcgtggtgcccacaaggctttttaacgaagttttcttcggtcctgttgtacatatagatatttaaagtgttaaagaattgttcaattttgtcgttggttatacccatatcatagaatccatatctataccagtttgtttggaagacgtacggattggctagtatgaggaagcaacagaatccatatctatacggtttgtttggaggacatagggataggctagtatgagaaagtaaacgaatcagtaaaagaaagcaagagagacatgtattgttatacaggttcatgtcctgatggtaatagggtactagatcttccgttaggcgaatataactatcgatttgatggaaacttaacacaaacaatccggttttttattaacacaatccgaaccctgcaatag

SEQ ID NO: 47331 - DNA, 6159 bp, Oryza sativa
cgcggggcgcgcccgaactcggccacgccggcacagccgacggaaggcggcgcgcccgtgcccctatggtcgccgcgctcgaccataggcacgggcgcacgacggagcggcggcgtagagaggggaagggaaggggaaaaagaagcggcggtccacggctcaccccgagtcgactgcgacgacgtaaacggcgaccggagcggaagaagacgccggctcggctcgggtggacggggtcgacggtgctccggcggtcggcgtgcgaaacgtaggggtgcacgaggtcgccggggatgcggtgaagccgaaggtggcgacgccgaggcggaaggtggtccggggcgacgacggcggcggaccggagctcgccggtgacagcggagagagagagcgacggcgcgagctcgattccgacggggagaaaggccggcgagtgtcggaatcggtgaagggaggcacggggaaggtttatatagggttgggagggggagagaacggccggatgtgggggaaacgggcgcggaagatccggccgccattgatggcgccggcgaggtttaggggaaacgtttccgaacaaatccgagggagagagggagggaaaaatggggggaaagggagagggaatcacggggagtgatttccccctctttattgcgcgcggggacggcgggatgcggcggaatccgcggcggcggcggcgctagggcacggacgaagcggcgggtgcggcgcgaggacagggatgacaggtgggcccacccgtcagcggcacgcgcgcggggaggaggccgattgggccgcgggggagaggagagagagggagggaggtggaccaatccggcccaaaaggggaagggggggaaaaagactttttagggtttttctttttatgaaaccattttaactttgtttatttcttaataattattatttgtgctctgaaaattccactaaaatttgagggctccttttagaccaaggagaatttaacaaaaattctccgggccacatttgaatttttcttgtacgtattttagtgtttgctaatttcttttcgaattttaattaattctattattccttttagagaatgatttttatttcgggatgaatttatcaggacgtgacagaaatatccgagatcctagtcggttacgattgtattttatctgtaactacatattctgttagggatatggactttattttgtaatacggaccccttctcctatataaggaggggtctgggtgcctctaggggcacgatttcctcccagatcatacgatcaataatacactcggcggatcaatccccggacaggagtagggtattacttcttgatttagaaggcctgaacctgtataaaattccttgtctctaaacccatccgcttttccagcttgatagccacccccttttagtattgccgaaatcttgtttcgacagaatcctatgaaattcctatggaatgcctaatacaatgtaagtttgggaggaattctaacatgaggtagaacctcatggaaactttcctgtgagtctttatctcatctaattcatgtgtttttcctgtggtccaatcaaacgatcattactgtgtttttcctgtgttttgcaatcctctgttttacacttaagggccggcctgtttggcacagctccagctccagctccacccctcctggagctggagctcagtcaaacagtttcagctccaccaaaactgggagtagagttgggtggagctctctcacaaaatgaattagagttgtggagctgggtttaggcagctccacaactctactctagacccaactcttggagctaaatttaggagttggagttgtaccaaacaggcccttatattcctatcaaaatcctatgtttttcctattcctacgttttttcaatcttgcgattcaaaggggcccttagatacaacaattcgtcaaggaatccaggaaatatggaaggtgtgcacatggttttggtgaaccaaaacacagtgaaggacaaaagcatatgagtatatgtcagatctttataccttgggagattaattttactgtacctgagaaagtacggtatctaaattttagagggttgctacaaaacaggatcccgttgcaacgggatagacatattaactattatcttgcacgagtatcacaggtataaggtcctaaatatcataggtaccggataacagacatcacagatatcgggtaccatgtagctggtaccacaataggtatcaccgtatcaggtatcaggtactgtcacatagaagggtatcccgttacaacgggataccgttgtctaggttttctgaaattttacactaatattattttacctcgaagtatttagtatctgaaggtatcaaatttacataagaaaatatgacacattccggtatatattttcaaagagggataagtccaatttatgccctcaaacttatgtttgtctaaaatacaccctgaactataaaagcgggtattatacaccctgtaactatcaataccggatactttacccccctagagctgtttcagactggttttcgatggcacgtcaacatgagtcccaccagtcagatgatctctctttcgtttttttttctaagctcgctgaggagcggaagaagccagcgagcttcctccctctgtcggttccttccctggcatcctccctctgtccatcccaggtgacccccctccctgatccatcaacatccatggtgaggcgggggagatgctgcggcgagcgacggtacgggatatgacagggcagtgcccggaacagcgagaggtcctggtggtcgccgtcgcctccctcatgaatcacgagcttgctgtccccgaacgggagaaatggacctcgctagagccaccgcaggaggaggaatcatccctgtggagcgtcgctgccgcctggtcgaggacgaggagtcgctcggggaggaggagctcgagcttgccggtgataacaagcgcacatccgtcttcgtttccgccgtgatggcggcgtcacggcccctgccccggtactcgcgtctctgtcttgtccaagctcgcgccaccttttatctccccatcttctctgatcttggccaaggaggctggctctgccatcctcttcagcggtgagggaatagtgggagggacgagaagaaaacgcaatggcagatggatgcagaagttggggatggtacggatggatgcagagattgggattagtgcaactggtgtccacgagctagcttcgccattgccggtcgcctcgctcctcctctacgagctttgcctccggcgagtccactcgcaaccttgcctctgtgaactcccaagcttggtggcttgagagagaggggaaggaggtagcaaaaggaaggtcagagttcggtgaggattccaacggcggcaagccggcgaccatcgaggggagctctatagcggcgttccacagtgataattccgatggctgtgaccctcggggtgtaggtcagcgacagcactccacagcacaggtaaaattcggtggcgccgtggcaacgctcctctacatcgccgtcgagatatgcgagaggaaagatagagagatgaggggagtaagaggataagacttctgactggtagattaggcccactgttttttaaatattttttcattaatcggaatgccatgtcatttgctatgtagaccaaaaccgcctgatctaaaatgaggggatcaattgaaacgattttgatagttagagccttagaggatgttgaatacctggttttatagtttagggggcattttagacaaaggtaagaatttgagggtgtaaaatgaacatatccctgaaaagtactatcagaaaagtactaccagccaccggcgcgttgtgtcctcgtcggcgtgttcgtcttcctagacgttttctgttccattcggcgagatcgatactgcagtcgccggtcataaagcggacttcttgcccccgtcaccccgggagaaaaagccgaggcagcagcaggcgtccactagtcatcgatcagccagcgcaggcggaaaagcagcggcggcagagaaaagctcacgcgtggctcccaactcccaaggaagaatattccaccgagcacctagcttgtatcacgtgaatccaaattcacgtgatttttgctatacgcgcacagagccttctaccaggagattcctccatcattgcttcgtgcacacgagaagtgcacctagaggttcacgtttcagctaagtttacaccaacttcttactggcagctttagaattaattcccatgacgagtttaaattatgttcaaccgttcctataccgagacacaagattctcactacagatgatgcactatctgaattcgacataagtactaaggattggtccgacgatgagaaaaaaaaaggattgtaagactatagcatatattcatttcatctaacaattatttgtaggaggtatttaaggagaagacagtcataaagttgtggttgtgtcacgaccggaaataacccaacgggcgttccttacgtgcgtgtattattccttatcccaggaggcaaggtacaccaaaaattgatacatttcagagtttatcaagcggaagcgtaaatagttaatttattacatgggctgcgaaggcccagcacacacaaagacaaacgagaaacagcggaagactagggcgacgaccacaggcgcttgacggcaggcacgagctaaacaccaaagccttcatcttccagggactcctcttctgggtttggaaaaaattgagcaagactgagtacaaccaccgtactcaacaagacacacccacaagtgcagaataaatgcaagggagtacaagggggttataatataaagggttagggttggcagtaaacagcattaaaagacacttagttgctcaaagctattttgtaaacacgattctagagctatacaatattattaatcaaggccgtgaacccacacgaacctgccttaacccaaggcctacgatgattcagaccgaactggcaacccgaccctgggtcccagctcgtcccaagccaacccaggccaaccattccacattttagttgttaagcaggttttaagaattaaaacactaacttgggtacattgctcggcttgcccataaccgagggcgcggctattcgaatagattatactctgatcagaggtgtacatctttacccacaagacacatcttcctcacgtgtaaccacgtgccacataccaccacggtatacagacggaagacgtgacatagttcccaacccatcctagccataaacaagagtaccgacccaaccccacctacggccggaacccccgggacaggtaggcaggactgagcccccagcagcaggacaccggccctgtgccatgacatctcgactaccgggccgtagctcgtgtagccttcatttgtcctagagatgtccatcgacctgctatattattatccccttgtacccctatattattatccccttgtacccccttgcattaattatgcatctccggtgtggcttgctgagtactgtggttgtactcattcttgcttaatcttttcccccccttcagtaagagaagctttggagaagaagtcttaggtggagtcctggcttataccccagttgagcgcctgtgaagatggagccgtaggcccgctagtccgctgctgtttatttttgattgtcaggccttaagtgcctttgtaataatgtaaatattatcgatataataaagatgtgccttttgtattatgtttgtttggtgtaccccggcatttcctgggatggggattaatacactagcgttcgggaaaaggcaattttctcggtcgcgacacaaagggccggtgtcctgctgctaggggctcagtcctgcctacctgtcccgggggttccggccgtaggtggggttgggtcggtactcttgtctatggctaggatgggttggaaactatgtcatgtcttccgtccgtatgccgtggtggtatgtggcacgtggttacacgtgagaaagatgtgtcttgtgggtaaagatgtacacctctgatcagagtataacctattcgaatagccgcgtcctcggttatgggcaagccgagcaatgta

SEQ ID NO: 47332 - DNA, 2881 bp, Oryza sativa
attactgaaatgctctttgtaagattaaaaattaggaattgagctccgaaaaatccgagaatattccagagagtataattaaccatggagaatttaataaaaattaaatccatccatgctttatatttaggaaattttatttcccacatttaacttcacttgtaaattaaagaacatttaatataaattctattattaatttattaaataatttataaatcctgaaacgaaaatcaggatgtgacaatggcgccggcgaggttaggggagaagtttccaaacgaatccgagggagagaggaagggaaaattggggggaaagggggaggggatcccggggaataattccccccactttattgcgcgcggggacggcgggaggcggcgggattcgcggcggcggcggcgctagggcgcgggcgaggcggcaggagtggcgggaggaaggggatgacgggtgggccccacccgttagcgagggtggcgggcgggcccgcccgtcagcggcgcgcacgcggggagaggccggatgggccgcgaggagaggagagggagggggagagagatggccccagccggcccgagagggagagggagggaaaggggactttttagagcttttctttttataaaaccattttaactttgtttatttcttaataattattatttgtgttctcaaaattccactaaaatttatttacgcattttaggcttttaggaaatatacaaaaatcctccaagccttatttgacttttaactttgcacattttaattgttggaggctttcacacggattttaattattctaggcataatttagaggatgtattttagagtcgttttgggacgtgacagtacaccatcaatgaacgtttctctctccactcatatgaagtccacaaatcacctctcacatattccactttcatatccacatgagactaggcaaagaaatgcttataaaaacattagtctcatataattggatttgtcattactcaccaaaaccaaattaatgacacttgcactttcagaaacagtcttgacgacaaggacgtattcgatgtgagcaaaaataatgggtgtcgaatccttcaaaacagtcttgacgacaaggacgtaccaggaataattgagagaaaaaatataagtaaaaaggctcaagaaaaatataagttaaaaattctctaggttgttttgtgctaaaagctaatttgagaaagagtgataaatgcaataggtatatatgtatagtgtttatttttcaacctatgtgcttgtaaagatgttgcattataaatcgtatgaaattatgaattttgattgttgatttgatcttaattgtaaaatctttggttcatgattatactttaatgcatgcttgctatattatagatgggttcatcttctttttattgaaacacatgacttgatatgctatatgtatgctaagctcttgaacattatgaacataattcctatgcttgatgaaatcattgtcaaaagggggagaagcaataagttttttcggagaagagaagaatttttggaaagtttttgagaagagcatgttttttggttcaaggggaatttcattcttttcaaaagtgagagaagttttcttttggattttgagcacgatgtgtacatttgtatgaaatgtgctttttaccacttatgtttttatttttccaaacaccaaaatatttttgatgggtttgccaatgtgttcatcaagggggagattgtaaaatcaaaggtgttttttattattattatgtgatggacagttggcatctgagattattggttttgatatttgaaatttatttacgaagtggttttggagatgattggaatttgcaagtgaataggaactgctgcttttgatgtggtccggtcagaccgggcatgtgctgccggtcagaccggcgtgtattacgcagtcagaccagcgcgggcgactctgtgtcggttttggtttcaggttgtttatttggaaatccatgattgtttcatgattatggcttctagatggatactatgcatatgtaatactgtagtttgctaccaatgaatcaagttggagatagcttggtctcggaatatggtttctttgtttgtttcacgtgtaggtgacttgatgcctcgggatagtattgccggtgatggatcgggagtcgactggatggtaaggcgatgtccgtgatggtcagatatcatgcggaatacttaggcttgagttcaatgtacgtagttggtaaagattccatatggcatacgatggaggtattgtgtgtgtaggatgcggagtcgaatttggaaggagtccaaatttggtatgattggttatgtaaagtttgtttcttgtacgaggaggtttcctatgtggattagaacttctagtatgagtttggttcgtggctttaggctgcctacctcatgtataaatagagagggagcgtgaggcttcccggtttcaattttgagagcaattgagttgatagtttagttaggtgtcgcgaccgagaaaattgccttttcccgaacgctagtgtattaatccccgtcccaggaaaagccggggtacaccacacaaacatgatacaaaaggcacatctttattatatcgataatatttacattattacaaaggcacttaaggcctgacaatcaaaaataaacagcagcggactagcgggcctacggctccatcttcacaggcgctcaactggggtataagccaggactccacctaagacttcttctccaaagcttctcttactgaaggggggggaaaagattaagcaagaatgagtacaaccctcagtactcagcaagccacaccggagatgcataattaatgcaagggggtaca

SEQ ID NO: 47333 - DNA, 1373 bp, Oryza sativa
ttcttgtacgcattttagtgtttgccaatttcttttcgaattttaattaattctattattccttttagagaatgatttttaattttgggatgaatttatcaggacgtgacaaatccaccccccttacaagaatctcgtccccgagattcgaggaggctagcaagaagataggttgggcggtcttctcttcttgtctgacttcttgcgtcgcgtcttctataacgaacttgcctagcaaaacttctccactctggactgcttggctcgatctcctgttatagatggaatcgtctcttcacctgacttttccctggttgcacctctagctgacttcgactgggctgcggcattggaagatggggcttcagttccagaacttcttataactcatatctttggagtcaacctcatacaggttaccacttcatgttatgcgtcaacactagcttgtcattactaggataccatgtttgtcatcataagaatatcatgcttgtcatttacttctaacttgccaccaactgcctcatattagctttcctgctctccgggtgctagctacttctgctattcgatgcaagggtcggtaactttgcctttgaattatgtttctaaaaagaaccaacttatcccacttgacatgctttgacgtcttcccaaatggctttactgctggacttcttattgtctgatcgttatcctgccaaatctgaagcttcgttgttagatgtggttttaatctgacctctgtagactatcttcgaacatatcacttggttcataactgggaatagctctcatgaacaagcaactcggattcactttctttatgttcagtttactttccactattctcttcatgttgtcatcatttagcattcaaagtattcctttacacattcaaccctgatgtgttattttcagatttctcttatcttcgacctacttctttgaccggtaataaacacctttgctgttatcttctatcaatcaccttttgaactttgtcaaccaagtactcttcactccgagagttgtggatgcttctggtgacgatgtggtcctttggtctgctgcctttcagtgaaacctcgaagtgtttcgccaaaagctgtactgaccgtctttgcctttgatccgaaaaagacacatctgaaactctcagtctaaacaaaagtctctttggctttttaatccaacacagtttaatggctttcttttccatcaacaggttggttattaactcgaggttagaacatagttcctctgaaatcagaccctaggtctcctttgtcagtaaacaattatacacataatcccatatccacatcttccaaaagaatcctaatagaacttgtctgtattacacattt

SEQ ID NO: 47334 - DNA, 533 bp, Oryza sativa
agtgttttctaggatgcgatccaaaatcgtttttccttctgacggcgtcttgtgcatgaacgatcctccagcggttatgtccagatagaatgcagactcctaatccaaacccgtatgaaaatgctggagaagcacatactcgggtaaggaccgggttggtccggactgcactaaattagtgaatctagaccaagctgcaccgattgattcgttttcgatctgcttgaaactgagaatttttactcgaagggcggtaatacgggtgactgggaagaaggcaagacataatctgtctcgcagctttttccagctaccgcttacacatccaacggtagaggtgtaccattggtttgctctctcttgaagaggtcaccgcacagtttcttgtctcatgccacgaatcttaaggcatgagtagacttgtcaaagtctcgcagatgatagtagggattttctagatcacagccagaaaagggattttccctaccatactaattagctcgagacaattttatagccagttgtataaatgg

SEQ ID NO: 47335 - DNA, 661 bp, Oryza sativa
agacgaaaacaaaaaccaaccaaatgtccatcttttcaacaaaaagtacaaatatacttctcacgacaagtttgtgaagtagatggttttgaaatatttatttttgtttcttttaaagttgcaaaaagagaaggcaaaattccaccagatttaaaaattgttttctttgcacttggttttgtcaaaatttctctgcattctgctatactcaaaacattgggttgatttttggtgaaatagtcacgaacatcaaaaccaacacccctattgtaactagtcactttagactgatctaaaatcatgtcaagttgtttcttaccatcagaaaatctttgcaaagaacttttcaaataagaaacctcatttttcaaattagcacaattttcacaatctaccatgatacctttgcttttacgacatttggggcaagaaagcacttcattggttttcacaatgttttctatatgctcaacacatactaaagcatatttcaatttcatctcattcaaaaaacaatttgaacaactttgagaaatcaaaaaatctttggtttggttagccctttttgcacataaaacattgtacaaagaacttgcacttaaagcaactttgtattttgtcaaaacgttctttggcgaaacccattcatcaataacacgag

SEQ ID NO: 47336 - DNA, 733 bp, Oryza sativa
aacttcaaatggccatatcttggccatttgaactcggaattggaccgttcaagtctctaatttttccttaagaagtcaagaacccatttttgtgctttgttcctgcttgttgtttggagtttattagagtaaaagccttttcttttccgttggtcgtgtagacgctgcagcttcggaagatccgctcttcgtggaagttgaagccgtcgtttgggaaagcgagcaaggcaagtcacatcatccttgagcatattgaaatcccagtttacaaaattattttaatttaaattattgcattatcgctttatttaaattcccgcgttatcactgttttatttagccatgcctatttacctttgttatgaccatattattattgttattgttattattattaccttgttcaccctagattaaacaaaaccccaactagtggacactctattcctggttccactagtttgaatttaggtagatgcttcgctgattaaataggacaacattaggtggttttataactttagactttgggaattctcatatcatttggacactttggaatggttggcttatgttggaattggacacacacctctcttcctctttcaaaacccctaaaacctgttttcggtggggtttgggtgcatgccagttgcgggaaggagcaccccggccactataaggattaagctcgggcctctgttgaaagcactaccgtactttcacatgtcta

SEQ ID NO: 47337 - DNA, 599 bp, Oryza sativa
ctgcaagttgattaagcaaacaacctagcatggttacatcaccacccaccgatgcaaaccacgcgctacacacacaagcaaggaaacacacgacaaacgaaacactagagggtggcttaggttctgcgacgggttctccaagatcttcgctcctgcttcacagctggcttcactgcttccttcgcttcgctagcggatcctgcagtcttccggagcttcggcaaacaactgacgatatctttttcttcacaaatctgaccaactagtactaattgaaatttgaagaaggaagaaaagagtaaaccttttgcaaatagcattaggggaagaagaaaagaggaactttcgcaaatagttttatttataaaatatgtccttaggttttatccacttggcttatcctacagtcgagatggctctgataccagcttgtcgcgaccgggaaaattgccttttcccgaacgctagtgtattaatccccgtcccaggaaaagccggggtacaccacacaaacatgatataaaagacacatctttattatatcgataatatttacattattacaaaggcgcttcaagcctgacaataaaaataaacag

SEQ ID NO: 47338 - DNA, 678 bp, Oryza sativa
ccttcataggtggagggatatgggattccgctgcccccttcttctcccatgccgtcaaaggccggagtaaacctgtcacgcccggaatttctatccaaaattctaaacgcttacatgtgtgtgaaccctcatccaggaatcagccgaggcacacaataacaaattgataatagaggacaattattactctaattaataagcaaataaaatatcattacagaggtagatagttcctctcaatcaataaagatctaagcagcggaaaaaaaaagataaacggcgcagacgactccactccacaggcagcttgaccagggctatacctaatcctccacaccatcagcatcactgtagaactcctcctctgatgaatgattgcaaggtgagtatatgacatactcagcaagccacacagcaaatatgcaagtgcacatgataccaaaggatggcatagtatggtttcatttgcataaataatatttaataaacatttcagaatttaataaaacagttaagtaataattaaacaatattaatccaacgctatacaacataccatgttgcataggccaaccattctgaacaaccttcgcggctgcacagttctatctccaaaccaagaattaaccattccaaaccaggagctaatcaaattattaccagttatagcatcattta
